United States Patent Application Publication US 2007/0067865 A1 - sequence listing, part 32

SEQ ID NO: 196202 - DNA, 668 bp, Gossypium hirsutum
aggtgccgtaccggtactcggcagtttccggcccagagccacgcgtactatctaccctctctcccgcaagccccaactcttttttatttcttgtttcatataatttcgttgctgatctaaaatggcgggtcggggcaaaactctcggatccggagcctcgaagaaggcgacatcgaggagtagcaaagctgggcttcaatttccggtgggtcgtatagctcggttccttaaggctgggaaatatgctgaacgagtcggcgccggagctccggtttaccttgccgctgttcttgaatatcttgccgctgaggttcttgagcttgccggaaatgcagcgagagacaacaagaaaacccgaattgtgccacgccatattcagctagccgtaaggaacgatgaagagctaagcaaattacttggagatgtcacgattgccaacggtggtgtgatgcccaacatccacaacctcctcctccccaagaaagctggaacttcctcaaaggcatctggaggtgatgaaaattaaattatgtcaacagtttagactcataaaaccctaagggaatcccctaatttatctccctctgtttacgtgattcttagattgaaaccatcatgggtattagctttgaatgttgtttcacttagttctttatttgttaagttgg

SEQ ID NO: 196203 - DNA, 508 bp, Gossypium hirsutum
  unsure (1)..(508): unsure at all n locations
cccacgcgtccgttccacgcttttgtattttgcattttcgtttttttggaattcatcatcttcgttgcgagtatacaatggcaggtcggggtaaaactcttggatccggggcctcgaagaaggcgacatcgaggagtagcaaggccgggcttcagtttccggtgggtcgtatcgctcggttccttaaggctggaaaatatgctgaacgtgtcggagctggagctcctgtttacctcgctgccgttcttgaatatcttgcggctgaggttctcgagcttgctggaaatgccgccagagacaacaagaaaacccgaattgtgccacgtcatatccagcttgctgtgaggaacgacgaagaactgagcaaactacttggagatgtaacgattgccaatggaggtgtgatgcccaacatccacaacgtcctcctccccaagaaagccggaggctcctcataggtttccggcggngatgatgattagatccagatcaattagtttagattctg

SEQ ID NO: 196204 - DNA, 476 bp, Gossypium hirsutum
gcccgaatttccgggtcggcccaagccttccgccacgctttaatttgtttctgcatctctcgttttatttctcgtatattaatggcgggtcggggtaagactctcggatccggagcctcgaagaaggcaacatcaaggagtagcaaggctgggcttcagtttccggtgggtcgtattgctcggttccttaaagctgggaaatatgctgagcgggtcggagctggagctccggtttacctcgccgccgttcttgaatatcttgccgctgaggttcttgagctagccgggaatgcagccagggacaacaagaaaacccgaatcgtgccacgtcacatccaacttgccgtaaggaacgacgaagagctgagcaagctgctcggcgatgtgacgatcgccaatggtggtgtgatgcccaacatccacaaccttcttctccccaagaaaaccggaaccttcaaaactttcggtgccgatga

SEQ ID NO: 196205 - DNA, 462 bp, Gossypium hirsutum
ctttttcatttgttttcacaaagatggaaatattcaaaaccccaaatccctgtctccttttatgtcttgtggtactctgtttcactatcccaatcgcattaaccaaggcagaagcaactacaaccaccctccctgaaaacgaagcgaacaatgctgaacctgtgggcaacaatgctccatttgctaaacctgttggggacaacgggaaacaatcccacctgggctatcaacagcagaaagacccaaactatccacaacaaggcattaaccagccactgtcgtcagggttgaaccagccgtattcggctacgaaccagccttactctgccgggtttaatcagccgttttctagtatcagtcagccatttgggggcaccaaccaaaggggctcaatggaaaacgttgctttcgaaaatggggttaaaaaggagaagactgggattccaagtgttgccttggttt

SEQ ID NO: 196206 - DNA, 496 bp, Gossypium hirsutum
gcaggtgtgtatggcgcggtgttgctgacatggcgaggccattcgtgaggcgtgacgcgaagtcttccagaagcttcactatttgggactgctgatggtgtttgcggtgcataggaacggcggcttagtggcctagggtttccactttctgaaaagagtcaatggactaagttttgggttaggttattgggctgtgtaatgggctaggattaggctttaatgttttgggtcttaggcttggtctgttattgggtcctagaccgtttaaagggacttcgattatttatttggctttattttgtatgggctagtaaagactgtaagcggactatttttagactatttaatttaaaaaaattatatttttatatttttttattgcttctgatgggcccgggcaaattgggccgcttacaatatattttaaagattggattggagatgatttgatcaagccataaaatctttcgaataataaaaattatattggaattac

SEQ ID NO: 196207 - DNA, 1408 bp, Gossypium hirsutum
gttccaagagtccaatcagaacagacgttgctctcctttggttagagtcgagaaaatgtttgaggatatccaatctaaactgcctggagctccacagtttcttctttgtcttttacctgataggaaaaattctgatctttatggtccatggaagaagaagaatctttctgagtttggcatagtcactcagtgcatggctccaactagggtcaatgatcagtaccttacaaacctgcttctaaaaatcaatgcaaagcttggaggactgaattccatgctagcaattgagcaaacaccttcaattccagttgtttcaaaggttccaaccatcatccttggcatggatgtgtctcatggctctcctgggcagtctgatattccatcaattgctgcggtggtcagctcccggcagcggcctttgatttcccgctatagagcatctgtgcgtacacaatctcctaagcttgaaatgatagattctctattcaaaaaagtctctgacaaggaggatgaaggtatcatgagggaggttctcttggacttttatacaagttcaggaaagaggaagcctgatcaaattatcatattcagggatggagttagcgagtcgcagttcaatcaagtattgaacattgaactggatcaagtaattgaggcttgcaaatttcttgatgagagttggaaccccaagtttgtggtcattgtggcacagaaaaaccatcatactaagtttttccagcagggatctcctgacaatgtcccgcctggaaccgttatagacaacaaaatctgtcatcctaagaacaatgacttctatctttgtgcccatgctggaatgattggaaccacgaggcctactcattatcatgttctcttagatcagattgggttttcggctgatgatctgcaggaactagtccactctctgtcgtatgtgtatcaaaggagcaccactgccatatctgtaggtgctcctatttgctatgcacatttggcagcctcacaggtgggtacattcatgaagtttgaagataccgcagagacatcctcgagccatggtggagttaccgcacccggagccatttctgtccctcagctgccgaggttgaaggagaacgtctgcaattccatgttcttctgctgagcccccatgttttgtataggcttttggttgttaccaaaacgactgaaacgtttttaagttatatgaaagttgaaaaaaaaagtagggttataattgatgatgtgatggtggttgaaacatcatcccatttgggtgttttgccctactgtatgtaggatatatgaaggtatgtttgactagcacttgttaaatggctttcgcctctgtagcacctgtaatcctgtttggtgataatcaatgcatagcctcagctatcgtcaactt

SEQ ID NO: 196208 - DNA, 519 bp, Gossypium hirsutum
ctctttcattcgtttacttttgttggaaaatatgagctgaaaacactgaactgaagaaaaatgggttcggtggcaaagaagggattgcagaaatacttgttacagcttcaacatcaccctttgagaaccaaggcaattacggctgcggttttgtcagggattagtgacactgtttctcagaagctttctggaatacccaaacttcagctgagacggattcttctcaaaatgctctttggatttgcttatcttgggccatttggtcattacatgtatatgctactggataaaatcttcaaggggaagagagactccaaaactgttgccaagaaggtggtgctggaacagttgacaacttctccttgcaacaacttgcttttcatgatttactatggggtggctgttgagggaagaccctggatgcatgtgaaaactaggatcaagcaggagtatccgaaagtacagatgactgcatggacgttctggcctgttgtgggatggataaatcaccagtacatg

SEQ ID NO: 196209 - DNA, 502 bp, Gossypium hirsutum
caagaccagctaattgacaattctcagcatccacaaagctcaaaaaacgataccaatgttgttgggctggctcttggtcctccacaatcatctatcatagggttccaaaatattggttcttcaatgcagccatcaaatcttaatcctttcaacgattggacgaagaaccacgataagggagttgaggactttttatcagaggaagagattcgcgtaagaagtaatgaaatgctcgagaatgaagaaatgcagcaccttctccgtcttttcaatatgggaggtaatgcttccattaatatgacagaagacagtgggtacgggttcccaaattacataccatccccaatgccaaactttgtagacgaagaccgttcacgttctggcaaagctgttgtagggtggttgaagattaaggccgcaatgagatggggattctttatccgaaagaaagctgctgagagacgggcacagatagttgagctagaagaagaagaagaagaag

SEQ ID NO: 196210 - DNA, 743 bp, Gossypium hirsutum
gtttatcgcctcttgctttcatctcttgtcaccagaaaaaactattcctcttagtccaaagcttaacaacggaggttccttgaggatttgaagctaatatccgatggaaggaatcggaggggacggtgcatcggtggcatcaccgatgcctcaatggggacatgatgcttggaggatgtatcagtattatctagataagtcgactcctcatacgacttataggtggatcggaacccttgttatagtagctatctattgtttgcgggtctattacgttcaagggttttacatagtcgcgtacggtctagggatttacctactgaatttgctaattgggtttttgtctcctttggttgatcctgaactcgaaggttccgatggacctttgttgccaacaaaaggttcagacgagttcaagccgtttattcgtaggctacccgagtttaagttctggtactccatgaccaaggctttctgcatagcatttgtcatgactttcttctctgtattcgatgttcccgtcttttggcctatactactttgttattggatcgttctcttcgttcttacaatgaggcgtcaaataggacatatgatcaaatacaagtatatcccattcagcatcggaaaacagaaatattccggtaagaaagcttcccctagtagcagtggctcccgtggggattgaacctcggccagtttggattacgacatacgtgatcattgattttcatctttggaga

SEQ ID NO: 196211 - DNA, 656 bp, Gossypium hirsutum
caggatgttacaacttgctttgttctggttttgtccaaaccaacaacaaggttgccattggagcagcaatctcaccaaggtcctcttacaatggcagacagttcgatatcggattaatggtttggaaggatccaaaacatggacattggtggttagaattcggaccaggattattggtgggatactggcctgcctttctttttagtcacttgagaagccatgccaacatggtacaatttggaggagaaattgtgaacactagatcctcaggattccacacatcaacacaaatgggcagtggtcattttgcagaagaaggctttagaaaagcagcttatttcaggaacttactgacagttgattgggacaataatttggtcccattgacaaacattcatttaaaggctgatcgtgccaattgttacgacatcagacaaggaagaaaccgtgtttggggaacttacttttattatggaggccctggaaggaatgtaagatgtccttaactatttcatcttttaaccctttaattttttttctctctttttcttttaccccaatttttctgtcccaggtcttaataaggtttgggttattcttagatttttttttttttctttgcttttggcctcgcaagtaatgcattttttggtccc

SEQ ID NO: 196212 - DNA, 907 bp, Gossypium hirsutum
  unsure (1)..(907): unsure at all n locations
tgcgaccagtaaatcgagtgaagaaattgtgttttgttagttaatttaagaagaatgagattagagaagtgctggttttgttcctccactgtatatccggtgcatggtattcaatttgttcgcaatgacgccaagattttccgtttctgtagatcgaaatgccacaagaatccttcaagatgaagaggaatccccgtaaagtaaaatggaccaaggcctataggcgttttgcatggaaaggacatgacacaggattcaacatttgagtttgagagaaaacgtaataggccggagagatatgatagaaaccttgcagagaatactctgaaggccattaaaaagattgataaaatcagatcagacagggcatttgaccccattaaaaacatgcttaatactggcaatgtcccataggcagaatgatgcatggaagccatggtatcatggcattcacttggtcaaagcttcgcacgttcttgcacatgattcttctcttcgtctttcaatatttatagtcaatgtatccgatgcactgaccgaatatatcttctcatgactagattaatggttctgtgctactatgctggtttttaggtctataatatgattgctngcttccgttgtttatgttcatacgttttttagttgtcctatgtacttacttatgatttctttcattagttaattattattctcatttatctgtcgctttatcttatctctactctttgttctatcgataattatctattctcttactgaataatatgctatcttctcgatgtggttttaacctgctatttactcttcgatattcgcatcatgtattttagtctactacttattcttctgttgtcatctgtgtctgttctcggactatctttattatatatctatatcagtactt

SEQ ID NO: 196213 - DNA, 812 bp, Gossypium hirsutum
  unsure (1)..(812): unsure at all n locations
cttcttcagtccctggttcaagctctctcttgacgcgaccaggaaatcgaataacgaaattgtgttttgttagttaatttaagaagaatgagattagagaagtgctggttttgttcctccactgtatatccggggcatggtattcaatttgttcgcaatgacgccaagattttccgtttctgtagatcgaaatgccacaagaacttcaagatgaagaggaatccccgtaaagtaaaatggaccaaggcgtataggcgtttgcatggaaaggacatgacacaggattcaacatttgagtttgagaganaacgtaataggccggagagatatgatagaaaccttgcagagaatactctgaaggctattaaaaagattgataaaatcagatcagacagggcatctgaccacatcaaaaacaggcttaagacaggcaaagtccaagaggcagaaagaagcaaggaagcaattggagcagggcattcacttggtcaaagctccgctcgcacttgcacaagattcatctcttcgtcttccaaaaatcaaagtcaatgtgtcccaagcacagacagaagagaaatcagcccatggaagagtgaaattggttctgctgttcctcggcttggtatttttgtccaccaaaatcttatgcatgcaactcgtggcttaagttatcaagaggttttttatgttgtgtctagcggtccagaattttgattagcatgttcaaatgttattgttttgagtagcatattttgtagtcactaattatggaaaagtcattaaaatatggattatctttggtttttcctttt

SEQ ID NO: 196214 - DNA, 458 bp, Gossypium hirsutum
acccttccaatctttttttaagttgatctaatccaaaaataccatctcttcattttattggaatcaccgaaatgggcggaggaggagtcatgagggcggtggggaaggtcgccggggtcggaattgttaactccggccttcgtggtggtgttcagggaactccgctgtctgctgagcaatccgtcatgcgtgtcgccgccgcttcccgttctgcttcttccgtggtttctgtttctagtgaaggagtttcgtctgttgccgacacgactgcgtcggtcagtcacaagtcatcttgggagatggtggatgattgggaattcgctggtgattttgaacaggaagctgctctggaaggatccatcgccgcctcaggtagacccgaaccgattgctcgggttttgtttagtggcgttccaagccttgaggaggctaaagaagccactaatgatttgaaagat

SEQ ID NO: 196215 - DNA, 650 bp, Gossypium hirsutum
attctgctttatggaaaggctatggctttgtaaggcctcggagatggaacgagttaggccatttaaaattggggacagcgtgaagatacgggtagggcttgtgaccccaagatggggttggggaatggagactcacgccagtaaagggcaggtggttggggttgatgcaaatggaaaactaaggataaagtttcagtggagagaagggagaccatggataggagatcctgctgatgttattcttgatgacagctcgtctggcacagccaatacctcatgaatcacaccttgaactgtgttttcagttcattcctgaagctcggggttactttgctcgaaactctatcccgacctgaccatggaccaattctattacaggattatttgtatttattaagtacagggatggacatggagcatgaggaactgacttgcctcactgttaattatagtaaatacaaagagctgcccaaggagaaaaacgaaattggctatagaccatgtatctcacagatagtgatgatagattataagctggtcatatattatttagataagagatgaatatggtcatttatatgtaactttgtacaaattggacatcacttaattaattaataattaattattgagtctttttctgttatttc

SEQ ID NO: 196216 - DNA, 435 bp, Gossypium hirsutum
cccacgcgtccgtgcatgttacaagggaaaccaaaagttttttggtttatggtgcatcatggcttgtgattgttctaatattgtttgtaatgaagactgtatctgttggaaggcggaggttcagtgcaagctatcagcttgttttccggctcatcaagggattaatattcttgacatttgtgtccattctggttattttggtcacacttgctcatatgacaattcaagacattatagtgtgtatttttatcttcatgcctacgggttggggaatgctcctgattgctcacgctttgaggcctgttgttaagaaagctggcttctggggatcagttcgaacacttgctcgtggatatgagattgtaatgggcttgcttcttttcactcctgttgcattcctttgcctggtttccattttgtctctgagtttcaaac

SEQ ID NO: 196217 - DNA, 447 bp, Gossypium hirsutum
gtgcggacgagatcatatggcttacagatctgcttatttccctgtcaaggatgtgattgatggggatttgtgtgagcagtttccgaccctacctctggatctgcagagaaaaattgcagacgagttggaccgtactcctggggagatactgaagaaactcgaagaagcccgaaacaagatcatttgagatagcagatagcatcaaaggtcaagttctcttttacccggattgcgggataccaattgcggttaagaaggctttagcacgtcggaatccaaggcagatgagggagaaattgggacgatggagtcgaaagtcgagaacacgagaccaagaatgggagtattgtataagtagttatgaggcaaactagttgtgttagtagaggcaaaaaatcagtattagctgctgcagattcgagtatttgctgctgttattgcagtttt

SEQ ID NO: 196218 - DNA, 677 bp, Gossypium hirsutum
ctttttcttttttttctttatattttctcttccactaatactaataacccccaaagctaaaacctttgagcttctctttcatggcgtcctcaagggaaggtcactacagaggtgtaaggaagagaccgtggggaagatacgcagctgaaatacgtgatccatggaagaaaacaagggtttggttaggtacattcgacacacccgaagaagctgcactcgcttacgacggagcagctaggtccctccgtggtgccaaagctaaaaccaacttccccacaccgtcttcctcttcttctccgccgccggctctttctcttgatcttaatctcgcttctcataatccccatcgttgggctttagcttcacctcatcaccatcaccgttttgccgccgtcggtgatttccttcaagctggtggtattaaagatatgaactttggtcccgacccatcgtcttcgacgagacccaatgtcctctccgtttcaacttcccctccggtgaccgcaaatggtaacacggcgtcgtttcttgggattgttcgacgtggtttgcctatagatttgaatgagccacctccactgtggctgtgaatgtggtttttcttctctaggcattttgcaggctccctttttaacctttaacccttccttaggcatctttgctacttctgtttagta

SEQ ID NO: 196219 - DNA, 305 bp, Gossypium hirsutum
cttggtcgatcataaactgggtacaagcatgctgtgctgaagtagaacttatttttaggcttggtactcctgattgtgatttggaatttggataaaataaattagatacagaataggaaagcttacacttatttggagcctttcgatacttcaggttgtaatattattattattataatcaatggtttcaaacactcctttttcatcaggaaagaatatagataagaatgaaccacctacactgtggctgtgaatgaggtataatttttgtatgcattatgcaagctcactttttaacctttaac

SEQ ID NO: 196220 - DNA, 584 bp, Gossypium hirsutum
cccacgcgtccgtccacgcgttcgcacgaatacctagcccctgaaataatcaaaggagaaggccatggaagtgctgttgattggtggacctttgggattttcttgcatgaactgctatatggtaaaaccccctttaaaggttcaggaaaccgcgctacactattcaatgttgtagggcaacagctgaaatttccggattcaccagcaaccagttatgctagccgcgacttaatccgtgggttgctggtaaaagagccacaacaccgattaggggtgaagaggggtgcaaccgagatcaagcaacatccattctttgaaggtgtgaattgggctctaatacgatgcagcaccccacctgaggtgccaagaccaatggagagcgagatgcctaggatgcctgggaaactcgggccagtggagccagttggagttggtagcaacagtaaaaggatggtaggtcaggtaggaacagacgtgaaatctgggggtaaatatctggactttgagttcttctagttttcttaattacaggaagccgtgttgtattagtatccatttactcaatccccccgaaagtttgttca

SEQ ID NO: 196221 - DNA, 1104 bp, Gossypium hirsutum
  unsure (1)..(1104): unsure at all n locations
cccaccttcaaaatctctgtacatgtttttatttttcttgtctatattatcaaaattttaaaccctcctttctctctctctctctctctctctctctccccctctctctctctctttcatttcttttctttttctctcccacaagttgcagttgcagagcttcgccattgttgtcttccttcaagctttttcagtttcttattcactcttcttcaacacccttttgatttttgctcttcaaccatggctgctttagtgcttccgctgctcatcctggctgccattactggccgctcaagtggcaactggtgtatatgcaaagatggtgtaagtgatacagtattgcagaagacactggactatgcatgtggtgcaggcgccgactgtaaccctatccacttgaagggatcctgttttaaccccgacactgttaaggctcattgcagttacgccgttaacagttacttccaaagaaaaggccaagctcaaggctcttgtgatttttccggcactgccaccgttactaccgctgaccccagctatactggttgtgctttcccatctagtgccagtaccgcaggcaccaccacaacaccaacaactacaccgtcatccaccacaccctcgtccgttaaaccaaataancaataccccaccaagcacaacaccattcggttcgacaacacctactggaatattgggaggaattggcaacggcttaggcccgtccggaactgggatcaacacagattacagtactgatggaggatttaggctgcaatactgcttctcttcctatgcaaccctcttgatttcaggattgatgctattgtggggttaaaagaagttacaagggaacatgttttctggtcattcagtcttgttctcttctagtgtatggtgttgttgatctaagaacatgtttgctaagggttttttttttttttttgggtatggattttaatcattttaaaagcatgacttttatgggtatggaattttggttttctaggttttatgtacatttaattggaaattgttatttttaggaggatttggcaccacaaaatcatcctcttattagtaattggccgtagcaatttt

SEQ ID NO: 196222 - DNA, 449 bp, Gossypium hirsutum
tctttctctcgctcactcactcacattgggggagaaaagatttgatcttttagtgaagttttaggagggaaaatccaaatcaaagaagaaagaaacgaaaaccttccttaaagtgtccgattcattactggactgacccataagtgaaaaaaagagggaccccaatataataacctctttgtctttggtggtttagccattgaagaaacgaagcagaagagaaaaagaaaattaacagagttggaagaaagaatgttcgcagcggagaatggactcaaaggggacccgaggctacaagccatatctgacgccattagagtggttcctcacttcccaaaaccagggattatgttccaagacataacaacgttgttgctggatcacaaagcgttcaaggataccgtcgacatatttgtcgatcgctacagagacatggatatatctgtcgt

SEQ ID NO: 196223 - DNA, 390 bp, Gossypium hirsutum
ttttatcttttaacgcttcattagaaagaaatttcttggtactctcaaggaacgcgagaggcttctcgaagacatggaaaacatgatcacttatctgcagtctgttatatccacgcgtacgcatgattcattacttgctgatgaaaagcttaaggctctacaagaggaggtacgtttgctttgggatgcttcgagaaaaaacaactttgaacttcatgttttggaatcggaagcacaggacactgaagatagggtggaagctgttaatttaaaagttgaaaaggtttgatggtcagaggatgctgatggtgattgggactgtgtgcaaactttaggtgaatctagcaggtactaagcctagaactctttctatttgttctgtttcaattc

SEQ ID NO: 196224 - DNA, 450 bp, Gossypium hirsutum
tgaaagaggacctcccccgaaacatttctaaccaccattcctgagactgaattttcccgagattcattaaaagcagcgtcgaaattaagtttgacaacagaaccagttggtgggcaccaacccatacactcatgcctcatgatcgcccacaaagaacagcaaaacactcgacattgtatgctggaattattcttgaacacctagggcaatctctgaagatattatcaatgttttcagcagttgcctgacatctgggacatactaccaccgagagcaatcgcttacactgaagattcataaagtggggaataaaattctaagaaattttccagattaggattttaattttccttggaatgtgaatattccacagttttttgtaaaatattctagcctcagtctgtaaataattaggaaaatgccttgtaatagtttataagcagttcgcac

SEQ ID NO: 196225 - DNA, 612 bp, Gossypium hirsutum
cccacgcgtgcgcctatatctgcaaaaattcaatacctgcttcagattggcggtaagctgcacggaattgttgtgaaatacagtccagatggaaagctgttgcaggttttggaggatagtgaagggaaggttgtgaaagcggttagtgaagtcgaagagagggatggcaagctctggctagggagtgttcttatgccctttgtggcagtttacaacttggcttgagttgggaggcagaaggaaaaataaagagttagcaatggtgttttatgaatgtggcaaatcttctcttagccatcgttttcactatgaagaaaaacacaagaatgttttctaagtctatacatgttattggcagtggggctgtattacttggattgcaagtatttggataaaattctgctgaaaagaaagtatttgggtttttccatttaaatacttcagtccataatgatttttagtttttacaagtagaacatattcttaaatttatcttggaaacgaagtatcaaatgtaagacacatagccaaagattttaagaaaaaactacttgaaatcaccaatatggacatttataactaccattcctaatcttagtggtagttataact

SEQ ID NO: 196226 - DNA, 395 bp, Gossypium hirsutum
atcaagatctgaattttcatgctacagaagaggatcctgttactaaaaagagtataaagaggttgattcttaacataaagccaaaagatatcagttcaattattgttggctctccaggtgaggatccaaagatggtagccaacttcaaagaccttctacaaaaaatttttgtgcttgatccacagaagagaatgacagttactcaggcattggctcatccattcatcacgggcaagtgaaacatgttgctgattttatgtctccagaaatgtgttccgctagatatttgtacattatgacctaactcatatttagatatctaatcattgggaattctgtcttttatcttctctgtgctggacaaagagctttgggcacttgttttggcatggttg

SEQ ID NO: 196227 - DNA, 802 bp, Gossypium hirsutum
cccacgcgttcggagatcgagaaacatatcagataaaagcgaaatgagaaaaactccttcactggtagacctttgtgttagaacagtgatagataatgtaaggtaccttggagatgttggtgagacagattcacatcttcttgaacgtattctaccgcattgtacagtcgatcaattattgcatgtggaaacaagtacaaagggaagggatctctgttcagtaactgataaactatggaagaatttctatgagctgcagtttggccgtgagagtatgaaaatagtaattgagaggatgaagctaaagaaagtaatcgttgagatggagacagttgtatgaggcaaaattgaaggatgttcaggaggccgagaacaaagcaattgaccggcttaaacaattatacatgataagaagatgctcgaaaacaaagtcggcgggttcagctttgcacaaaggttccaccttcaagcaaaagaagcttttttgctggaagtggacctggttacaatatgtccaatgtcaagagcaacataatgaagaaagcgaagatagatcttatgaagagccaggaagtgaaaaacctcgcagccatgaagaaaaaagcagtgcaaagtcatcatagtggtaccaccataacgaagtcgagtggattttgcggaaagaattcagcttcgacatcaaagcatagcaaaccattagagaggagattctagaagaagcagtttctaaaaatttaagaacaaagtcccgaaaaaggttctattgccttcctcctcttttttcactgtaatatttggaaag

SEQ ID NO: 196228 - DNA, 420 bp, Gossypium hirsutum
attcaatcaacattcatagcccaaaaatcaaatggcctgggctcctttcagcagctaccgagttaccattcgcagtttggtggccagtaacgcatgggcagtgaccagatctcgccatcggaggctccacacgaagaaatctgatttggccgtacagaggaggcgtgcgaaggaggctgcgcgaggagccactcgtgggagtcccaatttctggcctattctggcacgttccagaagctcccagtgctgctgagataattttggatgtattgggcctcgggttttagggcttattgggtcctgggttattaaaaatgggttaaaattattggattttatgtaattgggttaagggttttttgggggggtatttgtttaattggattaaaaatgtatttgggctgctttaatttagtttaa

SEQ ID NO: 196229 - DNA, 280 bp, Gossypium hirsutum
tcggcaagccttccgcaaggcgtccgtttagatcgcgagcgggccgcccttttttttttttttgggtttttttttttttttttttttttaaaaaataaaatggactttttttatccttccccataaatgaaaagcttattagtaagaggaagggtaatccttacatttcgtttcgtaaaacttgtaccaacatcaaactttaagctgattaaaactgataaatttagactaagaaagtggtctttgatgggcagagtgaatagagagaaggaggaaaaga

SEQ ID NO: 196230 - DNA, 295 bp, Gossypium hirsutum
cgaggattccagggggtggttccagaagctatccgagctcaggatcatcagttattctgccattggatcaccaagacaggttccaaaaagtcgaagtcatggtatgcggcggcgcggcctcgggagcttacgaagcggcagccagagggagattcctccctgcattgagctcctgtgggagaatggtgattacagggaacaatctcatatggaaaatggaaaacatgccaggacctcgtaccatgcatgacatgttgatccttcctacaggtcatatactaatcatcaatggcgc

SEQ ID NO: 196231 - DNA, 701 bp, Gossypium hirsutum
cttttcttacgggcatgtgagagggatgcatctggatgtcttcttttgaagggtgcctctttcccagtctccaaaccattttggccaatgatgtgactgagttcttgccttatgcattccagctgttggctcagcttgttgagctgaacaaaccacccatttctccaagttacatgcagatttttgtacttctcctctcccctgattcatggaggagatcttcgaatgttccggcccttgtgcgtctgcttcaggctttccttcagaaggcacccaatgaggtcaatcaggaggggagactgaatcaggtgctgggtattttcaacatgcttgtctcatctgctagctcagatgaacagggcttctatgtcttgaacactgtgattgagaatcttgagtatggtgtcatatctccatatatgggtaatatttggaatgtcctctctatgcgcctccaaaacaaccgtacagttaagtttcagaagtctctggtgattttcatgtcactcttcttaatcaagcatggggctacaaatctagtggacacaatgaatgcagttcaggacaacattttcttggttattttggagcagttctggattcccaatcttaagctgattactggagccattgagcttaagttaacggcagttgctttaaccagactcatatgtgaatctccggtacttttggatcctgca

SEQ ID NO: 196232 - DNA, 496 bp, Gossypium hirsutum
gtcttataaccaacctgaattttggagttgaaaagaataattggccacccttattaccaatcccatgaaactaaaaataatgtgactggtgtcccaattgccactaaaagtccatatataataaaatcacaccaggtatcttgcatcttatttttcagaaagatcaaacacttacctccgtcattggcatcacaatacggaccgcactaacgatagattgcaaaaattccacgatattatcaaccgtggccggcactgagcagtccttttttatcatttatggctccccaatcacttgaactgtccactttgaatgatgccattctcattcaagtattccacgaattcatctataagatagggccatgcaccttcggcatcgtagttcgatagtgcagggtctaccgttctagcaaactccaaaagttgagaccatgtgtcccgagagatcgctttgttatgtcgagcctgtaaaaactggcaccaatggtcaaaa

SEQ ID NO: 196233 - DNA, 650 bp, Gossypium hirsutum
  unsure (1)..(650): unsure at all n locations
gaacattgaccccctataaagtacctatcaaggtggaatatgcggtccgaaagagttgttatgcttctgtagttgttgaaaatatcaaacttgtgtacttaaggaggagcttagtggaggagctgttgatgcatcctgatacatttgaagaaaaggttgtgggaagttttgttagagtgaagagaaagcctggaaactgttcggggatgacttcttttcagcttttgctagttactggcgtaaagaaaacctcaaatgctgagagcaactccgggattctcctcgaggtttcttgcatgccggctgatgttcctatcgacatgcttaatgatgatgacatctcagaggaagaatgcatagatctgcaacagaggataaaagatggtattatcaaaagacctactgctgtggagctcgaagagaaagccaaaagtctgcatgaagatataacaaagcattggattcagcgagaattagttcaattgcagggtaaaattgattttgcgcatgagaagggacggaaatacatgttggaacgatttctgtttgaaagggaaatgccgcagtatccgtttgttcttttattctttatttatataagtcgactannnnnnnnnnnnnnnnnnnnnnnnnnnnnnnnnnnnnnnnnn

SEQ ID NO: 196234 - DNA, 579 bp, Gossypium hirsutum
agccttcggccaacccgtccggtttctcctcttcctttgaacgccggcctctcaaactccaaccaaggaagcaccaagcatttatttgagtttcttcctctggtttcatcatcgatccatttttttttcgctttataatggcaactaggctacagtttgaaaattctatgtgaagttggagtgttttccaagctggcgcagggcttattgcttggttgcaattggagggtctgaaaacttctacagcgcttttgagtctgagttagcggatgtcattcctgtcattaagacctctcttggcggcactagaataataggacggctctgtgctggaaataagaatgggcttgttgtccctcacaccaccacagatcaagaacttcatcacttgcgaaatagtctaccggatcaagttgttgttcagcgcatagatgagaaactatctgctcttgggaactgtatagcttgcaatgaccatgttgctctgacgcatacagatctagatcgggaaactgatgagataattgctgatgttcttggagtaaaagtttttaggcaaacaattgctctaaatatttt

SEQ ID NO: 196235 - DNA, 768 bp, Gossypium hirsutum
gagcgtcgaaccttgtttcatcggcaacaatacgacgccgtatcccactacttggtgcgttttgcgtgctgggtttggggtttcaattctcccttcttcctcttacctcaaaacgagttgtcctcagtcttcccattttgttcatatagaaaggtcgaaatttagtacccaatcagcagataagaccgttcaggctgtgaaaatggaggggaatagcaacattgttccaagcatcgtcgtctatgttactgttcctaacagagaagcaggtaggaagttggctggaagcatcgtgaaagagaaacttgcagcttgtgtaaatatagtaccaggtctggagtcggtgtatctatgggagggaaagataaactcagatcctgaggagatgctcataatcaagacaaggcagtccctcttggaagctctaacagagcatgtgaaggcaaatcacgaatacgatgtgcccgaagttattgccttgccgatcactgggggcagcccccagtatctagaatggcttaaaaacagtacaagggactgaacttctcggatgtagtatatgacctgccatgaatgtctgaaaacatgtaagtgcccagttatggttgtgttatgaatggcttcatctgactcgaataaaggaagcatgtcatgttcgtaatcggaaagattaaaatctattttcgtaggaaaaaagatgtgttggagttggtgtgtttttaagacaaggaatttgctctgataaatgcagcctattatttgttctcc

SEQ ID NO: 196236 - DNA, 471 bp, Gossypium hirsutum
tccacgcgtccgcttgtttcatcggcaagaatacgacgccgtatcccactactcggtgcgtttggcgtcctgggtttggggttccccagtctctgctcaatactcccttcttcctcttacctcaagacgagttgtcctcagtctccccattttgttcatatagaaaggtcgaaatttagtacccaatcagcagataagaccgttcaggctgtgaaaatggaggggaatagcaacattgttccaagcatcgtcgtctatgttactgttcctaacagagaagcaggtaggaagttggctggaagcatcgtgaaagagaaacttgcagcttgtgtaaatatagtacccggtctggagtcggtgtatctatgggagggaaagataaactcagatcctgaagagatgctcataatcaaacaaggcatccctcttgtagctctacagagcatgtgatggcaatcacgatatgatgtg

SEQ ID NO: 196237 - DNA, 501 bp, Gossypium hirsutum
gcaggatgtatcggcccaagccgagaccggccagttcgtgaacctaagggaagtattgggtgcgtttccgatgaacaacgtgactaggatgttactagggaggcaatatttcggggccgtatccgccggcccaagtgaagccatggagttcatgcacataacacatgaattgttttggctcttaggtgtgatctatttgggggattatttgcccatttggaggtgggtggatccttatggatgtgagaaaaggatgagggaagtggagaaaagagtggatgatttccataaaaggatcattgaagaacataggagggcaagggaattgaaaaacaaagaatatggaaaggatgatgattatggtgaagaaatggattttgttgatgttttattgtcattacctggtgaagatggaaagcctcatatggatgatactgatattaaagctctaattcaggatatgatagctgcggcaacagatacatcggctgtgaccaacga

SEQ ID NO: 196238 - DNA, 437 bp, Gossypium hirsutum
  unsure (1)..(437): unsure at all n locations
ttgctcacgcgtccgcattcatttgtttgggaacttgattattgaatcacacctgaaagcttctacatgggtgaaccttacggtcttattttacagaaagctcaaccattaaaaatcatcgcacattcagtctaaaaatattctgttgaatatttgttgaatgttggcaacaatgcagcagcaaggaaatattcagtgtgtaatttggttgttggaactctttgtaatatgtaaactaagtttagtttggttgtaattttgtttttactaaggttagtgagctacttagctgatttagtagctttttaggttattattaagttgattttacagcttggatacaagcacaagttacgtttgttttcttccaatgttatggagctatttatgcatattgtatngntactaaaactagtaatgagaattatcttttcacc

SEQ ID NO: 196239 - DNA, 495 bp, Gossypium hirsutum
ttcacgcgtccgaccggagataacaaaaatacagcagaagctatatgccatgaaataggtgtttttgggccgatggaagacatcagttcaaaaagtttaactggggaaggagtttatggcacttccagataagaaggctcatctgagacaaagtggtgggcttctattttctagggctgaaccgagacacaagcaagagatagtgagattgctaaaggaagatggagaggtggttgctatgactggtgatggagtaaatgatgcacctgccttgaaactagctgatattggaattgctatgggcattgctggaacggaggtagcaaaggaagcttctgacatggtgttggcagatgacaatttcagtacaattgtttctgccgtcggtgaacgaagatccatttacgacaacatgaaaagcttttatcaggtacatgatctcgtcaaatatcggtgaggttgcctccatattcctaacagcagcattgggtatac

SEQ ID NO: 196240 - DNA, 423 bp, Gossypium hirsutum
ccgccaacgcgtccgcggactcttgggatttaggcgaggcctccccccaggtgatggtgttttgtactacccaggtgaggtgttctcgtcttcaaagaaacctgttgcttcccttagactagagcgcattctcagcggcttgcaagactctgaatacctgaagctttatgcctcaagatatgggaaagaagaagcacttacacttttagagaagacggttgtttatttaggtccagagcggtacacccatgaacatatggccattgatataatgcggggtgagattttcagcagttgcagatcatgttcctgaattatctatgctatttctttatttttgtcattctattttcgttgatatatagacactctttattttactcgtaaattatatgcaatggaaggaggacaaactttatagcc

SEQ ID NO: 196241 - DNA, 311 bp, Gossypium hirsutum
cggacgcgtgggacttgcagccgtggtgatatagaatcaacatttgttatgatcatagatatttgagagaacaggtaatatttaattgatcaggggtatatttggcatgatcattattgacattatacggctcatctatcttctgagtattctatgttgtatttgttaaaaataggggccgcgaccaacgtatttttacctttgtaccttatcagcgcactgaaaaatttggattagcatcatttgagttccttagttatgaacagttattattggactaaaaaaattttatagggtcacctaaattcaat

SEQ ID NO: 196242 - DNA, 362 bp, Gossypium hirsutum
ctttcccagagcctgtaatatcacgaccacgtttgtggacatcggcgatctcgaagctgtgaaaaatgccatcgtcgaaggaaagaccaaagtgttatacttcgagtcgatgtcgaatcccacgctcaccgttgccaacattccggcacttagcaggatcgggcacgagaaaggaacgacggtggtcgtggacaacacgttcgcccccatggttctttctccggctcggctgggtgctgatgtggctctccatagtatctgtaagctcatgagcggcggggccgatgttattgcatgtgctgtttgtggccctgcaagcctggtgaactcaatgatggatctttatcaaagcgcgatgatgc

SEQ ID NO: 196243 - DNA, 712 bp, Gossypium hirsutum
  unsure (1)..(712): unsure at all n locations
tatgatatctttgttagtgatncctatgttttgttgcttcagtgcggggttgaggggaggatgaacaatcaaaagggtgttgatctcaaacggttcggtgagcttttgatgtcctccgggattgtgttgattgatgatgtgctttgggtcacttttcatagcggatatcatttctggtatttgcttaaactattgacctgcaagagtttgcccgatactcaaactggcttcttcaaactgatcaaaatgtattttccgatggtatacgatatcaaacatatgatgaagttctgcaatggcctacatgtgtggtttaaacaagctggccgagttgttagaagtggaaagagttggtgtatgccatcaagctggttcggatagtttgctcacatcatgcacgtttaggaagttgagggataactttttcaaatcagtacagaaatatgcaggtgttctgtatggcttagaggtcgagggcgggcagaattcggattaaaagagaaaataattgggataaaggatgtagactactaagtgtgtgtgacttaattttatttgtctacattggcctatgaagaaagattgttgatctagttgtgactttttctcttttgcttgcattgtaactaaaacctttaactggtgttcaagttaaagtccagtgtaaattatgcagttagtgtttcaataataattgtaacaattcccatct

SEQ ID NO: 196244 - DNA, 499 bp, Gossypium hirsutum
cccacgcgttcgccatcctcaacaacaagaagaggaggaggaggaggaggaggaagaagaggaggcacgcgtccgcccacgcgtccggaaaatggaaaatggaggcaaccatggaaaggatatgcttttggaccatcttggagatgacattgttgctgcttctgcaactatggagcaacacgaagaagcaccttctgcagaagaaatgcaagaaaggatggatcaattcacctacatcatgcagcagaagtttctctctggtgaagattatgagtatttagattactctaaaatagatgacgatgagaccttggatgatcactggcttagggaagctaaccatgatgcagaggagaagtattttgctgaagattaataacggaaaattacatccattgatctcccaacatttgcagatatctcttcgttatagcagtggttagtgattacctttttctacttatgtacctaacttctaatataaagttatggaatggca

SEQ ID NO: 196245 - DNA, 712 bp, Gossypium hirsutum
  unsure (1)..(712): unsure at all n locations
ttccacgcgtccgcccacgcgtccgcccacgggtccggtgggatctatattcccatctccaatgcactatgctggtccaactgaagtgcagtggcatgctaaggctcggattaatgccggagccaatttttacattgtcggtagagatccggctggaatgggtcatccggttgagaagagagacctgtatgatgccgatcacgggaagaaggtcttgagcatggcgcctggactcgagcggctgaacatccttccgttcagggttgccgcgtacgataagacccaaggtaaaatggctttcttcgatccctcgagagctcaagacttcctcttcatatcaggcaccaagatgcgggctcttgcgaagaacaaagagaaccctccggacggattcatgtgccctggcggttggaaagtgttggtcaaatactacgacagcttgacaccatccgacaacggaaggatccatgaagccgttccggcttagaccaatgttcgataaagatactccatatgattgggaggagcatatttaacactgtttgatttccaatgtgtgtgtgatgcagaatctctttaataaaaccatgagaggcactggtacagagacaatgaaaaaagcttgcctctccctgtaattaggttgcccccattatggtgtctgccattggtgctcgctttgcttgtgggcaacatngnactatatatgtct

SEQ ID NO: 196246 - DNA, 517 bp, Gossypium hirsutum
cccacgcgtccgcccacgcgtccgcttcctttcagggttgctgcatatgataaaacccaaggtaaaatggcgttcttcgatccctcgagggctcaagacttcctcttcatatcaggcaccaagatgaggacattagcaaagaacaaagagaaccctcctccgggatttatgtgccctggcggctgggaagtgttggtcgagtattacgccagcttaacaccatcggacaatgacagaataccgcaacccgttgctgcttagatgaattgaatttggaagcaaacctcgaaacactatttatctccatcgcgtaatctggaccttgtgaagtctcttgtgtccagatttttgttcaataaaaaccatgtggagaccctgtttcatagtcatgaaacttgcctccttgttactaggatgcccattaaggcatccaccattgattccattaagccatttaagcgtaagggcaaattgtactatatatataaatatattacgttattgtcttctaatgagg

SEQ ID NO: 196247 - DNA, 577 bp, Gossypium hirsutum
gcggagaaactcccgggacgacaccacgcctgcgaagaatggctccctcttactcctccacctgcagagaaagtagatcctcctgtgggcactctggatgacctattttggaaaaccaaagcaattcctcgtatctactatttgcctttgtctgatgaacaagttgcagcaaagcaagcagcacatggcagaaacatctagcagtagagatgaggctatagttttatccctggctgctcttctggttttcgtatcggttggtctgtaccttagataatggtaagaaaactgtcacataattgcatgtttgcaggtctgcaggttttgctttataggaaggaattgttgcagcccgtgcagagggaacttgtccaggatgggtattggttttctgccggctacttggggcttgagttgaattttcatttagcactagaatccttcaaacgttgagctctctttagttatggattgattctcctttgttctaatttggttttcctacagaacagtagcttcaacttttatgaacctgatttggtagaatcttactcactctggatgttgttattttaat

SEQ ID NO: 196248 - DNA, 1017 bp, Gossypium hirsutum
actctgtactctttctagttgtcatcaattgtggaagctctcaaatctcagctgctatggcacccatcgcacggttacttttgctcgcgcttctctcaactgcactcacgatttcatcagggtctggggatgggtacaccatcaatggtcgagtgaagatcccccaaggtctgggtacaaaagggtttgctttgcctggaaaaacgtcaaatgtcaaagttatactcaatggtggccaaattgttacttatctgagacctgatggatatttttcatttcagaacataccagcagggactcatttgattgaagtggctgctattggctatttcttttctcctgttagagttgatgttagtgctagaaacccaggcaaggtacaggctgcgttgacagagaacaggaggggtctcagtgaattggttttagagccgttgagagatgaacaatattacgagattagggaacccttctccataatgtcggttgtgaaaagcccaatgggtctcatggtgggatttatgctggtggtggtgtttttaatgcccaaattagtggaaaacatggatcctgaagaaatgagacgagcacaagaagaaatgagaaaccagggagttccctccttagctagtttgttaccaggaggtgggaggaattaagtgttcgattgaggagcaggaactccgagataatggtttggcaaaatcaaggggcggttcaaacgtcgagctcgattggtcttctaccctgatattcatcttttgattgcagaaagaagggatgataccttttgaattcctgggggcatctcaaaggttatgtggtgttttacttgatagttgcagattttcagaacttatcatgggatttaacttgttataacatctattcattgttgtgatgctttgatgtcataaacaaagaagagttgaaaatttattgttatagacattatccatctagtaagaagtccgcttcttagcctttcgttataacacgagttccatcatcccattt

SEQ ID NO: 196249 - DNA, 582 bp, Gossypium hirsutum
  unsure (1)..(582): unsure at all n locations
ccaatgtcctattcaagggaccgtcttgctgaacattttttgtcttcagattagaggaggttggctaggtcttactctagtgacccttcacctggccagtccttaatgagtgcctatcctagggcacaaaaccagtggccagctggttatggcgcacaacctcaaacttggccttttactacacaggcacaaacatggacccctggctacagccaacaggctgcatatggtgcgtatggtagttatggtagcacctatgctactccacaagtacccacatcagttccacaaagtgctgggtctggtgcttatccgactacgtatcctgttcagacctttcctcaacaaagttttgctgtaccaactgcgggcacgatgttaaccccagcccagcaacctgctgcagcagttcctcaaactacttattatgggacctactgatgagactgcagttaaaaagaccatccaattactttgctgtctctgttctacgcgtatcctcataacttagatggcttagcagttagccaaggtggacatttttgaggtttaagaagaaaaaaggaaantgggggggggttg

SEQ ID NO: 196250 - DNA, 419 bp, Gossypium hirsutum
cggacgcgtgggcggacgcgtgggtttggccattaacagtttacttcccgatcgagatgcacattgcgcaagcaaaaataccaaagtattcattcaggtgggtatggttgaaaatactaagctgggtttgcttgataatatcacttatagcagcagctggatctgttgaaggactaattcaaagccttaagacatataagccatttcagactcggaatgaggagtaatccttgcttaaaggttaggttttatgaaatacttaacattgttcaataagacagagtttgcagtaaatgtaatttattgttgtcttcacttatgtattccatatgcaaatctgcttgttgtagtgtggctccttttgaaagagaatagagtaaccaattttaatttgatacaatttgatccgtttatttctt

SEQ ID NO: 196251 - DNA, 718 bp, Gossypium hirsutum
cccacgcgtgcggcgactttcaactttgaagaggaagacttgttaaaggaaagaagctgtaaaagtgagatagagatgttgaggttcacgttatattattgggtgttaatagttattttaattccatctgcctcctttgtgattgtatcatcatcgaaagaacagctaagttcaaagcaatgtgaggatctgggtttcacgggtttagccctttgttctgattgcaacactttttctgagtatgtcaaggacaaagagttgatatctgactgcttgaaatgttgcacagaagactcagatgattctacaagtaagattacttattcaggtgcgaatactggaagtttgcatgaggaaactagtattctatccggaaattgttggtttcattgaagaagagaaggacaagtttccaacagttaaagttcaatatcttttcaattctcctcccaagttgatcatgttggatgacgagggccaatataaggaaaccataagaattgacaattggaaacgtgaacacatgctgcaattcctgcagaagaaagttcagccctattccgcaagctcatagacagtcattcacattcctgttatcgcacgataaagtaaaaccgaactcagcaagattgaactatttattcgtgttagccttgcgttttaaattatgtgcttgagcttactgattttctgtctctaaagagagaataattatgaa

SEQ ID NO: 196252 - DNA, 529 bp, Gossypium hirsutum
ctttcttttagtccgtaactcattctctgtatcatctatcatttccttatttctactgtttcctcgctttccggcttcacatccttctcaggtgaacggagatggcaggaaaaggtggaaaggggcttttggcggcaaaaacaaccgccgctaacaaggacaaggacaaagataaggacaagaagcgcccggtttctcgttcatctcgtgccggaattcagttcccagtgggccgaatccaccgtcacctaaagactaggacttccgcaaatgggagagttggtgccacagctgctgtttacttggcctccatccttgagtacctaactgcagaggttcttgaattggctgggaatgcaagcaaggatctgaaagtgaagagaatcaccccgagacatctgcagcttgctattaggggtgatgaagagcttgacactcttatcaagggtactattgctggaggtggtgtcatccctcacattcacaagtcccttatcaacaaaaccaccaaggattagaatgtttgagt

SEQ ID NO: 196253 - DNA, 392 bp, Gossypium hirsutum
acgaaactattatcctattctttcttgctttcagtttcttcactcactggcccaagtctctcgggtgaacggagatggcaggaaaaggtggaaaggggcttttggcggccaaaacaaccgcagctaacaaggacacggacacggataaggacaagaagcgtccggtttctcgttcatctcgtgccggaattcagttcccagtgggtcctatccaccgtcatctcaagtctagggcatctgctaatgggagagttggggccacacccgccgtttacttggcctctattcttgaatacctgacagctgaggttcttgagttggctggaaacgcaagcaaggatctgaaagtgaaaagaatcaccccaaggcatctgcagctggctattaggggg

SEQ ID NO: 196254 - DNA, 592 bp, Gossypium hirsutum
agaagatgattgtatcatgaaaatactgtctaactatatacacttgaactaaagtgaaccagtgtgcgggggctcaactacgggatcaggttgttcttctgtgcaacacctttttccagacgatgaaacgatggatcatcgggacagtcgattgcatgtgctatacttaaattgaagacatacattcctcaacactcaacaccgaatcaagggcattagccctaacagacgcagctttttcatcatctggggctgttagagctagacagccaacaccaccttttgatatcatcttcttcgtcaccaacatcctccatggattgcttcaatttcacaaaaacaagctatcaaccccaccagtacgtgaagatggaagaacataatttcttcactgcagatgaagcttgtaatttcttttcagatgaacaagctccaagtcttcattggtattctcctgaacaatggaactaaaatgaagctccaagatttttgtaagatgggatttatgtaagaagttaaaaactagtacccattaccatgatcttcagcctgtgatggaagtcaataatgcaaaaaagaaaagaagggaata

SEQ ID NO: 196255 - DNA, 581 bp, Gossypium hirsutum
cctacgcgtcgcttcaccgtcctttatttttttccaactaaggttaggctttaaactttataacattatgggtttagcagcagccctcctcttcctcctcctagcagctccggcggcttttgccgagcaatacaccgtaggagacagcagcggttggacctcgaccggagattaccaaagttgggttcaagggaaaacattcaccgtaggcgacacacttttgtttacctacggtggcagccactcggtggaggaagtatccaagagcgactacgataattgcaacaccggcaatgctattaaatcctacagcgatgggaacactgtcatcacactgtccaatccaggggcaatgtatttcatatgccccaccataggtcactgtgctggtggcatgaagctagccatcaatgttgtagcagctagtggcaactcaccctccaccccctctactgcgtctggttccaccactccttccgggactccccccagtggtggtacaacaacttctcccccgtcaacacctagcggagctccgagcaccgagaattatggttttatggtagccttgttgggagccg

SEQ ID NO: 196256 - DNA, 493 bp, Gossypium hirsutum
ctggtcagagatttgcagctaaaatgagaaacatagagaattaggaagcatggtgtaccccaatgaatcccttgaagactctccccagaagaaaatggggagaggaaagatcgagatcaagcggatcgaaaacacgacgaaccgccaagttaccttttgtaagaggcgcaatggtttgctcaaaaaggcttatgagctatcggttctttgtgacgctgaggttgctttgattgtcttctccaaccgtggtcgactctatgagtatgccaacaatagtgttaaagcaacaattgagaggtacaaaaaggcttctgattcctccaacactgggtcagttgctgaagttaatgctcagttctatcagcaagaagctgacaaactccgaaatcaaatccggaatttgcagaatacaaacaggcacatgctgggggagtccgtacggggattgcctatgaaagagcttaagaacttggagactcgtgtagaaaaggat

SEQ ID NO: 196257 - DNA, 678 bp, Gossypium hirsutum
cgaagcgtgtgcaaagcatgttaggagcagcaagaggtataacatcttcttcatcttccagaatcttctctacgaatattctttccaagcctccttctttcttcaccatttcacgcgctcttgctccctccattccccgcttttctgtacgatcaatggctgactctgctttcaagaaagttcagattcagagagatgacactgcatttgatgcatatgtggttggcaaagaagatgcacccggaattgttgttcttcaggagtggtggggtgtggattttgagataaaaaaccatgccttgaagatctctcaactgggcccaggattcaaagctcttattccagatttgtatcgaggaaaggttggtcttgatgttgcagaggcacaacacctaatggatggtcttgactggcaaggtgctgtaaaggatatctgtgcttcggttgattggcttaaagctaatggttcaaaaaaggttggagtgaccggattttgcatggggggtgctctctctattgcaagttctgtcttagttcctcaatttgatgctgttgctgccttttatggggttccttcacctgaactggcagaccctgcccaggccaaagcacctgttcaagctcattttggagaacttgataactttgttgggttttcaaatgtgacggctgcgaagg

SEQ ID NO: 196258 - DNA, 511 bp, Gossypium hirsutum
gggacgcgtgggatttttagagtttaccgaatcagtttagctatcctttttttgacacagaaccgcaatttaaaacagtatatcgacggggaagggctagataatttttttcttttcttgcttggcgatgtataaccaggtatcatgcaatagaaaaattcctcaaaattcctggaggtattggcttgggcctagaaacggaagatcaggtaacccgtgaatccaacgagttggtttataataattcatgaaggaaattatcatatttccgcaagtcaattagatgcgaaatataaaaattgactttttttcgtagttgcacaagaggttttgttttttgttggaagccctcttttttttttatctatatctaacgactactcttacttgttactagacgactaagcaattcctttatattaaaataaaaaaagaagaggaaggaataataaaaatttcccctaaaaatttttataaaacaaccccggggataaacagggttaaccaaact

SEQ ID NO: 196259 - DNA, 911 bp, Gossypium hirsutum
ctggcagcttgcactgcaaaagcggaaagagggacgttgtcctcttgaacctggcgaagtggcagtgattcttcgggcaatgggatatcccaaggaaacacaaatttatgttgcttctggccaggtttatggtggtcagaaccgaatggcacccttacggaacatgttcccgaatctggttaccaaggaagagttagcaagtaaggaggagttggctggtttccggaaacatgtaacaagcttagctggactcgtcttcttggtctgcctgaaatctgatctgtgggtaatgacccacggaggtaactttgctaaattgattattggtgctagaaggtacatgggtcatcgtcaaaaatcaataaaacctgacaaaggacttatgtctaaatcttttggggatccttatatgggatgggctacattcgtagaagatgtagtcgttacccaccaaacccgaaccagaagaaaccttccctaattacgacctttgggagaaccccttaactccttgcatgtgtaaagcttgatagccacttttttcttctcgttacttgtttatgcacgttgagcttcatcgaaatgaaactgtatttaacaaatgaagatgcttttagtatctgaaagctacaagggaaaagagcaaccgattaaagttcttaacctttaaaaaggagtacggtagagggtattgtctgatggaagccaataccaggaccagccagcaatgctagcagaattgtctaaaagaaaaaaaaaaaaacaggtaaatgtaaccaaatactagtgcctttatttattaatctttggcatggttcatatgtcaaaagacatcgtcaatcatcagtacgacgtcgagtaaaaaattggttgaatgtagaaaaaaaatgaaaccgtttttctttaactcc

SEQ ID NO: 196260 - DNA, 557 bp, Gossypium hirsutum
aagagatggtggtaacatgtctccaccctaatctaaacccttgctttaaacccttaatttcattcccttctcaaaaccctaactctttcccttttaaatctctcattgcttcccctaaaacctttagtttcgctaaacccataatctctttacaagtcaaagcaaattctcctgctctttcagatgaactgccactggatgcttccccttctcaatcttcttctggtaaagagaagcttggagtggtggtgaagccattagagaagccacgggtagtattgaagttcatatggatggaaaaagatatagggatggctcttgatcaagtgataccaggccatggttcaatccctttgagtccatattacttttggcctagaaaagatgcttgggaagagctcaaggttttgcttgaaagcaagccatggatatctcacatgcaaaggattcaccttctcaaccaagctactgatatcatcaatttatggcagacaagtggtggtaatttaacctaaagtgtttcaacttacaaagttttgttgcaatctcttcatgtt

SEQ ID NO: 196261 - DNA, 397 bp, Gossypium hirsutum
gacccacgcgtacggatgagtacatcacacacaatgtgacccttggagatattaacaaggcatttgatctgatgcatgaagggggttgcctccgatgcgtgcttaagatgaatggatgaggctaatatgggtgaactaaaggggtgatctgtgaagaactacgtgcctatcttctacaaccgggtttgtacttccactgccaacttaggagtgtaaagtagagtctgttggaacaaactttttctatgaagcctagtagtttaaccttgtgaaaaatgtttggtttatgatgttaaaagagaaccagcgatggaggtgtgtgcatgaatgaatgaatgaatgaataaaataattaagctccaaatcatctgaattatggagatgatgagtattggac

SEQ ID NO: 196262 - DNA, 1090 bp, Gossypium hirsutum
gaagtattcagcttctatccggatgagacgttttgcaatggatttgaagaagtgttgagacgatacagagaattagtccctaatctgaaacttgcagggccaacgtcatttgctcctataattgaaatggccatcaccattgttgagcaaagtggtgggcaataccatgtgttgctgataatagccgatgggcaggtgactagaagtgttgatacagagcgtggcctttgataatttccagtttgtgaattttacggaaataatgtcgaagaatatggataggtcccgaaaagaggcagagtttgctctttcagcattgatggaaattccgtctcagtacaaagcaacgctggagctcaacatattgggtaataccagggggaaggctattgatagggttccccttccccctcctctttatggtgctggttcttttagcaactcgaaactttcgtggtcgagcagttttcgtccaagtgcaccttcttccgctagacgtgaagcaccagtccaaaccgctcctcctgcaagttctgcttcagataatcatctttgccctatttgcatttgcaatgcaaaggatatggcctttggttgtggacatcagactctgttgtgagtgcggacaggaccttcagttgtgtcccatctgccgaggcaccatcgatacgagaataagactctattaagcataatatgctttgcctggacttgcttatgctctctctatcgtccagcattccaagagtaagtcctttaagtttattgtgcaaaaggcttcatagttggccatgattggatgcgcattggatcttttctttagagagattgggcacccatcatatatgtatccaaagttttgtacatagttgtggatttcatcgaacgaaaaaacttagtcatatagcattatctatttcagtagatcatattgttgtaatgtaatcaggcacagaacacctgggaacagacatgtctcattgtcggattagcatccgtgccacatgccaactgtaatctgtaatgtgtttcatgccgtgagaatgcattttcagcccccatttattaactaaaaaaaaaaaaaaaaaaa

SEQ ID NO: 196263 - DNA, 276 bp, Gossypium hirsutum
cggcgcgacccacgcgaacggattggtcgtgctctgaattatttacatcatgtggttggtgtttgtcatcgcgatattaagcctcaaaatttactggtcaatccccacactcaccagttgaagatatgtgattttggtagtgcaaaaatgttggtaccaggggaacctaacatatcatatatatgctcaagatattatagggctccagaacttatattcggcgcgacggtgtataacactgctattgatactggggctgaaggtatgtcatggctg

SEQ ID NO: 196264 - DNA, 634 bp, Gossypium hirsutum
  unsure (1)..(634): unsure at all n locations
tcgcaccatttcagagattgccgacattttccaagggattccaaccttgaacctgttggaggatcaatagatttaactcgttattcaggttatgatgagctcaaacaagatttggctcgtaggtttggaattgaggggcagctggaagaccgagggagagtaggctggaaactagtctatgtggatcacgagaacgatgttctgctagtaggagatgacccatgggaggagtttatcaactgtgtccgatgcatcaaaatactctcccctcaggaagtccagcagatgagcgtggatggagagtttgggaactctgtcctgcctaatcaagcctgtagcagctctggcaatgggaatgcataaactagtatggttacaagctaaggtccatcagtagtccgggctatgtcgnttgangattcattgctttcatatgtatatatttcagcatatctctgcagaattgatgttactttcatntggtgacttatgtcgannagagaatgacattctatagcagagagaaaatgtggctggaggggcgtgactttattagaatcacttacttagttgatatgtaagaatgaattcagtcttttcttgtttgatgatgccttattatctacttcttatt

SEQ ID NO: 196265 - DNA, 828 bp, Gossypium hirsutum
  unsure (1)..(828): unsure at all n locations
ctctcctctcccaggcaagaacatgccggtccagatctactcctatcaggtaaacgttttcctctctgtcaagagcactttttgccaacctatgtgcatgcgagttctctgatctattaatgattggaaatttaattacctgaaacatgggttcctaatatggatatctctgataatagccccaatcactaatttatctagtgaagctttcaacattttttaataactgttctggagtcccccatgattttgattgataacattcttagtgagattcctaactttatactttccaaacatgtgtacgcctctgctacgaacgaggaagaaacattgttgtgaaccaccgtcttaagcaccaacaaatcccctttttggtcccatcctaccagtcctgttgctgacttggagcttcttctgtcaaacgctgcgtcgaactgaatcgttgcttttgggcactctcaaaatacatggaggctntcttcaaaccaggaccggcaacgagggcattcatcattgtaatgactntcctgcacctgagataacaaaattgggaattagtctcagagatctccaatagtcatggaattnttggggaactgagcccatatttctataaatcttatatgggctgataatacctatggatagggacccttgatantatagtgggtcgaattccgatatctcctcaaaaaaaaaaaactaaggggccgcattgccttgggcgtcatatggcggtaacggaggaaactgtcatagctggatccttccgggtaatgactanatcagtagagtgaaagttactcctccgggaggttatttatg

SEQ ID NO: 196266 - DNA, 463 bp, Gossypium hirsutum
  unsure (1)..(463): unsure at all n locations
cccacgcgtccgcccacgcgtccgcccacgcgtacgcccacgcgtccgggctctgctacgaacgaggaagaaacattgttgtgaaccaccgtcttaagcaccaacaaatcccctttttggtcccatcctaccagtcctgttgctgacttggagcttcttctgtcaaacgctgcgtcgaactgaatcgttgcttttgggcactctcaaaatacatggaggctttcttcaaaccaggaccggcaacgagggcattcatcatttgtaatgactttcctgcacctgagattaacaaaattgggaatatagtctcatgagattctccaaatagtcattgtaatttttggggggtaactgtaagccccataattttctataaaattctttatatttggtctgtaataaataactagtaggatttagggtagcctcttgtaatangttataggtgctgtgtacagaaaat

SEQ ID NO: 196267 - DNA, 722 bp, Gossypium hirsutum
cggacgcgtgggtgaagatcaaagttttgtcgccgccatgccgcaaggggatggcgatagagctacacaggaagaggcatggttaccgccatgacttcttcgagaagaagcgcaagaaggaagctcgtcaagtacacgagcgttcagctaaggctcaaaaggcgctgggtattaagggtaagatgattgcgaagaaaaattatgctgaaaaggccctcatgaaaaaaacattggctatgcatgaggaatcatcaactaggcgtaaggttgatgacgaagtccaagatggagctattcctgcctatcttatggatcgtgaaaataccacacgtgctaaggttcttagcaataccataaagcaaaagaggaaagagaaagccggaaaatgggaggtccctattcccaaggtcaggccagtcgcagaagatgagatgtttaaggtgctcagaactggtaaaagaaaaacaaagcaatggaagagaatggttacgaagtgcacatttgtaggacctggttttacaagaaaacctccaaaatatgagcgtttcatccgtccttcaggattgcgatttactaaagctcatgttacacatcctgagctcaagtgcaccttcaatctcgacattattggggtaaagaaaaatcctaatggtccaatgtatacatctcttggtgtcatgaccaaaggaacaatcatcgaggtgaatgtaagtgaattgggt

SEQ ID NO: 196268 - DNA, 455 bp, Gossypium hirsutum
gcttatgcgaattactgaaatggttgagtcaaagctgaaggagacgactgtcaggttggagcagcagttagcagaggagcaggcagcacggctgaaggcggaagagttggcgcagttagctcaaatgaaatcaaatgatgaaatccggaagcttcgagagaatctagaaagagcacagaaagagacagaggagctccgcaagcaagctgctcggtgtgccatcctgtgactgccgctacaatgagaagatgcctctcttatgctattatatttattttcaatgttttaaattgctataatgcttttaaatcctgcgtaaatgattttaagcttttccaaagtcaactgtcttatcttcatgcctctgtgtaaatattgaagtgtataagagacctcaacacactggttttattggtgagatatatctctgtcttattagatgaaattaaatgatg

SEQ ID NO: 196269 - DNA, 445 bp, Gossypium hirsutum
cgaaataagaagttcatgatggaatcattggtgaaaggtccttcaatcacaaatccgtgtaccttgccacctccttatgacactcgagctcttgcagtatttctcagaagaaaaaataactcaatattgcaagtgaagaaatgggagaaaggttattgggaaagtctcaacaagcagtagttgatgcctggttttttctcgttttctttttgtcatgatgaatctagacaactatacttttggtttatgtccaaaatttaagaaatacatggctgaaccctttacagcaccatggaagaatacccccgatcaatcaaataaacttggatcgagtgattttgtcgagtcaacttttggttcgattgaaaccaagattaagaccaagatccatcaatttataaaggggactatagataaataaagtggtgatttcagacaggtctgg

SEQ ID NO: 196270 - DNA, 459 bp, Gossypium hirsutum
ttcttaaaaaaaccaagcctatcctcctactattcggccgaaccaaaggacacccctcaacttctcttgttggccgatcatgggtttcatcggcgtctacacctccacctctgtcgtggttcatggctcaagtcacggaaagatgagatgacgcctattcatctcttttggtccgatacccaagccggagaacggcctccgacaatcgaaaccgcaggtaagaacctccaaaatcttttcttttttcttatagtagtgaaaagagaaaaatgagagtttgaaagcgagatcagtagccaaatattgaaacgaaaaatcacctcttttgatttctttgccctttttttgtgttatgtgcgcgtaaaaaaacatacaatctagtcttggggctttatagccaaatacatgtgatttgatttttgcttggtatttgggttatctctgcttttgctgtttctt

SEQ ID NO: 196271 - DNA, 745 bp, Gossypium hirsutum
gggctctttactttgatgataagcttgttgatggacatgaccatcaaggtcccttagcaaccacctcatctgttgttagaggactaacagtatttgcagcagtaactgatgaaagacttaatattcccagcaacaaaatacttggattggctaacttcttccttggcattggagttcctggcgatgccaaagatttattcaaccaaatagactccttggcttgtttggaaagcaacagggtttccatcccactgatcctatcacttccatctacagtgctttcggtgactaaagaagactcacttcaggttaatgttaacactgtgcttggttcaaatgcacctcctctaacagtgaagcttgtgggggtttttacttctggttcaaaggctgcatctctagttgaaagccaagaactactgtttgatgatggaactggaatgtataacttgaataacttgcccaagagtatagatgttggaagttacacatttgtttttgagattgtgcttcatgaacctgagcatgaaaagatttacatcacgggaggccaaaaaaaggtacctatatttgtctcaggacttatcaaaatcgaaaatgctgaaattgcagtacttgacagtgatcttgggagcatagaaacacagaaaaagttagatttagctggacaaaaatgctgtgtcattatcagcaaaccatctacagaagctgcgtgtatcttttaagttgacaactcctcatggac

SEQ ID NO: 196272 - DNA, 424 bp, Gossypium hirsutum
cccacgcgtccgggcggaacgtggaggttcgtaccacccagaacgttaatgggtcaaagcagaacataatgatcggaagcgttggaggaatcaacggtgggaaagtgacgaaatcggtttcgtgccaccagagtttgtacccgtatttgctttactattgccactcggtccccgaggtccgggtctatgaagcggatattctggatccgaagtcactggagaagatcaaccatggtgttgccatctgtcatttggacacatccagttggagttcgggtcatggagcgttcttggctttgggttcgggtccgggtcggatcgaggtgtgccactggattttcgagaatgacatgacttggaccatcgccgattcctgataaactagaaaagcttctggatgggtaaatttagtaaattttaccca

SEQ ID NO: 196273 - DNA, 774 bp, Gossypium hirsutum
ggacgttggaattgctaggtcatccgagtatcccgaagtgcagagaattacggataagcgtttgggtacacttgaaggatttttgaaggaaatggccaatggccggaagagtccggagagaatcaaggaagagaaaccaccggttaaggaggagcctgaaacaaacatgaatgaaataaaggctcttcctgcacctgagaattataacccacctcctccaccacctgaacctgaacagcctaagactgtcccaccgcaggttacggaggaccttgtgaatctaagggacgatgcggtttcagctgatgagcaagggaacaaattggcgttggctttattctctggatcacccacctcaaatgctaatggttcgtgggaagcatttccttcaaatggagagccagaggtgacttctgcatggcaaacaccagctgctgagcctggtaaagcggattgggaattggcgttggttgagtcagctagtaatttatcgaagcagaaagctggattagcaggtggttttgatccgttgttactgaatggcatgtatgatcagggggcagtgaggcagcatgtgagctccagtcagctaagtggtgggagtgcaagtagtgttgcgatgcctggccctggcaaggctgcttctcaagtgctggctttgcctgcaccggatggtacagtgcagccagtaggacagcaagatccttttgccgcatcgcttacagtgccaccgccttcgtatgtgcagatagcggacatggagcagaagcagca

SEQ ID NO: 196274 - DNA, 430 bp, Gossypium hirsutum
ccctacctctccaagttacaatccgcaatcagccaagtacagtccatctctagcatactcaccaagcagtccaaggttgtctccttccagtccttacagtccaacatcaccgaattataccccgacgtcgccctctctttcccctgcttctccatcttattccccttcaaacccaacctatagccctaccagcccatataattctggaggcaatcctgactccagcccaggttcgccacagtgcagtccaagtgctgggtactcccctagtgctccagggtatgcgccatcctcaactggtcagtacactccaagcaacacggatgatcaggcagctgatgacggaaaaacatgacaggagttaatgataaggcacgccgttttggaaaagctcgataaaaccaacgtggaatgcggcgaagactttttc

SEQ ID NO: 196275 - DNA, 572 bp, Gossypium hirsutum
ttcccacgcgtccgctattccccagtctcaattattatcaatcaataccagcttcccttatccgccctttgtttttatgtagcttttggattcaatctgaagattggagcctcgggttctgttttgataaggggcatttgagtttaagagttgatcttttgtttgtccgacaatggcgactgctattgggatgattggtgggaagggttgttcctcgtggatgcaagttaaggaaaagggaaagaagaagatggccaacagagttagagtttattgttcttctgctccgtcggtgatggatccttataaaactctcaggatccaacccggcgcctctgaatctgaggtcaaaaaggccttcaggcaacttgcccttcagtatcatccggacgtttgcagaggaagcaattggggggttcaggtgcaaacgatcaatgaagctggatgatatattgatgagtagattgagaggagaaacaaaggcagcagaagtgtatgaggaagagatagatgagccaatgagaggaatggatgattcagattgggatttgtgggaagaatggatgggatgg

SEQ ID NO: 196276 - DNA, 643 bp, Gossypium hirsutum
  unsure (1)..(643): unsure at all n locations
tccttgcgtccggtattctttattattcttcgtcttctgaaaaattttctttgaaattccagcttttgactacaatgtcaggaaggggaaagggaggtaaggggctcggaaagggaggagccaagaggcataggaaggtcttaagggacaacattcagggcattaccaagcctgcgattcgccgtctggctcgtaggggaggtgtgaaaagaatcagcggtttgatctacgaagaaacccgaggcgtattgaagatcttcttggagaacgtgattcgtgatgccgtgacatacactgaacacgccagaaggaagaccgttaccgccatggatgttgtttatgccttgaaaaggcaaggcaggactctctatggttttggaggttaagcttagtacactattgtattttaggcattgcagtattatgcttattatggtagaatcatggatcttggctatagatccactgcgttaatgtaattgcttcagttcgttgctgatgttactgtgattcttaatatttgaaatgctctcaaaggatttgtatcnnnnnnnnnnnnnnnnnnnnnnnnnnnnnnnnnnnnnnnnnnnnnnnnnnnnnnnnnnnnnnnnnnnnnnnnnnnnnnnnnnnnnnnnnnnnnnnn

SEQ ID NO: 196277 - DNA, 580 bp, Gossypium hirsutum
  unsure (1)..(580): unsure at all n locations
ttattgcttgtaattcatttcgttgtaaatttgtttccgtagtaatcatcaaatctttcgaagatgtcaggcagaggcaagggtggcaaggggctcggcaaaggaggtgccaagaggcataggaaggttttaagagacaacatccagggcattactaagcctgccattcgccgtttggctcgtcgaggaggtgtcaagaggatcagtggcttgatctatgaagaaactaggggagtattgaagattttcttggagaatgtgattcgtgatgctgtgacttataccgagcacgccaggaggaagaccgttaccgccatggatgttgtttatgccttgaaaaggcagggcaggactctctatggttttggtggttaagtttaggatcattcttaagttcttaactgtaatgcctttagatcttgactctagatctatatcgttatgtacttgtttgtgtactcgagtgatgttataatgatttgtaaccttaagattgatcgaataattttcattttgcaaagctttctttgggcaaaaaaaaaaaacaaagggcggccnnnnnnnnnnnnnnnnnnnnnnn

SEQ ID NO: 196278 - DNA, 525 bp, Gossypium hirsutum
ccacgcgtccgtggaaatatatggtatccgtggtccctcttaccagttcttcaatataggtgccatcaactggcgaaactgatatcgaaaagtgcttaacatgggaagtttatagtcagcttgcaagaggaatgactatacagttcctcgacactgctgccaaagaattaggatgtaatatttccatataacatcgattaactttcggattatcagtataaataccctttctctttcttcttttaaaactgagaatacaaagaagacttaagacttgcttcaatttgcttgaaccacatggttggggcagaaaatgcagctcatcgagtagtcctaggggatgaggatgaaggctttgaatgccatgaaactcttcaagcaaggttagtgtatgataaaaatgccacactgaggtttcatgtgtctaatcttactttgctttaagcttagctttgtacgatatttagactgagttttcgatttgtttgtcggattacgatatataatttcagtttaacttagttt

SEQ ID NO: 196279 - DNA, 625 bp, Gossypium hirsutum
  unsure (1)..(625): unsure at all n locations
cggccaactcttatcactttcaatatcttacaccaaaacatcattttttttccactcaaaggaatggctacatctcagttaacagcatcatcaatgacagtatcagtaaggaatttggcttcatttgaaggattaaggccatcatccattgtgaaattctcttcctttggatctttaaagcctgggtctttgactcaaaggtcctttaagggtttggttgtaaaagcggctaccgttgttgctcccaagtacacctcgattaagcccttgggtgatagagtgttggtgaagatcaaagaaacagaagagaagactgagggtggaattttgctaccaacaacagctcaatcaaagcctcaagggggtgaagtggttgccatcggcgaagggaagacaattgggaagaccaaattggaatgttctgttaagactggtgctcaggttatatattccaagtatgccggaaacgaactggagttcaatggttcanatcatcttatcttgaaagaagatgacattgtgggaattcttgaaacggatgatatcaaagatctcaagcctttanatgacagggttttcattaaggttgcaaaanccgaagaaaaaactgctggangtttgttgt

SEQ ID NO: 196280 - DNA, 513 bp, Gossypium hirsutum
  unsure (1)..(513): unsure at all n locations
cccacgcgtccgctagaattgaaagttgtttgttttctgggaaaattttcattacaggaatggctacatctcagttaacagcatcatcaatgacagtatcagtaaggaatttggcttcatcggtcgggttctggccatcgtccattgtgaaattctcttcctttggatctttaaagcccgggtctttgactcaaaggtcctttaagggtttggttgtaaaagcggctactgttgttgctcccaagtacacctcgattaagcccttgggtgatagagtgttggtgaagatcaaagaaacagaagagaagacagagggtggaattttgctaccaacaacagctcaatcaaagcctcaagggggtgaagtggttgccatcggcgaggggaagacaattgggaagaccaaattggaatgttctgttaagactggtgctcangttatatattccaagtatgccggaactgagctggagttcaatggttcaaatcatcttatcttgaaagaagatgaca

SEQ ID NO: 196281 - DNA, 690 bp, Gossypium hirsutum
ggggcaatggtgatgactttgtacaaaggtccaattgttgatttcatcaaatcaggaggcgtggcacaccatggcaccaccactgaatctgcagacaaacactgggttactggcaccataatgcttctagcaagtatcttaagctggtcaagttactttattttgcaatccttcacgttgaagatgtacccagccgagctctctcttacagcttggatatgcttgatgggaacgatcgaaaatgcagtagcgtcccttatcatggtccggggtataagtgcttggaaactaggttgggattcaaggctccttgctgcgtcttactctggaatagtttgctctgggattgcgtattacgtgcaaggagtggtgatccgggaacgaggaccggtgttccttacgtcattcagccctctatgcatgataatcactgctgctctcggtacctttgttttatcagaacaagtccaccttggaagcattcttggagccattatcatagtctcagggctttacactgtggtgtggggtaaaagcaaagatgggaaaagcccagaaagtgatgagaaaagcaaaggcctgcaagaattgccaatcacaaacaatgctaaatcaatcaatgttgatgagagcattgatggagatgccaaaattgttaagattccagcttcaaacagaccctttagcact

SEQ ID NO: 196282 - DNA, 569 bp, Gossypium hirsutum
cccattcttacgcttttggtcaagcaagtttggagcatcaacaaaataatgggggctttactgccaggatgggattctcctacatctgatccttcatcagctatacttaaaagaaatcggtcacttactaaagaagagattgaagctttctggagatcaaaaaggaaaacagaggaagagcatcttaatgctatatatggttcaccagatagttgcaatcagcagtatggaagggaatatatgagatcaagctccatgcctataccaaatagaaaccagggtttcatagacatggacacagaaaaaagcctggaaaatatcgtaaagcaaagtgggtggtggacaaggagcacttgggcattcttgaatgaacctccagttcttgaccgacctacaaacaattaccaaccacagttccatgttgccagcctcgctacttcaaagtttaacaagaattctggaatcagtgccaattagtgtttttaactcctaatggtatcttatgtgggtgtatttatctacttaatctggttatatagaacataatattactgagataatattctggt

SEQ ID NO: 196283 - DNA, 449 bp, Gossypium hirsutum
gttaatgagagcatcgcgagagctgctcttggatacatgatgtcttatgtacagaaggtgctatattataaagaaagtgaaaaccaacgcacatcatgatattgatgagagataagaatttggttgtttgactcaaatcatgcaaaggcataaggtggtctacataatttgagattgtgattaaatatgggctagtttcgtatacgaggaaaacaagttgggccaggtttaaatatgggctagtttcgtatacgaggaaaacaagttgggccaggctggtcaaagttggggacggcttgctctatctgtgcacttcgaggatactttataatactcaattagagtcgttaagtgagcctaaatttttgaggcactccaaatattcaggaaaatcaagtttatgaggtattaattccttaaattgatttctgaatttcatagtcaagtgt

SEQ ID NO: 196284 - DNA, 681 bp, Gossypium hirsutum
acggagaaccaaaatacatatggcactatagatgaaaacaaaaggtttgaacatgctttaggtatatatggtgacgatgtacctgatagatggataaaagttgcagagatgatacctggtaaaactgttttagatgttattaaacagtacagggaattagaagaagatgtttacgatatcgaagccggtcgaattacgatccccggttattccacctcatattttacattagaattggtcgataaccatgattttgatggttataggaaaagacctaatggtgctaagggccatgatcatgaaaggaaaaaaggtgtcccatggactgaagatgaacacaggaggtttctaatgggacttgtaaagtatggtaaaggcgattggagaaatatttcatggaactttgtggcttcaaagacacctacacaagttgctagccatgcccaaaaatattaccaaaggcaactttcagggggaaaagataagaggagaccgagcattcacgatattacagttcttaatctcactagcaccactacgttttccgaccatcgtaaggctctgtctgtaaaccagtctaatgtccttgcattgcagcataagatagcgagtatgtcaaaagctgtaagccttaatgggtcggatactagtttcgattcggagaatggaaacaggtttaca

SEQ ID NO: 196285 - DNA, 664 bp, Gossypium hirsutum
tcctcattcccctattttgaggtgccagaaccaaatattgttgaggtgaacactgtgaagaaccacgaaaaaacaggcgatgttcccatggggactgatattgagcctcgccatcgccacagcctatggacaggcctacgaaaatgtaaagccacttgctatggtggaaaaggtgacccgactccacttttactaccacgatattcccgttggaaatattgctactacaacctagatagctcacgcttacaccaccgataatttcttttccccgtccccatttggaagcttgtctgcaatgaatgatcccctcactgtagggccacatctaacatccacggtcattggcaacgcccaagggacgtacatagcattaagtcacgaccctgccaagttcactgcagtggttcatgctgattttggatttaccactggcaggttcaatgggagctccttcagtttgttctcacgatatccccccacagattatgttcctagccccgacaccattcgtgaaatggcaatagtgggagggagaggtgcgtttaggatggctaaagggtttgctatattgcgggccacttcttcgaatgccacgacacggaatgctagtctcgagttcaatgttactctgtatcattactaaacccaatcgcagaatact

SEQ ID NO: 196286 - DNA, 759 bp, Gossypium hirsutum
tttttcgcgtccgtcggtttctactctccaaaacatcatgcctcagggaaagcttcaagttgtccttgttagtgccaaaggtctcgagaacacagattttctctgtaacatggatccttacgtgcttcttacttgccgaacccaggagcagaaaagcagtgttgcatcaggaaaaggatcagaaccagaatggaacgaggatttcatattcaacatctccgaaggtgcttcggaactcgcactgaaaataatggacagtgatgctggttctcaggatgatttcgtgggagaagtagctataccactggagcctgtatttatcgaaagaaacattcccctgactccatatactgttgtcaaggatggagaatatcgtggggagattaaatttggtctcactttcacccccgaggaacgtgaaagcagggattttgaagttgaagaatcttttggagggtggaagcagtcttcatacactgattaggcaggccacttatagttttcagccttaatcccgtttcaagaagtaactattaagtttgattttcggaccatgtttggttggatgttattaccatgttgtcatttttactgccgttaattgtgacactgggaaattgtcactgattgaaatgtttgcctaatttgtactctggagatttagtgacatgttggttcttggatttgagcaagagatacggtttggttggtttttaagtaagcccgtacattttgaacacggaaaaaaaaacacggttt

SEQ ID NO: 196287 - DNA, 928 bp, Gossypium hirsutum
cttcaattatctcatcacttgttgaaaaccaaccaaatcaaaaaaaaaaaaaaaaaattctttgatttgattgatccatagatctacatgaagtttctagcttttttcaattcccggatcttctttttttcaagtatgaaccaaagttgtcaaatttaaaagcaaggagcaggtacggtggtacggttatgactttttaagacaagctgagaaaaacaagtgtttttagtgttgtgttgaagcaaaaaaggaggatattcggttcggttttcggttttttagggtctagtttttaaatgagaatttggaggtttttgtggatgaaatgagggatgttatcagggttaatgaatttgttgatggcttgttttttaccgagatctgatagacacgttcacacgagttccgaaaccggaggtcgacaagatggtcttttatggtacaaagattcagggcagcatttcaatggtgagttctcaatggcagtggttcaagccaacaatttgcttgaagaccaaagccagctcgagtccggttgttggagtttacacgagtcaggtccgtatggtacttttgttggtgtatatgatggacacgttggcccggagacgtcccggtacatcaacgatcatctctttcaacatctcaaacgattcacttcggagcaacaagggatgtcggttgatgtgatacgtaaagcatatcaagcaacagaagacggttttttgtcactcgttaccaaacaatggcctatgaaaccacaaattgcagctgttggatcttgctgtctggtcggtgttatctgtaacggaactctttatgttgctaacctcggtgattctcgtgctgttttggagagagctgtaaaggcaacaggggaggttctagctatttagttgtcggccgagcataatgtgtgtatagagtc

SEQ ID NO: 196288 - DNA, 650 bp, Gossypium hirsutum
ggacagtgaggctgagggacagtatcttgtgtttgtctgagcctgaactatcaaaaaccacgatcacagcttccgttgagggaccttacgggcatgaaatgccataccacttgatgtatgagaacctgattttagttgcaggtggcattgggatttcgccattcttagcgatcttaagtgatatcctccaccgcattaacgatggaaaaccatgtctaccaagaaagattttggttgtttgggccgttaaaaagtcggatgaacttccgcttctttcaagtatcgacatggaatcaatttgcccatttttctccaacaaaataaatctcgagattgatatttatgtcactcgagaatccgggccttcaatggaagaaggtaaggttcatgtggcatcgagctcttcctgccctttctcgggccgcagcatgtcgccgttggttggcaccggaaacaacgtatggtctggcctatatgttattatatcaacagtcggatttatcattttaatggccctgttaaggattttctacattaagccatacaatgtatctacctggtggtacctaggccttcttttcattgcatgcatggtcacgagtgttgttatcttcggtggtctcgtgatcggtttatggcatctctggaat

SEQ ID NO: 196289 - DNA, 774 bp, Gossypium hirsutum
gaaaaacatgggcttgcgttttgccgacctcttagatcgactttctactgagtttcctgagatgaggttcagatatacatcccctcaccctaaagattttccagatgaattgctgtatctgatgcacgaccgccataatatctgcaagtatatacatttgcctgcccaaacagggagtaccacagtgctttaaagaatgcgtcgggggtatagtagggaggcttatttagagcttgttcagaagatacgcagaatcattccggatgttggaataagcagtgattttatatgtggtttctgtggcgaaacagagaaggaacacgcagatacactaagcctaataaggctgttgggtacgatatggcatacatgtttgcttacagcatgagggagaaaacccatgcccatagaaactacattgatgatgttccggaagaagtcaagcaaaggaggcttactgaactgattgaagctttccgtgagagtacaggtcagcgatatgattctcagggtggaaccatccaacttgtgttggttgaaggaccaaacaggagagctccagataaagagcttatcggcaaaagcgataaaggccatagagttgcatttggtaatcatcctttgctggatcgggagaagcaaacagataacaaaaggaatcctgttgtcggtgattacgtagaagtccatataacaaagtcttcgagagcatcactttttggcgaaacagttgctataactaaattaagcgcattttacgacaatgtggatgaa

SEQ ID NO: 196290 - DNA, 659 bp, Gossypium hirsutum
  unsure (1)..(659): unsure at all n locations
cgatttggttgaaatggtcttcgcaaaaggagatcccgggatcgccgccttatatgataatctccttgtttctcaagaactatggtcattcggagagcggttgaggactaactatgaagaaactaaaagccttctcctacaaattgccgggcacaaggatcttctcgaaggtgatccgtacttgaagcaaagactacggctccgagactcatacataacaacactaaatgtctgccaagcctacacactcaaacgtatccgtgacccgagctacgacgtcaagttccgtccacatatctccaaagagatcatggaatcaaacaaatccgcggatgaactcgtgaaactaaacccgacgagtgaatacgcgcccggtttagaagacaccctcatcttgaccatgaagggaatcgctgccggcttgcaaaacaccggttaaaccccacttcggctaactcttaagtcgatttagtcccgagaataagaattacacatcgaanaatattgacgacgggttaaaagatgtggatgatgctatttaaattcctagttacagtgttcattgttgcaccaaaacttattatattatatggcttttaattattatgtaagcaatctggccaatatatatatataatgtaagcaaagtacttatcttg

SEQ ID NO: 196291 - DNA, 583 bp, Gossypium hirsutum
catgcaggatttattgatgaggatgactttagactccatttgctggtggggtttggagttgaaactggaactctggctcccactttaccagataacaacttcggtcgggcgttagatactgcaaacatcattagttaaaaaaatgacctactgaaatactctaaaaaccagaaaacgctatttcagtgtgggctccgaagctctacttggaaagagcatcaaagacattgttgacttcacttacaatgtcataaggagaagaaaatctgagattaaagaaattcgagaatctttgcaaaaccagcggagtataaagcatgacatatttgtcaagatttattgagctaagttgaagatccagaaggaaacttaactgacaaaagtcttagagatattgtcctgaattttgtgattgctggccgtgacacaacagctacgactctcacatgggccatatacatgataatgaccaatgctcgtgtagctgtaaagctctactcagaacttaaagcttttgaagaagctcaagcaaaggaggagaggttttcatttctaccatgtgactcgtaagtccttgtttcct

SEQ ID NO: 196292 - DNA, 313 bp, Gossypium hirsutum
cttgacacctcagcaagcttccatggttagagaatgcttatctcgtaataagtggaagcttcttggtgctaggagcttctgtgttctaccctttgattctaggtttcgatttctcttcctattggaggatgatgggaactccctttcctctacatcataagaccaaccatgtttcgttttctacctccaaaagtaggcaggcaattcttcaccacaggggctgttcccatgttatctatggccttgtaaattgatctcattgcacagtagttatgcatgggaaaaaattcaagccagggttccttttttttct

SEQ ID NO: 196293 - DNA, 595 bp, Gossypium hirsutum
cggacgcgtgggtccaacgtgaaaatactgaggcaaaatcacgagtggaagcgatgtgggagcaaatgaataaggggatacctaaggatgccttgagacaattttcaagcaataaagcttcagccacaaataaaacttcgcacaaagcttccaataattggatgaagtatctgcaaatgagaccagcagtgcctgctggcgatacggtgcaagaaagatggacagagtcaaaggctccaagtgccaccaaagaaactgaagcgcttaataaagataaagcagtgaaggaagctacttgtggtgcagaacaatgtcagtgatgaggcaaaagaagcttgcagctgcttgccctgtcagcagtgaaagatgctgcagctgctgcagcagctgcgtcaaatagagggaaaattgagattactgaggtacgagactttgctggtcaagaaattgaaataaaaaagcgaatccatgctgattcaaaagaggcagctgaaaagtccaaagcttatgcaccttctgcagtagatgctgttcttgaacaaatcaagaagaagccaaagctcagtgtgcttgacaagacgaaaaaagattgggg

SEQ ID NO: 196294 - DNA, 533 bp, Gossypium hirsutum
ctcgagttgacagtataaaggctgtatttgaagaagcatggactgatttaggcaagaatgagattgataaagaagtggtggagaaggtttgggataggattgctcctggtctagcctctcagttcgatgcacctaacacggtgccggctattgcacctcgccctttgttaattgtaaatggagctgaagatccccgttgccctcttgaaggcttagaaattcccaagacaagggcatacgaggcttatggagaggcccattcagacaactttaagcttgtggctgaacctggaatagggcatcaaatgacaccattaatggtgaaagaagcgagtgattggtttgaccagttcctcaaataataattgtaagggcctctgtctgtgttgttattgtttgtagatgtaatgtatttcctaatatgtatgcttcatcatgaatgatttgatgagctcaaagatcaaatctcttagtgtacttataattcttaataagaataaaataatttccttcagaaaaaataaatatttttt

SEQ ID NO: 196295 - DNA, 579 bp, Gossypium hirsutum
cggggccgttacctcggttttggagttacataaatggttggctcggcctggtgccatcgacaaagtcttttctgtggtgaaacaaatgaagcctgaacttgttaccatcgttgagcaagaagcgaaccacaacggtcctgttttcttagaccggttcactgagtcattacatttttactcgacgctttttgattcgttggaggggtcggtgagcagtcaggataaggttatgtcggaggtgtatttggggaaacagatatgcaatgtggtggcctgtgaaggggtggaccgaatcgagaggcacgagtcgctgactcagtggagaaaccggctgagtacggcggggttttcaccggttcatttgggttcgaacgcgttcaagcaagctagtatgttgttggccctgtttgcaggcggagatgggtatggggtggaagagaacaacgggtgtttgatgctgggatggcacaaccgcccactcattacaacttcagcttggaagctcaccaacaaaaccaccgccataagccagtaaaatttatttatttttaatgagtcgactaaatgagtctaagaaga

SEQ ID NO: 196296 - DNA, 472 bp, Gossypium hirsutum
attctttccgttttcatctgtcaaagctgtagaatactgtgggaattgaagcataatttgtatcaatttatttggccagttatcacattttttcagagaataaaatggaagagaagtatgaaactctgaagattcagcaagaatcgccaaattctggagtttttaacctaatcattaaccgcccatctgtcagtaatgcacttggactcaatttctttagtgaattccccaaagttcttaatgcgctcgaccaaaaccctaccgtcgccgtcatcgttctatccgggtccggcaaccacttctgcggaggtatcgaccttaaaagcctcgcagctatcgccgatgataactcgggtgatcaaggccgcaccagcgaacggttacggagaaaaatcaagctcctgcaagatgcgatcaccgctatcgagcggtgccggaagccggtaatcgcggcgatacacggcgcgtgtct

SEQ ID NO: 196297 - DNA, 578 bp, Gossypium hirsutum
cttacgcgtccggcatccttttggttaatattgcagccaccgtatttgcctgtcagtactacaatgatcaacttcagcttccatggtggggggttctattagcatgtggcattgccattgtattcacacttccaataggcatcattacagccattacaaaccagacaccaggtttgaacatcatcaccgaatatataatcgggtatatatatccaggatatcctgtagctaatatgtgcttcaaggtgtacggatatataagcatgacacaggccattaccttcctgcaagacttcaagcttggtcactatatgaaaattccacctagaacaatgttcatggcacagatcgtgggaaccctcattgcttgctttgtgtacctgggaactgcctggtggctgatggagaacatccctgatatttgcgacacaacggcctccaacagcgtgtggacatgtccaagtgataccgtgttttatgatgcttctgtcatctggggtttaatagcaccccgcagaattttcggtgacttgggaacttacgaggcagtcaattggttcttccttgcaagaacagtg

SEQ ID NO: 196298 - DNA, 338 bp, Gossypium hirsutum
tcgaattcggctttattggccattcccaatataaaaaaatggttggtttaatcctctggaccgggtggggcttcttgctgccatcttttcctcttttccaaatgtttgctggttatgggagtgtcaggcacattgaggaggagggcatgcgcggggtgtggtggccgagcgttgaacgtgctgcccgagcacatggtgagcggcggctggaggcttggggctagggttggctgctaaaaattcttaagattagtgggctgctatttgggctcttttttattggtttggggcttggtattgttttaattgtctgggccaaaaattggccatttcaataa

SEQ ID NO: 196299 - DNA, 404 bp, Gossypium hirsutum
  unsure (1)..(404): unsure at all n locations
ggcagggtggttcaggtcatggtgagggatatggggaggggtcaggcaggggaaatggttcaggcaatggtgaaggttatggcgagggacatggctatggagagggtcatggcagcggtggggacaagtaaaatctaactttgagtgcatgcttgcttgaaaagagaaaaaaaatatatatccataaataaatgaagtagcatgttatttacccgtgtaatgcatcgagtaatggatgttcatatggtttcctataactaaatgtcagtccccaatgcttttgataattaacaagtccttggctgttgcacctctagagttatacatacattatatgattctgttggatgctnnnnnnnnnnnnnnnnnnnnnnnnnnnnnnnnnnnnnnnnnnnnnnnnnnnn

SEQ ID NO: 196300 - DNA, 552 bp, Gossypium hirsutum
cactgtatgttttacaatggtttcaagtcttccctccacagctttgggcagtcgcatatttcgaaggagtgcgatatggccacttcacactaggtgtgaccgagttgttgaataattgggccctcgaatgtcatgagctccccggtcggcagatgatggaacatattcgccttcaactaacctcttggtttaacaatcgtcgtgaaacaggaataagatggacctcaattcttgttccctccgccgagaagcggatttcagaggcaattgcagatgctcattgctaccaagtacttagagcaaatgaagttgagtttgagatcgtctcaactgagcggacaaacatagttgatattaggagtcgtgtgtgttcctgtcgccgttggcagctgtacggtttaccgtgcgcgcacgctgctgccgcccttatttcttctgggcagaatgctcatctgtttgccgaaccttgtttcacagtggcaagccaccgtgagacctattcgcagatgatacatcctattccagataagagcgtttggaaggagctgggtg

SEQ ID NO: 196301 - DNA, 476 bp, Gossypium hirsutum
gattgatatgccagggcttggaaaagaggaagtcaaagtgtctgtggaacagaacactctggtgatcaaaggcgaggccaaagaatccaaagaggaggaaaatggcgggaggttcaccagcaggatccatttgcctgaaaaagtgtacaagactgaccagattaaggctgagatgaaaaacggtgtgctcaaagtggttgttccaaagatgaaggaggaggagaggaatgatgtgattcaggttcaaattgactgagttaactggttgcgtccggatgaggctaagtgggttttcgttggtttggggctgtgggtcttgtacgtatttagttttgataataagggcttcgagtataatacgagtaaatgttaatgtagaactttcattttgtgttaacagaaaaccttgttaattttggatctatataacaaaatttgataataaattttttgttaaaaaaaaaaaccttcaaaaa

SEQ ID NO: 196302 - DNA, 275 bp, Gossypium hirsutum
acgagcggggaacatatacgtggcatcatttgtttggtcgtgcagcggagtgtgtaagtcgggggagaagatgaaatacgtgcacaactcttgtggagaaggcgattctagtatttggaaatcagatttttaagttgccttcctacctccttaccggctttttattatccattttcaaatttattattaagtagtaaaattacttcaagaactttcaacactttgcatactccttttattattattattattattattattattatcatgtattt

SEQ ID NO: 196303 - DNA, 564 bp, Gossypium hirsutum
  unsure (1)..(564): unsure at all n locations
acgcaaaaaggcttttgattcctccaatactgtgtcagttgctgaagttaatgctcaagcacgtgctgggggagtccgtacggggattgcctatgaaagagcttaagagcttggagagtcgtttagaaaaaagaattagcagaatccgttccaaaaagaatgagctgttgtttgctgaaatagagtatatgcagaaaaaggttaaaatagtgaaatgcactgtgaatgacatacccggggacatctctttaaatcaaacggctgggctatctgcactttgctttctggagaaggtttgagtttttggtggatgcatagtccacgattagctgaattcatgcatagtgacttgtttaagctaactgattatcttaaagtgtgcattctatcattattttgttctatttgtattttgtattttgtattttgttatatttctggtgtagtatgataagtgcggtattttgtttggcgggatatatttatatcatagattattattcttttcaatnnnnnnnnnnnnnnnnnnnnnnnnnnnnnnnnnnnnnnnnnnnnnnnnnnnnn

SEQ ID NO: 196304 - DNA, 610 bp, Gossypium hirsutum
gagaaaccaccagggattggcagcagcaataattaaactttgggagaaaagcctcgttgcaaagattgctgtaaaacgaggtattcagaatacaaataacaagcttatggctgaggagctaaagaacttaactggaggtgtcttgctgcttagaaacaagtgggtggttgtcatataccgcggaaaagatttccttccaacaaatgttgcagctgctctggcagaaagacaagatttgacaaaacagatacaagatgctgaagagaaactccggatcaaagcagttgagccagctctctcaggtgaagacaaaggacaggcaccagctggtactttggctgagttttatgaggctcaagcccgctggggaagagatatatctgctgaagaacgggaaaagatgattgaagaagcttccaaagctaagcacgctaaactcgttaaacgcgtggaacataagttagctattgcccaagccaaaaagcttagagcagagagactactagctaaaatagaagcctccatgatccctgctgctcctgattatgaccaagaaacaatcactgatgaggaacgggttatgtttcgcaaagttggtttaagaatgaac

SEQ ID NO: 196305 - DNA, 527 bp, Gossypium hirsutum
cgttccttgtccgttacggagtcaaagtcaactcattggaagcggaggcaacttggtcataggagggaaaaaggtgtatccgaattcttggaccgccatattggtctccttggacaaccaaggtatgtggaatgtgcgatctacgttatgggacaggcaatatctcggacaacaattctacctcagagtctggaatccggttcgcagccttgctaacgaatacgacattccctctaatgtcctactctgcggccaagccgtcgggcgtcacccgtagttcgattaaaccattgaaaaccaactttttctagggtcatgagagtttgactggcggagaaaaatagatgatagaaaagagaatggatcgaaatcattgctctttcatttgtgtatctttagaagcattagataaattatgcattcattggatatttggattactatattagctccaagagcctgaattatatgttacgaaaagaactgaggttttataaattctaaaccatataaagatctagcatttg

SEQ ID NO: 196306 - DNA, 441 bp, Gossypium hirsutum
  unsure (1)..(441): unsure at all n locations
nnnnnnnnnnnnnnnnnnnnnnnnnnnnnnnnnnnnnnnnnnnnnnnnnnnnnnnnnnncgcgtccggggacgcgtgggctgacccatgcgtccgggtgcggattgtggaggcggagcgggacgatatagaaatataagtgtctgaagggtatagaatatgaatttcatttcatacaattcctaaagccattcatttgacttcaataatctctagcaatgcttttgagcattttgattttcttacctaaattaaccttatttttgttattacttgcggtaagaaaattcataatcttagtgtagagtactagtgatggtaaggtgctttcaacgggcatagctagtatggccatcatctttgctacttccaccaccactttcatatcttcattcatgtgcacctcttgcactggagcggacgcgtgggcggacgcgtggaa

SEQ ID NO: 196307 - DNA, 583 bp, Gossypium hirsutum
gcttattaaagatggctccaactaacgaagaagagcgtaagctgaaggatttcactgacgagtccccattcaagctaggtccagccgagaaattcctcaaggctgtgctcgacataccttttgccttcaagagggttgatgcgatgctttacattgctaatcccgactccgaattcgagtacctgaaaaggtcttttgaaactggggaggccgcttgtggagagttacggaataccaaaatgtttcttaagcttttggaggcagcgcttaaaacagggaaccgtatgaatgttggtaccaaccgaggggacgcccatgctttcaagctcgacacactcttaaagctcgttgatgtaaagggtacagacggaaaaaccacgcttctgcattttgttgtgcaggaaatcatcacagctgaaggttctcgtctttccaatgccaatcagaacccgaaagctgagaaaatacaacagtcgcgatcttcaagatgatgttgagtttcgtaaacttggcctgaaagttgtgtccggtttaagtggggagctaaccaacgtgaagaaagctgccgctatggactcagatc

SEQ ID NO: 196308 - DNA, 465 bp, Gossypium hirsutum
cccatgcgttcttccacgcgtccgcttttatttgtcaatggcttcatctgtatcattgtacgaggttcttggtgtaccagtgagtgcaaacggtaatgaaatcaaggcagcttatagaagacttgcgaggacgtggcaccctgatgcgccctcgcgttcgcagaaagaaatgtctgctgatcggggcatgagaatccatgcagcgtattccacgttgtcggatcctaatcaacgtgcggattatgataggaatcttagacggtggaaccgtccctttacgactatggaagcaactgcgacggcggtgggttcctatgggttctctagttatggtggtaataggaattgggagaccgagcactgctggcacgtaattatatgtattcttttttcattattaatgtatgtttcatgttcgtggtccatacaaatgagattttttagaaacgatatgtatcttttaat

SEQ ID NO: 196309 - DNA, 428 bp, Gossypium hirsutum
cggacgcgtgggcggacgcgtgggcggacgcgtgggtttcaaaaaatggctctcctccaaatgcacacacttcctcaccaaattccttcactttcacccattgttttttcatcaaaaacccattccaaaaactcactcttcttctctacaacaaaggttagacctttctcactttcaacacaacccagaaagctgctttgcaaacccccacttggcaaatatgtcagggaagattatcttgtgaaaaagatgtcatctcaagaaattgaggagctagtaagaggggagagaagagtacccataattattgatttctatgcaacatggtgtgggccttgtattttgatggctcaagaacttgaaatgctagcagtggaatctgagaaaaatgcaattattgccaaagttgaatccgatgacgagtatca

SEQ ID NO: 196310 - DNA, 555 bp, Gossypium hirsutum
aatagaccttaaaaatttggaagaaacttggcgatacagatgtgaagcacttactgcagaaaatgaagcatcctctggtgaagatatacgaaaagaattagaggagacaaaactacagtacaagcggttgaaggaagagcatgcatcatgaccagaccttgctgataaaatgattgaggagaaggataaggagggttgtatacttttggatgacaacaagaatcttcaacgatctctggagtcaagacaactggttgatcacactgacaattacaacacagccacacataaacaagatgctccaaatctaaacacctctgcagcagaacagcagattctgcttttagcaaggcagcaggctcagagggaggaagagctggcacaatcacagcgacacattttagcccttcaggaagaaattgacgagctcgaacgtgaaaatcgttttcacagtcaacaggaagctatgctgaaggaggaacttctcgacatggaaaggtcgaaaaggagagaaggtgttgaatttacgtatctgaaaaatgtaatcataaagct

SEQ ID NO: 196311 - DNA, 797 bp, Gossypium hirsutum
  unsure (1)..(797): unsure at all n locations
accctttcaagtgttgaacagtcaatttcagcatgagatccagtagccatggcactatatgcgataggtgggtcgatttgtgctcctgtgtgggaggagatagtttttcgaggtttccttctcccttccttgaccagatacatgcctgtatggagtgcaatactggtaagttcagttgcctttgctctggcacattttaatgtacagagaatgttgccgcttattttcctaggaatggtgatgggctgttgtttttgcacggtcgacgaatctattgccatctatgcttctgcacagcctctggaatggccttgtgttcttggatttaatgagataatcaatcttgtcttctcatgttagctttggctgatccagtgctagtgaagcatatgcgtcaggccaattttctggggtatgcttgttacagtatattcttgattgaatgaatgcctaggaattacaggtctccaactgaatggtacaagcaacacgaatgcgattcagttgatccaacatggctccacagaactgctccactgtntctgtttgtccactataccagggacattaaaagcaaccgaacggaatgaagaatgcatgtccattttggccaaaggcagccttcaatcttggaactgtaaactgcaaatntgattggtagatgaggactctttctttatggtagattataatcttgggctttcattngntngctaggtgttggaaatcattctattttggaggccagggtactaactctatcnatgttttaccaaaataanaaaaaaaaaaaaaat

SEQ ID NO: 196312 - DNA, 695 bp, Gossypium hirsutum
ctgcaaggctatagaacaacaaacaatatgttaaggatgatgattatggtgaagaaatggagagagttgatgttttattgacattacctgatgaagaccgaaatcctcatatggatgataccgatatcaaagctctaattcaggatatgatagctgccgcaacagatacatccgctgtgaccaaccaatgggcaatggcggaagtaataaagcatgcgcgtgtcctccgcaaaatccaatatgagctcgattcaaccgttggtcccaaccgaatggtcaacgaatccgatctacctcaccttaactacctacgctgcgtaatacgtgaaacattccgcatgcacccggccggaccgtttttaatcccacacgagtcccttcgggccacgaccatcaacggcttttacatcccggctaagacacgtgtcttcatcaacacccatgggttgggccgaaacactaaattatgggacgatgttgaatcgttcaggcccgagaggcattggctggctgatggcgctcgagtcgagatcagccacggagctgatttcaaaatcctgcctttcagcgccgggaaaaggaaatgtcccggcgcgccacttggagtgacactggtgctcatggctttggctcggctctttcattgctttgattgggctccccggaatggtatgaggcccgaagatataaatacc

SEQ ID NO: 196313 - DNA, 399 bp, Gossypium hirsutum
gcttcatctggaaaatccaagggtcctgtcacattgtctggtcaaaaaacgaaggaagatgcgtggggggatagctccaagagtgtggctcaatcacaaaatgttaccaaagccaagcaccatacccctaaaaatggtagtaccatcagtcagatggcgcttcaaaagtaggcaacaaatccaataatgaggacactggtcatacacccaagtctaccaaatccaaggatgacgtcgcttcaagagttggcaacagatccaaaaatgaggacactggcgacacacccaagtctaccaaatccaaggaggatgtcacttcaaaagtaggcaacacatccaaaaatgaggacactggtgacacacccaagtctaccaaatccaaagatgatgacaatgtta

SEQ ID NO: 196314 - DNA, 551 bp, Gossypium hirsutum
atcgctgtcgagggtcatcagctatgggctgttggctggcaaaaagcagtctcacagattggacccaattttgtctggtgggtggtagctcagagtgtcttctatcacttatataatcaagtttcatacatgtctctggatcaaatttctcccctgacatttagcattgggaacacaatgaagaggatttcagttatagtgtcgtccatcatcatcttccacacacctgttcagcccattaatgctcttggagctgccattgccatccttggaaccttcctttattcacaggccaaagcagtgagaaaggtcaaagaatttcaagattttttgttggactgaccaacaataaaaaaggggctttatgaatatttggaaggaattcactgaagatgatgctaatgggcttagttttgatgcattccacatgaagtcctggagatggaagcaacaagttaatatgatagtctttgcaaccttcaatgctactaattaactagtagatttttattttacattttgtaagttgaaacaaagggggggggggtgca

SEQ ID NO: 196315 - DNA, 411 bp, Gossypium hirsutum
gacccacgcgtaacgcatatgtcctatagcccgagctcccttattttttttaaagccatcaaaaagctagatcgtgggagattacccgagatgggactgattcatttgaagagattctcatatagccgtttttttaagaacaagcttcaaacatatgtggactttccaattcatgatctcaatctctccaattacatttcccatattgataaccaactgtccaattgttatcaattatatgcgggaactaatcactatgcaggcatgggaggcggtcattatactgctttaattgatcacgggcatggtagatggtacgagtttgatgacgacagagttttccccatcagtgaagacagaattaaatcatctgcagcatatgtccttttctatagaagagcccgggagatg

SEQ ID NO: 196316 - DNA, 357 bp, Gossypium hirsutum
ggcattttcacgatgatattactgttattgtgttattctttaatcacgatcttatatccagaggtgccgtccaagaccctccagtatcgattcggagtgcactagaacactgatgatttataaaccaaatagatctctgcttcctctggttcttgctctgggagattcgaaatcgaacttgaacctttagtttggctaactgcccgaaaatgttaaaaagagagtgagcaggccaagatttagtgcaaattctatagtaatgctctacttaattcagcctaaacattttgtgacagtgctttattagatgaaacatgaatataggtgcttgatttcaaatctaatgacgaaagactc

SEQ ID NO: 196317 - DNA, 1081 bp, Gossypium hirsutum
agaaaattaaatataaatgataaaaatctagaataagattaaaacaatagttaggatatatagaagtatagatatacagaaaagtatatatatatataataactgatatactagataattctatatatagtataaattaatcattccaagagatagcaaatattgagactcgattgtagaattctaatttgatcttaaataggaatactagcaataaggggacatctgtaatggactatttctgagattacacaattcgtccaagccggtgaatgaaccggtcactattgctcatattgtaatctggcatgagtatgtaatatagaacattcatcaagggccaatttatatgagtggctatcattcgtcagattctgtctggaattgttcactattgctctttcaggaagccatgctcgggttacaaaatgaaagagatgactggtagtggaatttatgctgctgctggtgccaatggggcatctgaaactactgctatgaattccactaacaaaacaggattgcggatgtatcaggtatctgtttgatctccctcgcagaatgagcatgatcgttcaccagttgttgatgtaaatttaccattttaaactttggtgtgattttcagcaagcaatgaatggaattagccaaatatcatttactgctgatgcaagtgtttctcccaaaaagcctacctctatccctgaggtagcaaagcagcgagagttaagtggctcattgcaaagagaatcagatgcaaagaataaaaagcaaatatcaaatgcaaagtataaggagatcagtggacatgacatctttgcccctcctgaaaataagccacgttcgttggctcgtgtcacctctgaatcaagaggaagcaaagacatgggagaacctgcaccacgaaatgtccgcacatctgtcaaagtttcaaatcctgcaggaggtcagacaagtatcctattcacggacgaaccagttgtcaaggtgacaaagaagatacataaccaaaagtttcaagagctgaccggtaatggtatcttcaaaggagatgtcccacccaggtctgtggaaaaaccac

SEQ ID NO: 196318 - DNA, 586 bp, Gossypium hirsutum
cccacgcgtccgcggacgcgtgggttcaaattctcctgttgagcaagaacaggtccttatggggaatatattcaagctgcacgacaagtatattgcatatgtgaccgacttttttcaaaaccatactctctttcacaagtgactgttctaatatctaaactcaactgcacatcctgggattgatttgacagtgactgttctcacaacaggattctggccaagttataaatcatttgacctcaatctccctgccgagatggtcaagtgtgtggaaggtttcaaaggggtctatgaaacaaaaaccaaacacagaaagcttacatggatatactcactgggaacttgtcagattaatggcaagtttgatcagaaaagtattgaactgattgtttcaacttatcaagctgctgtcctgctgctttttaattcatctgatcggctgagctattcggagatcatggctcagttgaacttgaaccatgatgacttggtcagattactacattcactgtcatgtgccaagtataagattctaagtaaagagccaaacacataaaccatcttccaaagcgacttctttgaattc

SEQ ID NO: 196319 - DNA, 415 bp, Gossypium hirsutum
tttatcgcgtccggaaaaaaaaataaagcctaaaaggtaaaaggttaacagattgtagggaaaaagaaaaaaaaatggtgagattatccaaatggcttctaaaagaagcaggaaccggagttaacaatacactttcagagatcctcgtttgtccgctctccaaacaagctttaagggtttgcgaggaaccaccttctcttatcagcgattctattggtgtctcttttcctataaaggatgggatcccatgtttggtgccgacagatgggaagatacttgatactgatgatacaatgaaacatgataatgctgctgatgattcagcttacaacaagtaacgtatggcttgtcggggattccttgtatcttgctattttcatggtgctatggatggaaaatgaagacctcacctatt

SEQ ID NO: 196320 - DNA, 674 bp, Gossypium hirsutum
gagaatcgttgaatgggaagggggtgaaaagattggtgaaaaggcagcttcagaatggctttacattgtcccttggggcctccggaaggttctcaattatatagcgcgaaaatacaataatcccccaatatacatcaccgagaatgggatggatgatgaagaggacaacagtttgcccctcaatgagattcttgatgacaaattaagagttcactactttaagggataccttgctgcagtcgctcaggcaatcaaggatggagcagatgtgaggggatactttgcatggtcattattagacaattttgagtgggctcaaggctataccaagcgctttggtttggtttatgtagattacaagaacggtctcactcggcatcccaaatcttcagcatattggttctcacggttcttgaaaggcggtgaaaagaaaaatggcaaggaaaactaaattgtctgaagctgaaattgccaagctacaaaactagtcttttcatctcgaatccatggtgttgtagccaagaagaataaaaaagtttgcttaagtggttggcaagggtctaactttaaagaactgaaatggaacgtttctgatgctatttctggtttctgtaaagcagatatgatgaggtacattaagtgcctggtatgctttctttgcagcctttttgttc

SEQ ID NO: 196321 - DNA, 681 bp, Gossypium hirsutum
ggaaaaagcaaagaaggatttggagcaacaagagtactttgatccaaagatagcagacgaggagcgtgagaaagggaacgaatgtttcaagcagcagaagtatcccgaggctgtgaagcattatacggaatcattgagaagaaatccgaaagatccaaaggcatacagcaacagagctgcatgctacacaaaattgggtgcattgcccgaggggctgaaagatgctgaaaagtgcattgagcttgacccaaccttttccaaaggttacacaagaaaaggtgctgttcagttcttcatgaaagagtatgacaaagctttagaaacataccaggaagggttgaaacacgatgccaataaccaggagctgctcgatggtgttcgaagatgcgtagaacagatcaacaaagccaatcgaggtgatttgagccccgaagaactgaaggaaagacaggctaaggcaatgcaagatccagaaattcagaacattctctcagatcctgtaatgagacaggttttgattgatttccaggaaaatccaaaggcagcacaagaacacatgaagaaccctatggtgatgaacaagatccaaaagctggtctctgctggaattgtgcaaatgagataaattgtgaaagtgatcaattgtaacttaaattgctttttttccttcataagaaattt

SEQ ID NO: 196322 - DNA, 1221 bp, Gossypium hirsutum
  unsure (1)..(1221): unsure at all n locations
gtttcttttctttttttttttctcgagaaccaaacacgcacctttagtaaccagttacttttggctttggcttttaatttttattaatactaaaaaggagtgctggaggctcttcttttttctttttttttccattgacattcttgataagtagggaagaccatgtgaattgtttgaactggactacgattatcgactttcttgacggggtaaacgtatcggttattctcagtattggtacaaaatggtcaaatgcaaaggttgtgggaaattaggaaggatgctaccgggtgacgggcctgcaaaagcttaccattatgctcttctttgttcccctgttgtttctgtttgggattgcattgtccgtaagatgagatactcctacatacctgaatgggtgtagtctttggtgttatataactatataggtagcatcggaagcttttttttagaatacaattatagaagaaggaaaaaaagacagctacatagggaaaaatatacaatttaggggaacctttttaaagtttcatggataacaaggcttgtaataaagtgcgaccgggcgtgagaaaagcgaaaaagaagcaagtgaaggatgagttggatcgtattaaacaggccgagaagaaaaaaaggcgcttagagaaagcccttgctacttccgccgccatacgttctgaactagagaaaaagaaacagcagaaaaaggaggaacaacaaaggcttgatgaagaaggtgctgcaattgctgaggctgttgctttgcatgtcctacttggtgaagacactgatgatgttggcaatttcgatctatttatcaatggaggaagtggtcctagccttccccatcaagttcattcaaaaggtttggtcactaatgcatcatatcgagctggatgtgagtgggcaatgttcggaaacagtgactggtctttctcatgtggagactacggaagggatctgattgaaccatgttttgaggatagtgtttggggaactgcaggactttcagctggtcttatcgccgcgcaagctgtttcggcacttcggattacagagaatgcagaggtaaacacggtcgtcctcaacgggatgttgagaggctagacaagcgtgtttgttgctacatcaaacctttgctctcaaaatctgaataatggctntgnatgtatatatatatatatctntgatgccctctgtagtcgagctgcttttctt

SEQ ID NO: 196323 - DNA, 562 bp, Gossypium hirsutum
cggacgcgtgggcggacgcgtgggaaagtttccggtactgagggttggggttgtgttattgttatgtaatccaaggccccttacaaaagtctgccatacaaatgcaggcagatctggaagcagtttggagtaaaatattgattgaaacgtacgagctagcagaagaatgctgaggaatcggctatcttggttgatcatggagataaagaaaatccacatgaaactaatgatcgtgacacagccagttgcgatgaggaattgcaaaaagatggagcaaagcaggaaagtattgaagaaccagcagcttctgtgctagacaaaaagattgtaggaagtaagttagatgagccgcaagtggaagagatggaggagagaacaccggacgactaagcttttcggctccagcgccaaccctatgcgtaataagtgctggtttttgttttgtgaataataataataatgtgaggactgagtaagcaggggatttagttttgtttgcagtttgtaaatcttatgtagacaacaacaatatagtctgcttaattacttagttattgcaccg

SEQ ID NO: 196324 - DNA, 571 bp, Gossypium hirsutum
atttcaacaaccgccctaattctttcaaagtactctcaccagctcgcacatgtgtggtttattataaagtggatgaaagtgtagaagaaactaatggtatcaatgtaattagtgtcagtgagacattagaaatggatgcatcaaagcagaagaatgctgaggaatcggctatcttggttgatcatggagataaagaaaatccacaagaaactaatgaccgtgacaccgccagtttcgatgaggaattgcaaaaagatggagcaaagcaggaaagtattgaagaaccagcagcttctgtgctagacaaaaagattgtgggaagtaagttagatgagccggaagtggaagagatggaggacagaaccccggacgactaagcttttcggctcctgcgccaaccctatgcgtaataagtgctggtttttgttttgtgaataataataataataataataataataataataataatgtgaggaatgagtaagcaggggatttagttttgtttgcagtttgtaaattgtatgtagacaacaacagtatagtctgcttaattactagttattgcatc

SEQ ID NO: 196325 - DNA, 627 bp, Gossypium hirsutum
caagatccgactcacaccaaaatcagctattttaaccttcttcttcgaattgatcaacagattcgagggttttatatcgcgatgaacgatgtgtctccggtgaaggtagtttaaaccattgaggatttgtcgagctagatccgataagttagattcgtgtgatatatgagtcccttctaaagatccaacatccatgaattccaataggacctgaatttcgccattttgatcgtacatttcatggcatttgacaacgttaggatgattaacatcacgggggatttcgatctctctacggatctgacgacggacggtctcttcatggttcccgtagatgaccttaagtgcataaaggcgagacgaaggacggtggatgactttatacacggtgcctcccgcgccgcttcctattcggttgacccgatcgatttccgataagttgacttgtttagagttagcgttaccgttggagcaggttgaccgagcagcgttggaagccggaggaagtggaagagggacggggagggatacggttcgttgaggaagcggtacggttagttccgccagcgtacgtgggcggtttctaatggcagaggaagagccgccaactgccggcggttgagaatg

SEQ ID NO: 196326 - DNA, 687 bp, Gossypium hirsutum
ggcgagactggaaaagtataccgagcaaattttcacgaccgagacggtaggactgttcttatattgcgaccgggaaaacagaacactacatccttagacaatcagctccgtcatttggtgtatatgattgagaatgctatattaaaccttccagagggtcaagaacagatggtatggttgatagatttcaccggctggagcttgagcacgagtgttccgatcaagtccgctcgcgacaccattaacgtgttacaaaaccactatcccgaaaggttggcgatggcggttctatacaatccgccaagaattttcgaagcattttggaaggtattaaattctaatgcattgtaaaacaacatttctgaattcttgagtgtcgaatgtcacttaaatggagataacatcagtgcatttacaccagcattatcacctgttatggtcaattgggcaactcgggttttttttagtaggtattagattttcgggctcagataatttaaggtctaggtttgatactaagagttcaaatcattttaagttaagtctcatttcaaatatctggagtattttttaattggttaaaatgtcataagttctttgtactattcaaaaattcagaattttatttcggtatttttattttcaagaatttagtccctttacattttagatttaaaaaaatgggtt

SEQ ID NO: 196327 - DNA, 1084 bp, Gossypium hirsutum
gtggacaacccagtgctgaaagctgagcaagatgcacagattggaaaaggctcccgtggagatgtaactatactgccaacccttgtgataaacaacagacagtatagagggaagttggacagaggagctgttctcaaggcaatttgtgcaggttttcaagagaccacagagccagcaatttgcttaactgaagatatacaaactaacgagtgcttagaaaacaatggtggttgctggcaggacaagagtgccaacataactgcatgcagggataccttccggggaagagtgtgcgaatgcccgttagttaatggtgtgaagttttctggagatggttatacacattgtgaagcttctgcggctttacgctgtgaaatcaacaatggaggatgttggagagaaacacaggaaggaaggacatactctgcttgtattgatgatcattcacatggttgcaagtgcccatacggattcaggggtgatggagtcaagagctgtgaagatgttgatgagtgcaaggagaagctggcctgccaatgtcctggttgcaaatgcaaaaatacctggggcagttatgagtgcagctgtagtggtggttcgttgtacatgcgagagcatgacacatgtatcagtaagaatgttaaaacagaggtaagctggggctctgtttgggtaataattcttggattggttgctgctggagctggagggtatgccatttacaaatacagaatccggagatacatggattcagagattcgggctataatggcacaatacatgccattggataatcaaccaaacaacgttcatcatccagacatctgaagtgcctcttccgattgggttggttatatattagtaggttttatatttttgggtcacgtaacttatttggcttctcttcgacattgtaattctaaataaagaacaattttcataattatgtggcttttacatttatcttccggctggatttatttttgaaaaattgagttcagggtgggtcggaaaatagttgggtaaatttgcccgatattaagtttttaaaataaataaaatttggatccggatgcttcgttct

SEQ ID NO: 196328 - DNA, 629 bp, Gossypium hirsutum
caaggctgttgcctcaaggtagtggtgaccttatgagcggcaggacaagtgccctattgcagggaagttcaacccctcctgcttggcaatccaacactagtttgggtgccgagcctatggcacaaccttctgtttctgctaaacctgtgcctgtggctgctgtctctccaattgtggagaaatctccggccccagctgcaatactaaatccagatgatcttcagagaaaaatacgagcgctgttggatgagtatttcttcgttaggctgcttgatgaagctttgctgtgcgtggaggaactaaaatctccatcacaccaccctgaggttgtgaaagaagcgatttcaattgccttggacaaaagcccaccgtgcgtcgagccagtctggaaacttcttgaatacttgttttccaagaaagtttttgctgcaagagacatcgcgaccggatgcctcctctacggtgccttgctggatgacattgccattgacttaccgaaagcaccaaataattttggagaaataatcgggagactcattttggctgggggactagattttaaagtggtgaaggaaatccttaagaaaatggaggatgacctttatcagaaagctgtattcgacgcagca

SEQ ID NO: 196329 - DNA, 509 bp, Gossypium hirsutum
gataattggaagagaagaatccctttgcagagatgtggaaaagacttcactattatgaaagtgttaccatcgggtgtttaccagtataggttcattgccgatggacaatggaggtatgcccctgacttgccatgggctcaagacggcacgggcaatgctaacaacattttggacttgcaggattatgttccggaagatattgcaagtatatctagtttcgaacctccgctgtcccccgagtcaagttacagtaatttgccgcttggagccgaagatttcgctaaggagccaccactcgtccctcctcacctacaacttcctctccttaatctacctgcatctcacatggagatcccgccacctctgtcgagaccaaagcacgtaatcctcaaccatctgtacattcaaaaggggaaaaatggccaacccgtggtggcactcggttcgactcatcggtttcgagccaagtatgtgactgtggtgctgtacaaacccgtgcagcggtagta

SEQ ID NO: 196330 - DNA, 476 bp, Gossypium hirsutum
cccacgcgtccgagtatttacccagcagaagtaagtaactttcagcttctgtgttctttatccaatctaaagagatttagattagagaaggtttcagttccatccttcagtacgagcgcgtttcagctaaagaatctgcgaaaaatatccttggtcatgtgtaatatcagtcaggcttttgaaaagggcacaaacaaaatgtcagataattttccaaatcttttggaaatcgacatcgactattgtgatgatctgacggaactgggtgaagggttgtgtgatgttgttcaactgatgaagcttagtatcaccaattgccacatgctccgtgcactgcctgaaggcattggaaagcttgtaaacttggaagttttgagactaacatcctgcactgacctcatgtcgttgcctgagaccattgggagcttatcccagctcactattcttgacatttccgactgtctaagcatcaaaaa

SEQ ID NO: 196331 - DNA, 455 bp, Gossypium hirsutum
agtttttgtcaaggatatattaaacagggcagtacaggtaggcgtctcctaaaacttacgggatctgaattccgactccactcagagatggcaacgggaacagctccaccaagaggaagtgcagcagcagcagcaagcctgcgcaggaggagaacaacaagcggtgggggtgcctcgggaggggctgctggtactatgcttcagttctacaccgatgatgctccaggactcaagatctctccaaatgtggtgcttgtaatgagcattggtttcattgcttttgttgcagttctccatatcatgggcaagtttgttcgtagggactaggaagtattccaagcgtgtagcaaacactttttctttttttttggtcttaacaggagcaaacacttcccattgttataatttttcagttttccttattactggatttgatttcatttgactaacccaga

SEQ ID NO: 196332 - DNA, 634 bp, Gossypium hirsutum
gaacgacccacgcgtgcgaatacacggaggggagtggcgagaacgagattgtgacaccaaatgagttcaaggagatggtggacgagttgttcttgcttaacggggtgctagatatcggtgactcgatcccttggctcactttcctagatttgcagggctatataaagagaatgaaggcattgagcaaaaaattcgacaggttcttggagcatgtgttggatgaacacaacgccaggagagaaggggcggaagattatgttgcgaaggacatggtggatgtgcttttgcagctttctgaggatcccaatcttgaggtcaagcttgaaaggcatagtgttaaggcatttactcaggacatgatagctggtggaacagagagttcagccgtgactgtagaatgggcaatctcggagctattgaaaaaacccgaaattttggcaaaggccacggaagaactcgacatggtgatcggcagggagcgatgggtcgaagagaaggatgttgtgagcctaccttacatcgactcgatagccaaggaaacaatgcggttgcacccggtggcaccaatgctagtgcctcgcgtggctcgccaagactgtgaaatagccggttatgacattcccaagggaactag

SEQ ID NO: 196333 - DNA, 717 bp, Gossypium hirsutum
gaagctgatagcatgaggcttcaaaaattagctgcccaggctaaagctttccgcacaaatgatgatgatgacgaggatgactctgatgatgactttagtgacgatgaagaactacagtcaccaatcgatgaagttgacccgtttattttctttgtcgatattgtcaaggctatgcaagctgcggatcctatgaggttgcagaaccttacacagactctggatttccattatcaagctcttgcaaatggtgtagctcaacatgctgaacagaggagagcggagatcgaaaaggaacaaatggagaaggcatcagtcgctgccgctccaccatcatgagttcagtttcgaactcgatgttcatccataattttcattcattcagaaatggttattttatgaaaccaagatttgtttccacttgcagtccattcaagtcattcattggttcatacggtcttgaaggtgatcaaaaccccaaaaaggtcaaggttcatatccatcgagattttttgtgtataaagtactcttcatccgcaaaacactgtgtttagggaactcctagtttgccatttttggctattcttgggagtcctgcccaactcatacatcagtttctgtttttcattttttcacgctatccatcatagttattcccagttagttgtttccggagtcggatcttctcctcgtcatgactggtccaggaccattcatata

SEQ ID NO: 196334 - DNA, 584 bp, Gossypium hirsutum
attggaaaacccggcccgacgcacgcgtacgctggaatggcacctacaggtgatacaagatttcaatttcactccgatcaaattggcatgggggtatttcatgaaactcaattagcaatatatcatgcctccaagatggagcgcgttcgacagtggattctacaagatgtattgcatgcacccatatctgacgcaacatactcctgtaatagtcaatctgtttatgccaccttttgcgatggtaacattggggtatttgatgctgatagcctgagacttacatgccgtatcgctccatcagtgtacttgtcctcggtaatcttaaaaggaagtcaaactgtgtacccgcttgttgtggctgcacacccgatagaagcaaaccaatttgcgatcgggttgagcgatggaactgtgaaagtactggagccctccgaatctgaagggaaatggggagtgagtccaccagcagataacggcgtccagctcaatggtaggacgacatcatcatctaccacaagcaatcacacaccagatcaattacaaagatagatttatgaaatgtagattattaggttcttactttt

SEQ ID NO: 196335 - DNA, 694 bp, Gossypium hirsutum
  unsure (1)..(694): unsure at all n locations
cccacgcgtccgcccacgcgtccgcccacgcgtccgcccacgcgtccgcgcgttttttaatcaactccggattttgtaatccgccgttcgtacgcggcggtgtaaaggaaaagagaggtgaggagaggaggatgttggaaaaccctacacccaccgcagctgatgccgctcctgccatcaaacgctatgctcctcccaatcaacgaaatcgttctctcggacgccgtaaatctggagagaagaatcaaggtgccacatcgagaaacattaatccagtcggggatgctgggagcagcgctatcctgaatgaagacaaccctcgtcatgctttgatacctttagaaggctgttctagaagtgatgcctctcggcttttaagcaatcgttgggcagctgtcttacatcgctaccatgatacatccattgacttgtctgaaagaccagttctgtactctggaattagtgattcagcctggaggaatttcagacttccccatcagatgatgtccccagcaaacaaaaccgggccttcatctggctcacagatggatttcttagctgagcttcgtcgtgcaattcgaaatgccaataccgacaactaactaatgacatagtgtgataatggcagatgtggacttatgaanctcatgaancttgcactcaaagtacctgctgtatgtgttcattagttact

SEQ ID NO: 196336 - DNA, 756 bp, Gossypium hirsutum
gctttttgatacgactacatgccgaatttgagcttgcattcacatcttcatggacaccattcatcggaatgtcttcttgattggacccgaaggatgaacattgctattggctctgctgagggaattgcctatcttcatcaccattcgaccccacacataatccatagagacatcaaagctagcaacgtgttactggattcagaattccagcctcaagttgctgatttcgggtttgctaagtttgtcccggacggtgcaactcatgtcactactcgagtcaagggcactctcggctatcttgctcctgaatatgctatgttaggaaaagcctcggagagttgcgatgtgtacagctttggcattctattgctagagcttgcaagtggcaagaaacccctcgagaaagtgaatagaacagtgaagcggtcgatttccgaatgggcactgccattagcttgtgaagggaagttcgatgaaatggcagacccgaaactgaacgggaagtatgtggaagaggagttaaaaaggatcatccttgtcgcacttgtttgtgccgataatcggccagacaaaagacctaccatgcttgaagtcctcgagctactcaaaggtgagtccaaagagaaattaactgaactagaaaacaatgaactatttaagactctgcaaactgtttgcgacgatgacgggataacagctgccgaaaaaaactcagacataattaaagaagagaaagatttgaaaccggcgaaagat

SEQ ID NO: 196337 - DNA, 561 bp, Gossypium hirsutum
gccacactcaaagtcccatacgaatctaaagggactggtggattcaagcgagctgcacttagattcgtggctgtttccaacaggacaagaattatgttccttagcacgttctacaccatgagaagtgatgacttttcttctctatgcggtcctgttgttgacgatgtgaagcttttgagtgtgcgtaacccttgatcatcaccgaccttgttcggggctgttgatgatccattgttggacgtggtctatcaacattttgtcttcctaaggatgatttttttttctttggttctttgtgggcttggaaaatcaaaggttttcgtgtgagctaaagctatatattgtggggaaaaaagaacctaggctatatattaatccaacaaaataaagtatatatatatatagactaatatcagggagtatactagtgtgattttattacgtgtttaattatgaattataccataataaatgcgaaaatattgggttatcactttcatctttttcgctgcgtattgtatttaatgaaagattatccttataaaaccttaattactgaat

SEQ ID NO: 196338 - DNA, 441 bp, Gossypium hirsutum
caaagacagcttgtagattatggtgctgggtcactgggctcattcccaccggttatggcccctcattatggtaggcatggtgggggccgtggtcatggtggttcttatcgtcatgggagagattaccatcggaagcgacaccgagatgatgaccactatgcacgtgagtcctcaaagagaaactcggatcatgaatccaggagagcctctgaccatgacgctagaccggagaagaatccacgtttccgagagagcggtgattctgatgaagaagaagatgatgatcgtaaacggcgatcttaatagatacattatgttttaattaagtgtaatatgtgaagtaagtttttggtgtttttatgcatttgttaagaggggctcgagacgcagaacaatgaggagttttcttggtacaattggtaggacaccaaatgctgcttt

SEQ ID NO: 196339 - DNA, 653 bp, Gossypium hirsutum
cggacgcgtgggcttcactgggctccaagatttggtttggctgggctgctctatttcttccttctctgctagagggttggaatttagcaaaaacatatgagttatctgggtgtgggagttagccctgggaatgttcccgtctaccatggcactaatttgaaggtcattgatagaagagtgagagttgcagagctggttttgaggtgtctcatatgtggcttaagcgttcttgcagctgttcttgttggaacagatacccaaatcaaagaaatcttcactattcaaaagagagctagatttacagacatgaaagctctggtgtttttggtggcggccaacggcataactgcagcttactcattggtacaaggagtgcgttgcgttgtgggtatggggagaggaagtgtcctttttagtaagcctctggctttggccattttttctggagatcaggcactggcatacttgaatttggctgcagtgggagctgcagcacagtcagcggcgtttgctaagttggggcaaacaaagcttcaatggatggtgatatgcaacatgtacgggaaattttgtaaccaagttggggaaagaatagcagtgtcactactagttagcatctgcatggtgggcctatcttgtatctcagcatttgg

SEQ ID NO: 196340 - DNA, 373 bp, Gossypium hirsutum
gaaagattctaaaattcaaaaaaaaaaatggaaaagaaaagaaaacaatgattgtctagggcccttagtgcagggtgtgtaaagaaggaaacgtgtgtgggttttctgtaggaagaaaaacatggttagaaacattgaactccttagtatggtatcaaaaagctgataccatattacatagtcaaaaagctaatgaaaaaaaaaacaaaactaaaaaaggagttaaaaagggaatcaatcatacataatttttgtagaaaatttatgtagtggtggaattggcagatcaaattcacactttgtaaacagtgtgttgcttgaacttgatttgaatttttttttatgggaatgaaaaaaaaaagtttattttttt

SEQ ID NO: 196341 - DNA, 826 bp, Gossypium hirsutum
ccatttttcatgtcatccaaatcccactgcaacggtgagagtgagagtgaaagagaaagcttaggttccacgctgctaaattataagcgaaaatggtgaatttcatgctgaagatctctgccgacctcgaaaacctcactaacctccagcctcagggcggctgtgacgatccttcctttccctatctcttcaagctgaagtgtgggaggtgtggagagttgagtcagaaggaaacatgtgtgagtttgggcgatactgttcctcttctacaaggcaagggaaccaccaatcttgttcagaagtgcaaattttgtatgagggaaggaactgtaacaatgatcccaggcaaaggtcgaccgctgactcaggaagactgtgaaggcggaaaatttgcacctttgatgctttttgactgcaggggttatgagcctgtagggtttgtatttggcgttggctggaaggttgaatctctggaaggaactaaatttgaaggtattgacttatctggagacgacttctctgaatatgatgagaagggagagtgccctgtgatgatatccaacctccgttctacttttgaaccggtgaagtagagtaatactgcacactgttttagtaaataaaaactgacaggtcaccatgaagtgaggtcgaaaccattgaccggaatacatgttggcattaagctattatatcctaaggtggtctgatgtgaaacattacagtttggtgcatgtccgtggatacactggcaatggttttactgattagtgaatcacgttatgctgtacttttatggttttctcagttttcagaatgattgcac

SEQ ID NO: 196342 - DNA, 592 bp, Gossypium hirsutum
  unsure (1)..(592): unsure at all n locations
acgcttggacttgtgcttcaacaagataacgacaacacgggcattgggtcagcttgtcgccaactacaactcattgcaagcattgaatctgttgggaaatccagttcagagcaacattagtgatgaccagctgcgaaaggcagattgtagcttgctccctaagcttacgtacctgaacaagcaacccattaaaccacaaatggcaagggaagtgctcactgatagcgttgccaaagctgctctagggagtggcagttggagctccagaagaaaaccctcccgaagaacaagccaaggtgcttcaacatccgccagtgtgcatagggccagcgtgggggtggggcataagaacaagaacaagtcgaagagccgaagtcgctatcactcatctgccaaattacctgcactggcttcttcatcccgttaagatattttaccagtaatttgcctggacaattcatgggcatttttttctttatttccttgtttttgctttgtgagtgaacctaaaagactgcttgcttcgcagacatatcaaccccgctctgttttctttntgtatgtttgggaatttgatttgtggttgtgtggg

SEQ ID NO: 196343 - DNA, 472 bp, Gossypium hirsutum
cccacgcgtccgcccacgcgtccgcccacgcgtccggcattgttgatcagccagctataatgtcctactgggatcttagccaagctgagaggagcaagtacgggattttggataacttgattcgattcagcttcggggttgaagacttcgaagatttgaaggccgatatactgcaggccctggagaccatagcttaaatagcgttttgatgtgtttagtatttttcctagtctaaatggagcatgttgatctccaaaagtactttctgttgtgtttgattttggtagatccacattggttgaatgaagtcatgattttggtacccatgaataatttggaactttgggggtgcttggttttagaaaattcatctaccgaaaatgttttttgtattttcttaatcttattttatgaaaataacttatcaagtggaaagtgatttattggttaaaataaataagtccattttatt

SEQ ID NO: 196344 - DNA, 470 bp, Gossypium hirsutum
ctaccggtcctcgccaacgctctcccgaggaactcgatcgcaaccgtcttggcggcggatttaaatcctatggttcgaaccgatacaattccaacggcgatgattcctcaagtaatagtagatggggatcttctagggtttcaaatagagattccgataaagaaatggctccctcacgcgccgatgagatggataattgggcgtcggctaagaaatcgactcgtgctgggaacggatttggggttggatttgagaggagagagagaggagggggagggttttttgattcgcaatcgaaagccgatgaagtagataactgggcatctaataagagtagtaaaagcgtgaatgctgctgcaccgccacggagatttggtggggggtttgagagaagaagcagtttcgattcacttcaaagggattcccaaagggatttggataattggggaaagaaaaaagaagagactggc

SEQ ID NO: 196345 - DNA, 664 bp, Gossypium hirsutum
cccacgcgtccgaaatcatccagactatcatgtgacagatcttatttgccttggatggtgttgattcaattggaattgtgcacagagatattaagccacaaaatattattttctctgaagggtctcgtacatttaaaatcattgatctaggagctgcagcagatttgagagtgggtatcaactacattccaaaggaatttcttttggatccaagatatgctgcaccagagcaatatatcatgagtacacaaactccttctgcaccttctgctccagtggcaactgctccgcccccgcgtccgggcagatgaatctgccggatcgatttgacatctacagtgctggtctcattttccttcaaatggcatttccatctttaaggacggacagcgcattgattcaattcaaccgtcagctaaagaggtgtgattacgacttggttgcatggaggaacaccgtcgagcctcgtgcaagccctgacctccgcaaggggtttgagctgctggatttagataatgggataggatgggaacttctgacatcaatggtccgctataaagcaagacaaagaatcaatggcaaagcagcactggcttacccttactgtgacagggaaaggctattagctttatccttcgtacaaaatctgaaagtgcaagtcttt

SEQ ID NO: 196346 - DNA, 441 bp, Gossypium hirsutum
  unsure (1)..(441): unsure at all n locations
cacgcgtncgaaaatttattaattttatgtcagcttggactgctaccccttattagttgttcggtggctaagtccccttattgtggctcccaattagcacttgaagatatggcgcttttatgctaaagattaaactttctgtatcttcgccgtatgaaattggtaatctggactttttctgtctgtaactgtggagtgtttatttcgattactttctcctgcagattcaagtgtgatcttgtcaattcatagacatatacgatcaaggccccctaattgttttggctttcaatataaagatgttcattatcttatcactctgaaatgcaggtaaatatgaagggggaaagcctgatgctatattttcgttcaggatgatgattttataaggttgccactggaaagatgaatccacagattgcttttatgaggggtgcgatg

SEQ ID NO: 196347 - DNA, 563 bp, Gossypium hirsutum
caaaagccaagagtgaagtcgaaatccttaaaaatcagttacaagcagttgtagcaactgatgatgcaactagaagaagcatagctgatccagcagttcagacatcttgctcggatcagtcattaaaaacaatgatggaaatttgtgtccgatgtctgctaaaggaccctgcagagagaccctctgttgaggacgtgatgtggaacttgcaatttgctgctcaagttcaggacgcatggcgtggagattcccggagcagttctcctggcggctctccttcccaacctgctatcctccccgttgccttccattagtgataactttcaggatatggcaacacaagtggaacccttggtttgtttgggaggatagagaagacaaagggttggaaaagcgtttaatctgatggttttgtataaaatatgaagtttcagaacttaaccattggaccaaaagtaattttactttgttttatttctattcttcttaccaagcaaagtctcgggaagtttaagcactctattctcttcatgtgagaatcaaaataatgtatagtttcttac

SEQ ID NO: 196348 - DNA, 559 bp, Gossypium hirsutum
cccacgcgtccgaaaagaaaatggggtttcgtgagttatgtgtggggttaatgatgatgatgattctcctgaaaccaattagcggcagagatgccgtcctagtacttaggagcaacgccacttaccagtgcaatggccttctcggcggctgcgttatccgggaagaattggagtcggagctggatttgttgatgatagattctaccgttatcagaatcctcaagcaaggtagcggtcacatatctatcaacacgtttataaagggtaagccagcagtaaatcaaaatgactgcggtcctagttatgggaattgtatttcaaaacccaagccaaatggacataattctaattgtaacggtaatagcccttattgtaaacaatgatgtttatcaacctatctatgacaataaacgccctattcattattcgaatcgtaaaggttgctacttttgtggactcttatctgtttctttgctttttgtaagtagcaatattttcttatttaaaaaatagtaattttttaatgttggaataaacatttccctccatttgattctct

SEQ ID NO: 196349 - DNA, 742 bp, Gossypium hirsutum
aatacttgcctaaactatatgatcctttcttgcatggaccctaccgcggaagaatcaaggaatggggttcccctttaagcataaatcaaacttataaaaaaaaaaacacggatccattttggataaataagattcatgctctacttcttactactgattatcacgaccttgaacagacactagatacactcaatataaaatcattagcaacagaaaaagaactctctttattgacattgacagaagatgaacagggaaatatcgattccgaggatcgagtcaaaattttgaaatttttattcaatatagttatagctaatcccaacaatcaaacaattagaaaaaaatctattggaataaaagaaataagtgaaaaagttcctcgatggtcatacaaattaatcgacgatttagaacaacaggagggagaaaacgaggaaaatgtaacagcagagcatgaaattcgttcaagaaaatccaagcgcgtcgtgatttttactaataaccaggcaaacgccgatacttatactaataccaaggatgctaatgatcctgatcaaacagacgaagtggctttgatacgctattcgcaacaatcggattttcggcgcgacataataaagggttccatgcgtgcccaaaggcgtaaaacaattacttgggagctgtttcaaacaaatgtacattccccccttttttttgacagagtttacaaaccactctttttttcttttaaatttct

SEQ ID NO: 196350 - DNA, 381 bp, Gossypium hirsutum
gtgatcacgtgatgaacagttatggatgccggggtggatatcatggcccatttagccacataaatctgttagtctctcaccatgtctatcatctctttctcaccttgagaaaatagctccttttggtttgtagtctgtactaacggaactagtgatctttcctattatcatctaaatttgtgctttttcttttctcttcttttctttttttctctcatggattgtcttttgaatttgtatattgatggccctttatgtgttctcacactttccttcagttactttgggtttagatatgtttgatctgttaactgaaacatggagaaattgtttcctattgtttcttgtgatgtaatctgatctagtatgttttaatgaact

SEQ ID NO: 196351 - DNA, 428 bp, Gossypium hirsutum
cccacgcgtccggaggaaactccctaaagagagttgaagctgtgactgagtgtagggtgtacggaagaggcaaaggttctgtcaaagattctgttaaggaagagaaactaaaagataaacctggattcgaacaccttaatgagccgttgcatgggttgtgtggaggctgaacttccccaagatgtgataaattctcgtttggactacgctgttgccatactagaaaatcttctgaaacctgtggatgaatccttggataactataagaaacaacaccttagggaggtggctttactcaatggtacattaagggaagagagtcccagaatgagcccgactatgagccctagtatgtcaccctttgaccggactggaatgaaacccgcccagacacgaagatgacccttattgtgacaagatgttgagtc

SEQ ID NO: 196352 - DNA, 801 bp, Gossypium hirsutum
gaaaacccgggccgacgccacgcgtccgcccacgcgtccgcccacacgtccggtttttgtaggaaatttgcctattaaagcgaagcgtagagtcttgttgaaggagttcactaagtttggagagattgagtctgttagaattcgatctgttcctctaaatgatactaagaagccgagaaaaggagctataatgttaaagcaaattaatgagaatgctgatagcgttcatgcgtacattgttttcaaaactgagcaatctgctgaggcatctttagccaataacatggctgtgattgcagagaatcacattcgtgttgatagggcgtgcccgccgaggaaaaagttgaaagcagagaatgctcctctctatgataacacgaggactgtttttgttggtaatctcccatttgacgtgaaggatgaagaaatttatcagcttttttgtggtatcaataatctggggtctagcattgaagctgttcgggttattagagatcctcaatttggtgttggcaagggtattgcttatgtcttgttcaaaacaagggaagcggcaaatgtggttgttaaaaagcgaacactgaagcttagggatagagagctaaggctttctcatgccaaatctgatgctacctcatctaagagaaagaacaatcatcttcagggacagaatataccccaccaaaaaatttgccattgattcaaggactccctcaactacctgcaacaaatcaaaatacaaaacttctttggtcttaccaaggcttgcgtgctaataaatcaagtttggataagaaagtg

SEQ ID NO: 196353 - DNA, 922 bp, Gossypium hirsutum
cccacgcgtccggcttcgggcttttataatatcgtgtatcgtcacggtgaaatctccgcccttcaagtcttcacagctaaaagatgccggccggagaactccggtatccttcttcgatctcttgtccacagatttctcaagcaacggaaacccccatggaggaagacgaggcgtgggtgtgggcgcagattaaagccgaggcacgccgcgacgccgagttggagccggctctagctagctacctctactccacgatcctatctcactcctctctcgagcgctccctcgccttccacctcggcaacaagctctgctcctccacgctcctctctacgcttctctacgaccttttcctcaacactttctcttccgatccttcgcttcgagccgccgccgtcgccgatctccgtgcggctcgcgttcgggatcccgcttgcgtttccttctctcattgcctacttaattataaaggattcttggcatgccaggctcatcgagttgcacacaagttgtggactcagtcacgtaggccgctagcattggcattacattctcgaatctccgatgttttcgccgttgatatacatccggcagcaaagatcgggaaagggatcttgttagatcatgccaccggtgtggtgatcggagaaaccgcggttgttggcaacaatgtgtcaattttgcatcacgttaccctcggtgggaccgggaaggcatgtggagatcggcatccgaagattggtgatggagttttaatcggagccggtgcaaccatattagggaatgtgaagattggggaaggagcaaagatcggggcagggtcagtagtgctgatcgatgtgccacctcggaccacagacagcaggtggaagagcctgcattaaggaaccaatgcatggtcgtggtccgaggggaaacaaga

SEQ ID NO: 196354 - DNA, 433 bp, Gossypium hirsutum
attctcgaatctccgatgttttcgccgttgatatacatccggcagcaaagatcgggaaaggcgtcttggtagatcatgccaccggtgtggtgatcggagaaaccgcggttgttggcaacaacgtgtcaattttgcatcacggtaccctcggtgggactgggaaggcatgtggagatcggcatccgaagattggtgatggagtcttaatcggagccggtgcaaccatattagggaatgtgaagattggggaaggagcaaaaatcggggcagggtcagtagggctgatcgatgtgccacctcggaccacggctggaggcaaccctgcaaggctcggcggagggaaggagaaaaccgtcaaagcatgaggaatgccccggagagtccatggatcacactttattcatctctgaatggtcagattatatcatttgat

SEQ ID NO: 196355 - DNA, 524 bp, Gossypium hirsutum
ctcatattgcccaaaatgccccacttttaaaggcaacattaacaaggggtgacctgttcaaacacccaggcaagccactgtacaaagtctatgttttgaatcattaaaatattctgaagtgataatgctgtccatgcttctactataacaggacattctcggaataaatggtccattgtttcagctctttctctacgttgggggcagcttttgttggttgctaacttcctatactgcatatttacttttgtaggcaaataattccatgagagtcttcagattgtaatctttatttttgttggtagatttaggctccaaatttttttgtaaaatttcctgtagatggtttgtaaagcataaactctaggatttgcatcagaactctgtaatagtttataggcactttggaccgagaattcacccgacgattctcctcccagatgaagaagtcctcgtgaggtgtttgtgtcaaggggatccgaaggattcttccagcgtcttcttctgtgaaagtattatttaac

SEQ ID NO: 196356 - DNA, 767 bp, Gossypium hirsutum
attctgtcaaaaatgaggcgaaattcgacgtatagcaagagaaaacaaccctagcccgaatcaccatattcctgagacatgagggctttcatcggtgttgtttcaagtatccttttcgttttctatgctaaaataatgcaagcaaatcgatggaaaagagggaaagatttgaaatcacatttagataacttttttgatttcttttctactgtttagaatatgtattgtagtgtgcgtatctcatccccaaaaaaaagagagactttacaatcgaaatacacagggctttatagccaaaatcccaaaaagatcaaaacataaaaaataaaaaatacaacttttctttgtttttctatttgctactgctgtggtttgtctgttcttcgcaggtacggggtgcgttggcatcgtacggaggctgtgctggcgcgggcgtggctgctggagggtacggaggcggtactgaagctggggctgctgcggcgcaaacagattgctagggttctgccctatttttgaatcttgggccacttgggctgatataatttggactagttttattagttttgggctatgggtcatgtaactgggctatggggtattgggtttgtgacttgggtcttggattttaattctgggtttaaggtcatgtattaattctaggttttggactgcaatgatttgggttgtaaaaagacactaaaatgggttgtttgtgtttaaaccttctgttcattgaattaatttatattttggtttgggctttt

SEQ ID NO: 196357 - DNA, 463 bp, Gossypium hirsutum
attgaggctaactgaactaaattattggcctccacaagacagggatgtcaaccacaggagtctctcactccctgctgctggattgctggccgaatgtcttgagcttaggaagttatgtatccatgggacggctcatgaacacttcatgatgttccttcttaaaatacctaacctcagagacgtacagctgagagaggactactatccggcaccagagaatgatatgagtactgaaatgagagcaggctcatgtagtcgctttgaagctgctctaaataggcgacacatcctcgattgaaatgatttactggtgtggagcctagccctgattagattatacacgggaagaacaggaggggtttcaagtacgaaattttcttttttcccttttctagaaaagaaactgtaaaagttcatccaaggtctgcgtttctttatatacatgcaattccctccccaactt

SEQ ID NO: 196358 - DNA, 432 bp, Gossypium hirsutum
  unsure (1)..(432): unsure at all n locations
cccacgcgtccggaggggcataaaagaattcttgcggccacagatttggttggaaggggaatcgacattgaacgaggttgctttgtcatcaactatgacatgcctgattctgctgatacatacctgcacagggttggcagagctggtccgtttggcaccaacggtcttgcaattacgtttgtttcttccgcttcagattcatgatgtgctcaaccaggtccaagagaggtttgaggtggatataaaggagcttcctgagcagattgatacatctacgtacatgccatcataaatgaaggttcattcaacaataccagtctcgggccccaaatcatgaatcggntagtgtggttgcggatgtgtatctgtttgtaaactaatgtgtaacgccttttaaatcacatgcttgggagggagcggcagatgcactat

SEQ ID NO: 196359 - DNA, 523 bp, Gossypium hirsutum
tcctcgcgttcgcccacgcgtccgcgccatagcaagcgcacgcgccgctgaactttatggacttcaaatcctagccgatggtatccaagacgattcgagtaatgtgacgcgcttcgttatgttagctcgggagccaatcatcccgcgcacggaccggccattcaaaacgagcatcgtattcgcgcacgataaagggacgagcgtgcttttcaaagtactatcagcgtttgcgtttaggaatatcagtttgacgaaaatcgaatcccggccacaccgcaataggccgatccggttggtagatgacgccaacgttggaaccgccaagcatttcgagtatatgttctacgtggatttcgaagcgtcgatggcagaggttagagcccaaaacgcgttggctgaggtccaggagttcacttctttcttgagggtattgggcagttacccaatggatatgacgccttggtgcccttccagcggagattaacaaaacctatgaaagttaaaaaaaaaaaaagaaaaagga

SEQ ID NO: 196360 - DNA, 594 bp, Gossypium hirsutum
attctcaactgcaacagttacaacagcattatacatcaaatgtaactgcaacagtggttggagctcctaaaaaaagtcagtaaccgtaaggtagccgacctaccagaaaaaggagacaggctgaactataaactcttgcaagcaacatgactatcctaaacaacgagcgttaaacttatttatcaaggataggggacctgaacgaaggataatttgaacaccctgacgcaagagaaggacatttacgctgatctactttgttgatagcagcatatgcagttaagatttgaaactgacgacaaagcaaggagacttctaagtaatgtgtcattgttgttgaaaccaaggggctatttgttcggtattactcctgaaaaagtgattgccaaaaactgctgtttctggatttgtgtattttcctttttttttgttcttgtggttattgctgcccctgtttctgggaggtgattgtgtaaacattttagtgtgctttagttattgtaagaatatttttaacattgttaattttaatattattgtaagaatattttgaattataattcagttatcaatttatatcatttatctttcatt

SEQ ID NO: 196361 - DNA, 772 bp, Gossypium hirsutum
cccacgcgtccgatcaaatcaaaacagaacttccaaagctttcagacaagactagtgattcgtgttcaaagaaccaaacaagccaagtacatggttgatttggacgttcagatccctacaactttcgatccattcgccgaggctggggaatttgatggcactggaaccaaggagtatgttcatatacggattcaacaaaggaacgggaagaaaagcttgacgacggttcaaggcctgaggcatgacctgagctacgagaaaatcctcaagagtctcaagaaggacttttgttgcaacggcaacgttgttaaagacaaagagctcggcaagatcattcaactccaaggcgatcaacgcaagaacgtgtcgcagttcctcgttaatgccggcatcgtcaagaaagaccaaatcaagattcatggtttttaaggataacccaagttgctatttatgaaaaaaaaaatcagcactgttccttttttagcttaaaataaaacactagtgctgctggctctctaatttatacacccttggggggttttaactggcatgggatatgggatttcctttatgaaaaatggggtttttatttgctctacaaaaaataaagatgagtcaaaaaaaaaacaaaaaaaaaaaaaaaaaaaaaaaaaaaaaaaaaaaaaaaaaaaaaaaaaaaaaaaaaaaaaaaaaaaaaataaaaaaaaaaaaggggcggccctttaaaagaatcaaagtttacttccccgtgcttgcaacgaaaaattttttt

SEQ ID NO: 196362 - DNA, 361 bp, Gossypium hirsutum
tcctacgcgtccgcccacgcgtccgagctaatgaaactctcctctatgcgtcagatgctgttgagaaattcagtaacagatattgcagtggagcattttctttggactagttaaaaagtgtcgaggcacccccactcgttcggcaataatgaaatatttatgtgctgtataaacgtttttttcactagctttggcaaccctagcagatgttacaaggtttgctcagttttcactactgatttttgtggcaaaaaatacaaaaataaagctaatcatctatcagttgcatgcaaaaaatgcaattggtgagttgaaccatgtaatgcacggcggtttattgatttatttatttttctggagt

SEQ ID NO: 196363 - DNA, 453 bp, Gossypium hirsutum
ggcggggcgagcgacccgttcgttggtgggtttttattagggcttcaactcacctccacagcattttggggcacggggatacccaaattgctaccattcacaaacgggagtttcgctggaccctcagcagcaaaaccctagggatgggtccctgagtgggtctcaaggccagccaccatcaaagcagacccagcaggtatggcaaaacaattactaatctcgtctcctcctggtttttcaggggcttatagtgagtttgaaagtggccaatcaaagggccttctagcgactgagaataactatacctgcagataatcaacaatgatgggtctgaagagactttggctggctactgccctgtgccatgagggtgtattctacttttaatttattgttctggtctggtctgttacgttaacttacgaacacagtgtgctaatttgggatagtgga

SEQ ID NO: 196364 - DNA, 527 bp, Gossypium hirsutum
tgaaattcaaaaaatacccccagattttgattttggggattattatcaacaaagttcaattcaaaatcaaaacagcttctttcagatcctcacttcactcccccccccccacaaatcaatcagataatccttagaatgcagaacagtgaaggcagctgtttgtcttacatggcggcgtggttgggaagcagcgtggcccaagctttcttcgcgtctctcgagcgttgctcttgcattaacctttccacctccgatgatgccgatgattccgaggctcatgatctccctctcatgttcactaatcgttcctccatctctccatcatcagtcacctctatccctaacaacaacaacaacactccttcaaacgacgtcgttaatctccctgtttaggtcatggatcgcgtattgtttctagggtttcgaatcttttgtctatagttctttttagtactttgaatcttgatgtaagcttttttcttgttgtttgactcttttttttcttagtttggatgtctatgaaattc

SEQ ID NO: 196365 - DNA, 414 bp, Gossypium hirsutum
catttcctctcattcagccaaatctaaaccccagtccctttgtttctccctcaaccgttcccaaaattccttcattcaaactccaatcaacctccatgaacagcgatccgttcattcaagccttgaagggtgttttttagcctcaagatccccttaaacttcgacttcgacgaagcaagagtgcaccgatggtcaaatcataaggtatcgtcccctttctccttcttttcaccttggctgactaattcccttttgcctaaactccaatcggctaccacagtagcatattcaagccttgatggttgttttttagccttaagatcccctcttagcttcgattttaacaaagcaaaagggaactcatggcattctcgtaaggtgtgcatggcgtggagaggaggctatgcacgcatg

SEQ ID NO: 196366 - DNA, 489 bp, Gossypium hirsutum
agctcctccaccacttcctgatgagccagagccaaaaagacagaaacttgatgatgccaagcttgttccagaagatcagttttttgctcaacatccgggtcctgcttgcattactgtgtctgttcccaaccttgatgaagggaatctcaaaggacaacttcttgagatcacagtgcaggccttatctgaaacagttggcagtttgaaggagaaaattgcaggggagattcagcttcctgcaaataagcagaaattgagtggaaaagctgggtttctgaaggacaatatgacccttgcatattacaatgttggagcaggagaaacgcttgctctttcattgagggaacgtggtgggaggaagaggtgatgagttttttgaacgaggctatccaagcttccagtgggaacttaaaaattatcacattttcacttcagaacagccatttgtttggagtcatggtcaaggatgttatgtgaaacctgataagc

SEQ ID NO: 196367 - DNA, 431 bp, Gossypium hirsutum
gaaaatgagtggtataaagaacctgtttcttcgactcgcttgtgaccccctgggggcggcacgaaccttcgagtgagtcatccattcctggttgaagaagaaggatggaactggttttgcttgtatgatttacttattatatctggatgacatcagtttgtgtttgtaaatgccatcactatatgcaaagctttggggattgcaaaatgtgaggaaaagctttatattacccaatattttcctaaaaaaataagctcccactttatttgttccccagttacctaaggtttttttcttgttctttagatgcttggttttggttactaattgttctatcaatagcagttctggaaaatattggtctctataagactacctttgagaacaacatcaagttgggaacaattacttttgagaacaatgcttgaacg

SEQ ID NO: 196368 - DNA, 618 bp, Gossypium hirsutum
cccacgcgtccgatctttacaggggtactgatacattgctgcagttggcgttttggcatttttcaaatatgggacattgcttctctaaggataaatctgacggatctgattcagaacaggctgttgagtttgttggtggaaatgtgcaccgggttacctctaaggaggattgggatcagaagttgtctgaagcgaagagagatggcaagattgttattgcaaacttcagtgcgacatggtgtgggccttgtagaatgcttgcaccattttattgtgaactctcagagaagcacccttctctaatgttcttgttgatagatgttgatgaactaactgatttcagcacctcatgggatattaaagccactcctacatttttctttcttaaagatgggcagcaaatagacaagcttgttggagcaaacaagccagagttgcagaagaagcttactgctgttttagattcggtggggaatcatgggaaatgacatttgtgaggtttccagtttcaaagacttggcagtatcttcttttctgtctctgtttgtgttgtcgtgagctttggttgaatgtggtgtatttgtaaactgttgtttgttatataagtgtaatatttgc

SEQ ID NO: 196369 - DNA, 647 bp, Gossypium hirsutum
gcatctttgaaatttacagtgttgaaccctaagggacgcatttggacaatggttgctggaggaggtgcaagtgtcatctatgccgatacggttggagatctcggattcgcttctgagcttggaaactacgctgaatacagtggagcacccaacgaggtggaagtgttgcagtatgccagagtcgtgattgattgtgccactgctgaacctgatggtcgtgaaagagcccttgtaattggtggaggaatagccaactttactgatgtgggtgccacgtttaatggcataattcgagccttgaaggagaaagaatcaaagctcaaagcagccaacatgcacatatatgtaaggagaggaggtcccaattaccagaaggggcttgcaaaaatgcgggcacttggagaggaaattggcatcccaattgaggtttatggtcctgaagctacaatgtcgggtatatgccaggaggccatccagtacatcactgcagctgcataagttgtgggttcttcaatacaatctctcagtttgttttaccttttttttttttgttcccggtgggacatgttcattagatttccattgaaattgtgctacaaacttcataaaataatgtttagttcatggtacggcaccatctgtaattt

SEQ ID NO: 196370 - DNA, 591 bp, Gossypium hirsutum
cccacgcgtccggtcaaaccatcatctctaccagatagctggaagctgggggggattttcactactggaattgctcttggtagttacttggcagtaatgacggctatattcttttgggctgcatacaagaccaactttttcccgcgtgtatttggggtggcaactcttgagaaaacagctcatgatgacatcaaaaagcttgcctcagctgtatatttgcaagtgagcattataagtcaggccctaatatttgtaactcgatctagaagttggtcctttgttgagcgtccgggtttactactattggcggcctttgtcatagctcagttgattgctactcttattgctgtgtatgccaattggagctttgctgcaattgaagggatcggatggggttgggctggtgtgatctggctttataatattatcttctatatcccacttgatttcatcaagttcttcattcgctatgctttgagtggccgggcgtgggatcttgttattgagcaaaggattgctttcacaaggcaaaaggatttcggaaaagagcaacgtgagcttcaatgggcgcatgcacagagaacattgcat

SEQ ID NO: 196371 - DNA, 517 bp, Gossypium hirsutum
gggatgaacaacatgggcatgaatttaggcatggggatggatatgggaatgggagaaagaccccaaatgcaaggaatgcccggcggttataaccctatgacgggttctggcagctattctcaacagccatatggtggtggttatcgatgagaatgggttcctatcccggagaagaggagtaaggaaattacatacaagcttgtgatatgagagagtaaaaaagagatgggaaaatagctaaaacattagacgttgggaatggaatcccaaagtagaagcagtagagtcgcacatttgtgttggcagatgagaacccatgttttttattcatattattgtcattcttggttaagctattgccagtgtttgggccataatcactccttccattgattactggtttgagctgttgtgaaattgtgtggatgaaatggtatgatgaagcttcataaattctgtaataagctccaatatcttatttttaatttttttaaataaattctgcaataaaaattta

SEQ ID NO: 196372 - DNA, 312 bp, Gossypium hirsutum
gccaactctccgtttttgaaggggacacttttcatcatgtgggctgatttaacattgcttggactataacctcacggtctccatggaactgctcacatattcaaggatactctgccatggtttccccagaaacttgtgaacctctcaaggaaagtatctaccccaaccattcttcagattgttaccatctatccaatcatttgcggagttcaggtaatcaaaacaaaggttcttggttacattcttggtaaatagtgggtaacatataattcgttttaccctgaaatccaccctttgtcatgattttttttt

SEQ ID NO: 196373 - DNA, 481 bp, Gossypium hirsutum
  unsure (1)..(481): unsure at all n locations
cggcacnaattcaagatcttcttgcagccattattggcagnctgatgcatgctgacgtaaaantctgcaatgagctgagcggatctcagtcatactccaaaacatgacttcacttctctcctccttcatcgtcgccttcattggagaggggagggtctctcttctcatcctcggtaccttccctcttctagtccttgcaaactttgctcagcaactctctctcaaagggtttgctggtgacactgcgaaagcacatgcgaagactagcatgattgctggcgaaggtgtaagtaatatcagaacagttgcagccttcaacgcacaaaacaagatcctttcgctattttgtcatgagctccgagttccacagatgcaaagccttcgtcgcagccaagtttctggcctcctctttggcctatctcaacttgctctttacgcgtcggaagctctgatactttggtatggtgcgcaccttgtaaac

SEQ ID NO: 196374 - DNA, 433 bp, Gossypium hirsutum
  unsure (1)..(433): unsure at all n locations
ccacgcgtccggccttctttgctcttagatgctcgaatatgttatcttggcatgccaattgtaccagcagtgactgaacttattgttgctcaattaatgtggttagattatgataacccttcaaagcctatttacttatacatcaattcatctgggacacagaatgagaagatggagactgttggatcagaaaccgaggcatatgctatagctgacaccatggcttactgcaaatcagaaatgtacactgtgaattgtggcatggcatatggtcaagcagcaatgcttttatctcaaggagctaaaggttatcgtgcagtacagccaaattcatccactaagttatatctgcctaaagtcagcagatcaagtggggctgtcatagatatgtggataaaggccaaggaacttgatgcanaanncgagtcctaca

SEQ ID NO: 196375 - DNA, 765 bp, Gossypium hirsutum
cccacgcgtccggcaaaagggagtgctgtaggaggcctaataggagtgatgcacatttatcagtggaagaagaggccaaattggaggagcagaccagggattactttgaccacacagcacctaaacgtcacactaagcctcaacgaagcgactattcttctaactacgtcgacgctcttgccgccgctgattccggtatccctgaatacctcgagtttcaacgtctagagaatgatccccagaaaatagtttacaatggaagtgaagtgagagaagaatttatggagactgaatattataaggatctcaattgcgtcgacaaacaccaccacacgacaggaacaggtttcataaaggtagagaacgacaatggcagaaactttaagttggaaccagattcagacaccagctgccatgcctttttgtagggaaatccagcaactaacgactggattccagctgctttggatgcggcttatgttgcttcagacaagcccaacagaatgatcaatgaatttaatgaaccagcgtggttttcaattgtctttcttttatctcctgtaatgtgtttctagaatatgatgttgaaaataatttaagaacccattttcaagggatgggatcttaactagaagtggtgttataaaaaaatatactatattattaatacaaaaaacttcagggggcgcggaccaatattcctttaggagggttacattcattggcgggtttcacgaggattggaaaaactggtcccatttaacg

SEQ ID NO: 196376 - DNA, 572 bp, Gossypium hirsutum
cggacgcgtgggtttgagtgtcagcacgttagcgggcacccctggctacgttgcttctgaatactaccagagcttgcgatgttccaccaagggcgatgtttacagttacggtgtggttttactcgagctactaacgggaaaacggcctacggattcagccgattttggcgataacaatcttgttggatgggtgaaacagcatgctaaactcaaaataagtgatgtcttcgatccagagttgatggaagaagaccccatgctcgagatcgagcttttacaacacttaaaggtagcttgtgcttgcttggatgatcgacattggagacgacccacaatggttcaagtgatggcaatgttcaaggagatacaagcagggtcggggctcgactcgcaatcgaccattgccaccgatgaccgaggttttaactcggtcgaaatggtagacatgacaataaaagaagtcccagaaggtaagcagtagatgaaaaccaaaaaaacttcagaagagaacattcttttgcaggtgaagaagaaagaagcaggtggtgatgatgaattcccacagaattttc

SEQ ID NO: 196377 - DNA, 1238 bp, Gossypium hirsutum
ttttccacgcgtccggatcatctttcagctaagctttcaatctagctttagttatagaaaaaaacagtggaattaagggtatggcatttgagaaagatctcaaccttgatgccaccgagctccggctaggcttaccgggaacctccgacgagtcagctaagaaccaaacgccggcaactcttcggagcaacaacaaaagagccttgcctgaagaatctatgtctagtaatgccacagcttccaaaaactgtgaccaagaaactgctccactccccaaggcacaagtgatagggtggccaccgatcagatcttacagaaaaaacaacttgcaacctaagaaaagtgagggtgaaattagtgggatatatgtgaaagtgagcatggacggggctccttatcttagaaagatagatttgaaggtgtttaaagggtacccagaattgcttaaggccttggaagagatgtttaagttcaaagctggtgaatattcagagagggaaggatataatggatcagaatttgtacccacttatgaagataaagatggtgattggatgttggtcggagatgtaccatgggagatgttcaccaattcttgcaaaaagctgaagatcatgaaaggatcagaagcaagaggcttgggttgtgtttgaaaaaaaatagcccttcagcttagggtatacaaagaagaaattacgatcccatttttttttcttctttgttgattaagcaacaaagaagattaatcttaggatgttgtccaaggcataacccaaaaaatatatattttcatgtatagttttggcatgtttctaatttccttgtggaatttgtacaaaggaaaacatattaagttcataacatgggtttcctttttttctttttcatgtatattataaatcaaatccttcttttgactatggtctttatttacattatccatcactcttgaaagaggaaaaaagaatgatggaatctgtggatttcaaagttaatatatataatgatgaaagatgttttcaaaaagagagaggtaaggaagaaaatggatttaaagtaattcttaactttcagtaggtctaacatataggaaatgatatgataatttgttcatgaaaaaaaatatttgtggctcctattgtgtgatataattcgcacgatgaaaaagttacatgtttgttgaggtcagttgttgtgagacggtcatgcttgttgagtatttataggttttatgacat

SEQ ID NO: 196378 - DNA, 1207 bp, Gossypium hirsutum
gttgaggaagaagaaagaacccagccaggaacgaacctctctttcttttctgacagacttgctgctaaattcgcatcatgtcttggtgcacaattgaatccgatccaggtgtttttacggaacttatacagcagatgcaagttaaaggcgtacaagtagaggaattgtattcattggatctcgattctctaaacaatcttaggcctgtgtatgggttgattttccttttcaaatggcacccaggggagaaggatgaacgtcttgtaatcaaggacccgaaccctgatctgttctttgctagtcaggtcatcaataatgcttgtgctacacaagctatattgtctattctcttgaactgccctgatattgacattggcccagaactatcaaagttgaaagaattcactaaaaacttccctccagagctcaagggtctagctataaataacagtgaagctatacgtacagcccataatagttttgcaaggcctgagccatttgttccagaggagcagaaagctgctgggaaagatgacgatgtctaccatttcataagctacataccagttgatggagtactttacgaacttgatggactgaaggagggacccattagccttggtcaatgccctgctagtccaggtgacatggaatggttgaagttggtgcaaccagtaatccaagaacgaattgagagatactcccaaagtgaaataagatttaacctcatggcagttatcaagaacaggaaagagttgtacaccgctgaacttaaggagctccaaaagaagagggaacgcatcttgcagcagttggctaccatacagtctgaaagacccacagacaaaaccagttttgaagcactaaacaagcaactttcagaagttaattcagggattgagggtgccactgagaaaattttgatggaggaggagaaattcaagaagtggagaaccgaaaacattcgaaggaaacacaactacatacccttcttgttcaacttccttaaaattcttgctgaaaagaagcaactgaaaccccttattgagaaagctaagcagaagaatagcagctctaggtgaagtgtatcttgttttgtttttattttcttgggttgacaagatgcttaatgcaaattcaaagaaaactggagtcacgtaaaggacccttttatgataaaatcaactctgctgttttcaaatgactt

SEQ ID NO: 196379 - DNA, 568 bp, Gossypium hirsutum
gtcagattgtttaaagtacgagtcttacttcagtcaaccggagttaattgaatttccgacagtggttcctggtcaaaatgcctatgcttactattatccgccaactaatccgctttatcaagctagcctccgagaaaagccaccattgctgttgaaaagtcacggaggacctactgctgaaactcgtggaattttgaatctaagcatccagtactgggactagcccagggtgggcatttggggatggtaactatggtggaagcacaggttaccgaagagaatttcgtgaacgacttttggaccgttggggaattgttgatgttgatgactgttgtagctgtgctaaatttttgttggagaacgggaaggcagataaggaacgactttgtataacaggaggctctgccggtgggtacacaaccttagcagctcttgcttttagagatacattcaaggctggagcttccctctatggggtagctgacttaaacttgttgaaggccgagacacataaattcgaatcccgttatcttgataaactcgttggagatgataaggctttcttcct

SEQ ID NO: 196380 - DNA, 440 bp, Gossypium hirsutum
ccggagttctcgtttgtagcgtctgcttcatctttgcttgagaaaatagtaaggtttcatatactacctcgaaagctcacctacatggaacttgcttctttacctgcaaatgcaacattatgtactttagctccggaccatgatctcgagatatccaaggccgtaaatattacacaagaattgatgattaaccaagttaagattgttgcaccaaatatgtttgaatccaagaagtttgtgatccatggaatatcacaagcattcaaattgggtgagcttcctaacaccttccagatgaatgcatttttatagtaaagaaggattcaatagcttggagaatttcattagaggcatgtatatttgacctcttacttgtttgtataatttttggtatttgagagcctgccagagctcaatatacaatgagtaagatcttgaat

SEQ ID NO: 196381 - DNA, 1518 bp, Gossypium hirsutum
  unsure (1)..(1518): unsure at all n locations
aaaaaacagaatctgaaaccccccccctgattatttgatcactctctaaaaccccagccaaacgagtctttccaaacccaatggattctgtgtttgcctccattgttcaagctcctgaagatcccattcttggggtgacagttgcttataacaaggatccaagcccaaacaagttgaatttaggtgttggtgcttacagaactgaggaaggaaaacctctagttctaaatgttgttcgaaaagcagaacagcttcttgttaatgacctgtcgagagtcaaggagtatcttcctattcttggtctcgcagagttcaataaattgagtgctaagctcattcttggtgatgacagtcctgctattcaagagaacagagtggctactgctcagtgcttgtctggtactggttccttgagggttggagctgagtttttagcaaagcattaccaccaacgtactatatacattccacagccatcatggggaaaccatgtgaaagttttcacgatggcagggttgtcggtgaaagaattaccgctactatgatccaacaactcgtgggcttaatttccaaggtttgctagaagatcttggcgcagcaccagctggagctatagtgcttcttcatgcctgtgctcataatccaactggtgtctgatccaactggttgagcaatgggaacagatcagacagtcgatgagatctaaagggttattgcctttctttgacagtgcttaccagggatttgcaagtggtagcttagatgcagatgcacaacctgttcgcatgtttgttgcagatggcggggaatgctttatagctcaaagttatgcaaaaaacatgggactttatggggagcgtgttggtgctctcagcattgtctgtaaggcggctgatgttgcaagcagggttgagagccagttgaagcttctgattaggcctatgtattccaatccaccaattcatggtgcctcaattgcaatgactatcctcaaaaatagtgatatgtataacgagtggaagattgaactgaaagctatggcagaccgaattattagcatgcggaaacaactatttgatgctttaagtgctaaaggtactccaggtgactggagtcacattataaagcagattgggatgtttactttcacaggattggacagtgatcaagttgctttcatggtcaaggggtaccacatctacatgacatctgatgggaggattagtatggcaggtcttagctccaagactgtgcctcatcttgctgatgctatacatgctgcagtgacccgtggctgttagaaagcaaattttaaagttctgtagcaagtactttttgggttttagccccatccatgtcatgactgttttcttcttaacttttcaagcacatattatnttccataataactgttgggtctggattggaaccaaatntttgatatntcgaatttcatgttaaacagtacatgtccttttaaacttcatcgtanatggcatgcttgctattggtatcaat

SEQ ID NO: 196382 - DNA, 1089 bp, Gossypium hirsutum
ctcatggcaaaactgttactcaggttaccctagcacatttgaaggagaagccagctccatcaactccgacgtcttcatcgtccagctacagtgccagcagtggggtcagatcagcagcagcaaggtggctaggtgctgggaacgggagccgcacgcttggatttgctggggggaatggtgggagtaaaagtattggtagtactagtaggattgggtcattgggtgcttcaagttctagtaattcgatcactaatatgaattttgatgggaaagggacttatttaatctttaacgttggtgatgctatctttataagtgatttgaattctcaggacaaggatccaataaagtctatcaatttcagtaattcgaaccctatctgccacgcatttgatcaagatgccaaagatggccatgatttgcttatcggggtgaattctggtgatgtttactctgtgtcactgagacagcagttacaggatgttggaaagaagcttgttggggcgcagcattacaataaagatggttctgtcaataacagtcgctgtactggtattgcatgggttcccggaagtgatggtgtttttatggtggctcatgctgatggaaacatgtacgtgtatgaaaagaacaaggaaggagctggtgattcttcattccctgttgtgaaagaccaaactcaattttcagtttcacatgcacgttacagtaagagtaacccaatagcaagatggcatgtttgtcaaggttcaattaatagcattgctttctcccatgatggggcatacttagcaactgttggaagagatggctatctgcgagtttttgactattctaaagaacagctcgtatgtggtggcaaaagctattatggtgctctactatgttgcgcttggagtatggatgggaaatatattctgaccggaggtgaagatgacttggttcaagtttggagtatggaagatcgaaaggctgtggcatggggtgaggggcacaactcatgggttagtggagtggcatttgattcgtattggtcatcacctaattctgatggcacaagggagactgtgatgtaccggtttggttctg

SEQ ID NO: 196383 - DNA, 645 bp, Gossypium hirsutum
cccacgcgtccgtatatctaccaaagtttaaactccaaacagcaaagaatcagagtagaaaaaaaaagccaaaggaagatgaagaggtggttcgatccatggcccgtgttcttcaagagagagttcaatcgcacttggcctttcctcgttggtttcgccgtcaccgggaccatcatcacaaagttctcccttggtctaaccgaggaagatgctaagaactctccctttgctcagaagcacaagaggtgatccaactgatttcaaaagcctatatggttgcagtcccttggtatgagaggctcagttgttttcctttttccttttcccaatgaacaatgaaaataacagaagacatcagttctgagtacactttattttgtgaattatgattttgtcatcaattaatgattttgctttgaataaggttaaaacacccttccagttagtgattatgtttgacgcccttgattctgggtttatgatattgagaatcaaaacatgacagtttgtgccattggttgccaattattagttaatgaacttaatgatggttaaggatgaaaaaaaaaggataacatcgcaaatgaagggcgaaaagcctgagtccgtataaaaaaaaaaaaacccaacgggggggcctcttta

SEQ ID NO: 196384 - DNA, 1121 bp, Gossypium hirsutum
caaaaacctgggttcagaccaatacaagttcttgcttcggacaatggttaatgctggcatcggtgaagaaacttacggcccaagaaacgtcattgatggcactgaagaaaccccgaatcttcctggttcgctttcggaggtcgacgatatcgtcttcggaaccctcgataaactctttgataacaacggagtttccccttcggaaatcgatatcctcgtgatcactatctcgatgattacttcggttccgtcgttgccggctcgggttattaaccgatacaagatgagggatgatgttaaagtgtttaatctctcgggaatggggtgcagtgctagtgttattgcggtcgacctcgtacatcatttgttcaaaacgtatacgaactcatttgcagtgattgttagctcggaatctttgattccgaattggtatcgcggcaacgaaagatcgatgatgcttcccaatattttgttcagattgggagggtgttcgttgttgttgacgaataaaagctcgatgaaacataaatctttgatgaaattaaagctttctgttcgtttccatggtggagcaagcgacgaagcttatcaaagttgcaccagggtcgaagattcccaaggctactgcggtttttcactttcgaaaagcctgccacaagccgctgcgaaagccgtaacaatgaatttccgagtcttactcccgaagacgctaccgttacgcgaacttgttcggtacgcgacggtttcgttcttacactcgaaaacgaataacaacaagggcaaaactccaagcttgaatatgaaatctgggtttcaacatttctgtattcatcctggtggaagggcagtgattgatgcaatgggacgaagtctagggctaaacgaatacgacctcgaaccgactcggatggcacttcatcggttcgggaacacgtccgcggccggaatatggtatgttttaagttacatggaagctaagaagaggcttaagaaaggtgataggatattgatgatcagtcttggagcaggttttaaatgtaataattgtgtatgggaagtcatgaaggacgccacggatgacgttaacgtgtggaaagattgtatcggtcgatatcctgtga

SEQ ID NO: 196385 - DNA, 721 bp, Gossypium hirsutum
gatttttacagagagagagggggaagaatggtcaaacattaccggtggcgcggggcaatggttgatattccccccctctctctctctttaaagctctcttcatctctctcccttatttctctctctttttgtctttgaatttgtgttgaaaggttcttttggtcgtagaacttttttgggtttttgtttgtaattcgtttgattaccaaaagaaactgatttttttttcttttttgggttattttgtggatttctgggttttctttctcaagtttgctcgagagataaatggcacaacgttctcgtgtacccaagtttggcaattgggagagtgaaggtaatgttccttacacagcttatttcgataaggcacgtcagggtcgcaatggaggaaagattgtgaacccaaacgatccccaagagagtccggaattacatcaagattacggagctccgactagagctccccctgcttcacgaccaaaaccagaatcggatgaaccaataggacatggacctgcaagaaggggacacgaacgaggaaggagcagggaagaaggtgacctcaggcaatatgctaactctccagcacgtaacgagaatgtcaaccgcagagctgctggagactctacaccttctcgttatggtcgtggagtaagttctggtgaatcccagaaacgttccatgagaacaagtattggatctgaaaacagcatagata

SEQ ID NO: 196386 - DNA, 552 bp, Gossypium hirsutum
taatgatctcacgaagctggttcagcactgcaggaaacttcagcgtctctggatactggattgtattggagacaagggactcggagttgtggcttcgacttgtaaagaattgcaggaattgagggttttcccatcggatccatttgatgccggaaatgctgcagtgacagaggaaggtttggtccttatatcatcaggatgtcctaagctcaactcattgctgtatttctgtcatcagatgacgaatgctgccctcatcactgtagccaagaattgcacaaattttatccgtttcaggttgtgcatccttgaccccgtaaaagctgaccctgtaaccaatcagccattggatgaaggttttggggcaattgtccggtctaacaagagtctgaagcggttatcactctctggccttctgactgatcaggtttttctttacataggaatgtatgccgagcagctcgagatgctgtccatcgcttttgccgccgacagtgacaaaggaatgctctacgtgttgaatggttgcaagaaacttcgcaagctagagat

SEQ ID NO: 196387 - DNA, 695 bp, Gossypium hirsutum
gaaaggctccaaaattgttgaatcccaagcgaggataacatacctacaaccaataacaagagaggtcctttgagtgcggatttcttcggttcagcttgctatacttttcagcatgggcagtttcgtaagctatatttcgatctaactcgagttgatgctcgtttggacttatcttcactctcatcttttgccaaaagaattttccagagttctagtgcaaacaaatctctatcatcccccagactaaatttgatatttccacgcgtccgcccacgcgtccgagtgtttcgagtggattcaaagttgctgctcgattctaaagctgggaaactaggccctcatatcgaagatgtcatatacagcttgagctactcgttgaggcttctgcgttccggaaaagttgtagcttggtattctccaaagaggaaggaagggatgatagaattgcgccttttcgaattttaactcatcttctgtcatcctatcattggttttgttcagaatttctttttctaatcatatgattatcctagttagaggctgatgtgaaatctcgcagctgaatttacagcttcatttccctttttttgcccaattcccatgttttgtaggcctttatggagcttcatagttaatcccaaatccaaaccctgcatgttaagtttgtcttctcccttttatattcaacaattgag

SEQ ID NO: 196388 - DNA, 744 bp, Gossypium hirsutum
gcgtgagtgcgcagacactaatctgaagcatcatcttgtgtttttgtgctcttagattctttgatagtgttcaaagtccacgcaaggtttgagtgatggggaaggactcaaaatcaaaggaagcaaagggaaagggcaaacaagctggaggtggaagcgatgatagtgcttcaaagggtaaagggaaagctgggaagggagatggccttggcacctgcacttacgttaaagcaaggcacatcttgtgtgagaagcaagggaagatcaatgaagcatacaagaaacccccacccgcgcggcttagcaacggtgataaggtcccaccagctgaatttgcaaaggtagctcaagaatattctgaatgcccttcagggaagaaaggtggagatttaggatggtttccgcggggtaagatggctggtccgtttcaggaagttgcctttaacacagtcattggagctaccagtgcacctttcaaatctacacatggataccatatcatcctctgtgaagggaggaagaattgaagcgagccaagatacagtcaggcagtgaagatgagttttatgttctatattaatgcagacatgaagtatgttcagtttgaaatattatccaatgattattcttcggatttgcaactgggataatgcttcttcttgttgaaaaatggcctgtaagttgatcttggatgtttgatgccaagatattttacatgttttcacatttcaaggtcttagttat

SEQ ID NO: 196389 - DNA, 382 bp, Gossypium hirsutum
ggcgagagccgtggcaggggaagccggggtgccctttttctcatgcgcagcttcggagtttgtggagttgttcgttggagtaggcgcgtccagggtaagggatttgttcgaaaaggcaaaatccaaagcgccttgcattgtattcatagatgagatcgatgctgttgggagacagagaggagctgggcttggaggaggaaatgatgaaagagagcagacaatcaaccagttgctgactgagatggatggattttcggggaattccggtgtcattgttttggcagcaactaacaagcccgatgttcttgatgcggctttattgaggcccggtaggtttgaccgacaggttacagttgataggcctgatgttgctgggagagtg

SEQ ID NO: 196390 - DNA, 367 bp, Gossypium hirsutum
gctcgacctacgcgtccgcatgagttgagttgggtctggtgttaaaattattgtgtcagaactgtcaatttggtaacttattattgttgttgtgttgtgagtgttgttttccaatgcaattggatttagtgaagtgtgtggggtccagcatgagaagagttccttctcctccttctcattttcggtgtttccattgtctaataaatatctgctatcttcttcactttcttattattgcagatacttctacttccaaaaaaagatgaaagtgaaaaaacaggaacctttgcctcttaattagaacaaagaataatgtttgtcataaagaaactatacctgtgactactgttaaaacacaaaggggggg

SEQ ID NO: 196391 - DNA, 996 bp, Gossypium hirsutum
  unsure (1)..(996): unsure at all n locations
gagagagagactagttctctctctctggagatgttgtccgtattttcgcagattgtgtcggatgatgctgtactaccgatgcgtgattgcatcgttcaggccttggagaaacttacggtcgatcaaggaatgccgccttctccggattcttgggtaatctaacttttttttccacatgaatagttcaaatcttcaatttgtaatatattagggaattgtgttttcccacttgtttgtggcttgtttttggttgcttaggttacaagtaacataatcgaaccggctttgcaattgtgggatggcaacaatcaagagaaacttgtttcccaagaaaccttcttggaagaattcaagaaagttgcggaacgtgtggctcaaaatctcaaggaacaacccgtaatcgtcgcccatagtgagaacactttcgatgggagcggcattaaaagactattaaccaacaagttcgaactagacaagttgcttaatacggctttagaaaatgtcccgaaagatcgtaatggtaaagtatcaaaggagtacttgcgcgtcgtgctagacgtagtggcaccatctgccagtttacctccaataggtgcagttgaacagatcgaccaggtcgttgccgatgcttttgacatgataaacgcggacgacgggaaagcggttaaagaagatgagttcaagaaactattgacggagatcttaggaagcgtcatgctgcagttagaaggcaacccggtctcgatttcttcgaattctgtcgttcacgagcctctcgcatcgtcctcatcgttactgcaaccatcatcctagttgcatatcactaatattaagggtgacaaaagaaaaaagggacaataaattttggttaattttaagttaaaaaactcttagtagcttttaagttgaattatgntgcagttcactggtttgtattgtctaatgaaaatatattaccataatacatgcaaatacagtacaaaatacaatattttc

SEQ ID NO: 196392 - DNA, 247 bp, Gossypium hirsutum
gccaatccaaccgtacattaaaacggaccgatcgattgatggatcatgacctgtcgcatgagctaaagatctagctccaggtcttgctcccagtgggacggctctagggatgactctctgtatgagttaccggcgcttgtgcctgtgcacgtacgtgttcacatatgataaaataattgatgaacctaatagctgacctaaaatatgcctgaagacatgcctggattggttccgggattggattcgg

SEQ ID NO: 196393 - DNA, 445 bp, Gossypium hirsutum
  unsure (1)..(445): unsure at all n locations
gggaactcggaatttccacaagactatgcattttttgagggtactacacatcctgttatagatggtgcaaacacttacaccaatgcatttgatggaaattatgacacattaattgcggccctcagtaaaatgggatacgggcagatgcccatagttattggggaagtgggctggcctacagatggtgcggtcggtgctaatctcactgctgctgaggttttcaaccaaggcctcattaagcatgtgttaagcaacaaaggaacccctctaaggccggctgttccacccatggatgtttatctcttcagtttacttgatgaaggggcaaagagcacccttccagggaactttgaaaggcactggggaattttctcctttgatggccaggctaaatacgcactagaccttggtttgggaaacaagagactaanaaacgccaagaatg

SEQ ID NO: 196394 - DNA, 628 bp, Gossypium hirsutum
gaacaataggtgcctttttcttgccatcgtttgctaggaatattttctcatcaatgagcagggtgcaacctaatttttatccattatcaaggcatttccaacacttacccttggaaaaattaaccagcttttctgctcattttcccagagaaaacatgctgatgagcattctttaaaactcagaaccttgcactgtctttgcccgatgatttgagattcaagatccaaatcttataatggtgtactttgtgaccgcagattgatgtgctaagaaacagaatatgcatatcctacttgtcttcaatacaagaaccaataccatggttgtcagcttatgggttttaactttgaatgtcctcatttttcttctctttcttttgcaagtcccgtttctctcacattcgatctatatgataaaggagtatgagtggggtgacacatttgatccaccacaaaaggggggggtgtgagaagaaaatgtgtaaaatttcagccctcgctccaatttctttaaactgtgaattggagagacaccgggaaagggaaatggattttttatttttatttttatttatttaaccatgggaaagtaactggaattcaaacgtattttgggaaatataaggaa

SEQ ID NO: 196395 - DNA, 1040 bp, Gossypium hirsutum
cccacgcgtccgcccacgcgtccgcaaaattttaacaatttcagagctgatctctagcttggccgggccataacacccctaatcgctcgctctcgatcagatataaaagagctgtgaattggagttcgaaagatgcctgcacagaaaatagagacaggtcatgaggatgcactccatgatgttgccatggattattatggaaaacgattggcaactgcttcatctgatactaccattaagatcattggcataactggatctagttcacagcaacttgctgttctacatggccataaaggacctgtttggggggttgcttgggcacatcccaagtttggatcaatccttgcatcgtgttcttacgatggccaggtgataatctggaaggaaaataatcaaaacgagtggctgcaggcccatgtttttaatgatcataagtcatctgtgaactccattgcatgggcaccccatgagcttggcctctgtttggcctgcgggtcttctgatggggatatatcagtctttaccgctagggatgatggtagttgggataccaccaggatagagcaagctcaccctgttggagtaacctcagtctcgtgggcaccatcaaccgcactcggtgctttcattggatctggtctactggatcctgttcagaagctggcctctggtggatgtgacaatatggtcaaagtatggaggctgtataatgggagttggaagatggactacagccctgccctccagatgcacactgattgggtgcgggatgttgcttgggcacccaacttggggctcccaaaatccaccattgcaagtgcttctcaggatgggaaagttattatatggacttgcggtaaagaaggggaacaatggaagggtgcgattttgaaggatttcaagaccccagtttggagggtctcatggtcgctgactggaaacttattgtcggttgccgatgccaataacaatgttacattgtggaaagaaacggttgatgatgagtggcaagaagtgaatgctattgagccatgaag

SEQ ID NO: 196396 - DNA, 440 bp, Gossypium hirsutum
cccacgcgtccgcccacgcgtccgctcttttcaatgctctggcaaaggctaatattaacattcgtgctatagcccaaggttgttctgagtacaatatcacagtggttctcaagcgtgaagattgtatacgggctttaagagctgtgcattcaaggttttatctttcaaggacgaccatagcaatggggatcattggacctggattgattggtgcgacattactcgaccagttgagggatcaggcagcagtcctcaaggaagaatttaacattgatttgcgtgttatggggattactggttcgaggacaatgcttttaagtgaagttggtctcgacttgtcaagatggagagaacttctgaagcagaaaggacaagttgctgatttagaaaaatttactcaacacgtgcatggaaatcattttattccaaatactgttttg

SEQ ID NO: 196397 - DNA, 759 bp, Gossypium hirsutum
  unsure (1)..(759): unsure at all n locations
aaacacacttttcactcaagcaactgccccaataagaacaaaaccaaagctttgggttagtttccttttttaattatatcaaaggtttcagaaagaaaaagagccttggaaagtgaagatgggatctggggctggaagttttcttaaggttttttttaagaactttgatgttcttgctgggccagttattagtcttctgtatcctctttatgcctcagttagggcaattgaatccgagtctcgtgccgatgaccggcaatggcttacatattgggttctctattccatgatgacattgctggaactcacctttgccaaagtcattgaatggatccctatctggtcctctcgcgaagcttgattttcacctgctggctggtcatcccgtacttctctggcgctgcctatgtttacgagcactatctgcgacccttctttatgaacccacaacagacgattaacatctggtatgttccgagaaagaaggatttcttcagtaagccggacgatattttaactgccgctgagaaatacattgaagagaatggaacagatgcatttgagaagctcattcatcgggctgacaagtccaggagtagtagttatggtcacatatatgatgatgatggctacaggcattgatatccttacagcaaccccgctatattttgttgctcttgtgaagaactcttgaatgcttgtttaaagcgtgtaaattatcttaatttgcttgttagtgcaagtttctaaacactnttt

SEQ ID NO: 196398 - DNA, 410 bp, Gossypium hirsutum
cccacgcgtccgacaaaagcaaaccctacccttttttttagagatctgagatcagaggtttcagagggaggcacgacacagaagaatagagcgtgggagatcagtgatgggatctggggctggaagtttccttaaggttctatttaggaactttgatgttcttgctgggccagctattagtctgctgtaccctctatatgcctcggttagggcaattgaatcggagtctcgtgccgatgacaggcaatggcttacatattgggttctctattccatgatgacattgctggaactcacttttgccaaagtcattgaatggattcctattctggtcctattgcaaagctgattttcacttgctggctggtcattccgtacttctctggcgctgcctatgtttacgagcacta

SEQ ID NO: 196399 - DNA, 418 bp, Gossypium hirsutum
caaatttgaaatgcatattcaggagaagcagagatggtggtggaaggggtggaaacggtggcggaagtggtggaaaaggtagcaacgacggcggagaaagtatcaactgaggtggcggaaaagcttcccgatgatagcatgctgaaaattgcagcaatggaggtggaacatgtttctgatataactgcccatgatgctcatgccactacacacttcattcaccaggttgaagaaataaagcatgagttggatgatttggttaacaaagttggagaagcaaggaccccaaaaaattgattcataggtaaaacttctttgaataagttctaaaaaataagtttgctattaattttaacaattcatgtaattttttttaaaaaaagtcatcgtattaattgtataaatatgaatataatta

SEQ ID NO: 196400 - DNA, 691 bp, Gossypium hirsutum
atttgtgtagtttcaggaactggattcttttgaacccatttacgaatttggatatagcacagcgaagggaaaaggtttttgtttagagttataacttttttaagtgcaggaggaaacgaaggttttgaaggagctggtgggtttgggtcagctagtaatatcgggattggttgaggaatttttgcagagtaatcaacaagatttaagttcgttatgatccatgctatctatccagccatcaaagcgatcatatgcacataactcacacgtacagttaagagcccatggacaatgtcctgttttgggatctctgaacatatagtgtggtttcccatcagcagtaaagctttcagtaagctttctttttggacctggttcacagggtccacagcaacagtcttggattatctccttcctctgggtctggtactggttgcatcattaacattgtgggaaacacagaaggcgtttcagggttctacaagtgactttgatcaaatttaatttctatagttccattccttctgaaagtgatctggctctttgtggattgtattggctgattatgctcatggagcttctcataatttgtaatccatcttttaggcagtaattttatcagttttgcctttgggatttgtcttggaacatgaatacagtggagttggtcctgtgtattgaccgaaataag

SEQ ID NO: 196401 - DNA, 769 bp, Gossypium hirsutum
ggcccggaacgaccaacccgtccggccacttcttctcttccgtaatctcttactttcagatttcagtctcagtaaagctttttcagcaccagccaaaatggggaagactcgtggaatgggagctggccgtaagctgagaacccaccgcagaaggcagaggtgggccgacaaggcatataagaagtcaaatcttggaaatgaatggaagaaaccttttgctggatcatcacatgccaagggcatagttcttgagaaaattggcattgaagctaagcagcctaactctgctatccgaaaatgtgctcgtgttcagttgatcaagaatggaaagaaaattgctgcttttgtacccaatgacggttgcttaaactacattgaggaaaatgatgaggtattgattgctggatttggacgaaaggggcatgctgtgggagatattcccggagttcggttcaaggttgttaaggtttcgggtgtgtctcttctagctcttttcaaagagaagaaggggaagccacggtcttaaaagaatttgacttttaatggctcacttaatctttgctatttatataaaaacctagtgtttgggattttgtgatgaaggattttagatatccaactcaaactgtgttctgtttttggtttcaaatctaaattctgtttggtagattattatatatggtcttatgaacccattatgtttggtgttatcatgtatgaacagaatagtacttgctgattatgataacaatggctcgatttttaaaaa

SEQ ID NO: 196402 - DNA, 712 bp, Gossypium hirsutum
  unsure (1)..(712): unsure at all n locations
ttttcttcatgggcatgctgaagtttcttttgagaatgttcgtgtgccagcaaagaatattctattgggagaaggacgcggctttgagattgcccagggaagacttggccctggaagactgcaccactgcatgagactgattggcactgctgagcgtggcatgcagataatggctgaaagggctcttaatcggaaaacatttggaaaatatattgcccaacacggttcatttctttcggattttgcaaagtgtcgaatagaactagagcagactaggttattggttcttgaagcagctgaccagcttgatcgacttggaaacaagaaagcccgtggaaccattgcaatggcgaaggtagcagctccgaacatggccctgaaggtactggacagggcaatacaagtacatggtggagccggggtatcatccgacactgttttggcacacctttgggcatcagcaagaacattgagaatcgctgatggacctgatgaagtgcacttgggtaccattgctcagttagaactacgaagagcaaagctttgaaggatcttgaaactatgatcatcacacaacagtcactttttattttttcttcttgcagtctcgaagataaaaataaggaaaaggaatccaaaaaattgggcattttcttagtaatattatggaattattatgaaagataataataataatgataatntatgtagt

SEQ ID NO: 196403 - DNA, 406 bp, Gossypium hirsutum
aacgactgcaggtctgcatgccaaccctttaatccagcaactgcttcggtgactatcagcagtacttgtgtacccgacctcaatctggatcttaccactcgcccctggccctttcccatcaaaacttggcacttaattaatttgaagtcatatgatgtgatattaacatcactattctactgcttaattaatttcattctttgatcacaataacacctactatgcttataagccggttagaatatgtttgcgagttagagctcaaaaatcctggctggagtctacttaagtgggatacactgcatgtctagccacgaatctagactatatctctaaaatcgtgtcctatcaagaatatacttttcatttcttttcctgctgaaactaccacttgcagttgattatg

SEQ ID NO: 196404 - DNA, 486 bp, Gossypium hirsutum
  unsure (1)..(486): unsure at all n locations
ttcccggtcgcccccccgtccgttttatggccaaacctatggtttgatttatccaaatttttggtttaaattattcctttattttaaggatttattggaaaaatttttaaggtttaaaatccaccttaaaatttagtccatttatttaggccggtggggccatttaacctctttttttctttttaaggtagttcatcttttatatcaaggatgtttggatcgagaaaccgacagatgtatcgatctgggaaaaaggtttggaactgatagactaaaaaattggtatagaccgattgaatctgttaaaaaatcaattgcaattagggatttcttaaaattgttttaaaatgtttgatgggttttttaaaatcgaattgattagattgatggagctagcanaccggtgggtcttgatttaaaaaacaattgaatttgagtacaaagacactttatatagcactaatatttgagaattggnggtgatgt

SEQ ID NO: 196405 - DNA, 743 bp, Gossypium hirsutum
gaacttttgaaggcattggattattgccactcacaaggtattatgcaccgagatgtgtagccccataatgtcatgattgatcacgagcagcgtaaacttcgtcttattgattggggccttgctgagttctatcatccagggaaagaatacaatgttcgtgttgcttcgagatattttaaaggtcctgagcttcttgttgatttgcaagactatgattactctttagacttgtggagtcttggttgtatgtttgctggaatgatattccggaaggagccattcttttacgggcatgataattatgatcaactagtcaagatagccaaggttcttgggacagatgaattaaatgcttatctaaataagtacggtatcgaattggatccccatcttttatttcttgttgggaggcatagtcacaaaccttggacaaagttcattaatgctgagaatcaacatctggcattacctgaggccattgatttcctcgataagttgcttcgatatgatcatttggaaaggctaactgcaaaagaagcaatggctcatccttatttttacccgattagaaatgcggaaagcagcagaactcggacctagcatgccaacttcacggtgatgatgatgttaaggcatggcatcttcttctttcttcatatgcatggttagatcctcatccctttatagaatgacagaagattaaagtctcttttatttttcttttgattttcatgtctccccca

SEQ ID NO: 196406 - DNA, 450 bp, Gossypium hirsutum
  unsure (1)..(450): unsure at all n locations
tttttatgaacctccacaattctatcagagatgaccggtatcttattggtcgtcgacttcataactttggggaaaactcagaagagaagcaaaatgaggcagggtcttcctcagaaacacagatttctgatctgcgggacactggaataatccagcatgaccgagaggttgatgtggggctgagactaaggcgcgctgctaattaaaaacgatgctgatgctcgaaatgcttgtatgaatctacgttccatttatgacaagctggtatacttgttaggtagtgtttgaaattggccaatacaatatttggcttacgcttactttttgtgcacagaatacacgttaactttgcaattagggtttgtcttaaaatttcagcaagttagataaataatgaattactattttattttacctncanaagnntggggcaacaaatncttacatatt

SEQ ID NO: 196407 - DNA, 530 bp, Gossypium hirsutum
tgacattgtgttggcttacgaaaatcaaaatggcacttcctttagggatgatttctgcaggagtgctgttcctagtggctcttactagggttcaactctcaaattgccaacatctcaatgccaaaatctcctgcttcgactgccctcataattatgacttctcaggcatccaagttgcagtgaagtgtgagaaagtgaagaaactagccactgcgaccactgaagaaaatggttctttcaaggtccagcttccatcaggcatctcaaacactaactgccttgccaagctcctaggtggaccaaaccagctatacagcaagaagaaaaacctggtgtccaaggttgtcaaggtgggacatcaacccaacacttacaccctctccactccactggctttctccacttcatgcccttcggcatccattgatgctaaatcatgtggagctcaaaaggggatcggttcatccaagaccgtcgatctgccactacccccggagtggggacttgcaccatccagctattatgttcct

SEQ ID NO: 196408 - DNA, 751 bp, Gossypium hirsutum
gaagttctccttgccatggctgaagaattgggagtttttattccttatgttggaggtgtcgaacatgctaatgttttgttgcctccgttggagactctttgcattgttgaggagacttgtgtgagggataaggctgttgagtcgttgtgtagaattggtgctcaaatgagagagcaggacttggttgagttctttattccattgttgaagagattggctgctggtgagtggtttacagctcgagtttcctcttgtggattgtttcatattgcatacccaagtgccccagaggcactgaaaactgaattaagaacattatacggtcaactttgccaagatgacatgcccatggttaggagatctgctgcgaccaatcttggaaaatttgctgctactgtagaagcacctcatttgaaggtggacatcatgtctatgtttgatgatttgacacaggatgatcaagattctgttcgcctattggctgttgagggttgtgcagcacttggaaagttgttggaaccccaagattgtgtagcacatattctccctgttatagttaatttctcacaggataagtcttggcgtgttcgttacatggtcgcaaatcaattatacgagctgtgtgaagctgtcggacctgagcctactaggtcggaactagtacctgcttatgttcgcctacttcgtgataatgaaactgaagtgcggatagctgctgctggaaaagtaactaagttttgccgaattctga

SEQ ID NO: 196409 - DNA, 478 bp, Gossypium hirsutum
gttgatgttcttcccaagaagcctgctaaacagtttcatgagcaggaaaatgggaacattgagaaaaatggaaagcattctgagcaaaagagctcaaagaagcagcaaaatggttcagttcagccaaagaaaccatttcaaagagtgaatgtggatgaggtagaatttgttgatagcaggcttgaagataattcatactgggcaaaggatggtgctgaaactggatatggtgcaaaagcacaagaagttctaggtcaagtaagaggaaggggtttccggcacgagaagaccaagaagaaacgtggatcatacaggggagggcagattgatctgcagtcgcactctataaaattcaattattctgatgaggagtaaatgctgactttctagttggatgatgagcactgctgtaccctctaacacgtttgcattcattggagtctattaagtggaactcaatggaactcaatgataatat

SEQ ID NO: 196410 - DNA, 444 bp, Gossypium hirsutum
cactatttctattgtatctgctagttggtttttattgtctgtcagttgaaactgcagtgctaaagggtgtagctcagtagtgtggaccaaaaagcatttgtttccgtgttgcacgtttatttgctcatacgaatgtcttttttttttttttttttttttttctctccaggtatatgggtacagtaactggcataagcgatttggatcaagttcgctggccaaattcccattggcggtctgtgaaggtaattattaacatttttttacatggatctcatagtagatggtttttattgtttgggatggataatatcatgttctattttattatgcatgtctaaagaaatttatgtgtttaacgtccatgatttcttgtttgatgtctttgatttcatggagattcaatgctaattgaatgattatgtaatgttagaatcttgaatg

SEQ ID NO: 196411 - DNA, 629 bp, Gossypium hirsutum
  unsure (1)..(629): unsure at all n locations
aacttgtgtactctatcaaagagtaagcccaacaatgccgcccaagtttgacccaacacaagttgtcgatgtgttcgtccgcgtcaccggcggcgaagtcggagctgctagttccctcgctccgaagatcggtccactcggtttatctcccaaaaagatcggtgaagatattgccaaggaaaccgcaaaggaatggaagggtctccgcgtgaccgtcaagctcactgtccagaaccgtcaggcgaaagtcatggttgtcccgtcggcggcggcgctggtgattaaggctttgaaggagcctgaaagggataggaagaagaccaaaaacatcaagcataatgggaacatcggccttgatgacgtcatcgagattgctaaagtaatgaggccaaggtcgatggccaaggacttaagaggtacggtgaaggagattctgggcacctgcgtctccgtgggatgtacggttgatggcaaagaccccaaggatttgcagcaggaaatcgacgatggcgatgtcgatgttcccctggagtgagaatgcttgntttctttttttcttttattatcaatattattctcccgttttactttcctttttttttaaattttgttagtttaatgtttggaca

SEQ ID NO: 196412 - DNA, 413 bp, Gossypium hirsutum
  unsure (1)..(413): unsure at all n locations
gttcttgacaatttggacgaaaaccagcacacatttcttttacttaagcgccttgctcttgagggggacgtaagctgccattccgcacctttttgtgtttattgtatataagataagcatgtgcacacgcacgcacgcgtgcacacacacacgtntgcatgtcacaacaagaagtcgcattttgaacaagaaagagcaacctattcatagcatcaaaattgcatttttataacttctgtatcatccgtataagaacaaaccaagatggggaatgaaaagagaaatctgatgatgatatagggtctgctctgcagtttgggttaaaacgatcttttgacagtaacacacgtgtttgaaatttcatccgctttactttgaaactgacatgccagtgtgctattttttttctgatg

SEQ ID NO: 196413 - DNA, 446 bp, Gossypium hirsutum
gtgaagtgtttacttgaactgtttagaaaatgttattctagtccttaccctcctatcgtccatttaggtgggatgcttggcattgttaatgcttttggggcaggtgctggaaatttagttgattttcacccttttaactcctctgtgcaaactggttatgatcaaaaggaaccttcccatatttcaggtccaatacttgtgaatcctgtttgtgaagaccactcaacatcactgatgcaagagatttttcttgttgctcaaaatcctgatgataatcaattgcaacaatatgcagcgtgggcaatttcatttcttcgacagcgactgtggtctagagaaatttcgaatagtgctggtggtacacaaactgagtctgctggctcaaaatctatttcgcacggtgttcctgaggacagtgcagtcatgaaactgggtctgtggcttaa

SEQ ID NO: 196414 - DNA, 582 bp, Gossypium hirsutum
ttcgccaactgggcccagtgctcatcctggaaatttttcactgtttcacctttcacagccggggaccaagtcttctacttcgaaaataatccatgcgattacttccaaggcggcaaagtaaaagcaatgacactttccctctcggttttagttgccatcgaaatgttcaactcccttaatgccctctctgaagatggaagtctcttgacaatgcctccatgggtcaatccttggctcctcctcgccatgtctgtgtcattcggcctgcacttcttgatcctctatgtgccattccttgctcaagtattcggtatcgtacctttaagctttaacgaatggctgctggttctggccgtcgcattccctgtgattttgatcgacgaagtgttgaagttcgtagggaggttgggacggcggatgagatcctccagtcaaagacctttgaaacccaaaacagagtgaagacagatatggtataaatccgataagtggatactagacagccaatgctagcctctaaaatgattaaaattcttgggaactgtcctctaacatggcgtttttacaatctgtgttatataa

SEQ ID NO: 196415 - DNA, 200 bp, Gossypium hirsutum
  unsure (1)..(200): unsure at all n locations
ctagatcgcgagcggcccacgcgtccgcccacgcgtccggtctatattccttgtcaatttgttggcgatacatttaagttcgcccctgtttgtaagtctttgtttgtgctggtttgatggaacaatcgatatgatcgccttgtaatgcttcttttcatatgcacttctttcttctagtagcnnnnnnnannannnaaanc

SEQ ID NO: 196416 - DNA, 1074 bp, Gossypium hirsutum
gtgggttctccacccactctgtcctctgggggacttgatcttgatttgaatagagttgatgagcctgctgatttgggtaatcactcaactgggtatagtcgtagactggatgtccctatgcagcctataaaatcattgtctgggattcttaatagtgaagtaaccgtccatagggacttcgatttgaataatggtcctgctgttgatgaggtaagcactgaaccatcactatttagccataatgctagaagcagaaatgccccatctcaaccatcagcttccagcctccggatgaacagtactgaggtggcaaatttctcatcatggtttcctactgagaatacatactcatctattgcactacaatcgatcttacctgatagagagcagccttttccaattgttgcaactggtgggccacatagggtgttgggcccacctatgggtgccaccccttttaatcctgatgtctatagggaacccatgttgtcatcttcaccagcagtgccatttccatcaactcctttccaatatcctgttttcccctttggaacaacttttcctcttccttctactagcttttctgtcagctcaactacttatgttgattcatcttctggtgggaggttttgttttcctccagttcattcgcaattgttacgacctgctggtgctgttccatcccattacccgaggccctatgttgttagccttccttatggtagcaatagtagtggtgctgagaacggtaggcattggggaaggcaaggtctagacttaaatgctgggcctggagttccagacattgaaggaagagatgagtcggcacctcttgcatcaaggcaactgtctgttgccagttcacaagtccaggcagaggagcaagcaagaatctatcaggttcctggtagcattttgaaaaggaaggaacctgagggaggatggaatggatacaagcaatcttcatggcagtaggaatcaagaatccttaaatgtcacattctgatgactcaaggtattcagggatgggaattagctaaaaccccagaggtcatctaccctgtgtgctcttag

SEQ ID NO: 196417 - DNA, 414 bp, Gossypium hirsutum
cggacgcgtgggctgatctgtctcctccactcagccatcgccatatcaagcggcgccttcatgatgttccgtatgaaagaaatctacaccttcacgcacgggatcgaaactgcctccaagctcctcggctccaccccacacgaccaactcctgatccggacctccgattcgttctccggcctgctcttgttcaccatcgggttcttgctcttcatggtctccttcgttgaagacaccgatttccagtccttcttcgccgccggctgcaccttcttgcacgttttcatggccgtgtggaggttttggttcgagaccagagtggaggatttggcttgggattgtattaggcaaacggttggcgatattttattggctctttcttgggtttcctttttggtttactcttggagagaa

SEQ ID NO: 196418 - DNA, 661 bp, Gossypium hirsutum
gcaacccccatgattagcattgtgaaggacatagtgaataacatcagggccatggaagaagaggaagaagaagagaaaagttgtggtatagagaaaggaaacggggttaataaaacgaattccacatcaccaaattcaaaaaggaaagaaaacttcaagacaaggagggcatacttttattgggtgacgagggaacaaggttccttcgattggttcaaagggataatgaatgaagtggctgaaatggaccataaccatgtaatcgagcttcataattactgcacaagtgtgtatgaagaaggcgatgctcgctcagctctcattactatgcttcaatcactcaatcatgctaaaaatggggtcgacatcgtctctggtacgagagtaaaatcccacttcgccaagcctaattggcgcagtgtctacaagcatattgctgtcaatcacaacaactctcgagtgggggttttttattgtggggcaccggcgctgacaaaagagcttcgccagctagcttcagatttctcccacaagacgtccaccaagtttgatttccataaagagaacttttaatcccatgccagggtcccggatagggagaacctaaaaaagaaatgccttggagctaaccagactctaagacagttacaagcaccttcat

SEQ ID NO: 196419 - DNA, 287 bp, Gossypium hirsutum
gagaaagtgaaggaattggaaaccagtgaagccgactctgaagaaaatatagagcaagtagcctgaatagcagtggagatcttgtacagtcttcaaaattgaaacaattctccccatatatggtaacacagatggcttcaatatatttgtttttgttttgttctgttggtcctccgtcgcagtttgggcattacctctgtcaagccgagagaatttgaaggaaaaatgataatattctctattgatttgatttacacgagtatatatacaaaatactatcaactctt

SEQ ID NO: 196420 - DNA, 271 bp, Gossypium hirsutum
cccacgcgtccgcccacgcgtccggttggcacttcccgggattacctagcgaagctgcttttctggtgtatgctattaggtcatcatttgagaggcttggagaacagattgcaactaagttgtgtcgtcggattattgtagagtaaggtttgtgaaattgtatagcctatctttttcttgtctttcttgtggtatttttggtttatcaggtaatgtacattcttcttcatgaagctattagtgaacttatattgttccaactctatttttt

SEQ ID NO: 196421 - DNA, 725 bp, Gossypium hirsutum
attctacttccattcaatacaaaaaaaggcctgtgacaagtttgatccatccttttatcctcgattcaagaaatggtgcgatgactatttttacattaagcatcgaggtgaaagacgagggctcgggggaatattttttgatgatctaaatgactatgatcaagagatgcttctttcatttgccactgaatgtgcgaattctgtggttcctgcatacataccaatcatagagaaaaggaaggatacaccattcaatgagagccaaaaagcatggcaacagttgcgaaggggccgctatgtagaattcaacttggtctatgatcgaggtactacattcggactgaaaactggaggtcgaattgaaagtattcttgtttctcttcctttatctgcacgatgggaatatgatcataaaccagaagagggaagtgaagagtggaaactgttagatgcttgcatcaatcctaaggaatggatctgatacttctggtcgagtttctttcaatcctttcgaaaattcccattggttcctttatttttaagatgctctccttttagggagttccttcttgcagtagtagttgtaagttttagcttcatggatttgttgtattaatgtaaatcacgtgaatgtaattagatgccctataatacgcattgcttagagttaagaggtctaacagttgctaatggattgtgtatctgctaacatatttgtgtacttt

SEQ ID NO: 196422 - DNA, 492 bp, Gossypium hirsutum
gattgggaaacttgtatctctgtgccggactttgattggaagcagattgctgagcccgtgatgaaattgtacactgaaacgacagatggttctgccattgagactaaagagagctcccttgtgtggaactaccgagatgctgatcctgatttcggattttgccaggctaaggaacttttagatcacctcgaaagcgttcttgctaatgagccagttttggttaagagtggccagcacattgtagaagttaaacctcagggtgtgaacaagggtctggttgcggaacatctcctggtgacaatgaaacaaaagggaatgctacccgattttgttctgtgtattggggatgacaggtctgatgaggacatgtttgaggtgataatgcgagcaacggctggcccctatctctccccagtagcggatgtgtttgcttgcacggttgggcagaaatgtagcaaggccaagtactacgtggaagacagaactgagata

SEQ ID NO: 196423 - DNA, 998 bp, Gossypium hirsutum
tccacgcgtccgtccacgcgttcgcccacgcgtgcgcctatacaacctcccgagggagtaaattcagtaacgtttcagggaagaaaatatggggagtgaagaggaaccaaaagaaggtttcccgaagatggtgaaccctgggaaagccacaattctggctctgggaaaggctttccctcaccagcttgtcatgcaagaatttctggttgatgggtattttaagaacaccaactgcgatgacccagatctcaggaagaagctaagccgactctgcaaaacaactactgttaaaacaaggtatgtggtaatgtcagaagaaatcctgaagcagtatccagagcttgccattgaaggactccccactgtgaagcaacgattggatatctgtaacgatgctgtcacggagatggctgttgaagcctcacgagtttgtatcaaaaaatggggacggcctatatcagacttaacccacttagtctactgtttcctcgagtgaagctcggctgcctggtggtgacctttacttggccaaaggacttggactcagccctgagacgcaacgtgtgatgctctatttcatgggctgctctgggggtgcagctggccttcgtgtagcaaaagacattgccgaaaacaatcccggaagtcggatcttactagctacttctgaaactaccattattggtttcaaacctccaagtgcagatagaccatatgatctggttggtgcagctctttttggcgatggtgctggagctatgatcattggctctgatccagttttgagcattgagagacctctctttgagcttcacactgcaatgcagaatttcttgcctgatactgagaagacgattgatgggaaacttacagaagaggggattagtttcaagcttgcaagggagcttcctcagataattgaagataacgttgaaagtttctgtgagaagttgatggcaaccgttggattgactgacaaggactacaacaagatgttt

SEQ ID NO: 196424 - DNA, 433 bp, Gossypium hirsutum
gcatattcttgtaaaatagatgtatattgggacctttcttcggctaaattcggatccgggcctgaacctttcgaggggttttatgttggtgttgttgctaataagcaaatggttttgcttcttggggacatgagtaaagaagcttgtaagaaaactggtgcaactcatatcccttgtaatgccagtttagtggctaagaaagagcatgtttttgggaagagggtatttggtaccaaggcgcagttttgtgataatggtcgaattcatgatctgataattgaatgtgacgcggttggtatgaaagatccttgccttataattcgtgtggatggaaaggctttgatgcaagtgaagcggctgcggtggaagttcagagggaaccataccattttggtcgatggaatggctgtagaagtttactgggatgtgcata

SEQ ID NO: 196425 - DNA, 651 bp, Gossypium hirsutum
cccacgcgtccggtttcttttttctaaaagaaaagcagtgtctctggttttttttaacccattatttggccgccatttaaccgtgcgccaaggccccgattgtgacggagatggcaccggctcgacgacttcggcgattaggtgagtttcccctttcccttttatattttaagagaaaaataactaaaaaataaaggaaaaaaataaaaacaaaaccgataactaagaatgacgaacaccaaataaataaatggaaaaaaaacctttttgtattcaaaaatctctttatatctccccccttttacactgaaaatattggccttttatagccgaaaatggaaaagaaaactaaatccaaacaaatctattcggttgtttgttggctcgatttttgctcttctctttcgcttgttgcaggtacgtgcttgaggagcgacatttgcggaggtgtggcgtgcgtagaggagcgcgaagaggcagtagttgcggcgccagattgctagtggccgctggggcagaagctgctacggcgctgaagcagaaagggctaagggtttctgcactgggctagggttaatgtaattgggctgaatttttgggtttagtctgcagatgggtaattaggttaattttgggccttaaatgtcttac

SEQ ID NO: 196426 - DNA, 326 bp, Gossypium hirsutum
  unsure (1)..(326): unsure at all n locations
cggacgcgtgggcggacgcgtgggcttcaatactctgtaatagtttataggcaccttcgcactgtgaattcgcccgacgcctctgcactccagacccgaaaatcatcatgaggttcttctgccaatgggatgccaataatcttctcagctacatcctccggaaaggtagaaattatcaactctttcttccatgtgtctgttactttgattaattaaatccgcaactttaaaatcattcaaatttgtatttaaagctgaaaaaaaaaaaaaaaaataaaaaataagagactaaaaaaaaaaaaaaaaaanggcgggcggtcctatat

SEQ ID NO: 196427 - DNA, 613 bp, Gossypium hirsutum
gccattagggaacacttgccagaaaaaggaaagggagtacaaggaagcccttgatgcatttaatgaaaagaacaaggaaaaagtacaactaatcacaaagttaatggagctggtgagtgaaagggaaaagttaaggatgaagaagctggaggagctgagtaagaacatagattccatacactgatcatataaggaaagagaagcccctttagctttggttttaactgattaggcttgtgtgtgatgtatttaaggtgactttgaatatttatatatgggtgtgttgtaatggtaatctttgtttgtttttggttagcattcgatgaatgttcaactgatttagaaaaagggaaataccctataaaaacaaaacaggtttgtaactaaaatgcactcttacatttctcatgttcaactattgtatctctttgttttagtttcttttcaagttttatgtaactcgaacttgcatactgtaattagtctacaatacacccttcagtagttccttgaaaaaaaaaaaataaattaaattttatataataatttattaatattttaaaaatataatattattttttttattttaattttataaaataattaaataaaa

SEQ ID NO: 196428 - DNA, 485 bp, Gossypium hirsutum
agaaagtggaaggaagggaagaaaacaatggtggatgatttcatggtatgtgtcgacaaaattatagcatctgcagcttgttttgagtcttcttcagtgaatccgggacaaccaatctcaactacagctgctgggaatactaatgttgttgttcctatgacgaaagcaagtggtgatgatgatagtggaaaagaaggagaaggaaaaactgggtatagttcaaagaaggtgaaagaggtggtggagtgtaggatatgtcaagaggaagatgatttgctttctttggaagctccttgtgcttgcagtggcacttctcaggttggctcacaggaggggcttccaaagatggtgccacaaggaaggggaccttacctggcgaaatatgcaaccaggttttttcaccaaattattctctttctccgaccagaacaatccagatgtttttgcaattgacattaagcaaacatggagcccgcatattgatc

SEQ ID NO: 196429 - DNA, 613 bp, Gossypium hirsutum
ccaaagttcaagcaaggacttaaaggaactggtgagaaacaaggaaggtggtgaggggaaattgtcttcttgcaaggaaagggtagtccatgaagctttgatggaggtaaagagtgttgggttatgggtatttggggttgttttggctaccttgtctggagagaccaaaccatacttggagatcaaacaagtgattgtcaggttcaattctgctttgttaattgatgtagattcatgtgtttttaaggttatggtggagaaaggtgagacattaaaagaggttaaggagctgaacagtgcagcaaattccctagtatcagcaatcctttctgggaaaaccagtgttgcagccatggatttcggtggaaagttaggtgttttcgagaaggagatggatgctttagaaaagcaagtggatgccctgttttcgagtgtattggcagccagaaatgaactgcttaacggtgtttggcaacgcaagcaataacatcaaaatccccagtttcttatgtaaatagaagaaaaaataggcacatacacatttgtgtgacattttttttatattatgtatcttcaaaaattattaatggaaatagaacagtttttcttgctt

SEQ ID NO: 196430 - DNA, 388 bp, Gossypium hirsutum
aaaaacgaaatcattatatctgcgggagcattgggaagcccacagctgttgatgctgagtggagtaggaccggttgctcatcttagatctcacaatatcccagtggtgttagaccaacccttggttggccaaggcatgtgtgataaccccatgaacgccgtttttgtcccgtctcctattccggttgaggtttcacttatcgaagtcgttggtatcacacattttgggagctacattgaagctgcaagtggtgaaacctttagtgcttctgttactactacttcaagaaactatggcatgttctcacctaagattggtcagctatctacggtgccacctaaacaaaggaccccagaagccattgccagagctgttgaatacttggata

SEQ ID NO: 196431 - DNA, 631 bp, Gossypium hirsutum
cccacgcgttcggaaaggttccaggctaagcagcaggatgctagtgataattggaacgatgcactgcaaaatgctaaagcacatccatttgacgatcacactaccaaatccagaaaacggaaatctagagatgaccaaggggcaacgaaccattcagagttgaaaaaggctgaaatggaaaacgtggttgccaccgaagaaggccaagctagtaaaaagccaaagcttaacccaaccggtgaaaagagaaacccattttcgaaggaaatttttgaaggctccaatcagaagttgaaaggatcaaggcataaccccaaggatcgtaaaggtggcgcaaaacctgctgttggtagttccgacaaggttgaaacaaatgttaatgagaccagcaaattaaagttgaaagaggtgaaagcaatttcacacccgaaagagaggacacgacaagaaaaggcaaagccggaggagggagagacaaatttaaaaaggaaaaggccaaaaaggaataaagatccatcaagccgagacgtggtagacaaactcgacatgctaattgaacaatacagatctaagttctcacagccgaaatccggaacacccgacgcggaaaagcaaggttctaagaagctta

SEQ ID NO: 196432 - DNA, 749 bp, Gossypium hirsutum
  unsure (1)..(749): unsure at all n locations
ggactaaaaactggtggtactgtccagcagcgtgcagagaggcttttcctaaccaagcacactcctctggaaaagctggacaaaaagcattttgcaaaaggctcactcggacctcgacaaaatgggtccactgcagtttcacaagacattaacagtctgaaacatattgcattgatggaggccaagatgaagaaactcgctgatttactgagtaagacaattgaacaaacaaaagaaaatgtggtaaagaagcaagcattgacatatgaggaaatggaacaagaacgtgaggaggaagagacacaagttgacacggaaagtgatgatgaagatcaacagatctataatcctcttaaattgccaatgggttgggatggcaagcctataccttactggctttacaaacttcatggtcttggtcaggagtttaagtgcgagatttgtgggaactacagctactggggccgtcgggccttcgagaggcatttcaaagaatggcggcatcagcatggcatgcgatgccttggtatcccgaacaccaagaacttcaatgaaatcaccaatattcaggaagcacaagaactgtgggagaagatacgagaacggcaaggagtgaacttgtggcgtccagatcttgaagaagaatacgaagatgaggagggcnncntttatnacaagaagacgtataccgatctgcagcggcagggactgatttanaaacgcttgtgttgagagttagatgtctcncg

SEQ ID NO: 196433 - DNA, 717 bp, Gossypium hirsutum
  unsure (1)..(717): unsure at all n locations
cccacgcgtncgctacctgccactctgtctgaagctttgagctttcaacctttccaacaatggcagcgataattggtgagtctccaaagcttgctctgtattcatactggcaaagctcatgttcatggcgagttcgcttcgctttaaacctcaaagggatttcgtatgagtacaaagctgtgaatctttcaaaaggagagcagtttacaccagagtttgagaaattgaaccctctgcattttgttcctgttcttgatgatggtgatgttgtcgtgtctgattcatatgcaatcttgttgtatttggaagaaaaataccctcaaatagctctcttaccagctgatccccagcttaaagctctgaatcttcaggttgccagcatagtcacctctagcatacagcctcttcatatgctgtcaaacttgaaatatcttgtgcaaaaagttggtccacaagaatcacttttgtttgctcaaactaatgtggaaaaaggtttcaatgctctcgagaagttgctgaaagacattaacggcaaatatgcaagcggagacgaagtatacatggctgatgtatttatggcacctcagatagctgcggcgatgcaacggtttaaaatcgacatgtccaagtaccctagattgtgtccgatattcgagtcgttgaaggcgttactggaattcttagatgcctcgcctgaaagaaaacctgatgctgtaa

SEQ ID NO: 196434 - DNA, 421 bp, Gossypium hirsutum
cccacgcgtccgccgaaattgatgagctaaccgtggatacgtcgggagaagatggttagtttgggatcaagagcttcactttgctgtgaagataggtccgaccttttgcctgacctaatcaaaacattgaaagctttacgcttgaagacactaaaagctgagattacaacgcttggtgggcgtgtaaagaatagttctgtttataaccggagaggaagactccagtagtagcgctgagcagcagcagcttctgctgcagtattgtattagttcaatacaagaagcattgaaagcggtgatggagaagacttccgtggacgaggcttcttcagggaatgtgaagagacatagaaccaacatcggtgtcctggaacataggtctctttagcttacaaaagaccgcgggccccaactttttttt

SEQ ID NO: 196435 - DNA, 633 bp, Gossypium hirsutum
  unsure (1)..(633): unsure at all n locations
aaaccctcaacccctctccctttatcagttactttcttccagctccatcaaaagataacaatggcgggtagattaggcagacgagttgtccacttcgccaaccttccaatcaagctactaatgcccaacaccttcaccaacatcacagaaatagccctcaaaaccatcccatccgcatccaagattgagatcaaacgcgtcctggaatccctctacggtttcgacgtcgacaaagtccgtaccctcaacatggacggaaagaagaagaagcgcggcggtttcttaatcgcccggcccgattacaagaaagcttacgtcaccctgagaacccctctttccatatccgagaacctcttccctatccaggtgattaaagaggaaaaagacagtattaataagaccagtaagagtaagagcattgtggaagaaggggaaaagaaaaagcattggcttgacggcaaggtgaaggatgatggatcacacagggggaaagggaaagggaaaggctcttatgcctcancccgtggcggtgaccgccgcggtggaggagaggccaagtntccttggagcagcatgaggaaagctanttaggtaggtanggtttgtggctttttgagttttcctttcccctcc

SEQ ID NO: 196436 - DNA, 675 bp, Gossypium hirsutum
ctttgaaattgaattttttttttcaaattatccataaagcaaaaaatcaattgtatttgaaatttgaaatcaaatggcaacttcaaggccttattcatctcattccacggctccatcggcgccggagctgcctccacagtcatacgaccaccaccaccagccgccgccgccgccgccgcagcaccagagctattacggacagtacccgacgccgtctccgccgccttcgtcatcatcaagttatgggccgagtggtggcggatttccagcaggaacatctccagatgttataagaggcgtttcaaatggtagatagggatcgaagtggattcatcgatgaatatgagttgcagcaggcactgtcttcaggttaccagaggtttaatcttaggactataaggttgcttatgttcttgttcaagaatccttatgattcactcagaattggtaagttgatttcttttgtttttttgttttttaactattttcaacataaaattgaagaaattatctgcataaattgagacttgaatcaaagaattaatggtcttaaaatcactgtttaccacaaaactcattgattgaattgaactgccatggtgctattttatttatttgtttattttattgtgcttaaatgcaaagctatcagattcaaatttgagtatgattgca

SEQ ID NO: 196437 - DNA, 507 bp, Gossypium hirsutum
gatatttgtctgctagctgagtttccatcggaaggatggtacagtttactcttaaacctaattagttggtagtcgcatcattgttgttagtgtttccttttttcccctcctcacataagcattctaagatcagaaattggaagttcctgggaaatgaatatcgcattttgacttgtttttcttggctttgcagcttccttgacatagaccacatgattgatagtgattttaacagtgagctcagcctgccattccagcagagcggcgaaacttctgacggtgcattggttacgagttcatttgagagcagttataatagtgatcaaggtagcggttatgaggagtatcaagattcaggttttgtaatttacgaggaaagctcacatgaggaggattttctggtcgtctaaaaaaagctaccagagctgacgagttcttaaacttgcagccactaagtgatcggataaccaggaaagatgctctctttctcataactgaagctgataa

SEQ ID NO: 196438 - DNA, 666 bp, Gossypium hirsutum
cttccttctccatttcactctcattaaaccatagctccaaggccagccagctcaaaccaacttttttttttcatttctcatgctcgccattttctagttgcaagctttgggtttttcttcttctgagttttgaagttgaaaaaggcagaatcttgtgctgttaaaacatggaaagaagctcatgttcaaggcttttaattgtattctgctgtgctctgtgtttggagtgtcaattggttcagtgcagtgttacctatgataggaaagccattgtgattaatggacagaggaggatcctcttctctggttctattcattatcccagaagcactcctgagatgtgggaagatctgattcagaaggctaaagatggtggacttgatgtgattgagacttatgttttttggaacgtccatgagccatctcctggaaattataattttgaaggaagatatgaccttgtgagattcgtaaaaacagtacaagaggccaggtctctatgctcatcttcgcattgggccttatgtttgtgctgagtggaactttggagggttccctgtgtggttaaaatttgtgccaggcatcagcttcagaacagacaatgagcctttcaagagagctatgcaagggtttactgagaagattgttggactgatgaagagccat

SEQ ID NO: 196439 - DNA, 483 bp, Gossypium hirsutum
gtattattcctcctcaactttgctcccattaaaccacagccacaaccagctcaaaaaccccatcttttttcctccattaaagcttaaagcttgagttttttgagctgttcagccatggaaggaacctcattttcaaagcttctacttgcattttgcttagctttgctctatttgagtcctcagcttggtcaaaccagggttccttatgataagaaagctattggtatcaatggtcaaagaagaatcctggtctctggttctattcattatcccagaagcacacctgatatgtgggaagatctgtttcagaaagctaaagatggcggacttgatgtgattgagacttatgtttttcggaatgtccatgaaccatctctctggaaattataagcttgaaggaggatatgacctttggagattcataaaaacagtacgaaaggccaggcactatgctcagcatagtattggaccttatgattgtgc

SEQ ID NO: 196440 - DNA, 649 bp, Gossypium hirsutum
tagaccggtacctctcggggaataccatgaacaggcagcggctacagttacttggtgttgcctgcatgatgattgcttccaaatatgaggagatttgtgcccctcaggtggaggaattctgctacataactgataatacatatttcaaggatgaggttctagaaatggaatcatctgttttgaattacttgaagtttgaaatgactgccccaacagctaaatgtttcttaagacggtttgttcgtgctgctcaagggatcaatgaggttccatcaatgcaattagagtgcatggccaactacattgctgaactgtctctccttgagtacagtatgctttgctaccctccatcactcattgctgcatccgcaattttccttgctaaatttatacttcttccatcaaagaaaccttggaattctaccttgcagcattacacactgtataagccctccgatctatttgagtgtgttaaggaccttcatagactatgcttgaacaacaacaattctactttgcctgcaatcagggagaaatacagtcagcataagtataaatgtgttgcaaagaagtattgccctccttcaataccttcagatttcttccacaactgaagaaggcattggacaccatcagcaacagcacaact

SEQ ID NO: 196441 - DNA, 626 bp, Gossypium hirsutum
cccacgcgtccggttgatgcatagggtctggtttttaatagtagaaatgaatgaagggttgacaggataactagtttgctcattgatttaacatccagtgattcatttgcctacttttcttagagggtgcaaaatgcaaacggactcctagtacaagggcctccatgaagctgggggtgtggtcacagatgctgcatggcagccattggatttttcaaagggaaagtatcttgatctggacacaggcatcattgtcaccaaccagaagttgatgccattacggtttaatgcagttagaaaatctatccaggagaaagcttcatctttgttgattcattttagaggcaggcttcatcctttcctcctaacttgctctgttaagctggctgaaacttgattatttttgccttcaatgcttgaacttttatcattcttctccccaatgctcataggaagatttacatttagcatgcatgaacaagaatgggaccaataaatctcatctctacaattatgacaacgtaattttagactatgaacttgaaagcatggtcctaggctttgagcccttctctttgttcaaccttgcaattggggttaggggtgattaattatataaagtaaca

SEQ ID NO: 196442 - DNA, 878 bp, Gossypium hirsutum
ttcctttccatccaaacaacaggctctctttcccgtctctgcatttacgttctatttttttttagatttatttttttaaaaaaaactaaagggatttgagttcgtctggatttgaagtactttcttgagcatatatggaccgtgctgaactatccactgaacaggttctgaagagggacatcccatgggaaacatacatgacaactaagctgatttcaggaacaggcttgcagctgttaaggcgttatgataatagagctgaaagtgtcagggcacagttgttggatgatgatggtccagcctatgttcaagtgtttgttaacatcttacgggatatctttaaagaagaaacagtggaatatgttctggctttaattgatgaaatgcttacagccaatccgaaacgagccagactatttcatgacaagtctcttgctaatgaagatacttatgaacctttcctaaggttgctgtggaaaggcaactggttcatacaagaaaagagctgcaagatactggccttgatagtaagtgcaaggccaaaaacccaggatggcgttgttgcaaatggagaaaattcaaagaagaagggcactaccattaatgatgtactaaaggaattggttgaatggctgtgcacacagctgaagaagccttcccatcctacttgtggtattccaactgctattaactgccttgcatcattactgaaggaacctgtcgtcagatcttcctttgttcaagcagatggggtgaagttactgattcctttaattactccggcatctacccagcaatctatccagcttctctatgaaacatgcctctgcgtgtggctgttatcttattatgagccagcaatcgagtatttagcaaca

SEQ ID NO: 196443 - DNA, 640 bp, Gossypium hirsutum
gaaccagctgttggtaatacccctttctgcagtggctggacttttaggaagtatcatagattctctgttgggagcaacccttcaattcagtgggttctgctctgtccgaaataagggtgttggaaaacctggaccaacagtgaagaggatttcaggtcttaactttcttgacaacaatgcggtgaacctcgtctcgatactactgaccacactgctgacttcatttgcctgtgcgtacattttctgattccttaatactcttcagccggtttagacagtgtatgttttgataaagtcgaaacaaatctcagaaaaggatccagttcccataaaaaacttcgtatgtgatgtgaatcaacataaggggaaacggtttaccatttgtgcctggaaataaagattaccatgttgctcgactggctaggttagaataaattcagaggcgagttgttcttatcttggaatgatcttttgcaacttctttttgtgctatgcttctcaatgttttaatttctcaatacaacccaattttaagggaaaacagagagaaacattacataacaacgaaatgctttgatcataaaggctacactacccaatatcttttccttcaatgaacatgtgaaagtatattattatg

SEQ ID NO: 196444 - DNA, 548 bp, Gossypium hirsutum
agataaattattggccttacggtatcgatttccctaaaggacccactggaaggtttactaatggtcgaaccatgcaggatatcattgttcaactactgggtttccaagaatttattcctccttttgccacttcaagaggccccgagattctcaaaggtgttaattatgcatctggttctgctggaattctcaatgatagtggccaacatctgggtgttcgaataagcatgaacatgcagttaagcaaccaccaaagtgttatctcaacaatagttgagatgttgggaaattgtgcagcatcaaaagcttttaggcaaatgcatgtatgcggttcaaataggcagcaatgactacattaacaacctatttcaagccagagatgtacaacagcagccacctattcactccagagcaatatgctgcttatctcatcgaacaatattcacggcaaataaagactctgtacaataacggcgcaaggatgtttgcactgttcggacttggtgccataaggtgtactccaaatgcaatcgcggtgcatggaacaa

SEQ ID NO: 196445 - DNA, 534 bp, Gossypium hirsutum
cccacacgtgtccggagacgtgctacaagataaaaaggattttgctttgcctaatttgtaagctttgaggttgactgaaaaaactatggcggaagagggacaagtaatcgcctgccacactgttgattcatggaaccagcagctcgagatgggaaaccagtccaagaaactggtggtggtggatttcacagcatcatggtgcgggccatgccgttttatatcaccaatcctggtggatcttgctaagaagctgcccaacgtcatattcttgaaggtggacgtggatgaactgaatactgtggctcaggagtgggctattgaggcgatgccaacttttgtgtttctgaaagaaggcaccataattgacaaggttgtgggtgcaaggaaagaagaattgcagcagaaaattgcctttcattcatctaacccggtgcagacagcatgaatcaacatttaaatgtacttgatgtctggagttgtttatgaaactaggatcttatgaatgtctgacagacagaccctaaataatgtgtg

SEQ ID NO: 196446 - DNA, 1135 bp, Gossypium hirsutum
tttgttgttggccttggtgacaaagtctcaccaactgatatagaagaaggcatgcgggtgggggttgatcgcaacaaatatcagatacagattcctttgcctccaaaaattgacccaagtgtcaccatgatgaccgtggaggagaaaccagacgtgacatataatgatgttggtggatgcaaggagcagattgaaaagatgcgtgaagttgttgagctacccatgcttcatcctgagaaatttgtcaagctcgggatcgatcctcctaagggtgttctttgctatggtcctcctggaactggcaagacacttcttgctagagctgttgcaaacagaactgatgcttgcttcattcgtgttattggaagtgagctggttcagaagtatgttggtgaaggagctagaatggttcgagagttgtttcagatggcacgttcaaagaaagcgtgcattgtgttctttgatgaagttgatgccatcgggggtgcacgctttgatgatggtgtggggggagacaacgaggttcagcgtaccatgcttgaaattgtgaaccagcttgatggctttgatgctcgtggaaacatcaaagtcctgatggcaacaaacaggccagacacactagatcctgcattattacgtcctggacgtttggatcgcaaggtcgagtttggtcttcctgatttggagagtcggacacagatattcaaaattcacacaagaacgatgaattgtgagcgtgacattagatttgagcttttagccaggctttgtcctaattccactggagctgacataagaagcgtgtgcacagaggctggaatgtatgccattcgggctcggagaaaaactgtgacagagaaagacttccttgatgctgtgaacaaagtgatcaaaggttatcaaaagttcagtgcaactcccaaatacatggtttacaattaaccgggttttacctctaccaactcctaaagacatgttctacattcaaaccaaaacatatatacctttttcaatgtattggaatagatattcaatgctgtttctttttatgaatttgagttgctttaatgtggattttacacttccctatatatacactaatggtcaatatatagacattgatttttactttact

SEQ ID NO: 196447 - DNA, 411 bp, Gossypium hirsutum
aataataaattgcatctcattaaaaatattttatgtatgaaattttacatcatcccgtgaaaaaggcatcaatttttgttaaaaaaacaattttaaaaaaaaataaaagttgatggtaaaaaaaggtttaaaatacaattaaaattattttgacaaaatatgtaaacgttaatcactgaattatcattaagccttctgaaatttatccctttctactatcagaatgaattttccattttcaattttttttccccggtgatggtgtttgggccttagcccaactataacccaaagatataatttcgacgccagcgcgcaagattgacgtagaagaaagatgagtgccgaaaaagaatcctctgtctctcaacgtcgcttgtcctgcactaaatgcttggacttgctctggtt

SEQ ID NO: 196448 - DNA, 478 bp, Gossypium hirsutum
  unsure (1)..(478): unsure at all n locations
ctaatttaaaaggggaaaggcagagccaaacaatctccgatatgagcatcaatatattcccgattttattctgttcgataattgctttgtgttgtttaatccaaatggctgaatctacagacgcaacgaaatcatcttcggcggcggcggcggcggcgggtgggacggatgcggcggtccacatcgtttacaccgagaggcctcaggatgagcagcctgaagcctaccatatccggaccctctccaacgtcctcggcagcgaagaagctgctaaggaagccctgatctacagttacaagacggctgccagtggcttctccgccaagcttactccccaacaggttgccgaaatatcaaaacaacttggtgttcttcaagttgtcccgagcaggacactccagctacattctggaccaggcaagctgcactaaggctcaagaaactcttntaccctactaaaaacaaaatcctatggaac

SEQ ID NO: 196449 - DNA, 561 bp, Gossypium hirsutum
ctcacggttttggcaaacaaagaaatataaaggaaccccactgtaaccaatatccccaagccttcttcctttcaagcaattatatcattgtaagttagcaatggagaatgatctcaacctcaaggcaacagaactgagattgggattacctggcagtgatgagcccgagagacaaatgacccctaggcctaacaagagaaccttatctgacattgtttctgagggatcaaggtcgaccacagaggaagatcatcaagacactgctcctcctgccaaggtgcaaattgtaggatggccaccagtccgatcataccggaaaaattgtttacaaggcaagaaagatgacgttgaaggcgggacaggaatgtatgtcaaagtaagcgttgacggagctccttatctcagaaagattgatctcaaggtttatagaagctaccctcaactcctcttggctttggaaaacatgttcaagcttaccattggtgcatactcagagagggaaggctacaatggatctaactatgctccaacatatgaagacagagatggtgactggatgct

SEQ ID NO: 196450 - DNA, 478 bp, Gossypium hirsutum
atgctttgttcaaattgtaggatggccaccagtccgatcataccggaaaaattgtttacaaggcaagaaagatgacgttgaaggcgggacaggaatgtatgtcaaagtaagcgttgacggagctccttatctcagaaagattgatctcaaggtttatagaagctaccctcaactcctcttggctttggaaaacatgttcaagcttaccattggtaagatttcaaaacatccccaactgttgttttcccttgacaaatcaaatgaaattaaccccatgataaaaagctgtagtctgattggtttttttttttatctgcaattttaaaggtgcatactcagagagggaaggctacaatggatctaactatgctccaacatatgaagacagagatggtgactggatgcttgttggagatgttccctgggagtaagttcctctttcaaacctttttctcttgaactatatatacatataccc

SEQ ID NO: 196451 - DNA, 453 bp, Gossypium hirsutum
cccacgcgtccgcccacgcgtccgcccacgcgtccgcccacgcgtccgcccacgcgtccggtaacaatggccatatccgtccctattttagccatcatctttgctctccatctcatcgccttcgtcttcgccgtcggcgccgaacgacgccgtagcttcgctgaggtggtgcctgatcagtacgacgagaggacctactgcctctacagtacggatgcgtcgacggtgtacggactatctgcttttggtctgctccttcttagccaggttgttgttaacggcgttactagatgtctctgctttggcaaaggccttgtctccgccacttcatccaccacttgcgccatctttttcttcgttttctcctggttaagctttttgggagctgaggcatgtttactggcgggatcagcaaaaaatgcataccacaccaagtacagaggaatctttggc

SEQ ID NO: 196452 - DNA, 624 bp, Gossypium hirsutum
gatttaacttattctgtttgattatattagaataagaaatgaaataaatgaaaagtttacaaaccatttcttctatttattacatgaatcttttaccatggtccatatttgccatgttgggtcacatttaggaaccccatgactaagggtttatgtagaacaaaagaggagagttaccccttattcttacaaactttggttatcagagaaaaggtagatttgggggtattggagtacctattcatttcttgacaaaggcaacccccttctcaatgctagtttctagttctttctttgccttctccaagccaaccctctcatactcatttagtgggccaagagggtatatttcctcaactccgcaacgaccgagtcttaccttggatgcgaagaagggcaattcagtcacatgagaagccacaaatgcacatcgaacaatgtcagcatcacctcttaagccccgaagacatgcatcggcaaattgaaccgcagcatatgccatcgataatgttgcagacccagcaccagcctttgcctcaacgacttctgtaccaccattctgaatgcggtttgtcagacgctcgcggtcgcgttgggtgaaagagcatgcaggcttaacctcgt

SEQ ID NO: 196453 - DNA, 1301 bp, Gossypium hirsutum
cccacgcgtccggttaaaagtgcacatcacagaatggcatcttcaccctttcaattctccactccagttctcactctcctattatcatcgccgtcgttacgaaaatccccttgtcttcctttccatccttcattattctcgccgccccttacccagaagaccctcactttctcgactgggactagagccgtttcggggtccggaaaatcccctggtcttcctttccgtccttcattattctcgccgccccttactcagaagaccctcactttctcgactgggactagagccgtttcggggtccgggaagttctgttggagagccaaggcgtcgatgtccgggaccaccatggagaaagggaaagggaaagtcgaagttattgattccaaggagaatctttcggtttcgctcgctaaatacaccgccgatctagcagctaagttctccaaagagaaaggcagtttcaccgtggttttgtctggcggctccctcatcaagtctctcaggaaactagtggaacccccatatgttgatgcgattgattggtcaacatggcatgttttctgggtggatgaaagggttgttcctaaggatcatgatgacagtaactataagctagcttttgatgggttcctatcgaaggtacagattctccctggtaatgtatacgccatcaatgatgcactgtctgctgaaggtgcagccgatgattatgagacttgtctcaagcacttggtgaagagcaacgtgcttagtgtctcaacagctactgggtttcctaagtttgatctcatgcttctcggaatgggaccggatggacacgtggcttccctctttcctggccatcctctggtgaaggagaacgaaaagtgggttaccttcattaaggactcaccaaaaccgcccccggagagaatcacctttactttcccagttatcaactcatctgctcacattgcacttgtgatctgtggtgcttggtaaagctggtgcggtgcattccgcattgggaaatagtcaaaattccgatccactgcctgttcagatggtttcaccagaaggggatcttgtttggtttttggacaaagatgcagcttccaaactataagttttgaagcctatagcttatctgagttgttactcgagacttactttgagtgtgttaaattggagttaactggtctgagcagtgattgtgctaccggagttcgtctccgctatagttatcgactagcaaccattttcttctttttctcatgatgaaaacatgctatgttcaataaaacgtatttcatggttgc

SEQ ID NO: 196454 - DNA, 721 bp, Gossypium hirsutum
ctatctacctctctcgtccggtatccagaaccagatgtttacgaggaaaatagaaagtattccccaagagatcatgtcagcaagagggatcttggctatttcaactctgacatccgatataatcgttacaaggaccaacagagaccaaattcccagagtttcaaataccaaccaggtgatagtagaggcagagcttatcgtagggcatcgagaagtcctgaggctgacactaaccctcactatggaaggtctattgatagcagaaagcatagagaaagaagaggtgcatcacccttggaaagaagctggaaaagggaaagatctccatcaaaatcaacgtctcagagatattgccatgaggattctagtttcggaaggtcggggagtttcagataccagtcgggtgatgatactggcagaaactatcatacagtgtaccaaagacccactgatgtcgatatcccccacgatagtaggtttattgatagcagaaaacatagagaaaggagtggttcatcgcatatggaaagaaactggaaaatgaaaaggagatctccatctaaacctaagcatcagagttatttcgacaaggactcccatagtttcagatgccagccgggtgacagtagaaccaaaagttatgacagtaaccctcaccatggaaggtctattgatagcaaaaagcatagagaaaagagaggtgcatcacccttggagattg

SEQ ID NO: 196455 - DNA, 518 bp, Gossypium hirsutum
gcagacccttccgaagcacacgattctcatgagacagctgaaggcgagacaggtgaagggaatggggacaattcggaaccgataactcggtcatgtacatacagctacgaccagctgaagtccaaatctgaaaatccagtaactggaattgacttcaaacgcagagagacttatttgtccgatgaggagttcgagacggtattcgggatgccgaaagaagcattttacaagttgccaaagtggaagcaagatcttcaaaagaaggaagttgatctattctagagcttcatgcacttgaacaagtgatttaagtgtttccgctgcattctacctagcaatccctcctatatttgatcttcaattccgcccaaaaatcatgggttcgtctacacgatgcctggattaccatttttgtgccctttttccttcttgataaacgtacgtgtaattagtattcggatggattccgatgttgcatggattaccatgaactcatattggaatgtttcgcaggtcaa

SEQ ID NO: 196456 - DNA, 394 bp, Gossypium hirsutum
cccacgcgtccgagtttttcaaccgggtttgaatgaaaagttggatcgaacttctccgcattgggatgacatcccagagatcgtgctggctgatgagccttacgtcggtcacgagtttgaatctgaggcatctgcacatgctttttataatgcatatgccacgagggtaggattcatcatgcgtgtgagcaaactttcccgttcgaggcgtgacggatctgctatcggtagggctcttgtttgtaacaaagaaggttttagaatgcctgacaaacgagaaaaaattatgaggcacagggcagagacgacggtcggatgcagggcaatgattttggtgaggaaagtaagttctggtaaatgggttgtcacaaaattcgtgaaggaacacacacat

SEQ ID NO: 196457 - DNA, 776 bp, Gossypium hirsutum
  unsure (1)..(776): unsure at all n locations
aaagctcggagatacttgagcagcatgcgaaagaaaaagccaattcctctctcccacaagttccctaatgcagatcctcttgctgttcgtttgttagaaaggatgcttgcttttgaacccaaggatcgacctagtgctgaagaggccctagctgatccatatttcaagggcttggccaaagttgaaagggagccttcctcacaaccagttaccaagatggaatttgagtttgagagacgtaggacgccgacgcgtgttgttagggagctcatataccgggaaattcttgagtaccatcctaaaatgttgaaagagtatctggaaggatcagagccaactggcttcatgtatccaagtgcggttgaccatttcaagaagcagtttgccttccttgaggagcactatggaaatggtacgactgcagctccacttgagagacaacatgcatctttgccaaggccatgtgtcttatattcagattattcagtacaaaactcaacagatgtgacagataacttatctaaatgttccatcagggaaactgagaaaccccaaacagagagaagctttccaatccctatgtcaagggcttccccctcaagttcctcaaagcatccaagggtgctgccagaccttggaaagtagttgatagtattggatccaacaattgtgggcatanctgcagtaagtcttgacgcnaagatgctcggaacctantncactantactgccaaatggttttcccggnaatccgttgtaagatagaatgatgtcct

SEQ ID NO: 196458 - DNA, 582 bp, Gossypium hirsutum
cccacgcgtccgcccaaacagagagaagctttccaatccctatgtcaaggcttccccctcaggttgctcaaagcatccaagcaggtgctgccagacctgggaaagtagttggatcagtattgcgatacaacaattgtggggcattagctgcaggtgaggctcttgaacagcgaaggatggctcggaatccttcagttccaactcagtatactgccacaaattgctcatatccacggagaaatcccgtctgtaaagatgatgaagaaaatgaattgcagccaaaaccccagtacatggctaggaaagttgctgctgcccaaggtggatcaagaagtcagtggtattgacctaatatcaactactaatggccaacaaaaaatgccggtgaggatctagtcccaaattgctcttcctactgctggttgaggaaaagctcagacaagttacaagtgaagctatgcattgtaatttatagcactaatttcaaagagatgaaactgtgcctacctatccttcataagatatgtgaaagttagagacttgaggaaaaggcaaaagtgaactcttttaacttatgaagtt

SEQ ID NO: 196459 - DNA, 614 bp, Gossypium hirsutum
gcaggaacttaggagggttaggtctgggattttaggtgagaaagataatatggtgaccatgcatgatgttatggatgctcaatgggtttatgataattatagagatgagacttatttgaggagggtgattatgcctcttgaagtccttttgactagttataagaggctggttgtgaaggactctgctgttaatgctatttgttatggggcgaagttgatgattcctggattactgaggtttgagaatgacattgaggttggggaggaagttgtgttaatgacgacaaaaggagaggcaattgctctgggaattgctgaaatgaccactgcggttatggctacttgtgatcatggtgtgttggcaaagattaagagggtagtttaggacatagatacttatccgaggaagtggggcttggggtcaactgcatccatgaagaagaagttgattgcagaaggcaaattggataagcatggaaagccaaatgacagcactcctaaagagtggttaagaaatgtcgcgttgccaactggtggggattctatggttgccagcctagcagcttctgctgaacctgcggcggtggaaaaggaaaaggaggatggagaggggc

SEQ ID NO: 196460 - DNA, 562 bp, Gossypium hirsutum
ttcttggaggggcttgagaacattctgaagggtggggaggctgataaggaaatggggatgaacggtggaatcaatctatatgcacaaatgatagatgagtgcgatgggttggataaaattgaaaacctgcaaactcatgacaaccatgagatatacgagaaggctgtgaagatcttggagagatactgggctgaagaggaagaagatgaacagaatatccaagatggtgggaatgaaaatcagcaaggctttaattttggggtgaaccagcagccaagtgttccacctggtggcttcaaatttggttgaagtgtttttagtttgggaattggggccctagttttgtaggtctactacattggtcgcaatgaaatttttaaaagacttgtttttatgtttttgcaatttggtgggtgggtgccaaggggtcagggtttttgttctggcgcataggcttttgctgtgtctggttttggtttattttggaatgtgttgaaagggtttaaactttgatttgtatttctatatttacataggaaaaatattccttgtggttgtggtc

SEQ ID NO: 196461 - DNA, 382 bp, Gossypium hirsutum
cccacgcgtccgccctatcttcgcatcctcagctttagcttaatctcttgtaaaagccatttctttagcttgttgtttatctaagtttttgctccaatgtctgattctggtggttcagcctctgctaacaggatgttgtgttccgttcctgaaaggctacagctgcatatggccatgttggccttgcagtttggctacgcagggttccatgtggtctccagggctgccctaaacatgggaattagcaaacttgtattcccagtttataggaatatcattgcgttgcttctgctccttccctttgcatattttcttgagaagaaggagagacctcccattactctaaattttcttttacagttctttctcctcgctcttgttg

SEQ ID NO: 196462 - DNA, 758 bp, Gossypium hirsutum
  unsure (1)..(758): unsure at all n locations
ggattgcaagagaaatggaaatcaatttcataaagtgctcttatcctgcctgccccttgtgttcaattctttttttgttgcatttcataatgataagtgattagtttatggtgaatgaaggtttcattgtttggcggagtttgatgaaggaaaacgaagttgcaggaagcgtctcgatggacataaccgaagacggagaaaacctcaacctcaacctcaacctcattctctatctgtaaatccaggaagatgtctttccaatctccaaggttctagacatttaccgtccagtagtccccaaatatttgccactactgccataacctcttcttggttgggaactgccaaaatggaacctgatataggctcggaatccagccgaaatggtttcttccgtggatcctttccacacagctacaaaagggaagaacagttgtcattattacaaaccaatcattcatcactccatggagtttctgtttatcagttacctttattaagcaatggtgtaggcagcagccaaaaaatgttctcaaatgcgatcgactccgatcgtgctctctctcttctgtcatcacagccggctgagaactcgggagattggttttgaaacccatggtgctatctggtccaacttcatcactgatcccaaacatgcaatataatggtgtancaatggaaggtgagcatgtttttggcactnngacgcatgataacacaacatctatggacaaaaaatgtttggatctgcaaatgtc

SEQ ID NO: 196463 - DNA, 730 bp, Gossypium hirsutum
aggagcccaaaagggaattcggggctcccggagcccctgagttccccaggaaaggggagggtttgccaccccaagagcgggggcgttcccggggagcccgattaaggccaagaatttaaggggaaccccgtggccccccccaggaaaaaacgggggggccgctctctattggcaatcggaggagaaaatggaattctttcaatcaaaagtgaagcaagcagttggagtactaaagtctcagttcagcagtgaaagcaacatcagtgcaatcgatgctatccaagagttagaagtacttgcagctatggacattaacaaaccatttaaagatgatgttcagccaccgcccccaccacccccagcaccagaaccgacacagccagcaccgatgccccaaaatatggaaggacaagtgtattaataacgaagccctatctctctgtatgattattaagaaggcaaggcgtggaagaaaatgttctgaccctagacatatgatatttctgtaaagggaaaagtaggaagttgcagatcatctaatttgtgttgttattgttgttgaggtgtgtgttcgtttgtgaaccctgttcatcgacttttaattattccccctcatttagtgcaacattagtcaagcatccttgttcgcttggtttttgcttgagtgttattattattattatgaatttgatattagtagtagtgtatttgaaatatccaaaaaaaaaaa

SEQ ID NO: 196464 - DNA, 664 bp, Gossypium hirsutum
tcgcgagtgccggggtcgccgcgaagcccatcaaccccaagaaatctactggaaagccttgttggccgccccaagaagacaacggatggagcagcatcatatggcgatctgaagagaaaacttgaattctttcaatcaaaagtgaagcaagcagttggagtactaaagtctcagttcagcagtgaaagcaacatcagtgcaatcgatgctatccaagagttagaagtacttgcagctatggacattaacaaaccatttaaagatgatgttcagccaccgcccccaccacccccagcaccagaaccgacacagccagcaccgatgccccaaaatatggaaggacaagtgtattaataacgaagccctatctctctgtatgattattaagaaggcaaggcgtggaagaaaatgttctgaccctagacatatgatatttctgtaaagggaaaagtaggaagttgcagatcatctaatttgtgttgttattgttgttgaggtgtgtgttcgtttgtgaaccctgttcatcgacttttaattattccccctcatttagtgcaacattagtcaagcatccttgttcgcttggtttttgcttgagtgttattattattattatgaatttgatattagtagtagtgtatttgaaaaaaaaaaaaaaaaaaat

SEQ ID NO: 196465 - DNA, 947 bp, Gossypium hirsutum
  unsure (1)..(947): unsure at all n locations
gctgaaattggtcagatgatgagtagagaatttcgagctggagaggaggaacctantgagctanaagttgtttgtcttgaggcaaggaggttgattgcanancgggagctgtcatctcctaagtctgaagtgggagatgcagagttccagtttgaaattgactgtgaggagccagaattggagttcatcccaaaaatggtaactgatgattctatgaccagagcatcattccaatttggaaatggatttgtgaataaccaccaccgtttaccactttcgaagctggaggaatgctttgaggaagatgaagaaagtgaattggaagctgagcagaatggtttttctcctttcgaagctcttgaaaggatcccatccatttcgaagctttcaatgtcacttagagatacttgcttatgtgacaagagccagaaatattccaaattttcaggaacaaaacaagaaaatgggtatcttacaagctcatcccggcgtaggagtgctaatgagcaacttcctgcaagtgtgagctttgtgaagctggctgacctgaatgaagaggaatggaacttcttcttggagaagttccaggagttgctgaagccggcattcaggaagcgaaaatctgttaccgtaggtcaaaagcagatgcagaggcttggtacatcgtgccagttttgagatttgaggggataccaaaagaggcaagttgagttgagtgaagaagaaataagagattgtaggtttgttgggagttgagatgcatggattggtaggatagatacagtgatatggatttgcatggaatgttgtaggatgaatttccctgtaaataatctttggcttcagccaattggagagggaaatgaggttagtagaaatgcttggattttttttttcttaaaccctttagctttgattttctttctttggtcccctttgacttttca

SEQ ID NO: 196466 - DNA, 430 bp, Gossypium hirsutum
gacgaaaacacgaagcaaagtaacgaaatccctcccccaaagccagtagtcgaagcctgggccatcacagcaacatgtgcttgacgttccaaccatccgcaccaaactatccttttctttacttcattcatgtagagatgtcaagtcgatttcatatgggtgtgatcacttctttattcccctttatttaccctgtggtagggaaattgtatttgaataagaggactgagtgtttagtctttaaggctctctaattagtaaaacaaaatctgttccagctataaaaggaaggtgtagcagaaggaggagaagaaacaaagaacaccaacctggctgttttattttataccttaatgatttgctttattattcttgtttgtatactatcccgcatttagtaatcaagatgaataattccccccgccaaaaa

SEQ ID NO: 196467 - DNA, 408 bp, Gossypium hirsutum
ttttctggaaaactgctaagaaaccacagagtgagagagtgaagaaggcgggtaatgaggcagctaatgttgatggtagtgggaatttgagtggtgcgtccactgtgccagaaggtgtggtgactgctgaatcgagtagaagaggagttgttaatagtgggaggaagcagatggcgaggggcacaaagaatttggggaagttggatttgaatgtggagtttagtaatgaagttgaagagccggcaccgaggaggaatgaggggaatcaccccagctatggggaggaggataacattgaagggaatgggttctttgagggtcttgatgagtttttgagtagcttgcctatactttcagctgttggggatgataaagttaaggctacttagtgaagtaagatccttgctt

SEQ ID NO: 196468 - DNA, 522 bp, Gossypium hirsutum
cccacgcgtccgcggacgcgtccgcctttccatctcccaaatttcaatttctttttcttctgattttccatgttagggaagcgaggtcgacccatgatcggaaacttatctgaattactagttccaacacataaatccgggttatcggatccttcaaggagccccaaaagtccactagacttattcaagaccccatcatcatcatcaagaagagggtcgatgaagagatgctatgatgtttttggtgatggagtagggcttggaatcattgcttcaatggagaaatccactgttgatcatcatccttcttgtaagctacaacacaccatttgtagattcaaaggaagatttcaagaaaattcagaagaggattacacttttgttacaagacatggagaatcatctacaaaagtttattttaatggaggtgacgaagaagaagaacagagacttgttggaaaaattaaggaaattacatctttaaaacccagatttgtgcaagatttcaactacccaacatca

SEQ ID NO: 196469 - DNA, 792 bp, Gossypium hirsutum
tttcacgcgtccgaagaccttgaaatctactcgatcaggtacaatgccaagcacgagaccgtgaatgtcccaggtactggttccctctggccactttctgcccaatctcccattgggaagtgtggagagcctaacagatgcgctccacaccttgagtggaatcctgacttggactgctcctgcagggatggcgagaagtgtgcccaccattctcatcacttctccttggacatcgatgtgggatgtactgacctgaatgaggacctcggagtctgggtcatcttcaagatcaagacccaagacggacacgcaagacttggcaaccttgagtttctcgaagagaaaccattggtcggtgaagctctcgctcgtgtgaagagagcagagaagaagtggagggacaaacgtgagaaactcgaatgggaaactaacatcgtttacaaggaggccaaagagtccgtggatgctttgttcgtgaactcccaatatgatcagttgcaagccgacaccaacatcgccatgatccacgccgcagacaaacgtgtgcacagcattcgtgaggcttacttgcctgagttgtccgtgatccctggtgtgaacgctgccatcttcgaggaacttgagggacgtatctttaccgcattctccttgtacgatgccagaaacgtcatcaagaacggtgacttcaacaatggcctcagctgctggaatgtgaaaggtcatgtggacgtggaggaacagaacaatcagcgttccgtcctggttgtgcctgagtgggaagctgaagtgtcc

SEQ ID NO: 196470 - DNA, 419 bp, Gossypium hirsutum
ctgccttgttgctgcaacccatcaatgacaaagatcccaccgactcggcctccgcctcttctttatcttccaacttggttgagtcagtcaagaccatctgcaacgtgactcggtaccctgactcatgtttcaccgctctatcttctcttaacgcctctacaaaacctgacctagaggccttccttgacctctctctccaagtagccatcacccatctctccgacctctcttcctcattcaagtccctcaacgacctccactctcagcctgctttaaaagactgcttgaccctgtttgatgacgccctcagtcgactcaacgactcagtgtctgccatgaaggtgggtaccgggaaggagcttgtgttgactaaggagaagatcagtgatatccagacttggatcagtgctgcaatgact

SEQ ID NO: 196471 - DNA, 491 bp, Gossypium hirsutum
gaaatcatcaaattcaaaggctttcaagtgccaccagctgagcttgagtccctccttataagccatccatcaattgcagatgcagctgtagttccgcaaaaagatgaagttgctggtgaagttccggttgcatttgtggttcgatcaaatggttttgaactcactgaagaagctgtcaaggaattcattgctaaacaggtggtttactacaagagattgcataaggtgcactttgttcatgcaattcccaagtctccttcaggaaagattttgagaaaagatctgagagccaagctggctgctgcagcacctaatacccacattccatgaaaatttcttctataatctatttggcttttaaattgcaacgccttttgctgattttgctttaacttaagcttttaatgtttctaactcaagaggtcctgaaaagaaaaaattagtatggcgatgatcctatgtcatatttaagtttgttctctttttctcat

SEQ ID NO: 196472 - DNA, 555 bp, Gossypium hirsutum
gcctttccagaattccacacaaatatggcactggtgttcatcttgccacagtagaatttactaataccagtgcaaactattgtgatgttgacgaaaatggaataaagtacatgatactatgtcgtgtaataaggggagatttggagcttcttcgtcctggaagtggacagtgttatcctagcaatgaagattttgatagtggagtggatgatcttcagcatccaaagtactatattatctggaacatgaatatcagcactcacatttatccagagtttgttgttagtttcaagatctccaatgctgaagggcgtttgattggaagtgagactaatcatgctgtttcaggcgtcactgcatctactccaggacttcagggtcgtttaccagtattatcatctgccggtgaattggggagtattaatcaccaaacctcagaatcaggtggatcccacgaaaatgatcctagcctgggttcaaacacttcaaagacccctaaatctccttggatgcctttcccaatgttgtttgctgctatctcagacaaaatccctc

SEQ ID NO: 196473 - DNA, 355 bp, Gossypium hirsutum
agaggccagtgactggcctccgactatatctagaaggtaaaaggagtaatcgcttggccatccacttgcagcatctttcctctcttccaaaaatcttccaacttgtagatgatccaaatgagaacttcagccaaatgtctcgtgatcgtaaatactatgagaaagtttattggaagaactactctcatgtatgcactgctcctgtcgaggctgaagaggatctttccatagtaactggagcacaactgcaggttgagaatcatggttttaaaaatattctctttttacggctacgcctttcaactgtcttgggagctatgtctcttaagcagccagaatgggatggatcacctgg

SEQ ID NO: 196474 - DNA, 639 bp, Gossypium hirsutum
aaagcatatgcattggctgactctaggcgcgattcatcttgttcttcaacagttatttcactgcttgaaaatgccttgaaatgcccctcagataatcttcggaaagggcaagctcttaataatctgggaagtgtcttggttgattgtgggaaattagactcagcagccgactgctacattaatgcccttaaaatacgtcacacgagagcccatcaaggccttgcacgtgtccattttctcaaaaatgataaggccaccgcatatgttgaaatgaccaaccttattgaaaaggctaaaaataatgcatccgcatatgagaagaggtccgagtactgtgaccgtgaccgtgacctcacaaaggcagatcttgagatggtcactcgaatagatccactcagggtatatccttaccgttatcgagctgcagtgttaatggatagccgcaaggagaaggaagccattgcagaactgtcaagggcaattgcatttaaagcagaccttcaccttctacacctacgagctgccttccatgagcatgttggtgatgtcttggctgcccttcgagattgtcgagcagctctctctgttgatcctaaccatcaagaaatgttggaacttgcagccgtgtcaacagccatg

SEQ ID NO: 196475 - DNA, 604 bp, Gossypium hirsutum
gaaaaagtttcaggcaaaaacacaacaagctgaagctgccccggggcctaccacgttcaggccgggctggctgggaggttggggaactaggtgtgattgacagggatggaagagaaagaagcagagacagaggaagggaacgggatgatagagaaagtagcaagaatagagagcgtgaagatagggaaagacgccgtagtcgaagcagagagagggataggggaaaggatcggagccgtgattatgattatgagcgtgatagagattatggacgggatcgagaccgaggcagatacttttactgagaaaagaaagaatgggtgacgttaatgtggttagaatatggcaggtgattgaaacattttgagttgaattggcatcttagcaaagactagtgtctagagttggatgtattgtggatttagtgtgatggggtggccacagttttggtactataggagagtttagattttgaaattaaaacagttaatgattttatctccttgctatggtatttcaaagccttctttttagcattcttgaaactcgggatgaatgttcgagcaaaagttggttgacatcattcttcaaaaaaaaaaaaaaa

SEQ ID NO: 196476 - DNA, 452 bp, Gossypium hirsutum
  unsure (1)..(452): unsure at all n locations
acgttcacgtcttccgcccacgcgtccgcatcgttctaacagcgaaggttgtagaagcagctgcgtgagcttcctaagctacctagggtttccttcattcgaaaatgatttacgacgtcaattctcctctcttccgctctttcctcagccagaagggaggctcctccgacaagagaaaaatggaggagcagaagcctaaggaacagagacccaaagcaaatgagaataagcctgtcatgacagagtaacagctgcttttgtttagtatgaatggcaagttggtggatggttgttcttagaactctgatatgttcgagattggaaatgcttgttgatgtattcaaatactgtcacaacggtttttcttctttgagatggaatgatattcaactttgtggatgataaataaaaaaaaaatatgatagggnnnnnnnnnnnnnnnnnnnnnnnnn

SEQ ID NO: 196477 - DNA, 537 bp, Gossypium hirsutum
tgtgcgtcctcacaaagccaatcatctagtttcactcaaaatgttcctcctgaaaagggctgttccgaggagcgtctgcatgatttgtccatggaggcaattaaagaattttacagcgccagagatgagaaagaagttgctttgtgcattaaagatttgagttcttcaagctcccatccgacgatgattgcgctatgggtaacggactgttttgagaggaaagacatagagcgggatcttttggcgaagctacttgtcaacctgacaaggtcccatgatggtgtattgagccaggctgaacttgttaaagggtttgaatctgtcctgagtacattggaggacgcagtgaacgacgcgccaaaagctccagaatttctgggacgtatttttgggaaaatggtagtggaagatgtgatgagtctgaaggagatagggcggttaataggtgagggtggggaggaacctgggcagctagtggaaatagggctgggcggggatgttatgggaagcaccttggggatgattaaaagagagaaa

SEQ ID NO: 196478 - DNA, 456 bp, Gossypium hirsutum
cccacgcgtccgcccacgcgtccgtttttcttcggtttctctgcctgtccctccttgaagacaagaatcagagagcatggcagccacactcagcctcctgaaatccccgttattaccccaaaagcctcaccttctacaatctaaactccccctcctttctaaccccacaaagcaatttatctgcaatgagtcttttaaccctccaaaactcttcgctgagactgttcatcacctaaaatcagcttctcttccccttacaacactcgcatttcccttcttatttgacgccgaggatgctcttgctgttggtggagagtttgggattttggagggtagaagttttgcacttgtacaccccattgtcatgggtggtctcttcttttacactttgtgggctgggtatttgggttggcaatggaggcgagtgaggaccatccagaatgagattaatgaact

SEQ ID NO: 196479 - DNA, 730 bp, Gossypium hirsutum
  unsure (1)..(730): unsure at all n locations
gccttgtttnttcctacaaaaacgtaggagttgagggatggttttgttaaaattaaagttcctattggcgatctcctttggtcgacaatcgacaatccccacccagcagctaacttcttgtttttatttttgttcttcagtctgaaaatcagtgagagatcgaagagatggcctttttccttggacaaagtagccttgcgaaccacttccgatcttatcagaaggcagaggcttccatggctgtgccaacacgagcatttcatgttgaacttggggatcgtgagaaagctctcttggcaaaggacccttcgttaagtcgttttaaatcttataagaagagtgtgtcgacactgaagagaattggggatgttcttacagttgttgttgtagcaggttgttgctatgaaatttatgtcaaggcagtaatgcgagaagaagctaggaacaaggcaaaggctggtggtggaagtaaatgaggctgtgcaagctttggcctgtgtgtggaaacgaaaaagtggatgtcagcatttcatcttgtttttggcaatgctgttttagattttaaagattttgcctagtgataaataagcaaaactgacatatgttatgacattgttgaagaccctagtctgcaaatttccatcatgttctcatcatatgaattctgtcataaaaaaaaatgatgattccaataattatagaaactagcccggtaatagggtttgggagt

SEQ ID NO: 196480 - DNA, 375 bp, Gossypium hirsutum
cgtccgggcttcttctagggtttctttaacccttgggggccgccgttcaagagctcccctcggcttcaaacgccgttttagcttctgatcgagacagagagaatagcagaacgcaaccaagtctggtattgttggcgcatggagcggtgcacgctggggagggtcgtggcgcgagattcgcggcggtgtgcgagggtggtactggagactgctggggcttgcggcgttggggccaaagctgctagggttttcggtagaaaatttggttagtgggctgttggggtttgggcctaggtttagtttattgggttgttttactatttgtaaggcctggcccttggcgatacacttataacatacaattatgatgtatgt

SEQ ID NO: 196481 - DNA, 631 bp, Gossypium hirsutum
  unsure (1)..(631): unsure at all n locations
caatattttcacctttttttttttcaattaatttctcaaaaagaaactaaaaacctaagtgacgccgaaatttactacaagatgccgaagaagatgggtgtaaacagcaaagccgaggcggcgcgtgcgcgcaagagcgccactgaagccgaacgaaaagatcgggaagcacgggagaaagaagagcagtactggcgcgaagccgagggtcctaaatctaaggccaccaagaaacgcgaggaagaagccgagaaacgagctgaagccgccgctcgcaaggctgaggcacgccgtcaagccgaaatggaggagaaagagatcgaaaaggcgttgaagaaaccggataagaaggccaaccgtgtggcgattccggtgccgaaggtgaccgaagcggagctacagaagaggaaggaggaggagcaagcggagatggcgaaaaaagcggaggaggcgaagaagagacagagtaggaccgcggccgaagaggagtatgagaggatggtgttagtgacaaacatgaatagggatgattcgttgattgaagccaggagtgtcgangaggcgattgcgccgatttctgtggcggacacccttcccccggatccccatcctgagaggccgcttagggctg

SEQ ID NO: 196482 - DNA, 776 bp, Gossypium hirsutum
  unsure (1)..(776): unsure at all n locations
ctcacatagcaattgtgctagctgacaatggggtcctttctgaagtttctggagccggacaaaagctgggagttatggatgcttacgcaaaagcttctagcattattaggcagtatggctctatgtatctacggcttggtaaccttcaaatggctctagaatattacgcacaagctgctgctgcagtaggtggtggacatgtatcatggactgggagaggtantgtggatcagcaaaggcagatgaacttgatgctgaagcagcttctcactgagatattgtttcgagatggtggggtttatcttttacttggttcgagaggtgctggagaggaaggtgaactgagacgatttttgactgatcataaagcaagacaacagtttctgctagaagctgcccgccaatgccaagattctgggctgtacgacaagtctatagagattcagaagagaattggagcattttcgatggcattggatacgataaataagtgcctctctgaagcaatttgtgccttatcacgtggtagattggatggtgagagtcaaactgctggcctcattcactccgggaacgagatcttggagactttcaaatattatcctgaagtcagtttccaagagagggaacatgtttcggagcaacaaaccatattaagacagctcgagactatattatcgatccataaattgatgagactaggccagtatcttgatgctctacgagaagttgccaagatcccattccttccattcgatccacgagcacctgataca

SEQ ID NO: 196483 - DNA, 400 bp, Gossypium hirsutum
  unsure (1)..(400): unsure at all n locations
gccaacaagtgccttggatccgatttcgacacaaaacatagaggatgtgatagtgaagcttaagaagaaaaggagaatgacagttgtaatggtttcccacagcatcaagcaaatccaaagggttgcagatgttgtttgccttcttgtgaatggtgaaattgttgagattttgaagcctaatgaactctctgaagccaagcatcccatggcacaaaggtttcttcagctaagttcgtaatttacttttctataatagttgttatatttcccttttctttgtgcttaggatttgatgttaatttggtttaaacaatgttcagcattgcaagtttatttgttgtnnaaaaaaacaaaactaaaaataaaaatatttaattttatttttaaaataaataattaa

SEQ ID NO: 196484 - DNA, 712 bp, Gossypium hirsutum
ggagttcatggctttcctactcttttccttttaaattctaaaatgcgtgttcgttatcatggaaaccggtcttttgaatcgctcagcacattctataatgaagtcaccggctttcagataaaatctctggataaaacatcgcgggacaaaaccagacatgtaccaaagcatgagaatcataaaagctctgagcaggagagctggtcattctcatgggcaagatctccacagaatttgcttagacaagagacctatttggccttagccaccacatttgtgcttttcagattgctttatctattttatccaactttgctggtatttgctcgcttcacttggaaacggatcaatcgagatgtaaagttgggaactatgttggaacatcctttgctgatctgaaacgaacaattgggttgaattccctgaaagagaagcaacttgcaaaggtgcaatgaatgctagagcatcttgctactgctgcgatcggcaatgccaatgagtggatcttgctgagtctttagctggtgtgggacaggtatttgtttcctctagaagtttggttgcaatctcttggaagcaagagcctttttgtttcatatttttatccaaagcaacattggtatttaatttgggcctgtaatacttaattttcatttgtgatatgatttagaatacatcttttgccttgcctgtatgtaagcggcactgcaac

SEQ ID NO: 196485 - DNA, 739 bp, Gossypium hirsutum
  unsure (1)..(739): unsure at all n locations
catcagtcttttcaaatccccttcctttcccatagttggaaatttaaatcctctctccttcactttcccaattcttcaccatctctttctcttcaaatttttcctctctcatccgttttcttctcttccttctcaatcgtttatgttttttttatatggaaatcacttgcttcatccatagattttgggttttcagccctaggaaatattgtttcggttcgtcttttcaaatctatggatgtctttgtggttgttcttgttgcatgctttgggaatgaaagaaactctggctctgcaagatttcaacagcaatggcctctcttttgcagtcaatctctattacattgattcttatcccaaaaagacacgctattcccttcatcgtattgcacgggtttcctcttatcccaatatcttttcttttcaattttaatgttcatatgcactcttccatggcttaaattcgttatttattgccctaaaacttgagataaatggggattagatgccagtttaacctgatacacatatttcttttatggacataatgcttaaggttcaactaagacgacataacttcatttctagtgaaattgtttaagcaattgtgcctttgtataaattgttaaaattctgttaaatgtacgggttaaacatggttcttcttatcagggaatttgtttgacatagggttatgctgataacgctntctgcataatatggtgactagtctagcagt

SEQ ID NO: 196486 - DNA, 623 bp, Gossypium hirsutum
  unsure (1)..(623): unsure at all n locations
ccttccgcatttttggagacatccagtgacccaagagctctggctgttgcttgcttcgatctctcacaatttattcagcaccatcctgctgngccggtgatagtaaacgacctcaaggcaaaagagcgggtgatgaaggtgatgaaccacgacagtgcggaggttaccaagaatgccttgctctgcatccagaggcttttcctaggtgccaaatatgctagctttttgcaggcgtagttttgcttcattgtgctcggtcatgtctcatcggatggtaagtaaattatgctttgtaggagttttatattctcgttcaagttcagtcgggatggctgatatttctattggatacttcatttcgaacatgtctaaggaagaattgttttgattcttttgtcaaaaaaaactttcaaaattagtgtttttaaaattttgagttgtggtgggtgtagaataaaatgtatgcagtccttgccctatttttaaaataaactgcattacaatgaacaacttatttttagcttgaatactccccacctttgaaaaaaaaaaacaacgggcggccgctcgcgcccacgcgtccacgaacgcgtgggcggacgcgtggacggacgcgtgggcga

SEQ ID NO: 196487 - DNA, 629 bp, Gossypium hirsutum
ccgttcaattcctcgagttcttctttcatttctgattccgttctcaaaaaaccctcgttttccccattctttatatcctatggctccaaaggttggtgagaagaagcccgccgagaaaaagccggcggaaaaggctccggcggagaagaggccaaaggcggagaagaagatctcaaaagaaggcggcgcagataagaagaagaagaaggctaagaagagcgtcgagacttacaagatttacatcttcaaggtattgaaacaggttcatcctgatatcgggatctcgagcaaagcgatggggataatgaacagtttcatcaacgatatctttgagaaattggctcaagaagcatcgagattggctaggtataataagaagccgacgattacatctagggagatccaaaccgccgttcgattggttttgcctggtgaattggctaagcatgccgtttctgaaggaacaaaggcggttactaagttcaccagttcttagatttctttttctttttgttttgagattggattctgattagggtttccgatttgggattttagggttttttaaatgatggtttaataatgttcttgagttgtaggctttcggattcaatgatggttgttttgat

SEQ ID NO: 196488 - DNA, 766 bp, Gossypium hirsutum
attttctcaaacattcttcaatcttttcatctctcctcagacccgatcgatctatcttcttgctccgttccctctttcaagaactggctaacacacaggaaccacttgtggaggaaactaacaagaaccaagaggtggttcttgccctctatgaggccttaaacactcgagacgtcgaaactgttcacaaaatccttgcccctgaccttgaatggtggttccacggtcccccgactcaccagttcttgatgcgcctgctcaccggtgcttcatcctacgattctttccgtttcgaggttgatcccctttcggttaccacctttgggcccaccgtcatcgtcgaaggctgcgatcacagccgttcaatctcttgggttcacgcttggaccgtaaccgatgggataattacccaagtgagggaatacttgaacacttcttctcaccgttactcgccttggaaactctacccaatcttcactgtccgactacaatccttcatcatcatcatcatcatcgacgggtgagattacctcggtgcattgcccttccgtctgggagagcagcattttccaacagggttggaaaatccgtgccgggtcttgtcctggcaatttagtcatttcactatcatatatctttctgatcaggtgcagccgtgagtaggaataaaataaaataaaaggagtactttcgtgtcagctccttattggcctttacttgctgatgcactaaaaaacagtgtcgtttaaagagagagagagatcaa

SEQ ID NO: 196489 - DNA, 563 bp, Gossypium hirsutum
cccacgcgtccgcccacgcgtccggggttcgactccccgactctaaacgccaacggattgattccgccgtctccgagaaaaaacctcctccgccgcaacaattcgacgaatcgcggcggttatttcaacgtttatggactgatgaagacgagatcgagcttctcaaaggatttctcgattacacgacttcgaaaaccaacgctaattcttctcaccatcaccatcacgatacggcgttgttttacgatctaatcaaatcgaaactccagctcgatttcaacaagaatcagttagtcgagaagcttcgaagattgaagaagaaatataggaacgtgatgaataagatcaattcaggtaaagaattttccttcaaaagccctcatgatcaagctacttttgaaatttctagaaagatctggagtagtagtgttggcaaagtagaagataatgttttagattatgatgaaaataatattacttctactactactactaacatcaatttactcgatgaaagtggagagaaaaagaatcttactccgaaatccgcagccaataagaga

SEQ ID NO: 196490 - DNA, 518 bp, Gossypium hirsutum
aatttctcaaagaagaaaaatggtgtagctccgggggggtcaaggtccaccactgaaaaaagaactcattataaaggcagctcctcccaatagttacctcagtcctcatcactcaatatcctttgaaactcagtgtttaagctttgattcccaagttttttttttttaagaaatggctcaggcaagaggcggtgcaatggcggtggcagcggtggcggcggcggtgctctgcttgttgctgagccactttgagttggctcaagcagcaacgtatactgttggtggaaccggtggttgggcctttaacgtggctggttggaccaaagataagcgttttaaggctggtgatacacttgtattcaaatacaacccatcaatccacaatgtggtagctgtaaacagggcaggttacagttcatgcacaaccccaaaaggtgctaaagtttaccagtccggcaaggatcaaatcaagcttgtcaaaggccaaaattatttcatctgcaactattctggacatt

SEQ ID NO: 196491 - DNA, 886 bp, Gossypium hirsutum
tcgtccacgcgtccggtgatctcgaagcatccaaagcattgatatacccttcttcaatttcccgatttcaacaaagtgatttcgaaaaaccctaaccctatctccagcttcaaccaagtctcgaattcttttcgcttttcttatcgtagatcgttgctaattctctcttttcttaatcgatggcggctaaacctcttacgagtgaagcaatcgccctcacagaaaagaaaatggacatgacattggatgatatcattaaaatgtcaaaaaatacttcaaataaatctaagaagcagccaaggataccgaataaaatccagagacctgtgagtaatgctgctaaagataaggccttgaaggtacgacagtacatggactcgcgggcttctgttagacagggggttctagctcaaagaaggtctaatttccaggggaaccggtttccttttgcggctgaggctgcacgtagagctgcagttgctccatttcgcaatagagcatttaatagtaggagggtggctaatgcgtcccggcctagggttggagcaccacctgtccaaaggagggctacaaatgggggttttactgccaagccacaagcggcagcaaccaacaactacaggcaggaccaacaagaggacaatagtaacaaaacaaaggcctaaaacattggattccctctttgccaatatgaaagaagagcgattgagggtattgtcacatcagaacaatggtgtacaacctaatggccgtggccgacaaagaatgccctggggaagaggccgttttggcaactgatatatgagatactacgagtgttatatgataggttgtttgttgcccttggttttctcttttcatgtctgcatgccaatggggatattgt

SEQ ID NO: 196492 - DNA, 664 bp, Gossypium hirsutum
  unsure (1)..(664): unsure at all n locations
gaatttttttttttttttttttgtctttttgctcttgttttttctgctacttggcctctgttgttgctgatgtttcttgttgtttgtgtttgcagggtatacccggtgttggtggtggaagtgtcaaacggtatgggcgtcgtgggggcgagggcgcgcatgcaatgctggggggcagacgaaactgagcggcgcacatgggcatagggctgctagggtttctgtcattttttgatttgggctagggtttatttttgttggcccgttgggtttgtttanttagggtaggttacttgggttttgggggtgggccaaaattggccttgtaaataacatacttgataatgcgttctattaatttccgaatttctgaagagtataactgaccaaagaatacagtctttagagtaaggatgactagaataaatacattgagcacaaaatttgccaccagagccatgatggagtaagaacccaaaagaagctcaggtacatggttgacattttccgtatgaataaaattctcagtaattaacccatcagtttgaagtagtgaaaattctgtccgaagttgaagagctataaagcttagagctgtggagaacaccgagatcacccagtatttcacacccattggtgacaaacacaacttttccaccaaaat

SEQ ID NO: 196493 - DNA, 425 bp, Gossypium hirsutum
gaaagattattcaaataatctgatcgactacctctcgatcactgaccttctatcaatcctcgcacatctttatttccaagggaagatcccaggtactttaacatatggtcaggcctctattctactctgcatgggcttgcagaaccgggatgtctcttatgttgagggacaattgaagaaagcactagagaggcagcagatactatcatattttaagaaggttatgataaagctgtacaagtatttgtatggggttgcatcaaaggagattgaatctgctttacctcgactaaaagaaagagtgttggaacctcatagtatctctgtggatgaggatctcaatgatgctgcaaagaaagttgaggaggaaatgaaaggcaagtcggatggtgtgttaaatctgcagttactccaacaatttgcga

SEQ ID NO: 196494 - DNA, 560 bp, Gossypium hirsutum
gaccaggcagctttacaaggtggattcatcttggaaaaaattatgggtccgatctcaacaggccatttggagctccaaacccgtaacccagacgataacccatccgtcaccttcaattatttccagcatccactagacttgcaaagatgtgttcaagggattcaaaccatagggaaaatcgttgaatcggagtcattctctaaattcagatatgattacatgtcttggccaggactcgttaacatgacagaacattccccaataaacttgctgcctagacattacaactcctcaatcccacttgaaacgttctgcagagacaccgtgatgactatatggcactatcatggtggctgccaagttagtagggttgttgaccccgattataaggttcttggtgtcgaagctctaagggttatcgacgggtccactttcaactattcccctgggactaattctcagccactgtcatgatgcttggaaaggtggtccttaaattaatcacttgccgaaatattcattttatgttgggttttttaaaattgacattttagtttgat

SEQ ID NO: 196495 - DNA, 759 bp, Gossypium hirsutum
cattttcattgatgctgaccttcttatacttaggaatattgatttcttattcgagatgcctgaaatttctgctatagggaacaatgcgacgctcttcaactcgggtgtgatggtcgttgagccatcgaattgtacattccagcttctaatggatcacatcaatgagattgaatcctacaatggtggtgatcaggggtatctgaacgaaatcttcacctggtggcatcggattccgaaacacatgaacttcttgaagcacttctgggaaggtgatgaggtggagaagaaacagatgaagactcgcctctttggagccgatccaccaattctttatgtcatccattatctgggaaacaaaccatggctatgcttccgggactatgattgcaactggaatgtggacattttgcaggagtttgctagtgatgttgctcacaaaacatggtggaaggtacacgatgcgatgccagaaaatttacagaagtactgtctgcttaggtcgaaacagaaggcacagttagagtgggatcggaggcaagctgagaaaggtaattacacagatggccattggaaaattaagataaaagacaagcgtttaaagacgtgttttgaagaattctgcttctgggaaagtatgctgtggcattggggtgaaaagaattggacggataattcaactgctaacccatcaccacctgctataaagaaggtatctctctcttcattatgatttaattttcctttcattttctactacat

SEQ ID NO: 196496 - DNA, 290 bp, Gossypium hirsutum
cccacgcgtccgcaactcccttgctgaaccctgttatgggcttaattgattcttgggtctgatacttaccaagttcaagtaatgctcaaaatttgaaactagaaggctctttgtcaacatgtcagtcagattgtgttttatgccaattttaagaatccaaacatccccttaaatatccacctctcaaacaaaatgataacgaatgtttatatgcttagttctctcgtgatgcatttgatctttggtaagatgtataacactttggctatcgcaatatacaacagttgctc

SEQ ID NO: 196497 - DNA, 677 bp, Gossypium hirsutum
  unsure (1)..(677): unsure at all n locations
gtcattcacaagcttgtactgtctgtaggtttgcaattcattttatgggaaaatcgctgcccggcgcaaccaagcttcaacatctcgcaaaggttaccggcgccgcccaccatcttaacacaactgggaaaaacccaaaacccactactctgaaccggcggattataagtgaagacaacaaacccaattccaagaagaagatggagagctccagtgccagtcaacgcctcccactttccgaagtcgtctccgattgcgttaaacgttggttcaaagatactctcaaggaagccaaagccggggacgttaacatgcaggttcttgtgggtcaaatgtattatagcggttatggggttccccgagatgcccaaaagggaagaatttggatgacaagggcgtcgaggctgcggtcttctgtttggaaagtcagccataagcatccaggttataatgcgagtgattcagattcggatgaaatcaagggtgattcttgagtttaacatacttggtctctgcatttcgaacatttagaatcggtccgcatggtggtcatgcctgttttgtctccttgaaagttccttgttcctgtgttgtaactcttttttttttttttccctttcttttttgtaattntggtttttgtttttataaaaatttcctttttataaaaaaaaagt

SEQ ID NO: 196498 - DNA, 386 bp, Gossypium hirsutum
cccacgcgtccgggctaaccctgatggtcgtaagagaccccggctcatcggggggggcattgctaacttcactgatgtcgctgctcctttcaacggaatcattcgagcattgagagaaaaggaagccaagttaaaagcagcacgaatgcacatctatgttccaagaggtggcccaaactatcaaactggtttggcatggatgcgtgctcttggggaggaactaggagtaccccttgaggtttacgggcctgatgccacgatgactggcatatgcaagcaggctatagattgcattatgtctaagcataaaagggtattatttttgttctccaaaatcgaagtattctgcccatgcaatttggtattctttggtcaaagtataaact

SEQ ID NO: 196499 - DNA, 443 bp, Gossypium hirsutum
cccacgcgtccgcccacgcgtccgagttctagatcgcgagcgcccacgcgtccgatcacccgctagcctcaaacgtatcatcaacatctctctctcgctctctctctgttgagttgttatatgtgtctactgagaagccaaagcaaacggaactttttttttttctgtgtgtggggctataaggttaagcatcaagactccatttttgaattttttttccataaatattgcaaaatataatattaaaagtgaacttcaaattatttgttaggtgttaatattttgatgagatttcagggctgttctgtttattccaggagaataaatttgtctgttttcttgaagcacaagaataatgcctgagaaaatatcaacagaggacttatttaacaatctagtagagaccattgcagatagtgtctctaagcagaaatctgtgtcct

SEQ ID NO: 196500 - DNA, 540 bp, Gossypium hirsutum
cggacgcgtgggcgcgggttctacaccctgatgtctcggctaatggtcgaaacgacgccgctgccaacgagttcatcaaagtacatgaagcctactctacgctatcggatcctgagaaacgggcggattatgatcgaacgttgttgttcaggccaaggcggtccttttctgtttccatcgaatcgatggccggtcaaacgtcttcagggttttctggttattcgaaacgaacatgggaaaccgatcaatgttggtgatactggagattaactgtgaaatccatagatggattttggtttattttcattctttttggcttctgaggaattactgattttgtgctaatttcgcctgtaaatatagaaatatgttaactgaaaaaggctgttttttttttttgcctgagtttataaagattagaatttggtgttgtagaaggatcgactaagatggggtgatcctatggctcatatggtcaaaaaaaaacaacctgagctggttcttaaagaacctagggatgcttataaaatgaaagagtca

SEQ ID NO: 196501 - DNA, 384 bp, Gossypium hirsutum
  unsure (1)..(384): unsure at all n locations
ctccaaaaaaaattcctaatttttcatcttttggagcttacaccacatgagctgatctgggttttttcccctctgtttctcattcagatcatagttaaaaaaataaaaaagaagcttccgttttgttctttaatggctttcacatttgaaaaaaaaatccattgaaagaaagagcaaaaaacccaactttttttattggggatttagttgcttcattgatttatacaatgggatttggttcaaagatgcagattattgatctatatttcaagaaaatgtanggaaatagaaagggattcgaaatcangaaaatttcatttcttattgatttcaaaaggggcaaaatctgtggtggatgaatcattaaagatttttttttttggt

SEQ ID NO: 196502 - DNA, 638 bp, Gossypium hirsutum
  unsure (1)..(638): unsure at all n locations
tttcttcttcctctgcttgtaaatatttgataaaattgcaactttgtttgccttattctttgggtaatcatggaggaaaccaattgggaaagcctgttgtttgagtttgactgtcccaatcttggaaatatcttacaaaatgaatcagaatcggtaactccaccaatctccacccactctcccgatgaaaaaccgatttggacatcctccattggtgagatcgagaagcttttaatggaggacgatcgttttgatgacaaggttgagactcaacctatccccaatgagtttttggcggatttattggttgattcatctcctattggctgcggcgatgaggtcatcgatgatactgcttttgacaaacaaaaccagacccttttcaacgttgataatgatgatcccattgataagaaacagagaaggaaattgagaaatagagatgcagctgtgagatcaagggagaggaagaagatgtatgttaaggatctggagatgaagagtacgtatttanaaggggaatgtacgagactgaactgtttgcttcaatggtccattgcggagaatcaagctcttcgttttactttgaaccagcgttgtgcatttgatgcttcctcggccaagcaggagtctgctgt

SEQ ID NO: 196503 - DNA, 406 bp, Gossypium hirsutum
cccacgcgtacgaccacgcgtacgaccacgcgtacgtatcaacagtcaaccaacacggtttctacttcttcatcttcactgtaactgaaacatggagaatgaaaggaagaagagaaaaatggggaatgaagaggaaaaagacgatgaagatgaagatgaagatgatgatgaacaagagaaagtggacaagttctttgctttgataaggagcacaagggagatgcgtgatcgtctaagaaacgcggcggtgcctaatggaccaaaagaggaagaatatcagaagaagaaacaggaagataaggcggttgttgttggtggcggcggcgtctgacagtggaatccaaagttccaagcagaggatttcatggaaggttccatatccaggtctgggaataattctttgggg

SEQ ID NO: 196504 - DNA, 408 bp, Gossypium hirsutum
tttacgcgtccgaccgaattgatgtgaagcgggatgagtgtaggcaaaacaatgatgagatgattggtccagattggttagaaggaagccctcctcgacttacctgcgttggaaagtgcatatttcttgggatttcaagcattggttaccattcattcatattccacaatggtaggtgctgtgctgacttattgtttaatttgagtctcttgtacctcttagagttttatattgcacagcctatacctgaagcatcatctgtcatcacacagacacagctagattaatagtattactcttccctttttctttttcctccctaagaccagaaatgattttgatttcattgattatcagtaaatcctaatatatatacatacaaaactcctaagtcaactagatgtgtgt

SEQ ID NO: 196505 - DNA, 603 bp, Gossypium hirsutum
  unsure (1)..(603): unsure at all n locations
tacaagggtacatcaagatttcctaaaggtagttcttactttaaaaggttgccaaaatctagtgccattaaggtaatagattttggtagcactacttatgagcgtcaagatcagacttacattgtgtcaacacgacattatcgtgctccagaggttattcttggaatgggatggagttacccttgtgacatatggagtgttggttgcatcttagttgaattatgcacgggtgaggcattgtttcaaacacatgagaatctggagcaccttgccatgatggagcgggtgttgggcccactacatcagcacatgttgaagagagtagatcgacgtgcggagaagtatgttagaaggggtagactggattggccagatggtgctgcatcaagggagagtatgagagctgttcttaagctacctcgtcttcagaacttgataatgcagcatgtggatcattcagctggggatctaatccatctattgcaggggttgcttaggtatgaccctattgataggctcactgctcgtgaagctctaaggcatccgttttttagcggngacaacaagtttaggcgatgagcatgcgatatgcttcatttttat

SEQ ID NO: 196506 - DNA, 608 bp, Gossypium hirsutum
ctcgtcgcaagaacattggaatctgcgtgctcacgggatctgggaccgtttctaacgtgacgctccgtcaaccttcttcagcaactccgggagctaccataactttccatggcagattcgacatcttgtccctctccgccacgttcctatcccaaacgacgtcgtgtcatgtgcccaacaggttctccatctctttggctggtcctcaaggccagatcgttggtgggttcgtagctggctcgttggtagcagcgggcaacgtgtttatagtggctgctacgttcaacaacccttcgtaccatcggttgcccgttgaagaagaagcgaggaacgcggggtcgtctggtggtgccggtggacagtccccacctttatccggtggcggtggggatagtagtcacggcggtggggcagattcttgtggggtttcgatgtacaacaatcacatgggtgggtaaaatgtcattggggctccaacagttaaaccaccaccacggccttactaaggacttacaagttttttttacctttttgggttttttttaaaaaaaaaattttattttttgaagccccggggaataaaggaaggttaaaattttttccccttt

SEQ ID NO: 196507 - DNA, 519 bp, Gossypium hirsutum
  unsure (1)..(519): unsure at all n locations
ctgcattgaggtttgttgttgataatccaggggtttgggcatttcactgccacattgagccgcatttgcatatggggatgggggttatttttgctcaagatgcccatcgtgtaggtcaaataccaaaagaggctcttgcttgtggattaacaggaaacaagcagaactgagagactgatttgagctaatttatgtattacgctatttggtgtcaggctttttttctttatttgctggtgtttgttagatggggttggtcttggttaaggaaaaagggtaggctacttgtcaagggctagccatggacaacggttctagtttgggcctggtcttgtcttggtataatatgtatctcatgtcaggtcatttgggcattggctaaagtctccaagtccatcttgtttcaatgggttgagggaaactatgttcgacaactcgcaagtcgcaactaaacttcaataatatcgaattccgctattgccnnnnnnnnnnnnnnnnnnnnnnnnnnnnnnnnnnnnn

SEQ ID NO: 196508 - DNA, 453 bp, Gossypium hirsutum
cccacgcgtccgcccacgcgtccgctgctcctgatactcgtggctcagatggcataattgaactcgattagttagttttccgtgagaaattatgaatgcagtgctgttgtgcataggatactactgctgtcagcttttgatcatgagaggcatattaaaaattgggaattgttttacaatgttaatattgaatggggagagttcctgaaattttccgggttttactttgagataagtgatttgagataagtgaaccgtaacccagtttaaggggattgctagcttccctacggtctcaccaggtgaattagctgatctacgctgcaaggtaattattctgcgaatgaaggctcctaatgtttttctcttttttaggtaatgtaattttttgttcttgtgcaaggatgaagtgttaataccaaattaacagtacttagatacttaggaattttc

SEQ ID NO: 196509 - DNA, 505 bp, Gossypium hirsutum
tttttactgaccaaggaaatttccaggctctgccaaatctgccttgctggtaaacgtgaaataagaggaattttgatcagttcgcagaggaagagcttgaagatggacgaagatcacagtaatagcggctttttggagactggaaaagctgatagatcggtttggttaatgaagtgtccggtcgctgtggccaaaccatgggggagtcagaccgcttcttcttccgattcacaccctgtcgccaacgttgtcctctctctcgaccctcgcaaaccccatgacccttcttctattcagtttactatggagatggctggatctgagattggcaatataccaaaaagttacgccttgaatatgtctaaaaactttcttcctatgtctgttttctttgaaacaactcatggtagggctgcaatggaaggagaaattgagcataaatttggcatgtaaccccttgagcaaaaccttgaggagtattggtggctttttcatgaaaaggcca

SEQ ID NO: 196510 - DNA, 435 bp, Gossypium hirsutum
gaaggagaggaaggcggcggacagctgagacctagcaacactgggagaagacaagagtgggagattgatccgtttaagcttatcatcaaaagtgttatagctcgtggcacttttggaaccgttcatcgtgggatgtatgatggccaagatgttgctgttaaacttcttgactggggagaagagggccacagatccgaggccgaaatagcttcacttcgagcagcttttactcaagaggttgcggtgtggcataagcttaatcatcctaatgtaacaaagtttataggggcgacaatgggctcatcggacctgaacatacagacggaaaatggtcaaattggcatgccaatttggtgtgttattgtggaaatattgtcctgggggtgcactgaaatcctacttgataaagaatcggagaaggaagttggcttttaa

SEQ ID NO: 196511 - DNA, 409 bp, Gossypium hirsutum
gtttttctttttcctacttcggtacttccttcctcattctatctcgatttctccctctttctccccgaaatgacgaagttcaagaagcttaatcgacccactggtcatcgcatgtccatgctcagaacaatggtttcccaggtggtaaagcacgagcgcattgaaactactgttgccaaggcaaaggagattcggcgacttgctgataacatggtacagcttgggaaagagggctcactctgtgcggcaaggcatgctgctgcttttgtcccaggagatgatgtcattcacaagctatttacagaactggcatatcgatacaaagacagggcaggtggatatacaagactgcttcgaactcgcatccgagttggtgatgctgccccaatggcctatatagagttcattg

SEQ ID NO: 196512 - DNA, 784 bp, Gossypium hirsutum
  unsure (1)..(784): unsure at all n locations
gaaaagcttacatgtttactttctgttaaaacccagttttcttttccttatgcgtcactgatcccatgaaaatttgtcctctttttgtgtcatatatatctgcaagagagtgacatcatttatatccttaactagttcatataatcatttgttcgaataaacttagcttaatcttgatataaaagaatgggtctctcaagtctcccagccccatcagaaggagtgctatgtgtactcttggtaaacacagctttatccatatctatggttaaaggcataattcgatcaatccttcacattatcggtatccatctctcctcgtcctcgtcctcctcctcctcctcgtcatcatcatcatcatcatcatcatcgccatcctcggatcttattgaaatccctgcggtatcattcgacatcagcatcggtaatgctgatagttacattaaagagttccggagcaggatgccatcgacccggtacgatgcggtatgtagcggcagtcaaccggagcatgactgttcagtttgcctgactaggttcgagccagaatcagagattaaccgcttgtcctgcggtcatctgtttcacaaggtatgcttggaaaagtggttgaactattggaatgtcacatgccctctttgcaggaacgctctgctgcccgaagaccattccggcctacttttgggtgagcgtgcggaagatttccgaattttccatgtacagcgcgtttattgtacaggtattttaaatgaaacgatgccgncctcggattagcgttaagcgg

SEQ ID NO: 196513 - DNA, 562 bp, Gossypium hirsutum
gcgaggataaaccacttgataggttatcatttctaacaagctcttcaatcgttggaactgatcattataatgacataaaggcagcaccagtgctagataatgcatgtcttcaaaacccgaatgttgcagttcatgttccgactttgcctcgaaatgtacagacatttaggtggaatggaggttctggctctagaactggcaatacatcaagttctaatatatctggggatagagatgctgtaccacatgagggacatctattcgagaagcatggctaggaacctgttagatcatcctatgtttgttcgtgcacctgagttgagaaatttggttcggaatccaatgaatcgagatgtaaatagtggaaatttaagtgttcctggaaattttgcttcgacatctcgtggtggctcaagttctggtgccaatgcatcttccgttcccacatgggctcctcagctgaatcacccttctcaatatccgcggagattgtcgggacttgttcgtcgacagttgatgtcttcccttggcccagagtctggtggcccgggaaatcatcctt

SEQ ID NO: 196514 - DNA, 1020 bp, Gossypium hirsutum
cggacgcgtgggcggacgcgtgggcggacgcgtgggcggacgcgtggggttggcaagcacaatattaccatttttgcccctcgcaatgaagccttggagcgtcaactcgaccccgagttcaagcgcttcttgcttgaacctgggaacctcaagtccctccaaagccttcttatgtttcacattatccccaaaagggttggatcccatcaatggcctgatccgaaaactggtcctgtcaagcacaacaccctttgtaacgatcatatacgcttaacttcccaatccaccggcaaaaagacagttgactcagccgagtgggcccgacctgccgacgggatccgacccgatggagtcatccacgggatccagcaacttctcattccccgctctgtcatagaagacttcaataggaggcgtaatctacggtcaatcacggccgtattacctgagggtgcgccggaagtggatcctcccacgcacaggttgaagaatccagcgccgattccagttggagctccaccggtactcccaatctacgacgctatggctccaggtccttctctggccccggccccggctcctggtcccggcggaactcgccatcacttcgatggtgaaagccaagtctaggatttcatccaaactctattacattacggcgggtacaacgaaatggctgatattctattaaacttgacatctttagcaacggaaatggggagacttgtttcacaaggatatgttatggcagtcttggctccccacgacgaacccatggcgaagcttactacggatcagtttagcgagccaggggcgccggagcacattatttattatcatatcatccccgagtaccagacggaggagagtatgtacaatgcggttcggaggttcggtaaagtgaaatatgacacactgcggttgccgcataaggtagtggctcacgaggctgatggttcggtgaaatatgggcatggtgagggttcagcttatttgtttgacccggatatatatacggat

SEQ ID NO: 196515 - DNA, 416 bp, Gossypium hirsutum
  unsure (1)..(416): unsure at all n locations
tcntgttcgacatctacaagaatatcgacagaagctcattggtgaagtgtcctgtgctgataatccatggaactaatgaggacgttgttgactgctctcatgggaaggcaactctgggaactgtgccaagaaaaatacgaaccgttatgggtgaaaggaggaaatcactgtgatttggaactgtacccggattatattaggcatctcaagaaattcatctcaacagttgagaagtcaccttctcgaagaaatgcttctcggaaaagtacagatggtatcgaacagtctaggcaaagtactgaatatttcgaggctccgagaagaggtatcgaccgcagggagaaaccaaggaaaagccccgttccccgggacaggccaaggaaaacaccctttccccgggaaaaaccagggaaaac

SEQ ID NO: 196516 - DNA, 822 bp, Gossypium hirsutum
  unsure (1)..(822): unsure at all n locations
gattgccgttcctccagaacgcttgttgtttaaaattccttcaacttggcaaggaatagaagcttcaagattgctcgaatctgagggtatacaaacacatttgacttttgtttatagctttgctcaagctgcagctgcagcccaagctggtgcttctgttattcagatttttgtcggccgtgttagggactgggcacgcaatcattccggtgaccctgagatcgaagctgctattcaaagaggagaggaccctggattggctctggtgacaaaagcttataactacattcataaatatggacataaatcaaagcttatggcagcagctgttcggaacaagcaggatatatttagtttgctgggggttgactatatcattgcaccattgaaggtattgcagtcactcaaagaatcaattacttctcctgacgagaagtactcttacgttaggaggttgtccccacagtctgctgccagatatgatttcaccgccgaagagctcacaaagtgggatcaactaagccttgcatcagccatgggacctgcatcggtggagcttctggctgcaggactggatggatacgttaatcaagcaaagcgagttgaggaattgctcgacaagatttggccacctccaaatgtctaaagtggctcgtctccgtctcaaagtatctctcgtgtggcatagaataagacggtggtggtaccctgctccattatgttgttttaacaaaccttgcttcatttgctgagaacttctagctggtttaaatattgaatgctaatcnncttatattctctgtatcaatgaacatgatgttg

SEQ ID NO: 196517 - DNA, 294 bp, Gossypium hirsutum
cccacgcgtccgcctcgacttaagacctaggtaagcttttcccacatactgtgaatatcggtgttaagaatcttggaaagatataagtaaatccaaacatccattataggatactgtcgaaaaatatggttactatcttcctcatattgacgacaccgagggcattgagcatccatcgccactttcttatgcttaaggttgacgactaggaataaaattccaggagattctccatactggtattggaacttttggaggggatgtataaattccatagtttccttttaaaatttt

SEQ ID NO: 196518 - DNA, 702 bp, Gossypium hirsutum
  unsure (1)..(702): unsure at all n locations
ggagtcgtccgcatgataagcagtacgatacaattctttgtttgagtgtgacaaagtggattcacctgaactggggtgatgatggcttgattactgcgttcgcaaagatttggagacttttacgtcccgggttggcgttttatgtatttggaacactcaacctctggtcatcatatgaaagggaaccgcacagtctctgtgacaacaagaagtaattttcgagatatcaagtaccgacctgatttttttcgggaaatgcttctagacaagatcggattcagaagggttgaagttgtaacttcagatctgtcgggaactagaaccggtttcaatagaccgatctttgcatactacaaatgaccaattttgatagttcgattttgttgaaggggtaccgagactaacttggacgtgatttttgcctgttaccacacatggatttacatatctatggggacaatggcgcaagtgcacccacggcaattgtagaactttttgtgaaatatgctgtaactaagataacttttgaacttggttttgagtgaaatcttcgttacgtgtctttaaatttttgttggtgttaatgtttacatgttctaattttgatcccacttaattataaatggctaaacaaataaataaaaaaaaatattttttttttaatttattatanaaaattattttatataaattaattttttt

SEQ ID NO: 196519 - DNA, 452 bp, Gossypium hirsutum
ctcagccccgaagccaagagaagagtggtttttgaagaagaaagaaagaaaattatatgtgaaagtatggcggggaaagaagagaatcgaatatttgtgggaggtttgtcatgggatgtcactgaacgacagcttgagcatgcgtttagtccatttggcaaaatccttgaatctcagatcatgttggaaagagataccgggcgtccacgtggatttggatttatcacatttgctgatcgccggtccatggatgaagctatcagggagatgcatggacgggagctgggggagcgcaccatttcagtgaataaggctcaacccaagatgggtgaagatcttgatcacggttatagaggaggttactcatcaagtggcaggggtcgctatgcaggtggagacaggcctgtagcacaggatgaatgcttcaaatgtgggcgttttgggcactgggc

SEQ ID NO: 196520 - DNA, 645 bp, Gossypium hirsutum
gtgagtcaaaacgacaaaaagacgtttaagtgatacgacaccggcgaaaaaggctacggagaaaagaaaaacagaagccagaatattgttttcgcgcaaagatcagaaaataggatccagcgatggcggaagatctggttctcgatacggcgatcagagattgggtgttgatacccctttcagtggtgatggttctgatcggcatcctccgctacttcgtctccaagctcatgcgctcctttcaagttcctgatcctaagatcgtcaaagaagggcaagtaatcgttagggctcggaatttacgaggtgctgcaaattttatccctcccaagtcttttcgatctcggagggtttatttcagcaatgaggaaaatggattactgtttgtccccaagggccaggctcaaaatgcgcaagcacaaatgttctctgaccctaacatggctatggacatgatgaagaaaaacctctctatgattatacctcagactctcacttttgcctgggtcaactttttcttctctggatttgttgcagccaaaatacccttcccattaactcagaggttcagatcgatgtggccgaatggaattgaccttaccacagctgatgtgagctatgttagtagccgctcatgggatttcc

SEQ ID NO: 196521 - DNA, 461 bp, Gossypium hirsutum
tttatttcctggctggtggtagccttgatgaagctcttcatgaacgatctgagcagttagactgggaagcacgtttgaacattatcatgggagcagcaaaagggctggcttatctacaccacgattgttctccaaggatcatacaccgtgacataaagtccagcaatattttacttgatagcaacttggaagctcgagtatcggactttggacttgcaaaactgttagaggatgaagaatctcatattacaaccattgtcgcaggaacttttggttatttggctccagagtatatggcaagtgggagagcaactgagaagactgatgtctatagttttggggtctttggtgcttgaagtcataagtggcaagagacctactgatgcatctttcattgaaaagggcctcaacatcgttggctggttaaatttcttaattacggagaatagagagcgagagat

SEQ ID NO: 196522 - DNA, 687 bp, Gossypium hirsutum
tttctggctggaggtagccttgatgaagctcttcatgaacgatctgaggagcagaacccataggcactgtcaaggataataaccaggacaaggaggggattgagtcatacacaccacggttgatctccaaggatcatacaccgtgacataaagtccagcaatattttacttgatagcaacttggaagctcgagtattggactttggacttgcaaaactgttagaggatgaagaatctcatattacaaccattgtcgcaggaacttttgggtatttggctccagagtatatggcaagtgggagagcaactgagaagactgatgtctatagttttggggttttggcgcctgctgtcttccgtcttctccttcccttcttttcccttttttcttcttcctttcttctcatctttatttcttcttttcttctccctcttctttttctttatcttctttctttctttttccctctttttcttctttcttttctcctcttcctcccttcccttcttcctcctcccctctctttccctccttctctccctccttttcccttcttccccttctttcaactactttactctcttcttctattcatcctccttcttttcctctttttctcctccccctcttacttttctttctatctcttcatctttcctcattttctcttctcttccttttttatt

SEQ ID NO: 196523 - DNA, 435 bp, Gossypium hirsutum
cgaacaccgatcgggggctcaaaatcggaagcttcctaaagaacctaagcaaatttgcggttgattccgccattaacgtctccctcaaaggtttcactggtgggaagaaactgtatcagacatttttgcatgaaaagttaaaagatgagccaagcaatgtgaaactaatgaagaaggaggaggagacacaatcaacaaaaatggaagacactgcaaacaaagctgtaggaggaacagagcctgtgaagaagaagaagaagatggtacctgaagccttgaaggaaatggagctcgaagatcctaagaggaaaacaatggtcattcgatctcgcctgtaaaatactaggaaaggctaatgggtaaattgatacttcaattataaatatttcgaagatggacttttttttattgtaccttgttaatggttaagctata

SEQ ID NO: 196524 - DNA, 396 bp, Gossypium hirsutum
gttaggccctgaagcctggaaagatagctagtcttgcaaaatctgttcgtgtacttgctgggatggaagagcctattggtcaagtgttaaagagaacagagcttgcagatggactcatcttggaaaaaacgtcttgccctctaggtgtcctgctgattgtatttgagtctcgacctgatgccctagttcagatagcttcactggccattcgaagtgcgaatggccttctgctgaaaggtggcaaagaagctaagcggtcaaatgcaatcttgcacaaggtcattacttcggccattccaaaatgcattggaaacacactaattggacttggggcttcaagagaggatattcctgatttacttaaggctaggtgatgggatagatctttggatcccc

SEQ ID NO: 196525 - DNA, 373 bp, Gossypium hirsutum
gcttcatgaactaagggaagaacatctggcattttctccaaaacctgatcaaaaagatgaccaaaagcagtatttgaaccagagaagaaagtttgggtttatccacatatctcttccattgccaaagcaaaacacgaagaaaccacaagctgtaaacacaatgtgataccatttggatgcatggtaattattgaacagtggtaattctgtggtcatatatagtaacatgttttattcagtttgcctcatttgtttgtgttgtcttctgggtgatcatttctgttttttaaatgttgctgctatctatggatacttgttttgaaatctccctgtgctgtaaatgtgttctataatttgcaataatgtattatgc

SEQ ID NO: 196526 - DNA, 1148 bp, Gossypium hirsutum
  unsure (1)..(1148): unsure at all n locations
ggcacaccaatgcaaagttgcacaaaaaacaggtgagaatcatgagcacaaaataaaatccccaattttgctgatcattagcaatggcaaccaacaccacccaagagcaacatcctgcagctggtaggcaccaagaagtcggccataagagccttttgcaaagcgatgctctttaccagtatatattggagactagtgtatatccaagggagcctgaacccatgaaagagctcagagagttgaccgctaagcatccatggaaccttatgactacatcagctgatgaaggtcaattcttgaacatgcttcttaagctgatcaatgcgaagaataccatggaaattggggtttatactggttattctttgttagccaccgccctcgctttacccgatgatggaaagatcttggccatggatatcaacagagaaaactacgagttaggattgcctgtaatccgaaaagctggcgttgcacacaaaattgaattcaaagaaggccctgccatgcctgttcttgataaattggtggaagatgaaaagaatcatgggtcgtatgatttcatctttgtggatgctgataaagacaactacctcaactaccacaagaggctgatagagttggtgaaggttggtggtttgattggctacgacaacacactgtggaatgggtcggtggtggcaccgcccgatgctccacttaggaagtacgttaggtactacagagacttcgttttggaactcaacaaggctcttgctgttgaccccaggattgagatttgcatgctccctgttggtgatggaatcaccctttgccgccgtgtcaaatgaaccaccaccgccgccgccgccgccacagccgcttctaccacccaagattgacaaacttataagtacttcaaaatttcataaatttttttttgtgcaatttcaaatatggtgtaaatttaatttggtatttataaaagcaaagcctatctaccattatcaaatcatattacattctaaaccnnnnnnnnnnnnnnnnnnnnnnnnnnnnnnnnnnnnnnnnnnnnnnnnnnnnnnnnnnnnnnnnnnnnnnnnnnnnnnnnnnnnnnnnnnnnnnnnnnnnnnnnnnnnnnnnnnnnnnnnnnnnnnnnnnnnnnnnnn

SEQ ID NO: 196527 - DNA, 454 bp, Gossypium hirsutum
ggaaatgaatcatgggtcgtatgatttcatctttgtggatgctgataaagacaactacctcaactaccacaagaggttgatagagttggtgaaggttggtggtttgattggctacgacaacacactgtggaacgggtcggtggtggcaccgcccgatgctccgcttaggaagtatgttaggtactacagagacttcgttttggaactcaacaaggctcttgctgctgaccccaggattgagatttgcatgctccctgttggcgatggaatcaccctttgccgccgtgtcaaatgaaccaccaccaatgctaccgccgccacagccgctactaccacccaagatcgacaaactttcatattttttttgtgcaatttcaaatatggtgtaaatttaatttggcatttataaacgcaatgcctatctaccattatcaaatcatattacattctaaac

SEQ ID NO: 196528 - DNA, 493 bp, Gossypium hirsutum
gatttggaaagaaaggttgtgaattggagagatgatgatgacaacactgtgttgcacattgcagctacaaagcaacagcatcaggcagtacaactgttgttggattccttttatgggttagatgcaaacgctaagaactcggaaggcttgacagctcgagaaatcatagaaagggttgaaagacaggggttgaacatgagtggcgccgaagacgatgataccaccaccgtcaagattgagcgcattaagaaaagaaccagtaggtctgaaagagcattaataaagttgattcgtgcaaagaatgggttgttggagaacatgctcaacgcaacactgggggtagcggcgctggtcataacagcaatctaccagtcctctttaagcccaccaagaggtctttggcaagggggtatcctctttcatttctgttgggtgaagaaacaaggaaaactgaattcttctcatcccgctttattactattccgcttcttct

SEQ ID NO: 196529 - DNA, 414 bp, Gossypium hirsutum
acgcccacgcgtacgcccacgcgtacgaccacgcgtacgagtgagtttgtggatattttgatgcattacaatattccaatggctttggtttcgactcgaccaagaaaaactctagaggctgcaatgagaacaatcggcatcgaagagtgcttcagtgccattgtggcagcagaggacgtatgtcgaggaaaacccgatccagaaatgtttctatacgctgcacaacttctagaattcattgcagagcggtgcattgtattcggaaactctaaccagaccgttgaggcagctcatgaggcacggatgaagtgcgttgctgttgctaacaagcatcttgtctatgagctcagggctccagacttggtggtaagacggttagacgagctttctattgtcgatttaaagaaccttgca

SEQ ID NO: 196530 - DNA, 645 bp, Gossypium hirsutum
cttggaaatgtgccagttcccaatcaggcttgtagtgagatcgacagtggaaatgcatggagaggacattatgatgatacttcagctgcctcctttaacagataaaaaagtcaaaaacaaattgattggactttacataggctcattggtggatgcctttccattaagaaagatcaatttaatgaagttcttccaaattcagaggtgttaaaaccactgccatggaattggcagaaggatggatcttgttctaactttagcatccacttttttttgactttgccctttagtcactagtagtttttctacgaggtaaggtgcaaaagggagctttggggcaagtttatcattgatgtataatataaccatattctaaaagccggtctgacattttcagcaagatttgtagggttagtaactattgctcaattaaagatacatttagcatcaataaaaattagatatatagatataactcgagggggggcccggttcccaattcgccttatgtgagtcgttttacaattactggccgcgctttacaacgttgtgattgggaaaccctgcgttcactaattaatgccttgtgcaattccttttccaattgcttatacaaaaggcccttcgttgccttccacattgtcg

SEQ ID NO: 196531 - DNA, 500 bp, Gossypium hirsutum
cttgttcggaaccaatggctttgatagatcccaaggtaatggcttttgatagatcccaagatagagtttcttatgtccgaagtaaacgaagagaaaacatctggagactttagagaaatggactaaggttggcgcatgaagtcatttcttttgttaaaaagaaaatggataaagcttctagatctggagacttgagagatatcaaacttagtttgatcgggcattctatcggaaactttataataagaacagcattagcagagagtgctatggaaccttacctgagattcctccatacatttgtgtctctatctggtccacatttgggatatctatacagttcaaattctttattcaattctggactgtggcttttggagaagctcaaggggacacaatgcattcatcagctcacttttgctgacgaccgtgatattcgtaacacattattccacaaactttgcgaggtattgagaacaaagttgcaaaatggtcttgag

SEQ ID NO: 196532 - DNA, 558 bp, Gossypium hirsutum
attgcttcttatcatttgtaacagctctcgggagcatagttagtcgagttaaaaacaggatcttggtcagtgatgctgaacccaattgtcaacaaagtccatccagctccagagaatctaaagacctaacagactcgcacatcaaaaccttgcatgactctccactagaccagaaaacagagaagaaattgacacgctcgagtgctcagccttgtaagatgacgagaaccagcctaagtggaagcattcaggctaaggggattaagcacgagaaaggaaagagcttgaatttccaatattcaacagaagaacttggaggtggactcaaaaattctgcaaaaggtgatagtggaaggaagtcaggtgctcggagatgtctgaaacctgatcctgtataccagaaacaaagagcttgtacaggaggtggtgcttttagaacttcaaacccctctttcagtgttgtgatacacccatcacaatatggttcttgtagtactgtgcacataccggaggaatttggcaagagatatttgaagaaaaacggagaaatgatgctga

SEQ ID NO: 196533 - DNA, 337 bp, Gossypium hirsutum
  unsure (1)..(337): unsure at all n locations
cacgcgtncggcagccaccacaaggactgctccaccttctcctctgttttcaagccaaactccccccttccaacttcgatttggacgaagagaagcaaagatgtcgacggcccgcctcttttggtgaagaacgtgcatggtgggtgggggggtttgctgaacgtgggtggaaacgggtgccgcgacatgggcagttgctgcagcgccgaaaaaactgctgctagggttcagtttttttctgctgaaatagttcaatagcttgggcttgaatttggactaacagatgggcttgtaacttgggccacgttttattaaatttgtaattgtgtttggattt

SEQ ID NO: 196534 - DNA, 362 bp, Gossypium hirsutum
ggcggcgaagatggaaacggaagtttgaaactgtttggggtgtggttgaaaagcgcgggaaaaaagcggccccgcgaggagaaaattgtgtacggtgggccacacgctaaagagatgaagaccgttgattttcgccacgtggctttgatgatgaagagcggcaaggtttgcaactgagccggtccccggcgacagcaaggaagttgatttcgtacaaatataactaggattaaataaaaagtttttttgttttttggataaaatatttaatatatgggtggaagtgttttcttaactttagaagcgtggttaaaaattgtcaaatgtatttaattaatatttaaaaataaaaatatataatt

SEQ ID NO: 196535 - DNA, 481 bp, Gossypium hirsutum
  unsure (1)..(481): unsure at all n locations
ccgtccggnnaccgatcacctgtgtagaaatgcattctccaatggnaaaatactttagtaaacagtctgatcagtgttggtattagaaaaagaaccaagtgtgtcacacagcattgatagaagatcaccacagcaacagtctgaaagttttgttcatcatttagcttctcctactcctccaagaaatccattagcttcaatgtcattgcagaataaatatgtgttgcagtcacgtccgcttagtcatccttttccaactgacaatattgacaaatcacctgggggaagtgcatctgctgttgaaagtatcaaaaaacaatctagtcaggttgatacagaaaaggaacggaatgtgtctctactcttaaggtctccaatattagaatcaaatcaaaccacgactgctaatgcaaatactgagctcgatgggggagattttgctggtctttttgacaaatttgttaatgataatgataggaga

SEQ ID NO: 196536 - DNA, 595 bp, Gossypium hirsutum
cccacgcgtccggtgttttctcagtatttgtaaactgaagcagtgaatctccagtgagcaaaagagctacactttgttttagcgagagtaaggacaactcgagctgactgagaaatggccatatatgggaatttacgtgtcgatgccactcttgcatctcaccaccaacacccttttcgaacctatattcgctcttcaaaggtagagtgtgtgggggtcatgaatggaggatcaagggtttctgaaattacaccaaaatggaatggagtgacaataaatagtccaagcattggcagcaaaaataaaagatcagttgggatcatgggagattataagttctctccaaatgctgtccaacgaagagggtgagagcttcctcttacacgccataaacatgagcttcttcgagcgacttcacttggcttggaaaatagttttcccatctccagcatctagaaggagctctaatgcaaatatagcgaagcagcggttgaagatgatcctgttctccgaccgctgagcagttagcgatgaggcgaaacagaaaattgtgaaaaatattgttcatgcactgtcagattttgttgagatagag

SEQ ID NO: 196537 - DNA, 441 bp, Gossypium hirsutum
atgggttccattgacacgccgacaattacagagaacggttcgacccagtctcaagccgccgctccttccggcggcgaccacaagcctccggcctcagctaacggagcgcaagtggaggtgtcgccggagcctgaaggaacgaaaaagaggcggtcgagtatgctaccgctggaggtgggtactcgcgtgatgtgccgctggagggacggcaaatatcatcctgtcaaagttatcgaacgccgtaagatgccctacgctgtgccctatgattacgaatactacgttcattacaccgaatttaataggaggcttgatgaatgggtgaagcttgaacagcttgatcttgattctgtcgaaactgttgtcgacgaaaagggtgaagacaaggtaacaagcttaaaaatgacacgccaccagaagcgggaagatgatgagacgcat

SEQ ID NO: 196538 - DNA, 452 bp, Gossypium hirsutum
gaatgaagggccgaccgacgcgtgcgggcgtccactgtctgaccaactcttgctggtctgctctgaaaccttcgtcgttttccgtgagtgggaattcaaatttctccaagcggagggtcatcaaagcttttttcttcgatcccaatcaagtgcccatccttaatcaagctgttaaggagccagtagccttcatgggtgggatgtttgctgggattttaaggcttgacttggatgaagagccattaaaggaatgggttgctagaactgtggaagcctctaacatcagtgaggatgatatttctgaaggactccaggaggaagaagacacccctgaacaaattgagattgattgaaatctaatccctgttttgcaaagttgttccataatactcgaaccttactcttttctttcctatatctatggcattatagtgtatccgacttgcatcaat

SEQ ID NO: 196539 - DNA, 676 bp, Gossypium hirsutum
  unsure (1)..(676): unsure at all n locations
taaagtaaaaaacttcggaaaaaatctcaaatccagaacccaaaatctcatctttccattagagcgcagctctcattcctctcgattttctttcactttgttcgcctcttcgattatcaattccgctctcagattcttgaagcaagcgaagttcaattctccaccctacatcagaagaaaactctgattccccaaaattagggtaatctcaatccctaaaagatgccggccaccgcagggagggttcgaatgcccgcgaacaaccgggtgcatagtagcgccgccttgcaaacccacgggatttggcaaagtgcaatcgggtatgacccttatgctcctaataaagatgattcaaaaaattcatcgagtcagatgactgccgctgctgaacccgatggtgaaaacgcatacgctagctttcaagggcttctagcccttgcccggatcacgggttcgaatgcaaatgaggctcgtggagcttgtaagaagtgtgggcgtgttggtcaccttacttttcagtgcaagaatttcgtgagtttgaaggagagtaaggagaaagaccctgaagcgatccaggctgcggttttgaatggacttgataagttgaaaggaggganactgaatgggaaaaaggagatggagagtgaaaaaaaagatgacgatgagagtgagagtt

SEQ ID NO: 196540 - DNA, 517 bp, Gossypium hirsutum
  unsure (1)..(517): unsure at all n locations
tttacttgctttgttctcttatcaattactgtcccctctcttgtttctcttcatttcatttgtttaagaatgtctttcatggcggctgctaaggtttttgcgtgtcctttcgtccttgttgccctcttcagcatggttgcttctgatcctgatcttctccaagatctctgcgtagctaataaagctgctgggataaaggttaatggatttccatgcaaggacgaagccaatgttaccgaagctgattttttctttagcggattagccaatccaggagtcatcaacaactcggttggatcagtggcaacaggagccaatgtcgagaaaatcccagggctcaacaccctcggcgtctcgcttgctcggatcgactatgcaccaggtggccttaaccctcctcacactcacccacgagccaccgagatcatcttcgttctcgacggtgaattagacgtggggttcatcactacatcaaacangttggtctccaaatcagtcaagaaaggcgacgttttcg

SEQ ID NO: 196541 - DNA, 588 bp, Gossypium hirsutum
cggacgcgtggggcaagggcggtcttgctacaggacagggaacggatggttcacatgttaaggaggccatggacttggcaacttcatttgcttcaatgaagttaaaatgaaaaaaatttctgcaactttcgtccctgacatggaagaagcattgatgctactaaatttcatcgatacattaaagtgaaatagaaaacatttagtttgtgtggaaatgctgcaattgccgaagaaaaatctatcactgtaatatactactttatttttcacttacgaacgtgtttcggcatatagaagaaaaattatgctattgatacccttcgaacatctccacgcttctttatttagcagtgaaaatggattataagaatcaactactttgttttaaaaaaaaaaaaaaaaaaaaaaaaaaaaaaaaaaaaaaaaaaaaaaaaaaaaaaaaaaatacaatatgttaaataaacaaaaaaaaaccaaaaggggaccacttttcaagtccaaaatacttaaaaaggggggccccttttaaagaaccaaagttttctaaccttgtgcatgcccataaaaagttttttttttggggccccc

SEQ ID NO: 196542 - DNA, 599 bp, Gossypium hirsutum
  unsure (1)..(599): unsure at all n locations
tccatgcttccgcccacgcgtccgcggacgcgtgggggctttatttgaaggttctctggtagtttttgattttttgggtgtttgttaaaatctgtatacaattttaccttagaaatttgagagggaaagtgatattgtatcagtggctaagttaaaggaatacgtgatgggagaggaggaagccaataaaatggaagcctctgaacccaaggaggacatgcagcagcagccacagccacagccacagcctgttaaggaagaagagatggagaatgaagatgaagcaggtgcagagaagaagagtgtgatcatccctcttcctcaaaaagttgcagcagcagaaacaccaccatcagttacagagaaaagtccaaacaacagagattccgtgcttgctcgagttgagacagaaaaaagactagctttagttaaagcatgggaggaaaatgagaaggcaaaaatagacaacaaggcatataagaagatatctgctattggatcatgggagaataccaagaaatctgctgtagaagcacagctaaagagcattgnaggaaaactggaaaagaagaaggaagaatatgcagagagaatgaaaa

SEQ ID NO: 196543 - DNA, 625 bp, Gossypium hirsutum
caaaagtttgcgtaagttagttttttattttagctaaaattttattagcttttattagtttcttttttgtataaagtttggtcttctaaaaattttcctgtctcaagctcaataggtagtcaataagcactaaaactgatttttgatagttttcttcttctatttcagtattttcaacagctacgaaccatggttttgaggtcatatttcgactggcaaactgatgtgccaatgaatgaaagaaaaacagttgaagctgagcgcgcgcctctccttgctgctgcagatggtcttgaatgctactggaatgcatttgagctgccttatacttttcctgcttcttaccttgaccctcaaaactacacttcattacttccattatattccattccacctgaagtcatcccatatgaaactttcacgatccattggtgatatggatgttggggagttcattgttcctgttccatacgtaaagcaagtaaaggaattggagagaagaaaagaagaacttgaataattgctcttgggagaaagggtatgaaagaatgtgggtgattaagtcaaatggagaaagggacatcatgtccttgttgtgtgcaagtgtttttctcctaagacaggc

SEQ ID NO: 196544 - DNA, 746 bp, Gossypium hirsutum
cccacgcgtccgcttcaatctggttccctgtgccaaattcctaccgaggcaagagcatgaccttccagttcttctcccctcaggcatgcatatgcttctgctgcaaaaggagaggggatatctctatggataaccgtcttcaacgccattaagtttcccctcagatcccatcctactaagcctgtcgctgatctgaaggttctactgtcaaacgctgcatcaaaataaattcccgttcccgccataaagcgtaacagaagagcagacactgaccactattacttctcttgaaaacccaggacattctcggaagacatggatacttccttcaaccgccgagcagcatcgaggacatctatcattggatataaccctcctgtatctaagattagcaaaattgggtataaagtcccatgatatcctccagactgtaaatgtaatttttgagggcatctgtaagctccagagttttttgtagaattcttttacctcggtctgtattaaataatcattacggtctcgactagcatcttgtaatagtttataggcactacggaccgaaaattctcccgagagttcccctttccacacttgaaaatcttcatgctcaaactctgctaggggaatctgcaatattttcctagcaacttcctcttgaaagtttatcgaccccctgaatccagtcatcattccaaatggagatactatgccctgtacccaccctgcagctcattcctttttggaga

SEQ ID NO: 196545 - DNA, 614 bp, Gossypium hirsutum
gcttgtatctggtagtgatgattgcaaggtgaaagtttggtgcacaaagcaggaggccagtgttattaatattgacatgaaagcaaatatatgttgtgtcaagtataatcctggatctagcaatttcattgcggttggttcagcagatcatcacatccactattatgatttaagaaacatcagtagtccacttcatgtgttcagtgggcgcaagaaagcggtctcatatgtgaaattcttgtctgaaaatgaacttgcttctgcatctacagatagcacactaaggttatgggatgtgaaggagaatctgccgcttcgaacttttaaaggccattcaaatgagaagaatttcgtaggcctcactgtaaacagtgaatatattgcatgcggcagcgaaacaaatgaagtgtacgtgtaccacaaggaaatatcgaaaccggtaacatggcatagatttggttcacaagagatggaggatgcagatgaagatgggggtggatcgcacttcataagtgcggtgtgttggaagagcgatagccctaccatgctaactgctaacagtcagggaaccataaaagtgctagtccttgcggcttgacaaaatcgaagttcaa

SEQ ID NO: 196546 - DNA, 569 bp, Gossypium hirsutum
ttggacgcgtgggttttttttgtgcattgacatctggtttttagggtttaaaaactaggatcatgtagtcatatatatatattaaaatgctttttttaccaacatcacttcatatcttaaatgtaataatatgtgaaaaaaatcaaaacaccatcttcccttagggaaagggaagataatggtttttaagtacaaacttaccctagctttgttttcttttgtaaattcattaatggtggctaaaactttgggagtatttagcccctttctgattgaactatggtaaatagtttcttcttttgtgattttaatatgcatttagcttttttctaacatttcatcatgaaaaaggagctccattaatggatatggagctcgcaagcattttgcatgcaaaccctaggagatatttgggttccttagggttcttctcttctaatgtaccaaccatggttaggaccttctctctctaccctctcttgaaccttggaacttgttattttatatatatgggtttggattataagtagggacttatatatatatattcattctccatccaagggttg

SEQ ID NO: 196547 - DNA, 741 bp, Gossypium hirsutum
  unsure (1)..(741): unsure at all n locations
cccacgcgtcccaagaagaaggcttggaggttgttgcgaaagtatgaacttggtcgtcagccagcaaattctaagctctctagcaacaagactgtaaggagaatccgtgccggaggaggcaatgtgaagtggagggcattgagattgggtgacaggcaactattcatggggtagcgaagctgtcacccgcaagacccgtattcttgatgtggtatataatgccctcaaacaatgagcttgtcaggacacagaccctcgtaaagagtgctattgttcaagtggatgctgctccctttaagcaatggtaccttcaacactatggtgttgatattgggaggaagaagaagacagcagctaagaaggaagctactgaggacggagaagttgctgccgaggaaactaagaagagtaaccatgtgctaaggaagcttgagaagcgccagaaggaacgtacacttgatgctcacattgaagaacaatttggctctggtagattgttggcatgcatttcttcccgaccaggtcaatgtggcagagctgatggatacatattggagggtaaagagctagaattctatatgaagaaaatccaaaggaagaagggcaagggcgctggagctgcttagatgcagtatttcaaatggtctactctctcatcaatgtggtttttgttgcctttaaattttgttctctntattttcctacaattgaggatatggtacatttttattgtgaacattt

SEQ ID NO: 196548 - DNA, 411 bp, Gossypium hirsutum
gcgtccacgcgttcggtattatgtctcaacgtaaccttttacaaagactcaaactctggctttagggccgaaaggtaagaggaaaaagtaaccaaaaaacaaaaaatacaatgccgttctttgttggttttctttgctggcggtgcttggttgtctccttgtcggtgcgggtgtgctggcgctcgggtaccggtggggcgtgaaggccctaccgaggtgcgcagggggtcgtaccgaggctagggctgcggcgttccttgctgctaggggtctgccctggttttgaaccttgggccacttaagttaattaggtgttgggccactagatttgggctagagggactgttttaggcttgtaataggacattaactaaatggacttttattggactggtaatgtatttttattta

SEQ ID NO: 196549 - DNA, 404 bp, Gossypium hirsutum
tcgcccacgcgtccgagcttaccctgcaatgtgcgacaagctatcagatcaaagtcatattgacaacagagtagtggtggatggcaacctcattacaagcaggggccctggaactgccatggagtttgcactaggaatcgtggagaagtttttcgggcgcccgaaagccttggagctagcaaaaggactgcttgttggacgccagtagatgaactagtatgagtgtttggtcctgcccatgttaccctatagcctgctatgagacgatctatgagaatataaaaggtgagtaagcattcactctgcggttttttatgtacgataagtttgttccttgttgataaataaatgagtgttggaacaagctgagcaaaatgaacacctttggttcatctgtgatggca

SEQ ID NO: 196550 - DNA, 427 bp, Gossypium hirsutum
cattcatcaaagtccaaagtcccgaaatatctgtatatttcaacatgcctaaaaccttctcaaaattatcttcctctactttcttctttcactttactctgctcttcttctctgcaacctctagcggttccttctccaacattttgtctcccaaaaagttcggtctcaagcgagagaagctcacccatcttcacttctacttccacgacatagttagctcacgaaacccaaccgctatccctgtcgccagcgccgcctcgaccaacaaatcccatactggctttggcgttgtcatgatggccgatgaccctttgacggccgcacccgaccccaactccaagctcgtgggaaaagcgcaagggatttacgcatcagcagcgcaagacgaagtcggtttattaatggtaatgaacttggctttcatgga

SEQ ID NO: 196551 - DNA, 897 bp, Gossypium hirsutum
  unsure (1)..(897): unsure at all n locations
tcgcccatgcgtccgcccacgcgtccggtttcttgaaacggcaaaggacttgcctaccattatgacttcgaacattcattgtattagcaccatgatgaagtgcatagcgcgtggtgcggttgaattccttaagaaaccactttctgaggataaactaaggaatatatggcagcatgtggttcataaggcattcaatacaggagggaatgaccttactgaatcactacaaccagttaaagagtccgtggtttcgatgttacaacaacaaccggaaaatctaaaacctaaaaacgaagactcggaaacaacagaagatgcatctatgattcatgaaaatgacagtgaaccacctgcgggtaatgatgagtacccggctccttcaacaccacaattagaacagggaggaagattgttagacgatagagattgccaagatcatactcattgctcgatagaaaaagagagcggggagcaagatggagaaaccgaatcagtcgaaactaccagtggcaatacaactgcaacaggtggccaacctcagggaccgagtgagaccaatgtaaaagaggaggatgactcagttgatggtaccatgggcgagagtccgcaaaaccgagtagatagcaaaggttctgatgttgttgctgaaaagccaagttcatgtcctgataaagctaatcggaaaaaaatcgaaggtagattgggacacccgactgcataggaaaatttgtcaagcaagtggaccaacttggtattcgatcaagctatcccatctcgaatctagagctatgggaagtagaaggcttgacgagggcatatgtggcaagtcatctccagaaattcgatgcnnaggaacccattttactaaggtgatgatcganatgcttcaagacctaa

SEQ ID NO: 196552 - DNA, 544 bp, Gossypium hirsutum
  unsure (1)..(544): unsure at all n locations
cggacgcgtgggtgatgcctttgttgaaactagcggagccctaaacactgttgctacatccctgatgaaggttgcaaatgacatacgcttactgggaagtggcccccgatgtggccttggtgagctcattcttcctgaaaacgagccaggcagcagtataatgcctgggaaggtaaaccctacccagtgtgaggctatcactatggtctgtgcccaggtaatgggtaaccatgttgctatcacagtgggcggatccaatggccactttgaattgaatgtgttcaagccaatgattgctaatgcactcctgcattcattaagattgctgggtgacgcatctgcttcatttgagaagaactgcgtgaggggaattcaagccaatagggaaagaatttctaaattactgcatgagtctctaatgcttgtcacatctttgaaccctaaaattggttacgacaatgctngcacagttgccaagaaagcacacaaggaggggtccactttgaaggaagcagcattgagcccttgtgtgctcacaagcgaa

SEQ ID NO: 196553 - DNA, 1281 bp, Gossypium hirsutum
tttttacgcgtccgagaagaagcatatacatggagtgagggtcgcgcaatctttgccagtggaagcccatttgacccctttgaatacgatggcaaagtctttgttcccggccaggcaaacaatgcttacattttccctgatatgcacccatctgggttcattgaacaacaagccccagagccaaaacgaccaagcggtcctattatccaagaattagattctgatgatgaaaaagagatgaaagaaaatcccagaaaacatggtaggtctaaggatgaacctcatgtcgaggtaccagatgatgaaactgaacaatctgagagaaggaatgggcatttgcagtatatgaatggctataatggttcatatcaacgacaacagcaaccacctcaaactcgtagctttacgtttcaaagctccaccgttacgtatggtggtgctaatggggcttactatacttcatccaaaacaaggaggagtggaagtgatgggattacctttgaagaaagcaaagaagctaacacagctacaggtcaagcaagccaccgggtttcaaggggacttcttgacaagggtcattcggttacgagaaagctgaattcggatggtagggtggaaacaatgcaggccttgcacaatttgaatgaagatgagctttctggttttgaagaagcttggaatggtaatgctagaaagcatttgcctggctggtctggaagttctaatgtccatgatacaacagggacatgttggggtcagaatgggcaagcaagtcatggaggatgggcacttccttttaccgagcgttctcagcagtcgggaaaagcaatgatggatgccaaagacagtgcagggccatcacgcggccagaattttacaaaggcgaaaggtttgggagcccttaaagataagatttctcagacactagggaagaaaaagaaccaagtttgaactttgaagcactgagttgatcatctagagagtttatattgtgttctctcatataacatatcaacatgcccttttttggacataactacccatctagttcttcagttttcagaccatcgatagcatatctttgtcatgtgtctgtttctgtagtacaagacctttttggtgttgtggtggttaatgcagagaggtatagacaatttctgcaaatggcacccttttaggttatggatattacaacattataatatggattttttaatgcataaaactttgccttttcatggtttcttcctttttgcatttgtgttgaatatgaatatgatc

SEQ ID NO: 196554 - DNA, 396 bp, Gossypium hirsutum
cccacgcgtccgcccacgcgtccgatcaactcgcaactgatttggctgaggctgcaggcgctcatgttctgttaattattgcttccaagttcattgagagattgcaccaagacatacccggaaagggagtaaaaagacagttggagatcctatttaatgtatatgctttaagtctgttacacaaacatcttggtgactttgtcgcctccggctgcattaccccaaagcaaggttgcactagcaaatgaacagctgtgattattgtactcccaggtccgtccaaatgctattgcacttgtcgatgcattcaactacactgaccactaccttggctccgttcttggtcgctatgatggaaatgtgtatccaaaactctatgaggaagcatggaaagat

SEQ ID NO: 196555 - DNA, 303 bp, Gossypium hirsutum
ggtggcttctcttctttatatgaaagcaactaaaaacagaggaaacgtcattagaaaaggggaaagaatcctccaagtccctgtgctctttgtatttttggaatttaatctctctatttttcatattttaaaatttaggtctaattgttaacgcactcaaattcttctgttcaatttgccgccatgatatttttttttgtaaaaaattacttaagtaaccatataccaaaaaaactgttgtaataaacttaaatttagcaaaaaagttttaactgtgttcaaaaaaaaaaaaaatattaaaaa

SEQ ID NO: 196556 - DNA, 389 bp, Gossypium hirsutum
atgcgatctgccttaccaagcggctatcaatgatgcacacagagtatgagggacttaaagctcgtctcagctctcctaaattcatagagaacgctctcaaggatgtcgactgccgtgttcatgaaaaagcacgcatgtatcagaacccaagattaatttaaccaaaaaccgattggctctactggaatcaactgttatgctgtcccaataggctccatattggtcatattttcagtcttagcaaagctacacttcgtgttgggatgatctgcattgtttactcatttatgtcactataaactccatttcaactgatctgcacattcaaccattcgaggactctgtagttttctggtgttagaagcatattatacccagacttccgcact

SEQ ID NO: 196557 - DNA, 856 bp, Gossypium hirsutum
  unsure (1)..(856): unsure at all n locations
cggacgcgtgggctgcaataaagggtcacctatctttggtgcccatagacatgaagcctcaaccaattattcttgcctatattgatctcaatcttgagactttggctgcggcaagaatgttgacatcaactggccctggtcaaactcactggggtgattctggagccaacaatccagcacctgccacaaattctgctgatgcccagctaaaacaagaactcgcagcaatatttaagaaaattggtgacaagcagacatgcacaattggtctctatgagctttatcgcatcactcagctataccctaaggttgatatatttgctcagctccaaaatgctagtgaggcatttcggacttatattagagacggcttagctcagatggagaagaatgctgcagcaggaaggactccttcaagtgtgccaatgtcaacccctccccctgcttctctttcttcttcgtcacctgaatttgggcctctgtcccctgttcagaccaactctttaaatgattctaaattatcaagtacaaaacctgaaccaacaagctttaatttgccaccatcatacactgaagactatcggggggctggtaatgctataaatacagcaagagttcgtgcccctgaaaatgcattgcagaccaagaaatgagagattatcatgggttaccagtggacattggacgcatcagagaaggataaagttgcactacagnctgcgtggaacatggtatatgaccccgncctgatgcgcatgacactaatctggctctaactnaactcgncataatctnatcgatgaaccngncncaagaggctcctgataaagatgtgctcanccgttgaanacaaagc

SEQ ID NO: 196558 - DNA, 551 bp, Gossypium hirsutum
cccacgcgtccgcccacgcgtccgcccacgcgtccgcccacgcgtccgctttcatcttcttaattaattgttaatcttcccaatggccgcctaccaaagaaaacgacgttttgccaatcaaactaggaggaactgaggtatcaactatttgcagttgtaaaacattccggattcagacctactgctggacactatgtttgctacattcgatcctctcctaatatatggcataagatgaatgattcaagggttacttgtgttgaagaagaagctgtgctgtctcaggaagcctacattttgctctatgctaaacagggtataccttggttttcaactgcaatagaagtgcaaaagccttgtgcagaccctggaatttctgattcttcaccaaagtctgttctaaatgacatagactttgcctccaatcttgaggtggaaaagagtgccaattgtagtgccaatgaaactaaagatgttgctgatagagcttcaactcaattctcttgtgatgtgttcaactagtcagtctgtttctcatatgtattatttat

SEQ ID NO: 196559 - DNA, 514 bp, Gossypium hirsutum
ggtcagcggagatgctcttggagaggaattcaagggctatgttttcaaaatcaagggaggatgtgataagcagggattcccaatgaaacagggagtgttaattcctggttgtatctgtctcttgctccacagaggttacttgtgttgaagaagaagctgtgctgtcccaggaagcctacattttgctctatgctaaacagggtataccttgcttttcaactgtaatagaagtgcaaaagccttgtgcagaccctggaatttctgattcttcaccaaagtcctagatgacatagactttgcctccaatcttgaggtggaaaagagtgccaattgcagcgccaatgaaactaaagatgttgctgatagagcttcagctcaattctcttgcgatgggcatagtcataggcaggctcaactagtcagtcctgtatctcatatgtattatttactttacttttgattctaaattgttatggttactttaatttttacgacgacttgagttctaactttt

SEQ ID NO: 196560 - DNA, 744 bp, Gossypium hirsutum
gataaggcttctctttacttgacagcaattgaggatgcagagtacaaagatgacaagatcgaattttggaataatgtttacgggtttgacatgagttgcatcaaaaagcaagctatgatggaacctcttgtggacacagttgaccagaatcaaattgtgacgaatagccaccttctcaagacaatggatatctccaagatggctccgggtgatgcttctttcactgcatcttttaaagcttgttgcacaacgtgatgattacatccatgcttttgttgcgtactttgatgtatcatttaccaagtgccacaaattgatgggcttctctacagggccaaaatcgcgagctacacattggaagcaaacggtgttgtacctaaaagatgtgctaaccatatttgagggagaggcaatagttgggagcatgactgttgcaccaaacgagaagaatccccgagatgttgatataatggtaaaatattcattgagtggtcggcgttgtgcggtttcaagagttcaattctacaagatgcgctgatgtttctcactactatttttatccaccaccaccataaatttatggcctaggctaaagcatgaagatgctactcctattttaatgcatttgtattctaacattcctcaactgcttgagaatattggttctttcatgtggaatgtaacatttgttgccctttaattttcattgattctttaccatgtttgcatgagtaaattaggatt

SEQ ID NO: 196561 - DNA, 744 bp, Gossypium hirsutum
gaaaaattagttctatatgttcttttgggtacccttttccatttcttgtgcttctactttagatttatttttgtttcacataaaagcaatttgggtatgaaaaaaagctaaagattttgtttagaagtgatgtagtgaatggtttaataagtatagcagagcctaacagattttgatcctgattttactgattttaattacattgtcatgcaggtctagactctacttcaacagatagtgagttcttattttgaactgttttggtattctataaggaatttaagaacaataaattttaaacagatttagctaataccacccttccattacatattacagcaacaaaggttccaaacaatgtctgactccatcattacgaagaatatccttttcatcttatctagttgtttctatgcgaggggatgagttgcatgattagtttctataaagcatcagggaagttctgttttgttgatcttgtggttgtttggtggaggtttttaagaatttcacttttgcaataagcaaaatattatttgatggtactttaatattttaatatatgcatataacactgcagtataagctagatggatctccctctttaaaaagaccatagaaatcttggttgtttttgcacatttcattatatgccaacaagattggaaaaggtgatcaaattgtgatacactcacttttccttgtaggtttgatggttagaggatgcttatggtgattgggact

SEQ ID NO: 196562 - DNA, 867 bp, Gossypium hirsutum
  unsure (1)..(867): unsure at all n locations
tcgttccggccgaagaatattaaaggcttctttcgacttgtataacaggccatacaaaacccccattatctaccgtggatggaaggtgttgatcttcgaagcatactgatnnggtttggtgaatatgctagatagaaanacggtgctcgaaggggtaatatgttggtggcacacaccggtgaaggccagctaatgagctgggatgaacacataatgcttatcggtcatactgtcaactgttttggcggatccgttaaagtaattggtaacacgggaagtgactcaaccagggaagcgattcacgccaccgaacaaggttttgctgttggaatgcatgccgctcttcacatcaatccttactatggcaaaacctctctagagggcttggtttctcactttaatagtgtactaccaatgggccctactatcatatacaacgtcccgtcacgaactggccaagatattcctccgcgtgtcgtcaatactgtggcacaaagtcctagcttggctggtatcaaagaatgtgttggaaatgaccgaattgagcaatatacaggtaacggaattgtantgtggagtgggaacgatgatcagtgtcatgatgctaggtggagccatggggctaccggggtaatttctgttactantaatctggttcccggtttgatgcacaaactcatgttcaatgggaaaaacgcttcacttaatgcgaagctcttacctttgattcaatggctctttgaggaacctaaccccattggtcttaacacagcccttgcacaactcggggttgtgaggcccgtttttaggttaccgtatgtacctcttccgctggaaaagaaggtcatatttgttgaactggtcacc

SEQ ID NO: 196563 - DNA, 548 bp, Gossypium hirsutum
ccaacgcgtccgcggacgcgtggggggaactataaagcacatgctgataatcactatgatcccaatgcattgccggtgattcaggggattaattacagagacatcatggcggataatgtgtcgattgctgccaagttggaagggattgaaggggatcctttcaactaaatttggataatccatggtacgattggaatggccagttaaggctaagaaggtgccatggacttgcacagacgtcgaggggatctcgagtggagtaagtcctcggccatgtgaccaactaccagatcaagggccggagaaaatcacggcttgtgacttccctgcagagcccttgtccattgatagagtggtgctcaaaagttgtacctataggatgaaatacatgtgactgatagtagcaaagtaaaactaagtttggtagctagatgtagcaagagctctcatagttgggatcttatgggtttctgtttcttaattatcttatcaagtgttacattatatataaatatataaagccaatgcactctcaagtctcatccatg

SEQ ID NO: 196564 - DNA, 1285 bp, Gossypium hirsutum
  unsure (1)..(1285): unsure at all n locations
gcacacacgggttgttattgaacatggtgctgttccaatgtttgttcagctgcttagctctgctagtgatgatgttcgcgagcaggctgtatgggctttgggtaatgttgctggagattcaccaagttgtagagatctagttcttggtaatggtgcacttatgccattgttggctcagttaaatgagcgctctaaattatccatgctgaggaatgctacttggacattatctaatttctgccgtggcaagccgccgacaccatttgagcaggtgaagcctgctttaccagttctacgggaacttatttacttaaatgatgaagaagttctcacggatgcttgctgggcactatcttatctttcagatggcccaaatgacaaaatccangctgtcattgaagctggggtctgcccacgactggtggaacttcttggtcatccatcgccgacagttcttatacctgctcttcgcactgtgggaaacattgtcactggtgatgacaatcagactcagtttgtgattgacaacaaggtgctccctcatctctatcaacttcttgtacaaaatcacaaaaaaagtatcaagaaagaagcctgctggacaatctccaatataacagctgggaataaagctcaaatacaggcagttattgaggccaatattattcttcctcttgtacaccttcttcaacttgcggagtttgacattaagaaggaggctgcatgggccatctcgaatgccacctctggaggatctcatgagcagattcaattccttgtgagccaaggttgcattaagccactctgtgacctactaatctgtccagatccacgaattgtgacggtgtgcctggaggggcttgagaacattctgaaggttggtgaggctgataaggaaatgggaatgaacggtggaatcaatctatatgcacaaatgatagatgagtgcgatgggttggataaaattgaaaacctgcaaactcatgacaaccatgagatatacgagaaggctgtgaagatcttggagagatactgggctgaagaggaggaagatgaacagaatatccaagatggtgggaatgaaaatcagcaaggctttaattttggagtgaaccancagccaagtgttccacctggtggcttcaaatttggttgaagtgtttttactttgggattggggccataattttgtaggtctactacattggtcgcaatgaaatttttaaaaaactgtttttatgtttttgcaatttggtgggtgggtgccaagggttccaggttttgg

SEQ ID NO: 196565 - DNA, 811 bp, Gossypium hirsutum
tggaccaagccgtcggaaccaattcaaccttttttttccttcgttatttccaattctgaaactcaaatctcaaaacgattttagaaagaaaaaaccccccaaaaaaatcaaagccttttttaactttccttcaatgaaacgaaggaccccagattctcaggcaaccgtctccgaccacaaattgaagaaaatcaaagaagatgaggaggaacctgaggatacaaaatctgggttgatgaatttagatgaaaatcttttgtacgaaggttttcaaacacgtcgatgcaaggactttggctagggcttcttgtgtaagccgtctatggcgccaaaccgccaaagacgagcggctttgggagctgatctgcaccaggcactgggctaacatcggttgtggaacccaacagcttagatctgtcgttttgcctctcggcggcttccgtcagctccactcccgttacctttggacgttttccaagccacaagccgcttcggcttccgcctggtctccgcccaagattatcaactccaaaccgccggcacggtgggggaaagatgaggataatctatgtctctctcttctctctattcagttttatgagaagatgaataacagaggcagataattctaattctaattaattaattaattaattactacttttatagctttatataataaatggatcaaaatataaatatatcactttaattgcgcttttctagctttgggttttgcttgttttttattgctgtattgatttcctctatttttgtttgggattttactctctctttttttatggaattt

SEQ ID NO: 196566 - DNA, 421 bp, Gossypium hirsutum
atcatactggtaaacaatattcatctccggaagaaatgaagaaggttgctctagaaagatacaacaaaatgaaaggtaatgccccagagagattggtatcaggatctgatgactttaccatgttcctatgggaacctgctgtcagcaaacaccacaaagttcggatgactggtcatcaacagcttgtaaaccatgtttatttctcacctgatgggcaatgggtggctagtgcgtcatttgataaatcagtcaagctatggaatggtactactggagaatttgttgctgcattccgaggtcatgttgggcctgtttatcaaatcagctggtctgcagatagcatgcttcttttaagtggaagcaaagattccaccttgaaggtttgggatattcgaacaaaaaaattgaaacaagacctttc

SEQ ID NO: 196567 - DNA, 877 bp, Gossypium hirsutum
caagccctgccctatagcagtttccttccattgcagagccgaagacctcaaatccattcaaaaaaaataaaaatggagggaatatcgtaccagcgattccctaaggttaaaatccgagagctgaaggatgactacgctaaatttgagcttcgcgataccgatgcctccatggccaatgccctccgccgcgtcatgatctccgaggtccccaccatcgctattgacctcgtcgaaatcgaagtcaactcctccgtccttaacgacgagttcattgcccatcgcctcggtctcatccctctcaccagcgaacgcgccatgtctatgcgcttctcccgtgactgtgacgcttgcgacggtgacggtcagtgcgagttctgctccgttgagttccatcttcgcgccaaatgcatttccgatcaaaccctcgacgttaccagcaaggatctctatagttccgaccatactgttgttcccgtcgatttcaccgataacgctggctacgattccactgagcctagagggattattatagtgaagttacggcgagggcaagagctgaggctgagggcaattgcgaggaaagggatagggaaagatcacgccaaatggtcacctgctgcgacagtgacttttatgtatgaacctgagattcatattaatgaggatttgatggaaagcttgacgcttgaagagaagctaagctttggtgagaagcagtccaactaaagtctttgacattgacccaaatacccaacaagttgtggtggttgatccaaaggcgtatacctatgacgatgaagtgctaaagaaagctgaagctatgggaaagccaggtcttgtggagatatatgccaaagaagacagtttcatctttaca

SEQ ID NO: 196568 - DNA, 852 bp, Gossypium hirsutum
tcgttcacgcgtacgggcacgcgtccgcccacgcgtccgcccacgcgtccgggcaattgggaaattagggcagagcaaaaatggcgagaacatcatccagcaaagaaaatgctcaagctttattccattctcttcgctctgcttatgctgccactccagtcaatctcaagatcattgatctgtatgtgggtttcgcagtcttcactgctctgatccaggtggtttacatggctagtgtgggatcatttcctttcaactcttttctttctggagtgctttcttgtgttgggactgctgtccttgctgtttgtcttcgcattcaggtgaacaaggaaaacaaggaattcaaggatctaccacctgagagagcttttgcagattttgttctttgcaacttggtgctccatttggtgatcatgaatttccttggataaaatcataatttccaggttttgccggactgcgtgttttctcagtttccggccgtgattcataattttagcatgaaatgaagttcttagatcatcattatgagcttgagcatacatccagaactgtagtaggaatttgatattttatctttggctaaaagagtttcaagatcacttgatgagaaacaaaagacatttgagtacaaaaaaaaaataataatagaggataaaaaataaaaataaaaaaaaaggaaaaaacaaaaatacaaaaagaagatgaatattcaaaaaaaagacaaagtttaaagaaaaaaaaaaattattattcaatttaaaataaaaaaagggggggctcttttaagggtcccatgttttttttcctgctttttcaagaataatattttttttatggggcccctaa

SEQ ID NO: 196569 - DNA, 648 bp, Gossypium hirsutum
  unsure (1)..(648): unsure at all n locations
cccacgcgtccgctccctatgtcttcatgttgaggtttataaaggctgctcagtcagacaccaagcttgaacatctagccttctacctcattgagctgtgcttggttgaatatgaagctttgaagttcaagccttccttgctatgtgcatcagctatctatgttgctcgatgtaccctgcaaatgtctccttcttggaccccattgctttgcagacacacacgctatgatgcatcagaaatcagggagtgtgcggaaatgatattaagattccaaagagctgccagttcagggcaattgaaggtgacatttgagaagtacgcgagccatgaactcagtcaagttgcaatgattacacccttgggtaggcttccttgaacttgattttagttgaatgagttcaattttagcatgtaagtaaatataaaagtgaaatgtcatatataacacacaaaatagtccggaagctttcatgtcaattggagttgtggtgttgtagttgtaagcgtgttgattgtattggaggtattgtttcctccttttgagtttgagattgatgacttaatgtaatgatggatcatgggttcgtacttgatcgccttcttgacttagctccnnnnnnnnnnnnnnnnnnnnnnnnnnnnnnnnn

SEQ ID NO: 196570 - DNA, 396 bp, Gossypium hirsutum
cggacgcgtggggcgcggtaaagtaccatacggagcttaaggaagctgacgatctactcatgcattatcgatcggaaccgagctgttacccgtcgagagcttacttacgcggaaagggaaagtgcaggcttgcgttaacggggtttcccgatgagttttacgatactgagtgggatttgataatgatcgttgctcctcgtggatacttcccggaggctccagggaggatggcggcgatattctcggcggctgtgatggcgaggaacaggaaaggaccgggtgtgacgcacgtgttcttgcacgatgttaatcggcgagtggagaaagttttcgccgaggaatttttgtgccggaagtacttggtgaacagcgaggggagactttggcatttcgaga

SEQ ID NO: 196571 - DNA, 469 bp, Gossypium hirsutum
accggttctcattcgactggtctgtaaataatacctctgttagtccagacgggaagttgcttgcagtccttggagacagtaccgactgcctaattgccgatgctcagtctggcaaagtcactggcaccctagaaggacatttggactattcttttgcttcagcttggcaccctgatgggaacattcttgctactgggaatcaggacacaacttgcagattgtgggatgtaagaaaaccagcccagtccctagctgtattgaagggaagaatgggagcaattagagctctcaagttcacatcagatggtcgatttcttgccatggctgagccagctgacttcgttcatgtcttcgacaccaagtccgggtatgtgaagtgccaggaaattgacttttttggtgaggttgctggaatatcctttagcccagatacagaatcgcctgcggttgaactctaacaagatcgcga

SEQ ID NO: 196572 - DNA, 530 bp, Gossypium hirsutum
tttccgctttcgcgtccggagctctacaaaacagggatgggggaaaccacatttgaaaagttggcaatgacatgttcatgtctctgcacaagcaatggagaagcatttcctggttgggacacacttctgaaagttggctgcaaactcggagaatgcagaattattctgtgtgaagccggtgataggcacagggtgcagaagttgcagctcaattttcccagtgatgatgttgcttttgcactgaaagatagcaaggatctgccatggttggccaagtacttatgattctacaagcctgcaattatatttcaattcttaaacatatagctacaggttttgaaccaattttcattataagatcctccttatatttaaatcacagtccttgcaatgttttagcttatgatctttggaagaggcagattggtccaatttgaggcattgttacttttcattatgaaaaatgctgatatgaactgaaacatttttctaattgttatttatatatacattctgaaaatggtttggac

SEQ ID NO: 196573 - DNA, 459 bp, Gossypium hirsutum
gacgtaaaggtagtcaatctttttactgcttttcaacaaagagagaattggatgaccgattgcttcacagatggagttcatctatctgctgaggggggcaaaatagtggtggcagagatactaaaagtactgaaagaagctgaatggaagccatctctgcattggaaatccatgccaactgaattcgccgaggactcgccttatgatattgttggcgctgatgggaaaaccacgttgaatccgtccgaatggacttttcaccgagagattcaatgggattagagttcagagttctggttaagatcatgatctccaaatcccatggaaattaaaggaagacagagttcaatagataaacaagatttgtaggaaggactgaactacaaccatttgagtcctagttgcttcttgcaaagctatcaagagtttaattccatttaatgcaatatatatacatat

SEQ ID NO: 196574 - DNA, 320 bp, Gossypium hirsutum
gaccaagccgtccgccaacccgtccgacgcaatagtctgtaactttgatgggtgggagcttcccaaggttttgggtcggaattcggttgatagagtgttgttggatgccccttgtagtggtacaggagttattaccaaagatccatccgttaaaacctctaaaagtttagatgacatacaaaaatgtgcccatttgcagaagcaattgatacttgctgctattgatatggttgaagcaaaattcaaaactggcaaatacatcgtttactcaacatgctccatgatggttccagaaaatgaagctgtcattgactattcac

SEQ ID NO: 196575 - DNA, 555 bp, Gossypium hirsutum
tttccgttcattgaagttagggatccaaagttattcaccattttggtagataatcttccagaggatcattcggtagaaaatattaagaggatatttggtgaagtgggaaggataaagaaaatatcagttcgtgatccacatgctgttgaagagacaaagaaaactggtagggccgatatattgatcagtagtaagttacacgcactggtggagtatgagactattgaggctgctgaaaaagctgtggctactttgaacgatgaacatgactggagaaatggcatgcatgttaagcttcttgagcgaaagggtaagcatggacagcgaaagcaagcttggaggggacctgctcatgaaaaaaacatcaatgctcaggtatctgatcaaacaggaaccgaggagaaaaatgcttcaagtgagtatcatgaagatatacctgatgatgaggatggggagcatttgtccaaagagaaaaacgggtttcaacctagaaacagacgacgagggaggagacagaaaaatcgtggtaccaacggacacggccatggaactaca

SEQ ID NO: 196576 - DNA, 578 bp, Gossypium hirsutum
gctacctgcaaaggtggaccagctgaaatcattgtccacggtaaatctgggttcaacattgatccttaccatggtgatcaagctgcagaaatccttgttgatttcttcgacaaatgtaaaaaggaaccatctcactggaatgacatctctgagggtggcttgaaacgtatccaggagaaatacacatggcagatatattcggagaggctattaacattgacgggagtgtatggattctggaagcacgtttccaaccttgaccgtcccgagagccgccggtacctgcagatgttttacgctcttaagcaccccaagctggctgaatcggttcctctggcagaggaggagtaaaacaaaggaagaggcgggttttccctggaggatttttccgagttcttcataataataataattataataatcatagtgattatccttcggtgccttcatattgatcgccggacaagaaaaagcctctttagcatctgtgttcctatgtgtgctgttttatttttacgggcatttgtaggacatggagggggtactacgcccttggattccaacaaaagattcggatt

SEQ ID NO: 196577 - DNA, 414 bp, Gossypium hirsutum
acgggtgactcttaagaggtctcaccgaggctattaacactgacgggagtgtatgggttctggaagcacgtttccaaccttgaccgtcgcgagagccgccgttacctggagatgttttatgctcttaagtaccgcaagctggctgaatcggttcctctggcagaggagtaaaacaaaggaagaggcgggttttccctggaggatttttctgagttcttcacaataaaataataataatcttttgttgttttcatatttatggtcggacaagaaaaagcctcttttgtatctcttttcctttttttttctttttttttgttgttttatttttcccggcattgttagaacatggagggggtactgcgcccctggattccaacaaaagattgtgattcccctcattttctttttttt

SEQ ID NO: 196578 - DNA, 835 bp, Gossypium hirsutum
cgcctctgttttcattttagaaattgtttcaatcaaattttctcttttatcttttgggttagcaagaaacgtgttctgtcatcgtaatcattgattgaatcgaattttgatccgccatggctgcaaagattcttgccaacttaatcgtaatgggctcgggtatttttgctcgtgctgttgttcaggcataccggcaagcacttgcaaatgctgccaaatccggtgttactcatgagacactacaaaatgctgcccgtagagctggcaaagtcatgacagagcaagaagcgaagcagattcttggtgtaagcgaggatactgcttgggaggagataatgaagaagtatgatgtcttattcgagaagaacgccaacgtcgggagcttctaccttcagtcaaaggttcatagggctaaagagtgcttagaagccatctatctagccaaaggagaaggcactcctcctagttgaggatgaggatttgtccaggtttgctcatttcacatacagatgcccgcttgtagactaattctcgtcctacgaaaagggtttcaaagatttaaatcatatgcacagcccatcgtgctcctccccattcctgggttcaaacttcaaacactgattcattcaaattttgtgtccttgatgttaaattagttgagtggttgcaaataataactaaggttttcataaaccgtctattgcagttgttgtgctcattgttaattaaatacacagtagattagttgaaacttgaggcactgataaaaagtatgtaagaaacttcatgtaaagataccaagagccttgaatttgattaaatatccatgtgtttt

SEQ ID NO: 196579 - DNA, 699 bp, Gossypium hirsutum
  unsure (1)..(699): unsure at all n locations
atcccccgtctctctctgaatctctctcctgaaaagcaaattaggccaaaagaaagccgttctaagaaacgatgtcgtcttcgtcgtcgttcaggaagtcctcgtgcctttcacggagattctcgggatcgagatcattggccaaaacggcagcgctagcaacggtctcgccaacggtgaaccagtcggagatttcttcttcttcgtcgtcgtcgtcgcagcctacgccgctggcggaggcggaggcggaggcggaggaggaagggcaatcgtggtcgacgatgctgccggagttgctacgtgagatcatggagcgcgtggaggcgagtgaagatcggtggcctcagaggcaaaacgtcgtcacatgcgcctgcgtttgtgggaaatggagagaacctatgagagagatcgttagggcttcttcccccggaagccgcaagatcccttttccttctcgtcttaaacggtcagctccggatcgttttccccaccattgtttttatcgagcggtgcagaaagaactcggattctcgcttggtctgtcgcttacgccatccttccggcgagaagggagatttctattggctgccccaagatttccacttggtgtgcacatcgaattatttanggcccttggattgcaaggagttgggctcttttccggtgatgcatttcgtccggaggtgctttttctgatgt

SEQ ID NO: 196580 - DNA, 420 bp, Gossypium hirsutum
cccacgcgtccgcccacgcgtccgcgacggtggcacctccaacaacttttgaaccgtcgttgaccctgggtctatttggtgatcagggttaccaagttaccaagaagtcggatgtcaataaaagtggttatcttcatcaccatgaggaacctggcgccggtgatttatatcgtcgtcaagcttctcctcatagtgctgtttcttcgttttctagtggtagagtcaagagagaaagagaggttagcagcgaggaattagaggtagagaagaattcgtctagagttagtgatgaagacgaagacggtgttaatgcaaggaagaaactcaggctcaccaaagaacaatctgctcttctcgaggaaagcttcaaacagcatagcactctcaatcctaagcaaaagcaagctttagcaaagcaat

SEQ ID NO: 196581 - DNA, 345 bp, Gossypium hirsutum
cggacgcgtgggcggacccgtgggccgacgcgtggggtagaagcattggatgttaaaaaaacaggacgaagagatgatgacactacaggaacaagaagcacttcaattgcttaaaacgaaagagaaaactgatcatatcattaaaaaaacccaagagaaacgtcaacaaaagaagcagccgaattcagatcctaataaacctaaaaagcctgcatcttctttccttttgttcagcaaagaagccaggaaaactctggtacaagaacgacaaggaatcaacaactctacacttaatgccctgatttcagcgaaatggaaggagcttagtgaagaaaaaaagggatg

SEQ ID NO: 196582 - DNA, 558 bp, Gossypium hirsutum
ataaaacaaaaaagaacaactcagttttctttgtttatttcaagcaaaaatggaagcacgagagccacataatgcgacggcaaggacacattcaggcgtaatcagtgaactccacacgtctccctggcattcgccggtgccctacttgttcggcgggttagctgccatgctgggtcttatagcggttgcgcttctcgtccttgcatgttcttattggaaactattgggttacaacgagaacgacggtgaagggggaacggagagagacttagaagccggagaaggtaaaggtgaagctggtcggccggctatggaaccaaaggttcttgttataatggcgggagaaaaaaagccgacgttcttggccaccccaattggtgttaacgggtcgtattatttcggtgacaatagtgaaaagcgatgttgctgtagtgatcaaaagggagaggaaggcaagcaagatgagaaagaggtctgccgtggttgtgatggtggtggtgacggtggagctgaaactacggtgacccaacaatcttcaagtgatgatcattgattttg

SEQ ID NO: 196583 - DNA, 427 bp, Gossypium hirsutum
tcttgcttccttgcgtatgcttcgggtatatttgagaacttatgcacttgagcaaatggtccaagctgcaagctcctctgctggacttcggaccatcaagcgggttgagcaaaccttacaagatcttggggttaatttaaagccaaaggttccaacaaaggccgtttgtgctgagcatcttgaattaagaaaagaaattctaacgttgctaaatctccagaaacagttgcaatacaaggaggcagaaggttcatctttccgtgatggttcctatggtgatatgccaggcactgcaaagcggtcacaacgtgctgctgatcaggaccgcacatttgtccccgacaccattagttttggagtaattccaggtgatagggttgtcaaaagggagcaaaaacgaaagggacctgggagaacatctgagact

SEQ ID NO: 196584 - DNA, 596 bp, Gossypium hirsutum
  unsure (1)..(596): unsure at all n locations
attggcagtaatgaggaacataaagtcagaagttgatgcaggaagcataagaccttactgttttgtggaggttaatggtctaaagttggctgcaccagagaatatttacacagtcatatatgaagccttaactggacatagggttagttggaaaaaggctctgcaattactgaatgaacggttttcagatggaaagaaaattgctaagggggatgaccgaccttgtattctacttattgatgaactcgatcttcttgtaaccagaaaccaatcggtactatacaacattcttgactggcctactaagcctcattccaagttaattgtgatccgcccacccgtcccaatggatcttccagagaagttacttcctcgcatttcaagccgaatgggtattcaaagactctggtttggtccctacaattatcagcagctacaggaaattatatcaagtcgtttgaaaggaatcgatgcgtttgaaaagcaagcagtagaatttgcttcaagaaaggtagcagccatttcaggggatgcacgccgtgccctagagatatgcangcgtgcagctgaaattgcagattataatatgaagaatc

SEQ ID NO: 196585 - DNA, 503 bp, Gossypium hirsutum
ggagtgggatgtgtgttaaggttgtatgcgatcacctgggacttggtgtgaaaactgggatgccatatgtctggagaaatgatagaggtgatgctatagcaagcttgagaaaagaatgggagggtgtgaagctgatggaggaagtcgtacctttctttcagtcggtgaggttgtcacgggaagctacaacaacagaggactgtgtagctgaggtggcaaatgttgttaaagagcagctagaatcgaaagatcccatgtttgctcgtgcagctaaagccatggtggattgggtaaagctgtggaaatcagttggatctagcacatcctcaccgggggcataggattaagacatggttataatttgtgtgtttttgctttttggtttgctagaattatttctatcatacactcttccatgatggtgatgtttcgtggaatatctgtttgtaattgagctgcaacctgaaatggtttgcttgctagtgatattacgtggcaaaact

SEQ ID NO: 196586 - DNA, 682 bp, Gossypium hirsutum
ctcttcctttcttcaacttccccttccccttccaaagggtcctttataatccacctttgccaataaccctctccagtcccctctctccttaggtccgggccgccatctcgacccctccaatggcgccgcaattcgtcgagcttccatcgtttggttccgcaacgatttacgggtccacgacaacgagtgtctcaacaccgccaacaatgagtccatgtcggttttgccggtttactgttttgaccctcgagattacgggaaatcctcatctgggttcgacaaaaccggtccttacagagccacattcttgattgaatcggtttcggatctccggaagaatctgcaagcacgagggtcggatcttgtggttcggattgggaagccggagtgtgttttggttgagttagctaaagctatcggggccgacgctgtctatgctcatagagaagtttctcatgatgaggttaaggctgaggaaaagattgagtcggccatgaaagaagagggtgttgaagttaagtacttttggggaagtactttgttccatgttgatgatttgccgtttaaattggaagatatgccttccaattatggtggatttagggataaagttaacggtttggagataaggaagacgattgaatcattggaccaaatgaaagggatgccttctagaggtgat

SEQ ID NO: 196587 - DNA, 516 bp, Gossypium hirsutum
agttttcatcaaagaaactcagttcgcattttttttttcaaattattattagttgtttaaagcttgggatacaatggagttagctctgaacatttcgtctccgctaatatttcccacaaattcaacaccaaaattgaaaaaaattaacaaaatttcttatggtttcggatccaatggatcctacccgacctctaaaatctgcgctgtttgttccaatggctctggttcatcatcatcttcttctcatggggctgaggctagggcagtgggagatgcccgcagacgaagaagcaggcgcgaatcactattttgttgtgacatacctatccccgaggagcgaattgaagaaccggttggggtatcgttggctgaaaaattagttggagataacccccgttgcactgattgtcaggccaaaggtgctgacctttgtaccacatgctctggttcaggattatatgtggactcaatactagagagccagggtatcaatgtcaaagtccgctgcctaggttg

SEQ ID NO: 196588 - DNA, 502 bp, Gossypium hirsutum
caatttgtcttgaatacctttatttctggtttgctggttgacccactttttaatcttcacatcaacaacaacatgcctagtcgctgcgaaattctgtgtgaactcttgatcgcgattttgatccctcctttgggagtttgcttcaggcacggttgttgcagcgttgagttctggatttgtgtgctgttaactattctgggttacgttcctgggattatttatgctctctacgctattgtttttgtggatcgtgatgagtacttcgacgagtacaggcgtccactttattactctgcttagttctcttttatgatctctctctttttctgtaaagtggtgatcctgaaactgtttgcatttgtttttaattgaactcgatattgatgtgcttctactctttaattgatcttgacattgtgcgattgtaaatttgtaatgtttctttgatcttgtttggatttcagacaaatgtttgattttaacttaaagtgagttcattttt

SEQ ID NO: 196589 - DNA, 501 bp, Gossypium hirsutum
ctacctttcccccttttcctttaagccctcaatcaacttccaatccctttgtattttcttctttgctttagagaaaacaacactggagagcccatccatggctgcctgtggaaccattaaacacatctttgaaaacccattacctgaaaaccctactttgcttgaatccctttcttcttcttcttcttcttcatggaagcctgggattaaaccccttgaccaacaaccttctttcactgaattctttggtgaacttcatttccaggaaaatttaagtatttcccaactcttcttctactacctcttcctttcctacattgaacgtctccgggagtattggtgtttattcccatggaaatggtgaaaacagttctaattgccataaggagagtgatagcctctcgttgaaccctgagagcctccagctgtgtactgaagagcttggatttgagagctcctatggtgttgaagaggtgaacaatgagatgaaccaagactggg

SEQ ID NO: 196590 - DNA, 509 bp, Gossypium hirsutum
aacgctcttcaacgttgtagggcagcccctgagatttcctgaatcacccgttgtaagcttttcagccagagatttgataaggggcttgctagtcaaagagccacagcagaggttggcgtacaagcgaggtgcaacggagattaagcaacatcctttcttcgaaggtgtaaactgggctttaatccgttgtgcgagtccaccggaggttccaaaaccggttgaggttgagcggattccagcccctacctcatcagctggtgatagaccttctgttcctgctaccaaggatcagagtaactatctggaattcgatttcttttaaattattctctgaaccatttttctttttcttatttcgagggaatgtaagagttcatgatgatgtgcaaattagagtttctagaaatgataatgatcatatatgcttgattgtcttaattttcaaatttgtattttgcataagtgaaaacatcatttgattttgcatattgaaaggctatgggcttggt

SEQ ID NO: 196591 - DNA, 408 bp, Gossypium hirsutum
attgtgttagaaccagcaagcccaaactgcgattacaaacttctgtgggggaaaacatggcgggagcagctgaaccacaaaaacgccagagcgggagaccgttcccaccatcggcgagaggtccgcctcctcctcctcgccctcgctttgaacctgttgatcgcgaaaagacttgtcctctattgcttcgcgttttcactaagattggtggtcatcattctaaagaagattttgcagtgagaggcaaggaacccaaggatgaggttcagatttatacatggaaggatgctacgcttcgtgagttgactgatctggtgaaagaggtagctccagcagcaaggagaagagatgcaaggctgtcctttgcatttgtatatcctgacaagaatggacgttttgtggtgagag

SEQ ID NO: 196592 - DNA, 971 bp, Gossypium hirsutum
ctccaaacagaccggcccctttattttggataccggtggcaggtgaaagtggcgatttgcccgatttgcgaaggcaaaataatgaatctttattctgaattgaatcaagagattccaacttgaaatttaagaaatggaaaagtggtcaaaacggctcgttttcatgtttttttgcttatcagtttgtatccaaatcccatatgtttcttcgtctactgccccccttcaaggaaatcagggttacaaagaatcttcagctgcaagaacctttaagctagaggatgctcatgtagtacgttgttcaagagaaaggagtagagcagcatggaaagtaattgaagagtatctaatgccgtttgtggagcaagagcgatacaagatttcaagtggatgtaggcttcaccctgacaatgatttgtatagagatcaggaacagcacaagcatcatctagatataaacgaatggcgatgtgggtactgtagaaagaacttctatgaagagaagtacctggataagcattttgacaacagacattttgatttgctgaatacgagtcatagtaagtgtctggctgacctgtgtggtgcattgcattgtgaccttgtcatggattcttcactccgcaggactaagtgcaatcctgctgctgctgcgaggaatgaacatctttgggagagtcttgctgatagttggtttccggttagcaaaggtcctgtaacaggccgtcttcatgaattcttcttgccgcaattctgggatgcccacacttgcagcggaggtccaaaaccctttcctaaagggcaaaagaagcgaacaaggtttccttacatttctctatccattttgactttggtgcttctggccgttttctacttcttcatttacttggaccaaaaggggattaaaagtgggtcacaagaagctaaacgaatctcactaaatggtcgtaagaaaaaaatcgtttaaacat

SEQ ID NO: 196593 - DNA, 406 bp, Gossypium hirsutum
ctttgtctcaatttcactgaattttcttaccgacttctctgcattttccctcttctctcccttcacattggaggaactgaaccaaaagccaagaagcagtaggattgaacaaaggaatagaaaatatgcactctttcgggcacagattaaatggtctcttaaccttttccgtgacgatactggcaataatgtgtgctatcgcgtctctctcggacaaccttaatactccttctcccacggcagaaatcaagattatgaacataaactggttccagaagcagccgcagggtaatgacgaggtcagcctgacaatgaatatatcggctgatttgcagtcattgttcacatggaacacaaaacagcttttcatatttgtagcagctgagtacgaaaccccaaagaattc

SEQ ID NO: 196594 - DNA, 679 bp, Gossypium hirsutum
acgcacgcgtccgcactttcaggcacttaactaaaggtttcatttttaactagctgatgctccaaaaaaggataggttccattatacacagggtgcgcataagattaacagcttttatactgctccgaagaagctattggcatctgactctcgcctacgtcccgacagatatgcactatagctgggtgacctctctaaggcaggctttgaaaagagcagtttgtaggaaagacagagagctgaaaagaaaaacagggaggtaaagggacataaattcacccctaaatggtttgacttcgccaacgaagttgctgctacaccttggggtgacttggaagtttatcaatacaacggcaagtataccgaacaccgagctgccatagatggctcgagtagcagtgaggagattgacattaagtccactgaattcaacccatggcagtatgaagatttggctgctaactaaaagcacatctttgcgcttgcttttgaactgtgtgatatattctttttctatgccttttacacttcggtttcctgttgtggctagtgtcaattatagaacaattacatcataggtatttattctgttctgttttatttataatttctagaattttattgtttagttattttttggtccatggttttcaagaaaagtttatgtatttttatcatc

SEQ ID NO: 196595 - DNA, 425 bp, Gossypium hirsutum
tcgtccacgcgtcctctttcagaaacacagtttcaaacctgaaatttccatttgtcgattccaagctctcatcaatgggtctctcagttgagaattcggtaacacaatctcatacccgaacccacaaaaccttcctcatcaccaactacatcctcttgggagctgcttccgcctgtatcttcctcatcctctccctcacgcttgcttcccgtccttgtgtggattcttccttatcctcctccacgtcgtcaccatagccgccgccgtctcgggttgctccgtcgccacttccgggtccaacaagttctacgcagctcacatggtggtgatggtgttgacatcgatattccagggctcggtttcggtgcttatattgacccgaacttctgacttcttggggtacttgaagtcctacgtgagggaag

SEQ ID NO: 196596 - DNA, 570 bp, Gossypium hirsutum
cccacgcgtccggtttgatctctaaactactcgtggctgaccctgaaaggaggatcgcaattccagcaataatgcgtgttccttggtttcggaaaggacttagacgtccccttgcgttttcaattgaggaacccatatcagataatacagaagatgatgattctgtctccaagactaccaaaccatcgtctccgaaattctgtcagacgcttttgagttcatttcctctatgtcgtcagggtttgatttgtcgagtttgttcgaaaacaagaggaaaccgaggacgatgttcacgtcgagatgttcacctacaacaatcatggcgaaaattgaagttgtggtgaaggggttgaacttcagagtaggaaaagtcaaggacttcaagatgaaactacaagggtcatcagaaggacggaaagggaagctcttggtgactgcggaggtgtctgaagtggcaccggaggtagcaattgtggaattctccaagtcttccggtgacaccttggaatatgctcagttctgcgaggaaagtgtgaggcctgcattaaaagacattgtttggacatggca

SEQ ID NO: 196597 - DNA, 897 bp, Gossypium hirsutum
tcgtttgattttagcttccgcaagcaaaccctaaccctaaactttcttttcttcatctttttttttcctctcaatcgcgataatgtctcacttcggaaggtcaggcccgcccgacatcaccgacacctactcccttctcgtcctcaacattaccttccgcacgactgctgatgatttgtttccgctcttcgacaagtacgggaaggtcgtcgacatcttcattcccaaagatcgaaggactggtgattctcgaggctttgcatttgtgcgctacaagtatgccgatgaggctcagaaagctgtagataggctcgatgggagagttgttgatggtcgggagataactgttcagtttgcaaaatatgggcctaatgcagagagaattcagaaaggaaggattattgaatcatttccaaggtcaaggagcagctcaagaagccgcagtcctcgcagaaggcaccgggatgaccattacagagatagggattatagaagaagtcgtagtagaagtcacgacaggtatgaacgtgatcgctatcgtgggaaagacagagattctcggcgccgtagcaggagccgtagtgctagtcctctccattctaaaggccgaggaagaggccgttatgatgatgataggcggagtagaagtcgatcaatgagtgcttctcctgctcggcgtagccctagtcctcagaagagtccttccccacgtaagacatctccccctaggggtgaaagtcctagtagacggagccgtgatggacggtctccaagtcctcggagtgtttcaccgcagcgccgccctgctgattcacggagcccatcttcttgaaactcatagatcaatgaatgatcttgctgatgacattggaattcctggagacttgacttagcatg

SEQ ID NO: 196598 - DNA, 430 bp, Gossypium hirsutum
gcctaaccctagcccattatcttaatttctcccttgagaaaaagaaaaaatctctccccccttccattgctcttcttctccaccgccatgtctcacttcggaaggtcagggccgcccgacattagcgatacttactctcttctcatcctcaacatcacctttcgcaccactgctgatgatttgtttccgctcttcgacaagtacggcaaggtggtcgacatcttcattcccaaagatcgaaggaccggtgattctcgaggttttgcatttgttcgctacaagtatgcggatgaggcacaaaaagctgtggataggctcgatgggagaggcggtgatggtcgggaaataacaggtcagtttgcaaaatacgggcctaatgccaagaggattcacaaagggaggataggtggatcaacaccaagaacggggc

SEQ ID NO: 196599 - DNA, 433 bp, Gossypium hirsutum
  unsure (1)..(433): unsure at all n locations
aagccctcaaggtcctcttgagcaggcaacgaatggaggtgaaatcctctccgaaggagatatggaagaacaatcattagctactgattctaccaacaaatgatacaccatagatttacacattttgattatgctatcccaatttttgtgtaaataaaccacatattgcttctcatagctcgcgggagaacatttagatgtttgaaaattttctgttacaacttacaagcactttagaggtaaagctaaaagaaaacgtacaatagagatgagttatacaggcaaggaagcactgatttctagcgatttaccttacacaacactagaatcaatgagtattaactatgaacaattctttttggtnnnnnnnnnnnnnnnnnnnnnnnnnnnnnnnnnnnnnnnnnnnnnnnnnnnnnnnnnnnnnnnnnnnnnn

SEQ ID NO: 196600 - DNA, 520 bp, Gossypium hirsutum
cgttccctctctttaacgtgttcgccgttgaaggctgccgatccgacttagtcataaacaatgggccgcaaagctgatgcgctttatataaatccaaagaaatttggctctcttacaaaaccttgcatgaaggaaatgatatcattcctaaattgcatggctcttaacaaggttaatgatgaaaaatgcatccggcagaaggatcttttgagtgcttgcatggatgctcagtctaccaagaataggaagccatggggcagcattaattaccacttgcagaggcttaataggggaaggaagtaatgtgggttttctttaaagatgaatgttgaatttatgcatcattcttctagttcatcacttctagtaagatgatgtgcattaggttgtagctacagagaacattcatttgtatttttttttcttgcggttggttgaaattttggagaaagatgctcaatgtagcttaaaccaattcctgtcacttcaaagagtagcaataaattggattatataccag

SEQ ID NO: 196601 - DNA, 456 bp, Gossypium hirsutum
acttgaatgggtcagaaatagaactgagttgaagctacataaacaagcaataaacaaatccatcatcacttcgaggaaaggcccactctctcagtaaacattacattctaaacattctacttgacacaacagctggataaggctatctaatcacctgactagactaaactaatggtgacaaataaatagggtaaataaaccccaaggaacatgaacatgctggtgctggtgagaagctaaataagcttacacgtagaacaagaagaaggtgagaatgggattcatcaattttactttgattgcctgtggtgtcagtattggaaccttaaggttgggaaatttagattagcttccaggcaaagatacatttatgtcggtcggtttattccttgaatcagaaggcaacggagaccaaatctcgctgcaaattgatgaaatgatgtttgattttggatc

SEQ ID NO: 196602 - DNA, 471 bp, Gossypium hirsutum
agtccctcttcgggggttcttcttgtatagcgccctcatcgaactctgcacctgatccgttgctgtcttcgtttattttgcctatcgttgatgattctgttagtgtgcagcctcagttatctagcgaaaccaacacagctacgaaaagttcagatgtgaataagtcagagagaaatgtgcagtcatctcctctttcagtcaaggatcaggaagagaaggcaaaaagatgtgaatttgttaaaagggctgctgttatccacaattcttgatgatgttttatgataaccttaaaggatggttgctgcaatcgcgggctgttcacaagtcgctgaagcctatggcatgggtcttcgcctaccgtatgggttgctgcgcttgttgtagtgaatatgtttgatgtattaagcaaaagtgttaaataaggtaggaaatgagtgtaatatatatgtggcatgtgtggactttttagtt

SEQ ID NO: 196603 - DNA, 671 bp, Gossypium hirsutum
ataactagctttctactagttgtatattagcaaatcagtcgatgtggagatccttcaagtgatggcattgtagatacatggagaaaaatacattggaggaaacagttgaagcttgcttggagagagaatttgtgtaggacttgattgttagttttataggatatatatatatagttttcatgtggatgggggagggaagattttctttgatgtagtgttttcccactattgatatatgcctagtcttgtgctatattgcttttctacgtttctcatttttaggaaggcacctgaacgcccatcctcgacctgagaggttgctgctgtctttctttttgtacacagctcgtgtaatttcagcacatatgaagattttggacctgatatatatcgggtatagttggttgcacatatgagttaaccttttcttcctttgcactccctttgccggccaacgaccagctgccggtggttggctgtacctctccttgtcctatattctcttttccatgctcccttcctctttgaataataatccccactatgatttgtggtttcggcggttcttttggatagattcaatgctaatagcatcggaactaacgatttggaacgttttgggctattctctcttctgagctgggttttgctgagggctgggtgtggtgctt

SEQ ID NO: 196604 - DNA, 446 bp, Gossypium hirsutum
cggtatctcaagcaacgctatggggataatgaccagcttcattaacgacatctttgagaaactggctcaagaagctatcgaggctcgcgaggtacaacaagaagcccacgattacttcaagggaaattcagacacgccgttaggctcgttcttcccgctgaagcttgcgaaacacgccgtctctgaaggtaccaaggcggtgactaagtttactagctcttgaatttaatgaaatttggggattttaggtttagcgttttttatggaggttcctttttgaaattgcgttgatgtatgtaactccttgttactgatggttttgaaattgttggaaccatgaaatgaaagtgtatccttttgtctatgttaaggaatcgaaatgtttctttgtttaaaaaaaaaagcgtattccgcataactaaataaagactccgcctaattcttcc

SEQ ID NO: 196605 - DNA, 533 bp, Gossypium hirsutum
  unsure (1)..(533): unsure at all n locations
agaaaacatattaacaaatcggagcttatggctcaacgactcatcaaacgatggaactttaatggaaagcgacgcccatacctgttgcagaatatcgcaagaccacaccagatgattagtgtcttccagtttgtacttacacagcgggcaatatgtgtccacacacatcgttctcctcgccagattaccgaaatgcggcaccagattattaaccagcctccaaatgtggattttgattttaatcgggaatactttatgaccacaaatcattgtaaaaatctgtgtaaatctcatcaatagcaggcatgtaaatagtacgctgtagatgatctacaatcagtacccgatacccactcttgactgtatactccccagagccttcatgtttccagaccaacctatcctctggccgactttcagatatgggaatagcaagaattcggtccactgtactctcatcaacaatctntagaagcagcgctctatcccaggatcttgtttctccttgaccaaattgcccaaatgctacaaaa

SEQ ID NO: 196606 - DNA, 690 bp, Gossypium hirsutum
aacaactgctgtcagttcctctgttcctccgccccaactcttgggttgtttttcgtttttccttttgttgaagctttaaaaaaaatgctgacagtggaggaagttcgtaaggcacaacgcgccgaagggccggccaccgtgttggcgatcggtacgtcgactccacccaattgtgtggatcagagcacgtaccctgattactatttccgtatcacaaatagtgagcacaagactgagctgaaagagaaattcaagcgcatgtgcgaaaaatcaatgatcaaaaagcgttacatgtatctaacggaagagattttgaaagagaaccccaatgtatgtgaatacatggcaccatcactagatgcaagacaagatatggtggtagttgaggtaccaaggctaggcaaagaagccgccaccaaggctattaaggaatggggtcagcccaaatccaagatcacccacctcgtgttttgcaccaccagtggtgtcgacatgcccggtgccgattaccagctcactaagcttttgggccttcgcccgtcggttaagcgcctcatgatgtatcaacaaggttgtttcgctgggggtactgtgctccgtgtggccaaggacttggccgagaacaacaagggcgctcgcgtgcttgttgtttgctcggaaatcaccgcggttactttccgtgggccgagt

SEQ ID NO: 196607 - DNA, 718 bp, Gossypium hirsutum
  unsure (1)..(718): unsure at all n locations
ctgaatctagccccaacgacctaacccattagcactaatttgtctattagcaagtattgctatctcatatacgtgtttcctcttgatccacactttgttttcactgttccaactctatctctctaagctcccaatatggccaattcccaccaaccgtttgttgcactcatcgtcggcgtcaccggcatggcggggttgagcctagctgaagccttgaagagccccaatgccctcggcggtccttggaaagtttatggctctgcttcacgtcccataccaacttggttcccttcctcgcttctcgataaatacatcgcttttgatgccaccgacgccggaaacaccgctgatacgctcactccaatctccagcgaagtcacccatgttttctgggtggcaatccaagttcgtgaaagtgaacaagtaactgttacagttaacgcaactatgttatccaacggttcgatgttttgaagagcgnccggcgcaacgaaccggttcaagctcacatttnacgngtcagacaggtacccacctacatggtccgaccatatccgacgaatcggncaaggtctcgaaccatgaccacgtagngagagattgcccgctgcctacccaactttactcgcctaaagactttgnatataccgcatcatgactattgtgacggtgcatatatagccgtctcagacgttcacgcctctacatactgtcgctg

SEQ ID NO: 196608 - DNA, 665 bp, Gossypium hirsutum
  unsure (1)..(665): unsure at all n locations
atccccactgacaaggaacaaacgaacacatcggttgatcacaatggtgtttgggggtctcttgcagctgccgctcatattgatcagaatccagaaacagctaaacagaagcatgttgcagcagaggcctcgtccaaggagatgcaggctaagcagggtgcatccaccacttcaaccagaagtcgtactaaggtacaaatgcaagggattgcggttggtcgtgctgtggacttaactgtgttgaaaggatatgatgatctcattaatgaagtggagaaaatgtttgatatcaagggagagcttcgccccagtggtaaatggtccgttgttttcactgatgatgagggtgatatgatgcttgttggcgatgatccatggatggatttttgcaagatggtgagaaagatcttcatatattcaagcgaagaggtgaagaagattagtccaagatgcaaatttgcagtgtcgtctttggagggtgaagggactgctgtaaccattgattcagagcataaatctgaaacatgaaataataaagtttgaagacccttcttatttacgttacatatatatattgntttatttntggtttccttggtagattatactctgattagaacagtgaatgaaatgctgcattgaagaaaaagtacacagttgatgca

SEQ ID NO: 196609 - DNA, 505 bp, Gossypium hirsutum
  unsure (1)..(505): unsure at all n locations
cccacgcgtccggtcgccgccaacaatgaaacttctagaacctagaaatcagtttgcagccgtgggatcactcctgagacttgaatttcagcgaagcaaagaagaacccgtggcgaatttgcaaagtacggggtctgctggtatgtgtacgggggtgtgggcgtggcgtacggaaactgtgctggcgcggggcgtggctgctggacggtacggaggccgtgcatggggggttgcttggttgcggcgcagaggaaaaggagatgtcctagggttttgtcctgttttagtgttctaggccctgttgggtcctgtagattcgggtcagggtttaattatggggcttggggtaatagactggggtttttaatatttatttgttggttttgggttggtttgtaatgggctcgggcacatttggccccactacactatatattgtgtttttgttcttttgtcaattnaaaaaaataataattaatatatnnaataaaaataaaatttaatt

SEQ ID NO: 196610 - DNA, 437 bp, Gossypium hirsutum
tctagatcgcgagggccgccctttttttttttttttgttattttattattttctaaggctacccctaacaccaggacgaggcttagatggctcagcgacatgaacagcatgacgattaataagcttagattcttcaaaaggaattttgggatgtttggcatcatgatggatctgcatcgatttcacatcgggagcggttgttttgcaatgaggacactcgtatttggcatgtcctcctttctcaaacccagaacggtcagctaatccggctttgccgccaccacggttggtggtggcagcgtcgaccttggcggcgagttccttggccgtgtgcttcttgggcttggcttttccggtcatgattgattgatggatgataattatgaaatcaaagaaccaaaaagcaaaattgggaagcttttgggtttattttcttt

SEQ ID NO: 196611 - DNA, 769 bp, Gossypium hirsutum
gtacaagtctccgccaccaccacctccatcctcacccaagcacccttacaagtacaagtctccaccacctccaccgccatcaccacccaagtacccttacaagcacccgcgaccaaagcaccaactccagcaccagcaccgccaactaaagcaccagctcccccatataagcccccagttcctacacctccagttaagccaccaacaactccagcaccgtcttacaagccaccaagtccaccattgccgcctgttaggacaaaaaaggattgcatcccattatgtggacaaaggtgcaaattacactcaaggactaacctatgcttgagagcttgcatgacatgctgtgacagatgcaaatgtgtcccaccagggacatatggcaacagggaaatgtgtggcaaatgttatactgatatgagaacccaccgcaacaagcacaaatgtccttgaaaagcccaaccaaagcccccaaaaaacgacacttcttgagtatgtgtttttcatatttgtaatagcaaaaaagcttgcagtaataagttctgtaagaagagaggaaatggatggatttcttgtagtgtcttcgtttgtaatcctagaagctatgaacttgtcaaatagttttaattaacatataactgaagataaataagtagtatatattaagttcccttttgttctcgttaaggaaattgtatgttctaagcagaatgtaagcctaatatatgtttatatttaaacattgagaaataaataataaatctgagta

SEQ ID NO: 196612 - DNA, 561 bp, Gossypium hirsutum
aaatggacctggaagcaaggagtttgcaaccaggggttaaggcttctcttcttgctaaattaagggaatacaaagctgatctgaacaaattgaagaaggaattcaagagaatttcttcacctaatgctcatgatgagttgttagaatcagggattgctgatatacactcggtttctgctgagcaaagggatcgattgtcaatgtcagtggagagactaaatcagtcaagtgagagaattaaggagagtagaagaactgttctggaaacagaagagctcggtatctcgatacttgaagatttgcatcaacagcgacaaactcttttacatgcccacaacaagctttatgatgtggatagcgccattgacaagagcaagaaagttttaacaaccatgtcaagaaggattaccaagaacaaatggatcgttatctcgataatcgtagcacttgtccttgcaatcatcttaatcctgtattacaagatttcacatggctgatgaaatcttttgaaccattaatggtctgcaatttgtattatgtgatccgcatttgatactttca

SEQ ID NO: 196613 - DNA, 553 bp, Gossypium hirsutum
aagacgagtcaagcatcttggtctttgttagaaataaatgagcattgcttaaactagaactgcctgtttctgtcgtggttgtaataggcccattttgcccgggccaattagaatacaaaatagaaattaaaaaccaaaaaaaaaacacacacacacaaataaagaacccaaaatcagaagtccaatgtccgattacaaatatttgggcaaaaactaacttaaacccaaaatcccttaatataaacttaacccagttacataaaatttgacccaattaaataaatcctaaaacctaattctaataacccaaacccgaggcccaatacacccaaaaggaaactcagcagcctgagaaagccagaagcttctggagtaagccagaatggcaccagaaggtcatcttctcactagaaatccccacgctcggcctccacgtcatcagggtcgttcctccgtacggccgttctaaatcttttaaggtgtagtcaagcaccgtcaatggcataatcggggcggtgtttgcatgcggctggtcaccaaatgatggtggttc

SEQ ID NO: 196614 - DNA, 422 bp, Gossypium hirsutum
gtgcatctttcattttccatgttctttccagggttttgaagtgtttcccctttctggctcatttcaattctaattcaagttccagttttcatcatctgggtagtctgggatctcccttccaaatttgggttccttttattttttcatcaaagattcgatgtcacaaggcttttcaattgagctttactttgatccagcactcgaaaaccaagtcttgaaagcttggaatgtattggctcgtcgccaaatcagcactcagttaattgaaattgagtcaaggcctcacattactctcttctccagcccttttctagaccctgccaagcttgaatctgttgtcaagtcttttgcttcaaaacaaggacctttacctctatcttttacttcaattgggagtttcccaaatgacaaaaatgttcttt

SEQ ID NO: 196615 - DNA, 372 bp, Gossypium hirsutum
cggacgcgtgggttcagcacatacttagttggtagatggagatgacgatggtgaagataaggggcactagtaaatgtcggcttttccggattaagaagatggggtcacttgtattcgaaggaagagcttcacagaaagccatggccaccgtgaagggttgatttgaattgtacaggaattgccaaatcgttcacagtaatacctgaaccgtgttgtgtttccagtatcggtttttgtatgcctgtttgtatttgtattgtcgtaattttctttctcgtttttaactttcaatgtatgacttcgggattggcattttatcattttgcaatggcgaagtcgttggtcatgagggagatcgggtttttgtgtctt

SEQ ID NO: 196616 - DNA, 703 bp, Gossypium hirsutum
  unsure (1)..(703): unsure at all n locations
cccacgcgtccggcgaggggagtagatacaggcagcaatgagaaggagcttagtatatactccaagacagaattccggttgggacaccacgtcccaagactaccaagctcatctttcccgaatggaaagatcagccaccatgatccctggtgcccctcagtaccccgatgtccacaaggccttcaacaacaaggttgagtttccggaagaagatcagtgcactgagcggtccccaacggcaaactcccgaaagaaggttcaggtggttgagcatgcagagaccgttgatgaagccacccttgattctcaagctgatagctacatccagcagaaacacaaagcctttgaactgtgcaaatggaagaccttcaaaatgcactagagttgagacttttggagtaagcatgtcgatcatgatttaatgacaggccacgtaacctaaatatatgaagtattgctgctcatacactatttaaataaatgacctgtcactgtcttggggtgctaccaagactcgcgtgttctcttttctctttttctttataagttaactaagctcttaaaggtagttgcttggatagcagagtaattgctcttaggtgtgccctgatatgtagttgctgttaattgaaaattatttatgaatactaatatatagtatacacatatacatcnnnnnnnnnnnnnnnnnnnnnnnnnnnnn

SEQ ID NO: 196617 - DNA, 593 bp, Gossypium hirsutum
agaaaacaagggtttcaagtcgtaggtccgaaagaaatcgataaaaatggcgatggcgagtgttcgatctggtctcctacgagcagcccttcgcggcggctctcgtcctactgctcctcccacgcgtggcttcgcttcctcttctcatcacgatgatgcttatgaaaccgcaaaatgggaaaagataacatatttaggtgttgctacctgcactgttttagcgatttataacctatcaaaaggtcatccccaccatgaagagcctcctgcatacccatatttgcacattcgcaacaaggagttcccatggggtccggatggtctgtttgagagaaaggagcatcactagggatggccggatggatgcatatctttccgagttcggcgcatttttatcatttctctgagaaatcaatcagataattctgtggatcttttgtaattttagcactcgatttccagtttatggacttttaattgcaagttcatcaggttttctatatggttgtgcctgcctaccatactctgtttcgaaataataagattactgaatggtttgttgtggaaaaaaaaaaaataaaaaaacacctaat

SEQ ID NO: 196618 - DNA, 418 bp, Gossypium hirsutum
ggctttcttttgcagacgctgcggtcaacagaggcaaggccgcccccgcgtccggcaagtaggggatgcctcgggagacgagtgcgctagagtcacatgggcagcaacggcgcataggaaaggagggaaccctaggattccctggtgttgtttagtttttgggctctattgggccgtttagggttttagattactttgggccatgttgggccattaaggatttgggtaagtagtttgttattttattttgttttgtaattggactcttattgggctagtcaaaaattggggcgtgtacatcaatattttaacatttttatttatatattaaaattccaaatatgttataagtttgacggataaaactcaaaattgtacatcaactttatccaatgtgcaatttgatatttttttaaaa

SEQ ID NO: 196619 - DNA, 473 bp, Gossypium hirsutum
gtttcgtttaccaaatgccacaaattgatgggtttctctacaggaccaagatcgcgagctacccattggaagcaaacagtcctatatctagaggatgtgttaaccatctgtgaaggggaggcaataattgggagcatgactgttgcaccaaacaagaagaatccccgagacgttgatataatggttaaatattcattgagcggacgacgttgtgtggtttcgagagttcaattctataagatgcgctgattttgttgcagagcatttcatcaccactactagctgtaggaggggaccttgtttgcatgttcctcaaacgtttcaccaaacatttttttaattccttttctactttctttttcctcgaaaggttttccctgagaaagaaaaacacataagatgcatgtacttcattaactcaatccaactgttttcttctcatttatgcttcatattgaatcttgtggtttctt

SEQ ID NO: 196620 - DNA, 365 bp, Gossypium hirsutum
cccacgcgtccggaaaaaaaaatttaagagcctctcctctctgctggggtctccaatgcccttgacgccgactgatgagccacctcagtggttcaccgcaccaccactatggctggtggccgacgacaagcgacgacggggaggtgagtttccttcctctcttttcttattttttttattattttgaatgcaaaagaaaagaaaaaaagggaaaatgaaatacactgaaatagtaaataaataaaaacaagcagaaactcaagcaaaaagagtaaaaagaaacatcatctgaaactgttttgctcttgatgtatctcgtttataaaacgttggttttattgagataaattcttaaacaataaggt

SEQ ID NO: 196621 - DNA, 399 bp, Gossypium hirsutum
cattacatcacattccttactcgctttgtagcaattaagccaatggcaaaacttgtggctgctttcttcttggctctcattgccatctccatgcttcaagttatggtcttggcatcgcacggacatggaggtcatcattatgatcaaaaacattacggccctggaagcctcaagagttaccaatgtccatcacagtgctcgaggagatgcagcaaaacccaataccataaaccatgcatgttcttctgtcagaaatgttgcaacaaatgcctctgtgtgccccctggttattatgggaacaaagctgtttgcccttgctacaacaattggaagaccaaagaaggaggacccaagtgcccttaaaaattcttatttcataatttatgcctaatgcttaca

SEQ ID NO: 196622 - DNA, 604 bp, Gossypium hirsutum
tctatcgcgtccgatcgatacttacgatgatcaccgaatggccatggcattctctctagccgcatgtgctgaggttccagttaccatcaaggatcctggttgtacccggaaaaccttccctgattactttgaagttctcgctagagttacgaagcattgaatgacttactttagagaaagcaagaaaagcacgagagagagaggtttgtaccaccgtccttaaaaatcataggacgaaaggcaatcaaacctcgtcttcgatgttccatctcgtaatctaataattccgcaatcggcagctcgggtttattaccgtttcttcctagataatttatttttctacttgtaatgagtgagtagttggtctttggtcgctgtcatgaagactgttatgttaaacaatatttgctcaattaaggattgattcttttttggtaaaaaaaaatcaatccttaattgggcgaatattgttttactctaacaggcttcatgacagcgaccaaagcacctactactcacccattacaagtagcataaatatattatcgaggaaatggtaataaacccgagctgccgattggggcgttctttgcggacgcgtagg

SEQ ID NO: 196623 - DNA, 610 bp, Gossypium hirsutum
catttccaaagatcttttttcttctcttctgatcatcacaattaattgtcttcagaatcttccgagatcctatgccttgccatttcaaggtttcaagtgcaatccaagaaaactactttcttgttcccttaatatgatggtacatttccagggcgggatgaactcgagtaatgtaccgcggagtatggtagttaaggcaattcctggttccacatcaagtgaaaaaacgagtaactctgactcagaggggaaaaaatctgagacatatagtcatgatatgacagaagctatgggcgctgttttgacttataggcatgaattgggaatgaactacaactttatccgtccagacctaattgtgggctcatgtctgcagactcctgaagacgttgacaagttacgtaagatcggagttaaaacgatattttgcttgcagcaagacccagatttggaatattttggggtcgatattggcgccattcgagattatgccaagaaatgtggtgatattgaacacatacgtgctcaaataagggacttcgatgcatttgatttacggatgaggcttccggctgtggttagtatattgcataaggccgtaaatcggaat

SEQ ID NO: 196624 - DNA, 761 bp, Gossypium hirsutum
ttttgatgtgtctgacatttttggttcaaaacaaaaccccatgaatgatggaaaccttaataaaatgagtacaaagtcatcacaagactctaaagctcctcaaaagaaggatgcttttcaggtgaagtctggaatttgggctgattcactgaaccgtggaataattgatcttaacatatctgctcccaagaaggtttcactggcagatgttggaatagtctgcggattaagtgatgtgggtgaaagagtgaaagggcctccaacttcattttatatggggagagcaatgggaactggctctggtcttggtaaaactgggttcgcatctacaccatcaactgatgaagatggtctattctcaagccttggcaaccaccaacagtatcaattcggtagctttaaaaagtaattttgttcattccccctttgcattcatttcctattttggtgctaaaaacaaagttatcgactgttgtgcattttggtgtgctactttcgtatcattctatggtacactccccgggaagtcctatctttccattaggaacatttgcaagtgaaattggtattgagatttgattcagacttagttaccaccatattgttgttgttcacacactgtgttagaattatttttagcgtcgtctgaatcaagttgtatagtccgtgtatcagggggcctccccagttactgaagcctgtttccctatattctgtttatcatccagtgtattcgtggtgaataaatatcagtcttcatc

SEQ ID NO: 196625 - DNA, 629 bp, Gossypium hirsutum
cccacgcgtccgtttctatccaacatccattctttggtcgcaaaatgattaaaatatatatttttttttcaatctaatgttcttcattgatattagtatgttccactttttctttctttcattgttgcagaccatttttctatggcaccacaaaaatcagtggaaactattgggaaaaacttgagagatcaatatgagaagtggcagcccaagtaaggtcaaagttgatcctacagtggatgaagtgaagaaactttgtaatacatgttgcagatatgccaagttagagagttttatttcattacaatggacatggtgtgccaatgccaactgcaaatggtgaaatctggctgtttaataagatgttcacttgtttaactgttaggaatcaattcttgttgcttttcttttgctctatttgccaatttttctccttgataagcctgaacatttcctgtgcagagttatacacagtatattcccttgcctatcagcaatcttgattcttggctaaaaacaccttctatatatgtttttgattgctctgctgcaagaatggttgtttgttttccttccctagccttatctgttgcaggaatggttggtaatgcctttattgagctttttga

SEQ ID NO: 196626 - DNA, 525 bp, Gossypium hirsutum
gctgatctctgttcagttcgctggaccattggcctcaagttctattagcaccagtgctaaattcgaggttcgaagccccaaacgtgtgcagatcaagtttcaagaaggcataattggaactccccagctgacagactccatagtgttaccagaaaatgtggaatttctaggacaaaaaattgatctcactcctattaagggcttgctgacctctgtgcaagacacagcttcatctgttgcaaagaccatttccagccaaccgccattgaagatcccattatcaaacagcaatgctgaatcatggttgcttacaacataccttgacgatgaactgcggatttcaaggggagatgctgggagtgtgtttgtgctcgtcaaggagggcagcgctctcttgaactaaactctgggttccggttcttcttcttcctcagctatttattagagttatctgttgtcttggtttttattaagacagaatgtaagaactatacacttatatgggcaatacatggtcatggactc

SEQ ID NO: 196627 - DNA, 406 bp, Gossypium hirsutum
cccacgcgtccgtccatttcggaggctctttaagcagctcgaatcgatgctcctaatgcagcacatcaccctgccttgaaaagcaatggaagggtccttagctttggcctagatgcacccatttgtgattccatggcctctgtcttaaaccttggggagaaaaaggttttgaatggtgcccgagatggatttcatggtcttgaagaacaaagagtttcggttccaaacagaagggaaaacggtgatgattgctcgagtggatcttctatcacggtttcaaactcaatggaggaaggtggtagaagttgcattcaggaaaataggatgggcaacattaatggcttcccttcaccaattccttgtttacctggtgttccttggccttatccatggaattccgcggtgc

SEQ ID NO: 196628 - DNA, 429 bp, Gossypium hirsutum
aaacacagtaacattaccaatggcaaccctgtctagcgtgaacctcgtaaccccaagaaccatagccaatggaccagacgccccaaccctcaaggtcccatgccttaaccggccttggaaaagggtatccccaatgaagctgcgtgtcgggcctgttagagctgcaccggatggaatatcggagaaggtggagaaaagcataaaagaggcacaagagatgtgttcggatgatccggcgagtggcgagtgtgtggcggcttgggacgaagtggaagagctgagtgcggcggctagccacgctagggacaagaagaaagacgatgatcctttggagaattactgtaaagacaacccggagaccgatgagtgtcgtacttatgataattgaaaatgtttggttttttttctagtttcttagattatagttgg

SEQ ID NO: 196629 - DNA, 387 bp, Gossypium hirsutum
attactgaaatgttttcttctccgaagaaagaagatgatgattcaggccaaggctttcgttttgacaagtctctccaggaactgagagatttgcggtctcagcttcattacgctgcggattactgtgaaacaacatttttaaagtctgaagagaagaaaactgtggtggaaaacacaaaagaatacctatgcaaggcacttgtcactttcgttgatcatctgggaaacgtctctgctaatctaaatcactccatttcccagactaattcattttccgaggctgagctccgcatcaattgcctccatcaaagacttctctcatgccaacaatttgctcacaagcttgctctaaccagagtcaaatggaaccccattttccaagacata

SEQ ID NO: 196630 - DNA, 248 bp, Gossypium hirsutum
cggacgcgtgggcggacgcgtgggcttggatgatcaaggcactggcctgcttttaagcaaactaggacatcatgggcgggtttatgggtcgaagttggtagtagacaccggtgctgtactgtaacttgtttcggtaacacgggatttgatctctgagctcgcctgcatgccaatggttcgctaacatgaattactgcatgtacgtacttttttgagatggtgaaacgaaactgatgtaaatatgatgg

SEQ ID NO: 196631 - DNA, 672 bp, Gossypium hirsutum
attagccgagtacatcatcgccatttggtttcactcgtggggtactgtatatctgagcatcaaagattgcttgtctatgattatgtcccgaacaatacccttcattaccatctccatggtaaaggcaggccggttatggattgggctcttcgagtcaaggttgctgccggagctgctcgcgggatagcttacctccatgaagactgtcatcctcgcatcattcatagggacatcaagtcatcaaatattcttcttgacaggaattttgaggctcaggacctgcattgggattttctgtcttgccgttcaggtttcggattttgggcttgcaaaattagctttggattcaaatacccatgtaaccacacgtgtgatgggaacctttggatatatggctccagagtaggcaacaagtggcaagttaactgaaaaatccgatgtttattcctttggtgttgttctcttggagttaattaccgggcgcaaacctgttgatgattcttagccgttaggtgacgagagcctggttgaatgggctcgatctttgcttgctgaagcgattgaacattaagattttgatatgttggtggatccgaggctggaaaagaactacgtggatcacgaaatgtttcgaatgattgaggcagctgctccttgcgtgtgacattcagc

SEQ ID NO: 196632 - DNA, 713 bp, Gossypium hirsutum
  unsure (1)..(713): unsure at all n locations
gaaaaaaaagatgtctctagtgactgaagagatcaaaggcagcgcttcagaaatttaccatggagatgagatatgtcaagagaaatcaaagtttctgctggaggaaatgggcatgcccagtggacttttgcccctcaaagacattgaagaatgtgggtatgtgaaggacactggtttcgtgtggctgaaacaaaagaagagcataacccacaagtttgacaagattggtaagcttgtttcctatgcaactgaggtcacagctgtggttgagaaaaacaagatcaagaagctcactggggtgaagaccaaggagcttctggtttggatcacactcagtgatatctatgttgatgatccaccaactgggaatatcactttcaagacacctgctgggctgttcagaactttccctgtatcagcgtttgaggttgaaggtgaagttaagggtgctgttaaggacaagaaagaagaaaaggataatgtgaagcctgctgctgtggaagcagtgaaagaggtctagagtagtgagactagaattaaatttccaaattccatccatctgcggggttgtttttggacttgctatcttttaacaagcctcttctattaatatcatcaatagcagcaatcaataaaaaataacagcatgttagtttacattcaaaaaaaaaaaaancaaaaataaaaaacacattaaaagaaaagagggtaag

SEQ ID NO: 196633 - DNA, 650 bp, Gossypium hirsutum
ttatatcccaacttcgaaaaaccccgtccgcccacgcgtgcgaattttcatcccacatacatcactcttctcccacccacccaaccactttcctttctatcccaccattttctctttcttttgctttctaaaacatggccaaaacactacttaacaaacctctcattaccttcttcttctttttcttcttcagcttctttattcaaaccaagcaagataacccatgtccgtatccatgtttcccaccaccaacaggcaccggcggcggaggcggcggcggcacagtgacacaaacacctccagctagttactcaccaccctcccaaacaggagcataccctccacctacagggaacttaccatattactatccaccaccaccttatggtggaggtaattctttatatggtcagccccctcctgaccctatcttgccttatttcccatactactatagaaaacctccacaccaaacagatgatcagtcagcagcagcaacagttggtcctggaaggtcattactcatcaccactgctaccacaaatcttgttgtatttattattctagttatttctagtttagggaatttctagctagtgaaaggagaaaaaaggaagatcttgtgtaaaagtaattatgattaagccatg

SEQ ID NO: 196634 - DNA, 832 bp, Gossypium hirsutum
  unsure (1)..(832): unsure at all n locations
natcgggtaccctgaaggagaggctttttaatgctgcctacaactctaagaagcaagcaataatgaatggaaagagtccttctcccatatgggacagattggtattcaacaaaataaaagctagacttggaggacgtgttcgttttatggcttccggtgcttcacccttgtctcctgatgtcatggacttcttgaagatatgctttggtggtcatataattgaaggttatggaatgaccgagacatcatgtgtcataagttgcatggatgagggtgatattctttctggccatgttggctctcctaatccagcttgtgaaataaagctggtggacgtcccagaaatgaactacacatcagatgaccagccttatcctcgtggagaaatctgtgttaggggtccaattgttttccaaggatattacaaagatgaaatgcaaacgagagaagttcttgatgaacatggatggcttcataccggggagatatggctatgagcatactggtggccgtctaaagattattgataggaagaagaacatttttaagctggctcagggagagtacatagctccggaaaaggttgaaaatgtatatgctaaatgcaaatttatagcccactgttttatatttggagacagccttaattcttcattagtagcaattgtatcggaggaccaagatgctcttaaagcatgggcttcatctcaaggcattaagtacaaagatttagaacagttgtgcaatgacccaaaggcaagagctgccgtacaggctgaaatggatgccgttggaagagatgctcagttgagaggctcctaattatcaaaat

SEQ ID NO: 196635 - DNA, 605 bp, Gossypium hirsutum
cgacgtcgagtccaaatttgcatgtgtcttcttcatccttttcaggttctttggctagatggaggtcaccgtggaccttgacgttgttgcgaggatggatttacttgatttctttaaggaagaatgtgagcagagaggagccacagtcgtatatgctacccatatttttgatggtttggagacatgggcatcacatttggcttacatccaagatggtcaattgaagagatctgcgaagttaacagaaattaatgagttgaaaagctcagaaaatttgctctctgttgttgaagcctggcttcgctctgaaaccaagtgtgagaaaaagaaatcttccaattcccctgcccaagtccagaagtcctcgccttttggtacttcgcctttcatgtcgtcgaggcacatggcatactaccgttgatctttctgaatccagctatttttcaataatttttgaaggccaaaaccagatgcacgagcggaaaactttctttctagtcatcttctattaacgtggagttggccattgtggatttatatacttgtttgcttgccgttgcctgatggatggcttcgtatattctttggcagctttgttaaaaatg

SEQ ID NO: 196636 - DNA, 546 bp, Gossypium hirsutum
ctgacgcgtgggctcattaccactcgctcgaggaacaagacaggcaagtccagatcgatcgaagttcttatttaacgaagtacatggttgagttaggcattcaaatcccaacaacttttgatccttttgcggaggccgaggaattcggaagaacaggaaccaaagactatgttcatatccgaatccaacagagaaatggcaggaaaagcttgacaactgttgaaggtctgaaacaagaactgagttccgataagatccttaagtctcttaaaaaggagttctgctgtaacgggaatgttgtgcacgacaaagagctgggcaaaatcattcaattacaaggtgatcagcggaagaaagtagcacacttccttgttaatgctggaatagtgaagaaagagcaaatcaagattcatggtttttgagtggttttagggatgtcatgtcttttgattttaatacctctggtctgtgggaagaaccctaatggaatatgatgttggagtttcagtttcatttataataaataatggtcatttatttgctttc

SEQ ID NO: 196637 - DNA, 553 bp, Gossypium hirsutum
tgaatccacaagcagcttctgaagctgttataattctggcctcatctctttcgaagctagagtccttttggctcaagggttatggacgtctcttgctaggcgggaaccaaccatccatagcagatcttagccttgtttgcgagttaatgcaacttgaggttttggatgagaaggatcgcactaggttattgggtccgcacaagaaagtgcagcaatggattgagaacacaagaaatgccacaaatcctcactttgatgaagtacatagagtgatcatgctggccaaagaaagacaacaacatcagcgattaaaggcagcaaaaaatgaaggcggatccaacatgaaaaagccgttcgtctctagaatgtgagggaaaaccgtattaccaagtacttatttccagatgataagcaattattagcttgtataaacacgatacatgttttacctatggtttatactgcaagtcctatggttagatttatactgttgtcctaactctagtatctattgttgcaaattttcattctcaaaagctgtgttgcttgatcc

SEQ ID NO: 196638 - DNA, 421 bp, Gossypium hirsutum
  unsure (1)..(421): unsure at all n locations
gttctccttctgccctcctctgctcctatggcgatgaaacaaaggagcttcaacgacgccacaccggtaagttccctttactcccttcctcgttttgtttatttgttgttttttagaagcaaaagaaaagaactaaaataaattgaaaaaaaaacagtaaaggaacagagaaaaataaaaccaaatcccaccttcaaaaatatttttctgtatattttctttttgatttcggtacaaaaaaaattttgctccccattacaaagatcgattggcctttatatggtcgaatcaaaaaaacaagccctcgaaaacttccccccatttacatttttgtcatattttctgccattatcgattgtttgttgcatgtgtatggaaaacgtgcgttgtgcggngctactggacgtgcgagcaagaacgt

SEQ ID NO: 196639 - DNA, 562 bp, Gossypium hirsutum
cccacgcgtccgatgggtccgatccataatccgacggaatcgggccagggtctcgaaccccatgaaccaccgtttaggggatttgccccgcttgccttaccccaacttttactacgcgctagaagatcttttggagtcatacgcgccatcattgacctactctgtgcaccgctcgtcgatcataataggcgcgtcgtcgagaagcgtgtacaacgcgctacttacatcagcagtgtacgcattgatatgtcgatacgagggtttaccgtttcgatacccaggtagccggtacacatgggagcatttttgcgacatgtccgatgcacgcgtgctcgccaagcagcatatatgggccgcagtgactcccagtgccaagaaccaagcctttaattgcactaacggcgatatgttcacttggaaaagcttatggaaaaaattgtgcgacatatttgatctcgaatttatcccttccgaggagttggaaaactttgattttgttgagctgatgaaggagaaaagcaaggtatgggatgaaataatggaaatgcatggattgttcaag

SEQ ID NO: 196640 - DNA, 755 bp, Gossypium hirsutum
gcaaactcgtgccgattcaaatcttctcccatcgggtaagtggactgcgcttgcaacaagcgcagtttttgctattctatgtgcttatgagttccccgatctgtgaatatgctgaaaaataatctcttgaaaacacctttttctgttctggatgtcattgataatggctccaatcactgatttatccggtgaagtcgtttgggatttcttaataattgttttagagtctcccatgattgttgccgattgtaaacctagtgaaatccctaattttataccctctaaacatgcatgtgcttctgctgcaaatgaggaggaaatattgttgtgaatgatggactttaaggccatgagattccccgtcatatcgcgaaccaccagacccgtcgcagatgtgaagctactactatcaaatgctccatcaaaatagattgtcgttctcggcatgtcttcttagactctaaaaggtctgttcatatttacaggtcttttcatttttctgaccacttcatgttctgccagagacctctgtatgctttgcgctaactctctattggttgtgtttttcctttcatgcacgaactgattcctggagaaccatattagccataaagtataacaaaaaagtctacattggatgtcgtttcctctcttaaaaaccccggacagtcacggaagaaatgggggctatcttctacccaggaacaacctcgggggcatccatcatttgaaattactcttttgtactggagatt

SEQ ID NO: 196641 - DNA, 506 bp, Gossypium hirsutum
gggtgagaccctcttggggttaaacctacagcaatgcaaagcaatcagcagccgtgccgtggagctacttacggagcagctatggaggtgtgatatccttttctaaactaatgcatacaaactcctccatacatagatttttcagaacagcctttgcaagtagccagcagctttttcctccagtacttggtccccttttccagggaatacggtcgttctttctttctttcttttttgcaggtttccatcatccgggatgatctgctactactttgtgagcctgacaatgggcgtcggtttcttcatggctgaatttccctgagatgggttctggatttttgcttagcctttgtgcatatttgctttaggcgaaagcttttgcttaatattgtccttatttaaagtaggttttccaatattgggttgtagtttgaggttgctttttgcagtttcaaagcgtggtgttgcaagcttttcatgggcttttgccatggcagctatatata

SEQ ID NO: 196642 - DNA, 415 bp, Gossypium hirsutum
tttcacgcgtccgcctccttccaatctcaaagcctcgaagaaccagagaatatgggtaaatagcgaaacggttctctctcagagaactccgacgaagaaacgggaacaccatctaaacccaaaccaaaacacaaacccgactcagaatccgaagatacaaagcccagaagccacagcaaaagcgaaaaagggaaacgaccgagcaaatcacgaagaagacacgacagcagcagcggtatcagtgaagacgattcgtattcagactcagaatccgaatcggaatcccagtcggagtattcggaaacggaatcagggtattcggattctgaggaggagaggaggaggaggaagaggaagagaatggagagagaagaaagggaaaggaagaggaggaagaaagagaatggaaaagaaa

SEQ ID NO: 196643 - DNA, 878 bp, Gossypium hirsutum
cccacgcgtccgggaaaagctaaagataagaatccacccttctctctatctatccttgcactctgagctgttaaagtacactcttcttttggggctttcttttctcttgctggggttttctctattaaaagagggtgctcttttatatttataatattgtgtttttgctctggcttttccagttgcaaaggtgtttgctttaaggtttctaagctggacagttcttacgttgttagccaaggtcttcattttcattgcgaaaggcaagttatatagatttcatgaagtcggtctttattgttttcaacttcggacgagcaactcagtttaaattgtaagtttgctggttcttggtcttccaagatagagggaaaaaaaaggtgatcattttgagttactggatatatcttccatcctgtttaggagatggagaaaggttgctcaaataatggggaaacatgtcctcaacttcttgatttgatccctcaagaaagagagtggcaatatcccaagaggaaagaggagagaagccatgtagcatcagaagagaagaagctggaactgaggcttggtcccccgggtgatgaagaagataactggtccatcaaggctaccggcaaaaacgacaacagagacagagatgaacctttaatctcacttggctacctctcttcaatgaagaagagtaacggaaaacaggcgcataagcttccatctccagaggaccagcagcagcaccacccgattggctcagttttgtccccttcatggaccaaaaaccaccaccctaaccatcagcagctgacaaaccctccatttcttcagttcccatcaacaccccaacagtgcttgcctgttatagcaaaggaacagtcacc

SEQ ID NO: 196644 - DNA, 621 bp, Gossypium hirsutum
caatcaaccagggaagagttggataatatcatggccgctaccaaaaatggagttgcactcactggtgctgcagccactggatcagttggacctgttatcggaaaagtggacattggtgaattggaggattcatactatttccgtgtcgcccttcctggggtctcaatggataaaagagacttcaattgtgacatagaacctgatggaaaagtcgtaataaaggggatgtcaactactggcgagaagatagtgtgcaagaactttcaaatcttccatatgctgccgcaaaatctttgcccaccgggactgttcactgcctcgtttcagctccctggtccagtgaataacgaagacgctaagagttatttggctaacggaatgcttgaagcggttgtgaagaggatgtaattctgaagtgttagaaagctagtgactgccgctttacttactttacatttctttcccatgcatccaactcagtagttatatgttataggctttaagcatctctaaaaccgctgttgtttaaactttaatctcttcctttagaaccaaactggtgttccttctctatgttttttcctttaaaaataataattaaattatggtatcaatcattca

SEQ ID NO: 196645 - DNA, 461 bp, Gossypium hirsutum
cccacgctttcgcccacgcgtccgcccacgcgtccgcccacgcgtccggtgacagagagcggcactgctttaaaaaatatgtctgcaacgggaaacgtcggcggcggaggaccagaggaggataagatgccggccgatcaagctaatcacattaatctcaaagtcaagggccaggatggaaacgaagtgtttttcaggattaagagaagcactcaaatgaggaaactgatgaacgcatattgcgataggcaatcggtggatctgaactccattgctttcttgtttgacgggcggaggctccgtggagagcagactcccgatgagctggagatggaggatggagatgaaatcgatgcgatgttgcaccagaccggaggagcggaataaagcagtaggtattattatatatgatattggttcttctatatatgtaaatgaaagaattatagaacatttggaac

SEQ ID NO: 196646 - DNA, 471 bp, Gossypium hirsutum
gtccttggatgatggtccaagtgagaatggttctgaggcaacttctactgatgattgggcaggcttccagtctgctgggggggcctccacaactgacgagcccaatccaccaaaacctgctgaaagtaataccaagtctactagtggaattgaggatttatttagtgatttacctccattaacaaccaaccaagtcccagagaagcctcaaaaagatgttaaaaatgatattatgagcctctttgaaaagtccaatatggtgtcacctttcgctatgcatcaacaacaactagctatgctagcacagcaacagtcccttctcatggctgctgcagctaaatctgctcctggaaatgctcaacagcctccatctaacggcacaaacataccctctcaagcttggccaaacagtggctaccaattccctggaatgatgatgcccgttgctgggcaagctgatcttgaaaaact

SEQ ID NO: 196647 - DNA, 457 bp, Gossypium hirsutum
  unsure (1)..(457): unsure at all n locations
cccacgcgtccgggaaacttctgggcaagaaaccattaagcttgcaattcgtgcattgctcgaggttgttgagagtgggggaaagaacatcgaagttgctgtgatgacaaaggaacatgggcttcggcagcttgaagaaactgaaatcgatgccattgcagccgagatcgaggcagagaaggaagcagccgaggctgcaaagaaggcccctccaaaggaaaaatgatgaagcatcaactgtttaagctatcatttcctttttctttttttttcttttctggtctgactgcttaatttctgcaattgaagtttcatttgccattgttggcattttatttgctttttagttgtttcagtttaagcaagtatcaatcacattcagataatatgcaaaaaagaaaaaataaaaattattaaatttaatannnnnnnnnnnnnnnnnnnnnnnnnnnnnnnn

SEQ ID NO: 196648 - DNA, 367 bp, Gossypium hirsutum
cccacgcgtccgcggacgcgtgggcaagtgggcatgggctcgaaccgaacatatcagggttcacacaggtgctcgcccttacgtatgcggtgaggaaggctgtggccagacatttcgttttgtgtcggatttcagtcgtcataaacggaaaactgggcactctgggaagaaaggtagctgataaatttagaaggaagggaaaactgtaatttgaacattgtaatgaacctgttattgaatggtaggctagggttaggatttcaccattgttgtcattcaggaaactgttaattatgttctgtcttgggatttcattaagccccattcatttactctcaaattagagcaattggttggatcttgagtc

SEQ ID NO: 196649 - DNA, 1111 bp, Gossypium hirsutum
ccttctcgtccgcccacgcgtccgcttcaatccatgggacccaaaaagaaaacgcgagaaaaaaaaaaaaagagaatccttccaacaagttatttgtgagaaatactagtgggaagtcaaaatgcaggcttgtaatggagctgcaatgatgggttctttgcttcagcccatatgggtcaaagggaatagaccaatttttcctttaaaagggtatggtcttaagttcaactctgtcaaaccctgtagagctcaacttgaaagcagcttggttactggaaagcctccctcttcggactcattccctgtggtcgaaacccgatttgtggaccatggcctcagtgaagccgatcccgaggttcgtgctattattaacaaggagaaagagaggcaattcaaaagccttgagcttattgcctcagagaactttacatcccgagcagtaatggaggcagttgggtcatgtctcacaaacaagtattccgaaggactacccggtaaaaggtactatgggggcaatgagtacattgatgaacttgaaatactttgccaaaggagcgctttggcagcatttcatttggatgaaaataagtggggcgttaatgttcaaccattgtctggttctcctgctaaatttgaggtttatacagcaattcttaatccgcatgatcgaataatgggtttggacttaccacatggcggacatttgtcacatggatttatgactcctaaaagacgtgtatctggtacatcaatctatttcgagtcaatgccttatcggcttgatgaatccacaggcctagttgattatgacatgcttgggaaaacagctaccctctttcgaccaaaactcatattcggtggtgcccagtgcatatcctcgagattttgattatcctcgcatgaggaagattgcagatgctgtgggtgcatttctcatgatggatatggctcatataagtggcctggttgccgcttctgtagttgctgaccccttggaatattgtgatatcgtgacaacacccccccacaagtctttgagaggtccaagagggggttgttctttagaaggagcccgtttctgggatattggatcgcataaaaaacggttttc

SEQ ID NO: 196650 - DNA, 627 bp, Gossypium hirsutum
ggcatggtttagagaacttcctagtggagtgctcgattgccttacaccggagcaggtgatgcattgcaacacggaagacgattgcgttgagcttgtgaagttgcttccttcaacagaagctgctttacttgattgggctatcaatttgatggcagatgttgtggagtatgaacaatacaacaaaatgaatgcacgcaacatcgcgatggttttcgcaccgaatatgactcagatggccgatcccttgacagctttgattcacgccgtgcaagtgatgaactgcctcaaaacattgatcttaaagacaattcgagaaagggatgagtccgctaccaaggacaggttgcttccatcttgctcagattgtcctacaggcataaccgatacatgtgcatctaaggaacctgccactgctaagttcttgagggttgacacattgagtagactcgaaagtgaccccgaagagaaacaagggagcagccaggatagtaacagagaagaggaagttgagtccatttcaggcaacaatatactaaatgaatgggaaatgggaaatgttgaaactgaatgtataagtggatatgataacggtgaccggctaagtttaagaaaaggtgttaggcgatt

SEQ ID NO: 196651 - DNA, 832 bp, Gossypium hirsutum
  unsure (1)..(832): unsure at all n locations
ccaactcgtcgaccatcaactccatcaagtactaatatatctgcccctccaattaaatcatcttgttcagttacaaagccaactactgcagcatccagaagttctgtaccatcacgtggtgcctcaccgactgtagcatctagaccatggaagccttctgagatgcctggtttctcacttgatgctccaccaaatttaagaacaacactacctgatagaccactttcggccaccagaggtaggcctggagcgcccagggctcgatcttcttctgttgaaccaggtgccattggtagaccgagacgacagtcatgctctccttcaagaggacgtctccctaatggtgctatgctgcatttaagtggtggctctgttcctgcagtaagtcgtggctattccaaagctagtgacaatgtgagtcctgttgttattggaacaaaaatggttgagagagtgataaacatgcggaaattggcaccacccaagcaagatgataaaaattctcctcagcgtaactcctctgggaagtctgcttcaccagacagtacaggctttggaagaacactttcaaagaaatcactggatatggctataaggcatatggatataaggcgaagcattcctggaaatttacggccgttgatgacaaatattccagcatcatctatgtacagtgtgagatcgggtcatacacgaagcagaacaattagtgtcttggattcccctcttgctacaagcagtaatggtagttcagagcttagtgtgaataataatggccattgttttgatgggagcgaagtanaagatgatatcggcagcgagagagttggta

SEQ ID NO: 196652 - DNA, 466 bp, Gossypium hirsutum
ggaattccggggcggcccaacccgtccgccaacccttccggtgccggaaaccgaaatggaagttaacggcggcgcagtctccgatcccggaactatccgatctcagttccttcaactactccgtaccagacgaaatgctcaagttcctatgactgtggaacctgcgaaacctgtggttaagcctttgttccaggaggttaccccgccaaccttcagtgaggcaatggaatcttgtccaaaggctaacattggaaaccttaaggaactgctcaaagacgaaaatctatatctccatactgaggccggagatcaaggaaaattgcccgtgttgattttaagtacgaaaggaaacaatcaagaaaagaggcctgctgttgtttttctgcatagtactcataaatgcaaagagtggttacgcccattgcttgaggcttatgcttcacggggatatgtagccattggagtc

SEQ ID NO: 196653 - DNA, 494 bp, Gossypium hirsutum
cttttacttgaatttattggactggggctgcagcaatgttcttgcaatagcacttggaaacactggttatttgtgggatgcttcaaatagttctacctcagaacttgttaccattgatgatgacaatggcccggtaacaagtgtgagttgggctcctgatggtcagcatattgccataggcttgaacaattctgaagtacaatcatgggattctgcttcaaaccggcagttgcgcactctgagaggttgtcaccgatcgagagtgggttcaatggcatggaacagtcacgttcttacaactggaggaatggatggtatgatagttaacaatgatgtaaggattagatcccatgtttgtaaaacctacagaggacatcggcaagaagtttgtgggctgaaatggtcagcttctggacaacaactggccagtggaggtaatgataatcttgttcacatatgggatatgtccaaggcatcttcaaattcaccaacac

SEQ ID NO: 196654 - DNA, 284 bp, Gossypium hirsutum
gggaaatgaagggagagatgctcttaattggtagcttttcatggaagttcacaaccactgtgggtgtgatcatctttgggaaaagttaaatgaaggcattgtaggttaacccctcatgattttatgtttattttcgctttgaacgtttcttgtaactgttgtttgatatgcatagggacttttgatttagccatgtacaaaaacagttcatgtttcaaggaaagctcttcccccccaaattaaatatattaaatttattttaaattattataataaaaatatag

SEQ ID NO: 196655 - DNA, 777 bp, Gossypium hirsutum
cccacgcgtccgcaatttgggcacaatctatgtggattgtggtaaactggatcaagctgcaacctgctatatgaatgcccttgaaatcaagcacacgagagctcaccaagggttagcacgcgtatactttttaagaaatcagcggaaagctgcatacgacgagatgtccaaactaatagagaaggcacataataatgcctcagcatatgaaaagcgatctgaatattgcgatcgtgagacagcaaagaatgatctcaacatggcaacgaaactggatccacttagaacttatccatacagatacagggctgctgtgttaatggatgaccaaaaggaaaccgaagcagttgaagagctttcaaaagccatagctttcaagcctgacttgcaaatgctgcatcttcgagcggcattttacgagtcgatgggtgatatgaagtcagctctctgtgattgtgaagcagcactctgcttggaaccgaaccatatggacacgctcgatctgtataatagagcacgagacagagccatcagtccacaagaaatgtgagaggcatcatcgtcattacatttctgataaacttgccggatgtagcagtcagttacaaggaaaaagaatcatggagtcttttcacatcgagctgctgactgaccctcaccgtggaaaggaaaggacccagagagagttgcttgtaaatgcgaacaggccttatggaatcaggtgtaccttgccacataagaaaagatttagccttgtaggttaaaaggggtcacact

SEQ ID NO: 196656 - DNA, 579 bp, Gossypium hirsutum
cccacgcgtccgggttgaggtgatttacgacaaggtaactaggagaagtaggggatttggatttgtaaccatgtccacaatcgaggaagtcgaagctgctactcaacagttcaatggctatgaattggaagggagagcattgagagtaaactcaggacctcctcctcctcgtagggaagaattttctcctaggggagcaagaggtggtccttcgatgggagcaaggggtggtcctccgatgggagcaaggggtggtcctcctatgggagcaagaggtggtcctcctatgggagcttcaaatcgtgtctatgttggtaaccgggcatggggtgttgatgatatggcactcgagaccttgttcagtgagcaaggcagggttgtggaagcaaaagtcgtttatgacagggaaagcggtagatcaaggggttttggctttgtaacttacagatctgccgatgaggtcaacagtgccattaaatccttgaatggttgtgatttggatggaagaccaattcgggtcactgtagcagagtctaggccaaggcgccaattttgagtgcggatatttcctactgatgc

SEQ ID NO: 196657 - DNA, 1051 bp, Gossypium hirsutum
gacccacgcgtccgctactcaggatctgaaaggtcgcttgaacgtgcagtttcaaggggaagagggcggggatgccggtggactgtctagagaatggtatcagttactctcaagggtcatatttgataaaggtgcattactttttactactgtggggagcaatgcaactttccagccaaattccaattctgtttaccagaccgagcatctttcttacttcaaattcgttggtcgcgtggttgcaaaggcactatttgatggtcaacttttggatgtttattttactcgatccttctacaagcatattcttggtgttaaggtgacctaccatgatatagaggcagttgatcctgattattacaagaatctgaagtggatgctggagaatgatgtaagcgacattcctgacctgactttcagcatggatgctgatgaagaaaagcacatactttatgaaaaaactgaggtcactgattatgagctcaaacctggaggaagaaacaccagagttactgaagaaacaaaacatgaatatgtagaccttgttgctgatcatatcttgacaaatgctatccgtcctcaaatcaattccttccttgagggatttaatgaattggtgccacgtgaacttatttcaatttttaatgataaagagctcgagttactaatcagtggacttcctgaaattgatttggatgatctaaaggccaacactgagtataccggctatacggctgcatctcctgttattcaatggttttgggaagttgttaaagcttttagtaaagaggacatggcaagattgcttcagtttgtaactggaacatcaaaggtgccattggagggttttaaggcactgcagggtatctctggtccacaaaaatttcaaattcacaaggcttttggagctcctgagcggctgccttctgcccatacatgctttaatcagttagatcttcctgagtattcatcaaaggaacagcttcaggaacgtctgctgctggctatccatgaaactagtgaaaggtttggctttggatgaacaaagttt

SEQ ID NO: 196658 - DNA, 900 bp, Gossypium hirsutum
atctgatttggcgatggcggagcagcagcaactagagccatggaccgacctcagtggcaaagtggtgatggtgacgggggcatcttctggtttaggtcgtgacttttgtcttgacttgagtaaagccggctgtcgtatcgtggctgccgcgcgccgcgtcgatcgccttaaatccctctgtgatgaaatcaatcacctcacctttcctttttccggaccccagcctagtggccctcgagctttcgctgtcgagctcgacgtatgtgctgacggatccaccatacagagctctgtgaaagcggcctgggatgcctttgggaggatcgatgctttaataaataacgctggcgttagaggtaatgtgaaggatcctttggaattgactgaggaggaatggaatcaaaacatcagaaccaatctaacagggtcttggttggtgtcaaaatatgtttgcatgctcatgcgtgatgcaaaacaaggaggatctgtaatcaatatatcttccattgctggtcttaatcgtgggcaactacctggaggtttggcttatgcttcctcaaaagcaggcctaaacaccatgacaaaaaccatggccatggaactggggatgcataaaatccgagtgaactcaatatcacctgggcttttcaaatctgagatcacagaaggccttctgaagaaggcttggctacaagaagtggctacaaaaatcaaccctttaagaacatttggtacggcagatcccgcattaacctcgctagttagatacttaatccatgattcttcggaatacgtaacaggtaacatattcatcgttgatgccgggtctaccttacccggtgttcccatattttcttcgctttgaagcacaattggaatactaaatgtttgtattccttg

SEQ ID NO: 196659 - DNA, 376 bp, Gossypium hirsutum
cccacgcgtccgattggatcatcccaagagtggacctcggtctttgtctggtgagatgtcggggtttgctggtgtccctcctacttgcatgggtcactgcttgcacaaagggtttaaccatccaggtgggtataaatgtgcacctgagaatgttaaggttgggtccttacagatgtatatgaagaatgccgggagtggtgaggatgtaggtccaggaggtttccctgtggaggaagtgcacaagatcagcgtgctcgatataagaatggcaaattccgatcgacatgccggtaatatcttgattggtaaacgggaaaatgaccaaactgtgcttattccaattgatcatggctactgcttgcctgagaatttccag

SEQ ID NO: 196660 - DNA, 474 bp, Gossypium hirsutum
  unsure (1)..(474): unsure at all n locations
catacactgaaaaagtctgctcgctcattttccctattgtcaccattcaaaagcaagaccagtgagaagaagttgacagcttgatgatgatgaaaggtgaaccggaagtgtctcaattgtctcgtttatatcgatttccaaaggaagttccttaagtagacacaatgttaaaccgaactggttcttagcaagtgacatcccagcatgattttatgtaccgtctctgtcgtagccatggatttctgccattgttttactgtaaatgagagaatgcctttgattttatcccattacctcacaagtcacaaccaaaccaaacatgaaactatcaaaacccgaaaaaatataaacccaacccgaagccgtccaaacccacccgattgccacaagaatggcagttcgccaaattaattccattntaacagcaattgagttgtacatcgtcccgttacttttgtacctacttttataata

SEQ ID NO: 196661 - DNA, 637 bp, Gossypium hirsutum
cccacttttccgcccacgcgtccggaaaccttagaaccagaaaaaaaaaagggaaaaaaaatctcagattttctgtcaaggaaaatatggaatcgagtaggggtcaaggtggaatccagcagttgcttgctgcagaacaagaagctcagcatattgtcaatactgccagaaatgccaagatggctaggctgaaacaagccaaggaagaggctgaaaaggagattgctgaatatcgagctcaagtggagaaggagtttcagaggaaacttgccgagagcagcggggattcgggtgctaatgtgaaacgccttgagaaagagactgaagcaaagattgaccacctgaaaaatgaggctgcaagaatatcagatgatgttgtccaaatgcttctcaagcatgtaacaactgtaaagaattaggccccttgagatggcaaacattcaatatatgttaactgctgttcccctgcatgatgtaatatttgcgttgttgccctcacctggtttagactctggtgagtaaattagaccctttttatcagatacatcagtttgagaacatgtaggacaaattgtgtgcctatctatttatgctggggaaaagagcaataaagttttaataatgtcaatatttttgc

SEQ ID NO: 196662 - DNA, 588 bp, Gossypium hirsutum
gggaaaccttgaattcaccaaggatcttcattgggaatctcccccctcccgtccgggaactctcagaagattacacctgtgtcatatctcatggaagtaatccaagaaccacccatatctttgatgattgcattgttgaaagctgttgtggggttgttggtttctcctctccgaagagaaacgggtcaagttaccaatcagaaaatttccttagctactgttatgcttgtaagaagaatctttctccaggaaaagacatttacatgtacagaagtgagaaagcattttgcagcaaagaatgtaggtaccaagagatgatgctagaagaaagcaccaacaaactagaatctgatgacatctttgggacttattcctaacatttgtttcaagttctcatcatcagtcttgcataaaagccagtcaaggattaagtaaaaccagcacaaataacttctgtgtgtcaatcatcgcgagagtttttaattgcttttagctgtttaaacgatgaaactttggcgttgactctcaaggaatcttcttcaacaggctctatggtatttgtagaattgatctttcttgctttctttg

SEQ ID NO: 196663 - DNA, 520 bp, Gossypium hirsutum
  unsure (1)..(520): unsure at all n locations
cccacgcgtccggtggtgttggtgactcggtgatcggtcgggcactttcgcagctgctgtggagcgttaatgacattcctgttagctcgagcaagtatgggatcgttcgatctttagcggaacagcttatagaagagaacaataaggaagatattgaagctttgcgtgaaatgaatcggacggttttaatcggcggctttttcgaggacacttggcctggttgaagctgcaatgcttgaattggggcaaggcagggttggtcattatggtgctgggtttggaccggtttgttatcagttgaaccggcttttacgtgcggttggggtagggagtgggagagtgggtgtcagccgttcggggaattcgatgcagaagctggcggctgagttgctttggttggcggagaaattgtctggttgtgaatttgaggaagaggctgtagagagatgggcatcggcttcaaatctcgccgggctttcttaaccagggaacttngaagacgcggtacttnnnnacaaag

SEQ ID NO: 196664 - DNA, 498 bp, Gossypium hirsutum
gggcaggaagacgatatgtcaattgagttgtttttgtaagatgtaaagaagattgcttttcactacggattcgagttagagaaagaacagaccattgaaacaacgtatactacaaatcctcgatccatgatgcaaaaccattaccatgctgcattctggacaatgcgaaagaaaagaacaactacgacatagcttgcaagaagatgatatgcattcctctcttaaacatactctcaggttttattcctcatttggatattttttatatataagacttaatttcccctgagattttcttgttagtttggattattacaaaacataatcagttctttgattaattatatagatttatgcaatcagcatattctgttttgaacccaaattttgtttccttacaacttaagagttgatgttaacccaagttttcatcttacatttatttggacgtgtatgattcggaaaactttaaaaagttcgaatatacatttgttggag

SEQ ID NO: 196665 - DNA, 673 bp, Gossypium hirsutum
caaaaacctaaaagagagatgcgatattattgacttagctgtggaaatggatcggatactgagacccggtggatatcttttggtccaagacaccatggaaaatattaagaagctcaatccagtactccgttcacttcactggtcaacaacactttatcaaggccaatttcttgttggcgagaagggcttttggcgtccgagtgagaatgataaccgaaaagaaacatgagcagttatccaggttcttccactcccaaattgtcctcgattaagattggacttcaactctgcaacattcaaatacttctttaccctaaattcaatcctatagaagaaggatgagtttatagcatttaaatagcttatctgtcgattaaattatccgagttttgcttggccatgaacaacaggtccagcagaggttttggacagttacgttagacggactcgaagtgagtgttgtattcaacacaagtatattcaatttcttttaaattttgttaattattcaggggatcatagatcttgtactaatatctgaatgtatcagacaatgatattttcttttaaaaaatttagagtctgaataatgttagatgaacagctggaaagggagaaaaaaaaagcattaggtctcggcttcttcaaaaaaaaaaagcccacgcgtcaacgc

SEQ ID NO: 196666 - DNA, 361 bp, Gossypium hirsutum
  unsure (1)..(361): unsure at all n locations
cccacgcttccgcccacgcgtccgcccacgcgtcctagaagattcgtgtgctcatcggcgacaacagataagctcagcttttatgcaataaacagttgttttctggatttggttctttcaatcagttgtggataatatgaaagaaccatccttattttggaagaacaatgttgtttcagctcttaaattttaaacacgtatcagaagtatgtttggcaatagagaatctgaactcatgcagaactttgcacgttttggaccnnnnnnnnnnnnnnnnnnnnnnnnnnnnnnnnnnnnnnnnnnnnnnnnnnnnnnnnnnnnnnnnnnnnnnnnnnnnnnnnnnnnnnnnnnnnnnnnnnnn

SEQ ID NO: 196667 - DNA, 646 bp, Gossypium hirsutum
cccacgcgtccgaaaaaaatgtccaaggaagtgactgaagaagggcagagccgaaaggactatgtagacccaccaccagcacagctggtggacattaacgagctcaagctctggtcattttacagagctctcatcgccgagttcatagccacactcctttttctctacgtcacaatagccaccgtaatcggccacaagaaacaacacgatgcgtgcaatggagttggtcttttaggcattgcatggtctttcggtgggatgatctttatcctcgtttattgcaccgccggtatctcaggtggtcacattaaccccgccgtgactttcgggttgtttttagcccgtaaagtgtcactaataagagctgttacttacatggtagctcaatgcctgggtgctatatgtggtggtgggctaggcaaagcttttatgaaccatgaatacaccaccctcggcggtggtgctaacaccgtggctacaggctataacaagggaaccgctttgggagctgagattattggtactttcatgcttgtttacactgtgttttcagctactgatcctaagagaaatgcccgtgattcccatgtccctgtgttggctccacttcctatagggtttgcaagtgtcatggttcatttggcta

SEQ ID NO: 196668 - DNA, 537 bp, Gossypium hirsutum
cgactgcttcgttaacgtgagtactcttcatttttcttgaaacacctgtgtttgacaatccgacactgagccttcatgatgaacagggttgtgatgggtcggtacttttggacgataactcgacgtttataggtgagaaaaccgcggttcctaacaataactcggcgagagggttcaacgtcgtcgacaacatcaaagctcggctggagaaagcgtgtcctggagttgtatcctgcgctgatattctcgccattgctgctcgtgattcggttgttcggttagggggtccgtcatggaaagtaaggttgggaagaagggattcgacaagcgctagcagaagtgccgcaaatacctctattccaccgcccacctctaatctaagcgctcttatttcaagcttctcagctcaaggcctctcaataaaaaaccttgtagcactttctggttcacacaccattggcctcgcccgctgcacatcatttcggtcacacatttacaacgactccaatatagacccctcctttgccaactcgttgc

SEQ ID NO: 196669 - DNA, 518 bp, Gossypium hirsutum
aagatcatagacaacgttggttaaatttccgtcttcttacgctatttcgagtgccacatttcccgacagagatttggatcgatttattgcttgagcatcggctacagccatggcttcgtcggcaccaccagagtcgtcctccaccgcccaaaatgcaaggaagccgcttggatttatgaaaaacgcagtgaaatacaaacacaacttcattcagttcttcgcgatgaccgggattttgcttttgagcgtccgatctttgggccggaactgccgcctccacgacctccaggaggatacagcagctctcaagcaagagcaacactctcttaatgatcggatgagcaacataaaacgtggcctgctccacgaggcctctctcgagccctctggacgctttgcctcacgcctgcgcctcctctttggtgacgataattagactcttctgatcctactgtctagtatttgccttgataatatcatatctttagtgtctccaccttacgtcaagagaatgcact

SEQ ID NO: 196670 - DNA, 696 bp, Gossypium hirsutum
tgatgaatggtttcaaattagggttttccccttagcacttctatttgatgattaattagggttttagagctttcacaattgtttaggaatttgagagtttatgttggagaagaagaggggctcaagaattagagctttcatgagtgatatatacttggggatttcttttgtcattaatttgggtttgcttattgctctttgattttgagcaagtacttgctgatttcttgctgcattgaagaattagaggtttcaagcctggatttggagaattcaggcttttccctcattggcaagttcttccattgttcttgtcataggaacgacgaacgagcaaagcgattaatcttacttctggattgtacttgatttacatattattggggtttgatcggttaaccaaaatagggtgactggatgctgaacgccagagatttgcttgcttggctacttaacttgatgctgtggatatatggtctccctaaatattctggaattccttctattgctatggttgtttgaggactattagtttctttgcagctgttgcttagcatctgaaattatggttcttaagtgcatagctcatggtatgctgtggacgtgggttgatctggccctctcttttttgatttaagtgtttgtgtttgatcgcatggtctcaaatgagactgatgtgtgaaagattgcatttct

SEQ ID NO: 196671 - DNA, 423 bp, Gossypium hirsutum
gcttttggtggtgaaaaggccacaggaggaggccgtgaagctggcagtgattcttggaaacaatacatgcgacggtcaacctgcacaataaactacgggagtgagttaccgctggcccaaggaatcaatttcggctaggaatgcagacatgggtgaggcctaaggaagcaaatttgcattcctgcaaaatcaactcccagaccttttatgctctacatataggctgggatttgggtcacataattgtcgctgaaaaccatgaatagtaacatactaatgaaaagaggcataatgaagaaatcaatgattcctgaaacacactttgctacgaaaatcacgtgtagtgtgtgtgctgtaataattcttataatagaagcacattattgatcttgtgtcatgggttctagccccgtgacacttgca

SEQ ID NO: 196672 - DNA, 530 bp, Gossypium hirsutum
ctctgacacacactgatctagacaaggaaaccgaggagataatcgctgatgtgctcggcgtagaaggtttcagacagacaattgctggtaatattcttgtagggagctactgtgccttttctaacagaggtggcttggtccatcctcatacatccattgaagacttggatgaactttcaacgcttcttcaggttccattggtagctggcaccatcaaccgtgggagcgaagtgatagccgccgggatgaccgtaaatgactggacagccttttgcgggtcagacaccactgcaacggagctttctgtgatagagagcgtgttcaagctgagagaagcgcaacctagcgccattgtcgatgagatgaggaagtcattgattgatacctatgtttaagcttccccttcctttggttaatctaaaattgaagtccttcatataaatatggtattacactgttttatgtgagaaacataatataagtgtaaattaagtgagatgttgattgttgatgaaaatcacttggatgca

SEQ ID NO: 196673 - DNA, 519 bp, Gossypium hirsutum
tcgcccacgcgtccgaagagttccggaattgtatattagtcaaagattcatagatcaaaagaggaaggagaaaagtatattcgtatggcagggactgaatatgagcggcaatttgtgaggctcagcaagtatatgcgggagtgtatctacagaagccaccatgtgtaaaaggtttgaggatggcctctataaaaaaaatccgagtgtttgtgggcattttagagctatgtgaatttgtagcccttgctgaaagagcctgtaaggccaaagagctgattaaagaaaggagaaaagcggcatttgagttgcgggattcgaagaagagatagatggggaaatcacatcagtcctcatccaagagattaaaggaattctctacccgaccgaatacttcggtggggtattcaaacagaaacaagaatcaacaaaacacaacatctagagcccagaccacttcggttgcgagtgtcggcaatgctcgaccaaataagccggagtgttcgcattatggaagacatc

SEQ ID NO: 196674 - DNA, 462 bp, Gossypium hirsutum
cccacgcgtccgaaaaccgcaagcttatgagggaaatgtaagtaacactgagaaggaattgtcaaaatttacgagcacaagtgttactgaaaaacagtatcaagcccctttagctcgggtgtcttctttggaagatccatgtactgaaatttcagagtatgacaaagcacctccgacaagcatgcaggttgcagcaacagattcggagaatgttagagctcttgtagctgacacgaagaacttgaaactggaaaagattcctgaagtgttggataaatctcaagtaaaggagccatcgaaagggtttcgacggttggtgaagtttggaaaaaggaatcatagctcagctagaagtgaacatagtattgactcaaacaatgaggctgatgagttggttgcaaacggtgcctcatctagtgaagttcaatcgttgaagaacctaatctctcaggatgaaacccc

SEQ ID NO: 196675 - DNA, 473 bp, Gossypium hirsutum
cccacgcgtccgcccacgcgtccgtttagaaagagctcttcaacaatggcttcagagagagacactaaaaaaggcacctccgaactcctgtctagcgctaagctggtggcggacgcagcaaaatccacattcaacaaagaaagcgacaaggttgacaagggtaaggttgctggtgcaggtgctgatcttttgggtgccgcccaacactatgggaagctggataaggacaagggtgttggccaatatgtcgaaaaggctgagacttacttgcatcaataccagaccagtcacttagctcccaccaccaaccccgactcccatggagcaggtgccgccgccaaagattctgaaactgctgcagcttgtggtggtggtgttggggattacatgaagatggctcaaggtttcttaggcaaataaaattataattaaaacttattaatatttatttacttaagccttgctgtcaatat

SEQ ID NO: 196676 - DNA, 463 bp, Gossypium hirsutum
gcgggatgttcgttccgatgctcaaactcataataggctgtgaccccaagtattccacaggcatttccaagcgtatgatcatgggtgcagctggatcaactgtatactataacctgagacttaggcacccaacactggaaatgcctctcatagattatgacttggcattgctatttcagcccatgcttatgcttggaatcagcattggagttgcccttaatgtcatgtttgctgattggatggtcacggttctgcttatcattctcttcattggtacatcaacgaaagccttattcaaaggtatagacacatggaagaaagagacaatattgaaaaaggaagctgccaaggtggaatcagaagagtccaaaccagctgatggagcttctcaagattataaaccattacctagtggccctggcaaccagacagaagatgaagttcctctcctacaaaacatata

SEQ ID NO: 196677 - DNA, 649 bp, Gossypium hirsutum
ctctgccctccggtctcgtacaataattttttatgccgatttgtacctgtttgcatcaaaagatgcatcaaaaagtattatgtcctgcattctctcattcatttgtctctgtattttgacagtcttccaggtatgtttttcctttcccacttctttaagttcagctaaataagtctgtattttctgtactagatccccttctgatacaaactttctttcatgcaccatttgatttcgcgagttccacatcacccataaggcacagcaaaacacctgacattgttccttggttcctttttcgaagacccaaggtattgctggaagacatggagactgttctcttccccggagccacaacgagggcatctcacatttgtggttaatcgtttgcatcgaagattcactagtgcacgaatatagttccaggatatcctccaggccaaaagtagaatttttgatggtatttgtaagctccataattttctgtagaaatctttgaaatcgcgctgtgataaatgactcggatccgaattagcttattgtaatagtgtataagtgctccttactgacaattctccggacggttatgcctttcaaacgagcatgtcttcactgtgtgttttggcaagagggatctgtaaaatttttt

SEQ ID NO: 196678 - DNA, 447 bp, Gossypium hirsutum
  unsure (1)..(447): unsure at all n locations
cggaatatcaagttaccttaactacgaatccgctgtggaatctgccgaccagcaaatgagttgggtacttttcgccacaccagtcgtgttaatactcttggcacgatggctctcctctatggaagtctctggtatgctgtttggttcatcaccctgggaacgtatccgccggactcatcatcacccttctgaaggtacctcaccctgggtggtggctgctttcattgtgttgctgttagtcctgttgcagtaccagtccatttttcgtgagagctggatggtatgatctttatatatgtgtgtgtgtagtactatagtttgaaaaaactgtgttggaatttctcatctttaacagggttttgccttgttagatccaacacagtatctgtgctagcaacggttctaaatatacactgcaaaatttaagcnaaaaaaaaaaaaagaaaa

SEQ ID NO: 196679 - DNA, 382 bp, Gossypium hirsutum
caactacgaatcatgacatcacatgcttgatagcaacaaaaatcaaactctctataatattaaggagatatttgctttagaggtctccaatgactatatcaagaaggcattgggtaaaaattggagagaccataaaagcactttgaaaaaactatatttgaagaaagacataagccttgaagaaaaaattgagaaatgtcctgccgggaatgttgaggtaccaatgggaagatgcggttagattctgcaattcgaagaaaggagatgtattacgtatttccaaactcttatatatagtgtttactatatacgtaataataatttcattatgtaggaccatgagcgagttggaacaagcagcagacaaaaacaaaaattcacg

SEQ ID NO: 196680 - DNA, 634 bp, Gossypium hirsutum
ctctatctttctcctttcttttgatccctctcctccaccgccaccagtccctgacccgagctctctcttgccttcaagtttcgtacagacgatatcgggaaattgtataaggtagaacaatgccgaaggtgaagacaaaccgtgtaaaatatccggaaggatgggaattgattgagcctaccctccgtgaactacaagcaaagatgagagaagctgagaatgatcctcacgatggtaagcgaaaatgtgagacgttgtggcctattttcaaaattgcacatcagaagagccgctacatttttgacctataccatcggaggaaggaaatatcaaaggaattgtatgagttctgcttggatcaaggctatgctgaccgcaaccttattgctaaatggaagaagccgggttacgagcgtttgtgctgcttgagatgtatgcagccacgggatcacaactttgctacaacttgtgtctgccgagtgcccaagcacttaagggaggaaaaggttattgaatgtgtccattgtggatgcaagggctgtgcaagcggagattagattcaccttgttctttttccctagttttctaagtcgatgagagaagtttaaactgtagttgctgccacactgctcac

SEQ ID NO: 196681 - DNA, 505 bp, Gossypium hirsutum
cccacgcgtccggtcttttgtggtggatataccggatgggaacaccaaggacgaaacatgctacttcgttgaggcactgatcaagtgcaacctcaagtcattggctgatgtttcagagcgtttggctgttcaggatcgcactgagccaatcaaaataatgtgaataatctgggtccctcttagcagcatcaaggttgttgtgtgtgatgagtgaagaaatgttattattagaagctgagtagaaagttcgggctaccttgggttagagtcaactcctattttcttaatacttcatgcatcttcttcttactagaacattataattaggtgtgttgtgttgatagtagctgacaattaagctacaccttcggcctacagatttcttaaatgaagaaacatttcagaaattttctttgtggcttattctatggtgaataatgcggtattgtattggtatctagttgttaatattcttgcacaatggaaattttatagcctttcatgt

SEQ ID NO: 196682 - DNA, 246 bp, Gossypium hirsutum
tgacgagcttgccccaaatgtaacagaaggtctcgatgttcactttgtagatgatttcggtcagattttcagtttggccttcgaatatgatgatagcactatggtaaattaggttcttattaccagccaatggtttagattggtttttggctgaatattctttgcaactgatcttggaatccaaaacccagttttatattgtgaattacatcaaaattttcaatcaagaaataacaaggttgagta

SEQ ID NO: 196683 - DNA, 490 bp, Gossypium hirsutum
attttccagtctttcaattctataacatggctccagtgcctagtttaccaattaaagttggacatattgatgatgtccaagaactaagaaaagctaaaccagccacggttcctgaaagatttatcagagacatggctgataggccaaaagttgttccaaatctatcatcatctcttgacattcccatcattgatctttctaagctcatgaaaacagacaaagatgaagttatgcagctcaaaactgcctgtgaagaatggggatttttccaggtactgaaccatgggattgatctgaatgttgttgaagacatcgaaaaagtagccgaggatttcttcatgttacctttacaggagaaacaaaagtatccaatggctccagggacagttcagggctatggtcaagcttttgtgttctcagagaaccaaaagttggattggtgcaatatgtttgctcttggtgttgagccaccttgtataaggaacccaaa

SEQ ID NO: 196684 - DNA, 658 bp, Gossypium hirsutum
cctacgcgtccgctgacatgctctgtcaaacacgtacattttctcgagaaagtgagagatcgagagagaaaatacttcgcagggaattagcgagatcctgaaattttcctgcgttttctctcttcaatcttctccggctacctgatttatccgtcatcatgacaacatcaaggcgacttgcagaaagaaaggtggagaagttccaaaagaacataacaaagagaggagctgtgcctgagacaaccacaaagaaggggaaggattatcctgttggtcctgtgcttcttgggttcttcatattcgtcgtcattggatcatctctcttccagattatcaggacagcgaccagcggaggtatggcataagtctgcacttctggtgttaaggaattgcgaggagactggtcttgcattgggcttttcttttctgttagttttgtagggaaactgatgatatatttactagagatatgcttacgttgtgaaatgttcggaatttgaataagacctcccctttctttgtctggtcattgtgctttgtctgctacttttttcatttatgcaatgagatggacaaaatactgatatattagtggttgaaccgagttacaaactaataaagggataatatcttgatacgaatgatgcaagaaccaaat

SEQ ID NO: 196685 - DNA, 433 bp, Gossypium hirsutum
gttgacgtaccctctcgagttgctcaaagctcgtttaactgtcaatgaagattacaagaatctattggacgcggttgcgaaaattgtacaggcggaaggaccgggaggactatacaaaggcctcactccaagtgtgatgggagttgttccttatgctgcctctaattattttgcttatgatacactaagaaatgcttataaaaaagcttttaagaaagaggaaattgggaatgttatgactcttctaataggatcagcggccggtgcgatctcgagcacggcaacttaccctctcgaggtggctcggaagcagatgcaggctggtgctattaatggaagacaatgccacagcatgattcaagcattaacaagcatagttgagaaagaggggatggcagggctttatagagggttgggaccaagctgcatgaaa

SEQ ID NO: 196686 - DNA, 411 bp, Gossypium hirsutum
gtacctgaaaatctagatagtgtagccgagtttgaggctccagcgtctccaacttccagttacggtcaggcattgccaacggaggaagattttgcaaaggagcctgttatagttccctcccagctgcatcaaactgtcctcggtacagataatcaagatggagcatcatcctcaaagcctcaacatgttgtacttaaccaccttttcattgagaaaggatgggcatcgcattctgttgttgccctgggattgacccataggtttgagtccaaatacgtgactgttgtactctataagccactcaaaaggtaacatgtgcttttcccatgcttgactctgtaaagaaatcaaagtgactttcatattcgtttgtgaaggtacacctctgttttatagatgatgcttcgacac

SEQ ID NO: 196687 - DNA, 898 bp, Gossypium hirsutum
cccacgcgtccgcccacgcgtccgtccactcgttcggtgaggcaacactaactctggattcagttctggtttcagggggtttggattttgtccttgggaaggatggggctaacgtcaaggtggccgacttggtggggaagaccattctcttgtacttctcagcccattggtgcccaccatgccgtgctttcacaccgagccttgttgaagtatataagaagatcaaggaaaaggatgatgcatttgaagtgatttttatttcgagcgacagggaccaatcctcctttgatgacttttattcaggaatgccttggttggctctttcattcaatgatgctcggaaatcatcattgagtcgcaaattcaatgtccaaggcatccctatgcttatagcactcggaccaactggaaaaactattacaaaagaggcaaggagtctggtcatggctcatggggcggatgcttatcctttcactgaggagaggttgaaggagattgaggcacagattgaggagatggcaaaagggtggccggagaaactgaaagatgaacggcatgaggagcatgagctggtgctcactcgtcgcagtaattatgtctgtaatgtatgcgacgaaatgggacaagtctggtcattctactgtgaggaatgtgactttgatctacatcccaaatgtgccctggagaaagaaaccaaagctgatgcaaaagaaggttgggtctgtgatggggaggtctgcactagagcttcatgaattatgtccatgtatacaccaacacactagttggctgtcctgttgatgcagcttggatcatgtgtgtgctatgtaataaaatcttgagatgcagtgttgaaagactttgttatctatattggcccaatcctgtttcctggttt

SEQ ID NO: 196688 - DNA, 662 bp, Gossypium hirsutum
caagatactgtgtgctgactattgaaattggtagtcgctgcagatatggcagagggggagaacaaactcaagctctattcttactggaggagctcctgctccttccgtatcagaattgcccttaacctcaaaggtctggaataccagtacatacccgtgaacttgcttaagggggagcaattcagtcctgaattccaaaagctgaaccctattgggtatgtaccggtgctggtggacggtgacatgatcatttcagactcttttgcgattttcatgtatctggaggagaaataccctcaacaccctttattgccatctgatcttgcaaagaaggcactcaatttccaggctgcaaatattgtttcctctagcattcagcctcttcagaatctagctgtactgaagtacattgaggagaaagtaagtccacatgagaaaattccttggacaaaatttcatattgagaaaggctttgaagcgcttgagaaactgttcaaagatcatgctgggaaatatgctactggagatgaagtgtccatggcagatctgtgtctagcaccacggattctggctgggattgaacgattcaatgtggacttggctaaattcgcactgtgatctaggttaaatgaggcatatagtgaactaccagaattcccaag

SEQ ID NO: 196689 - DNA, 264 bp, Gossypium hirsutum
catactttctatcttgaggatcaatccaccaatttgcatgtactttgggccttctctgagtactcgattacgaaatcgactggctatcgtatggaagtgtattggatgaagtggaaggttcattagactctggatatatgtctgttctttcgcatatttccaagcgtggattataagacaacaatctctcttaagtaattggattcatcagaggacttctctgaaatctcaaagtcggttttacaagaaacttctctgttcgta

SEQ ID NO: 196690 - DNA, 501 bp, Gossypium hirsutum
gatagatgcaagttccatcaccccattgatcggttaacaaccaacgaagcttctcaggaagctattaagctcactcttgctggattacctagaagagagggatctgttcattgtccgtactacatgaaaactggaacatgcaagtatggtgcaacatgcaaatttgatcacccgccccctggggaggtcatgtctgtgactggagtacaaggaacatccacaacaatgtcgggatgaggaacatgatatgaaaactcagctacgggaagctactttgtgatgacgatttagccgggtttatagggctttctgtatcaaggtctgttagcatgatgcctagagtggatgggcaatatgaatgtacctagagtggaccatgtgaatttaatgtatttgtcaattaatttttgagaacacaatgccatggtagtagttgaattgttgcttgcagttgtattggtgtttggactagtagatatttggcaattttatgttcccgtt

SEQ ID NO: 196691 - DNA, 423 bp, Gossypium hirsutum
gatgccaccgatctctgccacttgataaaattttccgcataaattcaaatctttattttttttcaagatccgatagaagaacccgacctggtgatccgaaatggcggcgtatagagcagatgacgactacgactatttgttcaagctagtattgatcggagattcgggggttgggaaatcgaacttgttgtcgagattcacgaaaaacgagtttaatctggagtcaaaatccacaatcggagtagaatttgctacccgaagtattcgggtcgatgataaggtcgttaaggcccagatttgggacaccgctggacaagaaagataccgggcgattacaagtgcgtactaccgaggagctgttggtgcattgcttgtctatgatgtcactcgacacatcacatttgagaatgtcgagagatggtt

SEQ ID NO: 196692 - DNA, 458 bp, Gossypium hirsutum
gcagaatacttaccaacaatatctggccgcaaaggaactgaagaagcagtcttggagataccacagaaaatacaacacatggtttcagcggcatgaggaaccaaaaatcgccactgatgaatttgaacagggaacctatgtatactttgattttcacatagcaaatgatgaccaccaacatggatggtgtcagagaattaagacggagttcacatttgagtataactatcttgaagatgaacttatttgctgaaacgtaatgtaagttgtgtcacccccggaaatttcattgcaacttttttgaaaagcctcatgatgaagatgagatgagatgtcaagctttgattagacggttcatcttccaattatgccttttttgttggatattagttctgttgaaattcattacgaccaaagatattgggaacattggtagcagtctttgttaatctattggc

SEQ ID NO: 196693 - DNA, 595 bp, Gossypium hirsutum
gtcattttggatagaaaaattctccattgttgggatgatgtctccgtaactaaagaaatggtctgttttgcaaacagtaattggtattttgggtgcaaccttaattgataaactcgtaaggtggaataacaaccatcagtatgagtttctattaatgtcctcctaatatcaaactctagagtctagaatccaggcacctcggtgtggataatatattgtaactagatttatctgtcaaactgacgatgaatctaataatttggttttgcatcctttagatattgaaggtgcggcagaggattcaatctcttcaagctggaaaagccaaggcttagcacttcttcaagtggaatgttatttaatgttgcattccatggtcgtttatcttagttggaacttgaatttggtgttattgaaatagggttttgtagctaccttgtgtactagcttctttaaccatgattgttaattattacgtgttttgtaacttcttttatatttggccgagttaatatagatcagatgagctgtgaggtagattgctcatttatttaaacataatattttaattctaaatttaaattcattaattttt

SEQ ID NO: 196694 - DNA, 306 bp, Gossypium hirsutum
tattccaatcagtgatggatcgaaggagaaattcgctgaggcaacgaggtgaaacgatgtttaagctattgttcttacggcaagggaggaaggttttccggtggttttgatagcaatgttttcacgaaagttcatggaaccggtatgagtttattagttaggcaatttaatttgagtgtgaatttagtgattatcgagttaattacttaaatttagtgaggactggaaatttaaaatccctgattggtggttaaataggtgatgtgtcgggcatgcatgattaactgttgatcttggcactaatgc

SEQ ID NO: 196695 - DNA, 433 bp, Gossypium hirsutum
cccacgcgtccgcaattttagaaggtcgatttataaccgtggagaggtcgcgtgggaaacggcctaggactccaacaccgggccattaccttggactaaaaaataccagagactatggtcgtggtgagcgtggcaggtaccgtggtggtggtcgtgatgactacgggtatcgtcgatctcccaggcgctcaccatatcgaggtcgtgattactctccaaggtattctcctcatggtggaagatcaaggagggagcgctcttattcaccaccatattctcgcggatctaggtgaagaagtgttttgggtcgaaggggaaagatgagagatttgctttagtctcgtcagtgttgaatgttgatgtattctctagtttggacggagcttcaaagttaatgtttgcagtgttcttatatctctttaagcatgtaggg

SEQ ID NO: 196696 - DNA, 473 bp, Gossypium hirsutum
gttaaatctgaagagaaaccaatgtatagttctcaatcagcaatgccaatcacaaacgggcagtcgtctttctttcatatgcatgacagtgggaagcaacatctttctggaacattatcatcagcaactgaagccttcgatgctcctagtgcagcaccaacagttaaagagttatctggggtttcacgctcagactgtgctctctctcttctgtcagctcaatccttggatttgtcaagccatgtgacaggtattcaaatgactaggcccttgatcaatcaagctggccttgcccatcgtagcactgagaaatctgcagtgatgagttactcggaaaaaggtagcagtttctattcatgtgggatgaaccctaccggagtaagccaagaagggtcagtcgtggtccctgatgctggtcatactgctaattttgaaggtaaagtccaagacttggatctcttgagtgcaaggta

SEQ ID NO: 196697 - DNA, 417 bp, Gossypium hirsutum
cggacgcgtgggcgcttcccaaaaattcaattagattttgaaattccagcgaagggggaggagacacacacacacacgcacgcacagagatcttcaaatttcatcaatggatcattcaaaggttcaagagatcgtggagaagcaggtattgaccgtggcgaaggccttcgaggaccagatcgacgaagagattgcggctttagatcgactcgaccatgacgatctggaagctattagagagcggaggttgcagcagatgaagaagatggcggagaagcgaagtcgttggatcggtttaggccatggtgaatactctgagattccagctgagaaagacttcttttctcattggttaaaagctaggtgaaacgagtcgtttgtcacttctatcgcgaaaattggccttgcaaggtgatg

SEQ ID NO: 196698 - DNA, 708 bp, Gossypium hirsutum
gtttctctcatttttccttcaaagattccaccgttgttgaaccaagatggactgttttgtaccttcaaggaagccttgtttcgttgaagaagatgatggtttagcttcacttgcaggcatggagggtgttggatattcaggtggaagctattacaaaaaccatagccaaaatgggtttttctcaacacccttttgtttctcaaggaggaataatagtctaaggaacatgtcttcctcttcttcttcttctgctttctcatgtttgatttcttcttctccaaggtctactagattttatgatggcagatttgaagatcatcatcaaccccatttcttggatgcttgcttcctttgcaagaaacctcttgggggtaacaaggacatcttcatgtacagaggggacacacctttttgtactgaagagtgtaggcaagaacaaatagacatggatgaagctaaagaaaacaatttgagcttttcttcatcaatgaaagcattgaggaagaagaaagaccaaaggaaatcatccaaatctccaaccaaagctgaagattatccttttagaacaagcactgttgcagctgcttgaaaccaacatatctaccatataaatagttgaaaatatatatatatatatgaagatccatgaagaagcctatttttaggggtttctttgtttttttaattgtgaatgttatataacacact

SEQ ID NO: 196699 - DNA, 787 bp, Gossypium hirsutum
gttgctccttggcctgctcgtttgcaaaccccacccgatcggctgcaaagcatacatatggaatcctacatagctagaaaagaactcttcaaggctgactcaaaatactggaatgaaatattggcaagctatgttcgtgctctacattggaagaagtataaactaagaaatgtaatggacatgagagctggctttggaggatttgctgcagcaatgattgacaatcaactcgatgcttgtgttctaaatgtagtccctgttagtgggcccaataccttgcccggacgcgtgggatcgtcgattaataggggtcatgcatgactggtgtgagtcgtttgatacatacccacggacctatgacttattgcatgcagctggcctcttctcggttgagaggaaaagatgcaatatgtctaccatcatgcttgaaatggaccggatattacgacccggtggacgagtatacatccgcgattctcttgatgttatggatgaacttcaagatatcgcaaaagccatgggttggcatcctactctacgcgatacgtccgagggtcctcatgcaagttacaggatcttggtatgtgacaagcgcctactccgcagttgaaccaatagaactaaagactcgaaggccgaaacctcaccccttccgcaaattgaagacagctaaagcaagtcttgcaaatgattgtttccaaataaaatacaagtcgtcaattacaggtgtcttaatatcatgcagtcgtcagaccggatgaggatggaggaggacatgagacacatt

SEQ ID NO: 196700 - DNA, 498 bp, Gossypium hirsutum
ttttctttgtcgttataaaggaggaaaggctaagttcagtcggggatggtatgaatttacattggggatttttttgggagaaggggatgtctgtgtctttgaactgctcagatcaagggaaatcgtgctcaaagttactgtatttcgtgttactggaaagcggtggactaatgcaccggtctcaatgaatgcctgctaagttaagccatcatagattatagagagctggaaatttcaggaatgtcaaaaactatgtcaagtaactcgttcttctcaggtgacggtgtaaccaatctggttccataagaaattagctgctgtgcatgtttagctgcttaagataatggatactaaaattctctggcttgactaggtttgttagtagatttctccgatgtagttgatgttgaacccgattgggaaaatgtgttttagacttgatgttatggtctgcttggttggtttgaaattgaaattttcattcctcttgttgctttc

SEQ ID NO: 196701 - DNA, 486 bp, Gossypium hirsutum
atcaacaccaaaacctagcttcctcccgtctcattcggccgaacgaaatcccccctcaaccaccgcctcgcctccgtaatcagcgaacggcgtcgcacgaaggcctaatcgaccctgttcgaccatgaatccgagggttttgccattcttaagcctcacaatccctatttgagcttcgatttcttcaaagcaaacaaggattcgagggcctttatcacgataagtatcttccctctcctttatttttgtttttttactcctatgataacgaaaatcaaagagataaaagcaaaatgaaaaagaaaaatgatctttcaaattaccacttgaaaacagtcttttattcaccctttttggtaccgatttgtatgcgtaaatatgcgtgtatatttctgccaaaaaaaaagatcccatttacatcatttttctggctttttatagctgatttacatcataaataaaataaaaattgtattttcttgctgt

SEQ ID NO: 196702 - DNA, 444 bp, Gossypium hirsutum
cccacgcgtccgtgtatgtgaaaaaattggctgtttttatagggtacccttttagctttgaagaagaacaaggtggggtagtgaagaaactaatagatttatgcagttttgagaacttgagtaatttagacgtgaacaagacgggaaaacgacatgaagacgacgatgaggcaacgaacaagacgttcttcagaaaaggctaggttggggattggcaaaaccatcttacacccgagatggctaatcggctcgacaatatagtggagcaaaaactgagtggaaccggtttgagtttcgaactcaacaatggatcatcttgatggactaaaatcatttgtctttcgggtaataattgtgtgttcatttgcaactgtgtttggttgggatgctttgaatttcttgttcaaagatccaaacatgttattgaaacctatttctctcaaa

SEQ ID NO: 196703 - DNA, 399 bp, Gossypium hirsutum
ctgtttcgtgggtttttctaagaaaccctaaactgtggcttctcccaactgtcctctggggtccagccgcaagcaaggccaacaccaagccttcatttgcttccgtaacgaccaacagagggccggagaacccctcttgcgaggcgaaacgagaggccgtgaagttgtggagaacgaggggcatagagtatgggcgcaaacatggagcgaggcgcacggggatcgtgcgtggagtgccgacgtgggggttgcggcgtggggctgctgtgcaaaaggggaacttagggtctctaaaaccctaaaactttgggcctatcgggcgttgtaaaattttgggcttgtaaaccgaacctatttgatggactatttaattattgtgttatgattttggtttcaaaa

SEQ ID NO: 196704 - DNA, 947 bp, Gossypium hirsutum
cacgcgtccggatcgtctcacccgagctatcatggacgattatcattctagcccgccaaaagagcggcgggggcgaggagcatttagttgatgccgtgcttacgtagcaagacaagtatgatcttaacgaggacactattattggacttctttgggacatgatcactgcaggcatggacacaacagcaatctcaggcgagtgggcaatggctgagctcattaggaatccaagagtgcagaaaaaggcacaagaggagctacatcgtgtgatacgattccaaagggtgatgtctgaacctgatttctctaatctgccttaccttcaaagcgtagccaaggaagcactacgactgcaccccccaactcctctaatgttaccccaccgtgccaatgcaaatgtgaaaatcggtggctacgacatccccaagggatcaaacgtgcatgttaacgtatgggcagtagcccgagatccagctgtgtggaaggaccctgaagagttccggccagaacggttcctagaggaggacgtggatatgaagggtcatgatttccgattgcttccatttggtgcagggaggagggtgtgccctggtgcacagctcgggatcaacctggtgacatccatgttgggtcacttgttgcaccacttttgttggacaactgcggagggagtgaaggctgaggaaattgacttgcttgaaaaccctggactggttgctcatatgcggactccattgcaagctattgccactcctaggctgccttctcatctgtacaaacgtgtggctgcggatatctaagttttttccctaaacttctaattcttattgctcttagcattagattttgaattctgaacttttttttttttacaagttctgttgtattatcaattatgtctcatgtgatttgtgatcggtcgcgtgaaagaagaccaaataaaaacg

SEQ ID NO: 196705 - DNA, 683 bp, Gossypium hirsutum
aaaatagtgccagctagggaaagcctatcaagaatggaagagcttgggagaaggagaaaaaaagaagtctgctatagctaaatccccaatcgttattttgatgtcagccgtctttatatgacatttcactgccagtagtcagctttccagtacctgtagggctcctgccacaaggatggctaagcttgccccagggcaggagtggtataaggcaagaaagaaaagtgccatttccaccaactctttacaatagatttttcgcttcatcagagaagctggagcagaccgattagtaccacaggagattaaagtaccaaaataagacagatataaacaggacccacaactcatcgtctggttttgaagagttcgctatctccgaagaagttgtgttctttccgtggataccttcatttttgagctcgtagggagcgagggagcctagaaagccttgcccagagaactcacttatagaagagcttagctaaaaagctgactgtaagaagaagggctccaactcttctagcatttcttttcccgtcccagaccacagaaagagaatagaaaaggcacggatcccctttctttcctttccctgagcctgaggcgagagcttgctttaccgagaactaggcttttgcttcatcagatgctatagacgagaccacttatgtcacttaatt

SEQ ID NO: 196706 - DNA, 477 bp, Gossypium hirsutum
ttccacgcgtccgcaagaacagggtgcacccgttggtggaattggaattcaaggacatatagggagccctgtaggaccagttgtgtgtactgctcttgataagttaggcattctcggccttcctatctggtttacggagctcgatgtgtcttcaatcaatgaacacgtgagaggggaagatttagaagttatgcttagagaagctttcgcacatccggccgtggagggtgtaatgctgggcggattttgggaactgttcatgagccgggataacgcacacttggtgaatgccgaaggcgaagttaatgaaaccggtaaaaggtttcttgctcttaaacacgagtggttgtctcatgctcgtggacaagtagatgtaaaaggacaattcaatttccgaggctttatggggaagtacgccatggaaatcgatactccctctaagaagatcgtgaaaacttttgtcgtcgacaagggtga

SEQ ID NO: 196707 - DNA, 981 bp, Gossypium hirsutum
aaagcaggagctatgttgaagaagattcccctttatcagcacattgccaaccttgctggaaataagaccttggtcttgcctgtacctgcattcaatgttatcaatggaggttcccatgcaggcaataaactagcaatgcaggaattcatgattctacctgttggggcatcttctttcaaggaagccatgaagatgggagtagaagtatatcatcacctgaaggctgttataaagaagaagtatggacaagatgctaccaacgtcggtgatgaaggtggctttgctcctaacattcaggaaaataaagagggacttgagctcttgaagacagctatatcaaaagcagggtatactggaaaggttgttattggaatggatgttgctgcttcagaattctatgataacaaggataaaacctatgacttgaatttcaaggaagagaccaatgatggatcgcaaaaaatttcaggagacagtttgaagaatgtttacaagtcattcgtgactgattatccaatggtctccattgaagatccatttgatcaggatgattgggagcactatgcaaaaatgacaagtgaaattggtgaacaagtgcagattgttggtgatgatctccttgtcacaaatcctaagcgtgtggagaaagcaattaaggagaagacctgcaatgctcttttattgaaggtgaatcaaattggttctgtgactgaaagtattgaagctgtaaaaatgtctaaatctgccggttggggagtcatggcaagccaccgcagtggtgaaaccgaggatactttcatagcagacctttcagttgggttggcaacaggccaaatcaagaccggcgcaccgtgcagatcagaacgtcttgccaagtacaaccagcttctgaggattgaagaagagcttggagctgctgcagtttacgcaggagcaaagatcagagcaccagtagaaccatattgatggtttctttcttat

SEQ ID NO: 196708 - DNA, 462 bp, Gossypium hirsutum
  unsure (1)..(462): unsure at all n locations
acaggattggatatggtccgtgggatgcaatcctttctccattacttctcaaggttggcagatatcaaaatttcaatcggatacaattgctcggagctacatcatctcaactcttgaagagtcgataaaactggtcaattcagccatgcaccttctactttgggagcgtacaactgagaaaacctttaaacacttccaatctcaggagcgtgagctagtgaacaagtataattatgttgtcagcttatggagaagaatttcaactattgctggtgaattgagatacaccgatgccatgaaactgctgcataccttagaggacgcaaccaaagggtttgttgatcaagtgaatgcaaccatagcccttcttcatccgattcattgcacaaaagacaggaaagtgcaattagagttcgacgcatcaacaatacctgctttcttgattgttntaggtattctcta

SEQ ID NO: 196709 - DNA, 730 bp, Gossypium hirsutum
tccggaatggccgggccgacccgccccacgcgtccgcagaagtggattgaagtgaagaaagaaacaaccaccgaaaatgtcggcagcgcttcctccaccagcttcatctctcaaactaacggcgacaacctcattcccaacctcacgcgcactcttcctcgctttacgcaaaccccaaatttccattataccacgtgccactcctgactccgacgctgactcatcaacggaacccgactcctcgccctcctcggagacctcagccgactccgacccattcgaatcccgtctctcccaggtccgcctccgttaccgaatcggagccggcaagaaagcggagcgccgaaaatcaaagaaatccggatccgtatcaacttcgtcgtcttcctcctccatctacctccctccggtgcctttaaaagaggcgatttcaaatgggttgaaagtggatttcgggtttagcccatatagcgagagaataaacggacggatcgcgattctcgggttgacggctttggttttagtggaattggctacgggtaagagcgcgataagttatcatacgccagcaattatctttattcagatttattttgtagctgcagttggggctttgttcgttaagtacgagaaagaaaaagttagtgtttggccaccttctcaatcttctttaacctcaaaattgaaaaaaaaaagaatttttttggggtttttaagtaatatgaaagta

SEQ ID NO: 196710 - DNA, 724 bp, Gossypium hirsutum
gcacactgatgtcgcagttctcctcgataatgaagctatctacgatatttgccgaagatcgcttgatattgagaggcctgcttacactaatctcaacaggctggtctctcaggttatttcttccttgactgcatctttgagatttgatggtgctttgaatgtggatgtgaatgagtttcagaccaatttagtcccataccctagaatccatttcatgttgtcttcatatgcaccagtgatttcagcggaaaaggcttaccatgagcaactatcagtggcagaaatcacaagcagtgcatttgaaccagcttcaatgatggccaaatgtgatccacgccatgggaaatacatggcttgttgcttgatgtacagaggagatgtggtgcctaaagatgtgaatgctgcagtggcaacaatcaagaccaaaaggaccatccagtttgttgattggtgtcccacagggttcaagtgtggcatcaactaccagcctccaactgtggtacctggtggggatttggctaaggttcaaagggcagtttgcatgatttcaaattctacaagtgttgctgaagtgttctcaaggattgatcataagtttgatctgatgtatgcaaagcgtgcatttgtgcattggtatgttggtgaaggtatggaagaaagtgagttttctgaagctagagaagacttggctgctcttgaaaaagattatgaagaatttggcttg

SEQ ID NO: 196711 - DNA, 553 bp, Gossypium hirsutum
  unsure (1)..(553): unsure at all n locations
cccacgcgtccgcccacgcgtccgcccactcgtccgcccacgcgtcccacagattgaggttaatgcttctaatggaagcattggagctcatcgtgctgttctttctgcacgatcgcctgtttttcacagcatgttttcacataacctgcaagaaaaagaattgtcaaccataaacatatctgacatgtcaattgaagcttgtcaggctttgctatgttacatttatggaaacatcaaacatgaagaattcctggctcaccggctggcacttctccgggcagctgataactatgatatatcggatttgaaagaggcctgccaccagaggctcctagaagattttggatccaaagaatgtccttgagagactccaaaatgcagctttataccaattgccaaaactcaagtccagttgcatgcgatatcttgtgagatttggcaagatatatgatattcgagatgattttaatgctttcctgcaatgtgcagacgggnagctgataactgatatattctatgaagttctaaatacctggaaaggattctaagatgc

SEQ ID NO: 196712 - DNA, 610 bp, Gossypium hirsutum
  unsure (1)..(610): unsure at all n locations
gtcaaatgggtagctcttggaattgttgtcttagaggctattattttcttgttagcccttatggttagggccgccaatgtacctgctgattatgacagtgatgatgagttcattgcaccaaggcaacaaatcagacagcctttaatcaacaggccaccagttccagctacaggtgttcctgttactggcagccttgatcaacgacccagcagaaatgatgcttggagtgcacgaatgagggaaaagtatggtctggatacgtccgagttcacctacaacccttcggagtcaaacaggtaccagcaggcagctccgcaaccagcagaagaaagcagccgttgcaccattatgtgatgatcatctggttggttggttggtttccgaaggaaggttattgcattgtcgatggagtgacaaacttcatatttttcagatgatggtcttattttgttttttgctgagtttgttcacaatctatangagctttatgtgttccccactcattcctttttctaaaaaacatgtgtgtttgttccccaacgcctaacccacattttgttttttaaatttgactgctaccttaggttgtgccatgagtggaatctgaacg

SEQ ID NO: 196713 - DNA, 439 bp, Gossypium hirsutum
cccacgcgtccgcccacgcgtccgcggaaaatggggcagattcaatactccgagaaatacttcgatgatacttatgagtacaggcatgttgttctcccccctgaagtggccaaacttctccccaagaatcgcctactctctgaaaatgaatggcgtgcaatcggagtacagcagagtcgtggctgggtccattatgcaatccatcgccccgaaccacacatcatgctcttcaggaggcctctcaactatcagcagcagcaggagaatcaggcccaacaaagtatgcttgctaagtaattacatcagtatttagcatccaaaacaaaaagggtgaaaccaaagctactttgctagtgtttatcctcttcctaaacagtttgggtgttgtggattcctggattgttttgtattttagttctccactttggagaaatccatg

SEQ ID NO: 196714 - DNA, 561 bp, Gossypium hirsutum
tcgcccacgcgtccgctttcatcttctttttccttcataccaaacacttcacgagaaaaacagagaaagagtactttcttttttcttcttcttttggttctgtttcactgccatggcgaaaacgcaaacaccccatatagcgattcttcctagtcctgggatgggtcaccttattccactcgttgagttcgctaagcgatttgtacagcaacacaatttcactgtcacttttgttatccccaccgctgattctccttcgaaagctcaaatatcaaccctggattcccttcccagccctatagattatgtttttcttcctcctgttgacttgagtgacctccctcaagacgcaaagattgaaaccgtgatttctttaacggtggctcgctctctgtcgttccttcgggatgctttgaagtcgctggccgcaaagacaaaactcgtcggtttggtggttgatctttttgggacagacgcatttgatgtcaccggagaattcaacctctcgccgtacatatttttcccctccacggccatggccttgtctctgtttcattacct

SEQ ID NO: 196715 - DNA, 331 bp, Gossypium hirsutum
cccatcgtccgattaaaatggagaaaaaattgcagcttaagtgccttcatttcaccctcttcttccttttcttcttattgtttgcatttaatattgtgggtgcttttggtactaggaaaacactatccatggaaggctctaatgcaccaaacggtggttccaatggtgctactggttcagcccatggtcctaactgggactacagttggggatggggttcaagccctggtagtggatggggttatggttctggttcagggaggtctcctaatgggttcgggaggggttacgggttcgggtttgggtctggtactggttcacgttctggttc

SEQ ID NO: 196716 - DNA, 554 bp, Gossypium hirsutum
  unsure (1)..(554): unsure at all n locations
cactgtctcaatcgtttcacgattttccttttcttttttcttttaattatcacattattatttacacaatcatcagttggtttttccttttaaattttaatttacctcgccggaaaggtcgtcgcctttttcaccggggaaatttcatctccttaactatcttttctacctcagacatagtttgactgaaattgcaatgaacaagaatttgctctgaatttcatttttcgggctttgaagattggtgagcttttgtgctttagaagaatagcagaatgggatgtgttggatcgacgccggccaaaggagacgggaatgcgaaaaagattcgaaagccaaaaccatggaaacatcctcagccgataacaaagtctgaactcgagcagatgcgtgatgagttttgggacactgcacctcattacggtggccaaaaagaaatctgggatgcacttcgggctgctgctgctgaacctgatttaagccaggctcaagttattgtggactgtgcggnggtcatagtccaaaatactgatctaactatctgctatgatgaa

SEQ ID NO: 196717 - DNA, 602 bp, Gossypium hirsutum
  unsure (1)..(602): unsure at all n locations
ggaaggcgttactgtgctgtgcatgatgtggggagggctataaatacattctacgcgtataaaaagtttaagtttgatgtgggaattgaggagttccatggtctgttatctgccctttgtcgatacaaaaatgtgcaggatgctgaacatctgatgttttgtaacaaggatgtcttcccacttaataccaaaagttttaatattatactgaatggctggtgtaatgccatccgtagtccacgtgaagcagaaaggatttggagggaaatgagcaagcgaggtgttaggcatgatgttgtgtcatatgcaagtatcatgtcctgctactcaaagggttctaatcttaacaaggtactgaagctttgcagccaaatgaaatcaatgaggattgaaccacataggaaggtttacaatgcagtgatccatgctcttgcaaaggctaagcatgtaaaaaaagccatcaatcttctcaaagttatggaagagaatggtattggtccaaatgttgttacttataattcactcataaagcctctatgtaaagcacggaaggtaaatgaggctaaacacgtatttgatganatgttgcagaatggcctctc

SEQ ID NO: 196718 - DNA, 543 bp, Gossypium hirsutum
ctctcacattttatcttctctttttcccagggtctgttgactacccccatttgcctttcattaacccagcttttcaattttcttctctgttttttttctcatcatggcaagaggcaaaggtgttggaagctaaagaaggaaccatttccgttgcctctgcttttcctggtcatcaagaagctgtacaggtatagagatcacaaattcttaacacaagcaattggagaagcgtataaaggggttgaatgtaaagatggagggccgtttggtgcagttgttcgttcgcaatgacgaagtcgttgtgagttgtcacaacatggttttgagaaacactgaccctacttcacatgcagagttacttctattagagaggcatgcaagaagctgaatcaaattgagctctcggactgtgaaatatatgcttcatgcgagccttcaccaatgtgcttcgtgctatccatctgtcgaaatcaaatgctggttatggagcgaagcatagcagccatgcaatagattgatgattcatgcggatgctgaaagtac

SEQ ID NO: 196719 - DNA, 635 bp, Gossypium hirsutum
  unsure (1)..(635): unsure at all n locations
aaggtgtcctggagttcattgattatgcttacactgtgtttgggtttacttatgacctaaaattatctacgaggccagagaaataccttggagatttggaaacatggaacagagctgaagctgctcttacagaggctttgaaccagtctgggaagccatggcagataaatgaaggagatggggcattttatggtccgaagatcgatattagtgtatctgatgcattgaacaggaaatttcagtgcgcaacattgcagcttgacttccaacttcctgagcgcttcaagttggagtactcggcagaggatgaagccaagagggagaaacctgttatgatacatagagctatcctggggtccgttgagcgaatgtttgctatattgttggagcactataagggcaaatggcctttctggcttagtccccgtcaagcaattgtttgccctgtgtcagaaaagtctcagcaatatgcaatgcaggtccgggattggattcatgaagctggttattatgtaaatgttgacatgacagatcgaaagattcagaaaaagattcgagaagctcagttggcacagtacaactttatattaattgttggtgaaaaaganatgaacactaaaaaggtgagtgtgcgg

SEQ ID NO: 196720 - DNA, 1015 bp, Gossypium hirsutum
tttcattttacaacccagtaaggggatatttttctcttctctttgaaaaatccgaaaaatagttttccaaagggaaacttttgctcgtaatattctcagatctgctctcaaatcctcacattttgaatagccaatatgggaggtgggttcagagttcttcatttggttagaccattcctttcgtttctgcctgaagttcagagtgctgataggaaaatcccttttagagagaaggtcatctatactgtgatctccctctttattttcctggtttgcagtcagcttcccctttatggaatacattctacgacgggtgctgatccgttttattggatgcgtgttatccttgcatccaaccgtggaaccgttatggaacttgggattacccccattgttacttccggtttggtgatgcaactcttggctggttcaaagatcattgaggttgacaacagtgttcgtgaggatcgtgcgcttttaaatggggctcaaaagctgttggggatcctaattgctgttggtgaggcagtggcgtacgttctgtctggtatgtacggcagtgttggtcagctcggtgttggaaatgccattcttattattattcaactttgctttgctggaattattgtgatctgcctcgatgaacttctccaaaaggggtatggtttgggctctgggatctcccttttcatagccaccaatatctgtgaaaacataatctggaaagcctttagccctacaacaatcaacagcggtcgtggggctgaattcgaaggtgctgtcattgccatgttccatcttttaataaccaggacggacaaagttcgagcacttcgtgaagctttctaccgacagaatcttccaaacgttacaaatttactcgctacggttttgatcttccttattgttatctacttccaaggtttccgagttgttttgcctgtaagatcgaagaatgctcgagggcagcaagggtcggatcccattaagctattctacacctgcaacatgccca

SEQ ID NO: 196721 - DNA, 513 bp, Gossypium hirsutum
gataagctctctaaattctcttgccccatccaattcttcagcaactggaccagagcttcatccccatccgttgttttaccgccgtcgttggccaccacgtgcagtggccgaagttaaaaaacctttatttttacaggtacaaaaatgaaattatggcgaacatggagccattggagctgacatgggcgagaggcgacgtaggggaagccgacgtgggcgcgcgaacgtggaggacatgcgtgggaaggcttgcggcggctgcaacagaaaagggtgttagggtttttcttttcttttttttatttagggttaaatatttcggtctaggattaatttagggcttgggtaatttgggcttcaaaattgggttaattttattttgtttttgatttgattttgggtctatttttggtctttgaagtttgtttttggtttaaaaatttaggttttaatggtaaataggcccgggcaaaaattggtacccacaatttacataataaaaaaataagatta

SEQ ID NO: 196722 - DNA, 459 bp, Gossypium hirsutum
acaaagcacccatgcctctaagcccaccaccaaaccaaccaacgaacccaccgtcgtggccgcactctctacctcttctctcctttggatccattcgcccaaaccgatttctcccaaactcgctcttttcactgctacacgctttttcactccaaagaagtccacctccattgttatggctgctccccctacgactactgctaccgaggtggtgccagcaattattgttggtggtggaagagtgggaaaagcattgcaagatatgggcaagggagatgattcgctggtgaagagaggtgaagcagtaccgcttgattgtgaaggtcctatattggtttgtactaggaatgatgatcttgaggctgtgcttgaggccactcctaaatctcgttggaacgatttggtttttttccagaatggcatgctggagccatggcttcaaagcaaaggtcttaatga

SEQ ID NO: 196723 - DNA, 433 bp, Gossypium hirsutum
tgagttcaactattgaatcctttgtttatgcctcctgggtgcagcttactttgttgcaggcgccgatataggaaaattcaccatgaaaactgttgatgacattaggaccttgaataagtcagttcattttaggcctgcctgcaatttctataacatgaacgagcttgcagctttgtgggaaaggaaaatccggcgaacactccctcgagttaccgtcactgaggaagaccttctctcggctgcggcagagaatattatcccacagagtgttgttgcatcattcacccatgacatcttcataaagggttgtcaaatcaacttcccaatagaaggcccgaatgaaaccgaagcctgcagtctgtacccgaatgagccattccgaacattggatgactgcttcaacgacttcttagcaaagatgaaggatgaaaac

SEQ ID NO: 196724 - DNA, 686 bp, Gossypium hirsutum
gtgaaaaggtttaaccaggaagggttccaaggtcatagggagtggttggcggaggtgaattatctgggacagctttatcatcctcatcttgtgaaattgattggatattgcttagaggatgaacaccgtcttttggtgtatgaattcatgcctcgtggcagcttggagaatcatttattcagaagaggtacgtatttccagcctctttcatggagccttcggatgaaggttgctcttggtgcagcaaaggggctagcctttcttcacagtgctgaaacaaaagtgatctatcgagacttcaagacttccaatgtcttgcttgattcgaactacaatgcaaagctttctgatttctggctggccggggatgggccaacaggtgatcagagccatgtttctaccagggtcatggggacctatggatatgctgctcctgagtatttagccacaggtcatttgactgctaagagtgatgtctatagttttggagttgtgctgctggagatgttatctgggcgtagagcagttgacaagaatcgaccgtccggagaacacaacctggtggaatgggccaaaccatacctggccaacaaacgcaaaatattccgtgtcctagataaccgtcttgaaggccaatattcaatggaagcagccttcaaggccgcagcccttgctttacgatgctt

SEQ ID NO: 196725 - DNA, 508 bp, Gossypium hirsutum
gtaaaattaggcggagtagatcttgaggattcagttagaaattcgaatgaagatgtgacgagtgataaggtagtggaagaccagggacaaaatgcatgtaaacgaccagaggcttgccgcatttccagtagtgccgcggtcgcgcgggtccgaattcagggtatcgaaccggagtgagagatacccttctcttgggtagcaaacaatttattaaacccggactattttcttcacgtctgtgtttgtgtcaaagttgcacaataaaatcccacatgaaggggatggatatgtgtggatatgtttctcctgttgcgacagggaggttagggtctcttctttttattcatttgacactgtgaatatgttgattgcatcaatgtcttagcaaaaattgaaaagaaaaagccactgtgatacttagaggtaacactgaactgagctaggataggcttggcatgggtttattccagcccagttgatcacttagttatttttttttattaatatg

SEQ ID NO: 196726 - DNA, 552 bp, Gossypium hirsutum
atcaccatgaaaaccacaaaagcttcagtgtttcttcttttcatcatcttctcagtcacaccatcatcctttttgtttggtgtggccaacgctacaaatgaacctgtgctcgacactgatggcaacgaagtccaaacaggcaccgaatactacgttgtgtcggcgatatggggtgctggtggtggtgggcttgccctaggcaggccaagcggaaacccatgcccggaagtcgttgctcaaagacgatccggtgtcgacgatggtataccggtgatattttctagttcggactccgacgatggagttgttcgcctatcctctgacataaacatagagtttgttccgctcagacccagactttgccgaacaacaacggtgtggaaggtcgatgattacgaccattcagccggaaaatggtgggtgataaccgatggggttaaagggaacccgggtgccgacactttgaccagttggtttagaatagagaaggggggtgttcttggttacaaatttaagtactgccccgcagtatgtggaacatgcccagcttta

SEQ ID NO: 196727 - DNA, 813 bp, Gossypium hirsutum
cttcctctcactctcttcttcgctttctcttaaataatacgaaagctaaaagaaaaagctctaaatttcaatggcgaccgaagaaattagtcgaactcaaggcctcaatccttctcaacaatcttcttcacttccagactaccctcagatgattctggaagccatagaggcattgaatgagagagagggctccagtatgtcatccatcgccaagcacatcgactccactcactccgatctcccagcgtctcacaccactctcctctcccaccacctcaaccagatgaaacaaatgggtcaaattgttatgttgaacaacaattactcgaaacccgaccccaatgccccacccaagcgtgcgacgtgggacgtccacctaaacccaaggttcctcttccacctggcgtcgtcgtctctcctcccagacctcgtggtcgtccgcctaagccgaaggacttattggctccccccaagcccaaacccgtcagcaccggaaggccgcgtgggcgccccactaagaaggccaagactggtaccgccgccgctcctccacctcctcccggcgtgaagcgaggccgcggtcgacctcccaaagtgttaccgtcggtgggttttcagtaaagtagccaagttaataaacgaaagagaatggagaaaaggactcattccgtcactgctcctaccccagccgcgttaggtttaatatttttttaaccttaattgtttaggtgtggtttagttatctgctaattgacgttttagctttttcggttttttggtgtagttaacttttggtggagtactgtaatgaat

SEQ ID NO: 196728 - DNA, 604 bp, Gossypium hirsutum
tgttttctctctctctctctctctctctctctctctctctctctctctatttcttctccacaaaaatcccatattttgttcttaatctctctctcctttgcttacgataataacatatacgtattcaccaatgcatgatcttccgatccaatgtaattttgatccttagctttgaattttttaccgagtttgacccacctgattgactcactgagttggggcttctttttgttggagaaactatgttggaggcaatggagagttccgtcaatggcgggggtttctcgcagtttcagagctgcggagacagtagtgaagaagagctctcggttctgccacgtcatactaaggtggttgtcaccgggaataaccgtactaaatctgtgctcgttggtctgcaaggcgtggtcaagaaggctgttggacttggcgggtggcattggctggttcttaccaatggcatagaagtaaaactacagagaaatgccctcagtgtaatcgaagctcctactggtaatgaagaaaacgacgacatcgaatttgaaaacgtgcaatggaatggatcagacatggcatctgatgacactcaaaagtctcacagatc

SEQ ID NO: 196729 - DNA, 680 bp, Gossypium hirsutum
  unsure (1)..(680): unsure at all n locations
acgtccacgcgtncgagcttaactgtggaggtaagtaaatatgctcgtttaagacatatgggggctttcattcaccgctccttcaaaagattcattccaagttatggtgttgtttagaaacttcgggtaatgctggagatcacaaccttgatttgagcttagggaattcaacctcgaagcaaacgaatctcgagttaggtggtgatagggcaaattgctatgggcgatcagcacggtctgccacctgaagctgattggcaatataggggatttaggtctaaggtaaatctgcaccaggagccttgtagaagcgatggtgctactcatggaagatcggatggatatagtgaggcagagtcggtgcagctgttgagccaaactcttatccaatctccagcatcgattaagtctaatgaaatgcaaagatatggacagttcaggagacctggaaataacaatgtgtttcacattcctccatcatcttatcagattcattttccaagcagcagcaatggaggccgaataggaagcgatcttttactatccattagtgaacaacaatggccatcaggtcctcaccaaatgtttggaaattctgcagcatcatcaggattcccatcgcagattagaccttcttctcaaacttggctgcagaaaaatgggttccactcactcatgag

SEQ ID NO: 196730 - DNA, 904 bp, Gossypium hirsutum
ctctgagttttccgctgccgccctcaccggaatatcgtcggaggttcgatctatgtcgccgggatattcttcaagccaacagctttctctttagtcgaaagaaatgtacaataacttgggagcccagcctggggtgcctaggccgcctgtaaatcctcaaccagcaccatttggtaatgcattttatggtgctggttctggtcttatccgaggtggtctaggtgcatatggagagaaaattttgggatcaagttctgagtatgtgcaaagcaatataagtagatacttctctgatcctcaatactactttcaagtgaatgatcaatatgtgagaaacaaattgaaggttgttttactgccatttctgcacaggggccattggacaagaataaccgagccagtaggtggtaggctttcctataaacccccgatttttgacataaatgcaccagatttatacatcccatttatggcatttggtacctacgttgttcttgctggattatcgctcggccttcaaggaaagtttagccccgaagtactcaactggttgtttgttaagggattatttggctggtttctgcaagtcatgctgctgaaagtaacattactctcattaggcagtggtgaggcacctttgctcgacattatggcatatgcagggtatactttcacaggactctgtttggctgttctcggaaggatcgtatggagatattcttactactttttgatgccatggacatgcttatgcatgggagtcttcttggtaaagacaatgaagcgggtcctctttgctgaggttagaagttacgattccagcaagcaccattatcttttgctctttgttgcccttgctcaatttccactttttacgtggcttggcaacatcagtgttaattgg

SEQ ID NO: 196731 - DNA, 488 bp, Gossypium hirsutum
gtacactatcattatacgttctttctttctttctttttttaaattcccgggccttattggctactgtaaacaaaaccctgtttgtaaaagaaatgaagctcgttttggtgacattcctgctggtttctcttgttctcagctcctttctctttgaggagtcgatggctggttcaggtttctgtgcgtacaagtgcaaggcaaggtgcgcaaaggcagattttaaagagaggtgcttcaagtactgtaacatttgctgtcagaaatgcagttgtgttccgtcagggaactacgagaacaagcacgaatgctattgcttcagggacatgaagaacttcaagggcttgcctaagtgcccttaaatactggcttaaatacatgctattgcttaacttgttgtagaaggcgaattttagcttttgtgggggctgtacgtcttaaagagtcttcttggacgaggacccataaaaggtttctattaagctaatata

SEQ ID NO: 196732 - DNA, 392 bp, Gossypium hirsutum
cccacgcgtccgcccacgcgtccgaaaataattgaaagatggtttgtatagcttgcctggggccgctcttcctcgtcccgatcgtcaacattttgcctcttcttttcgatttcgtcatgggtaaaatttacaggcttcttggatgggaataccgtaaaccagagagagcaccgccggcgtgtccgtataaaccggctgccaaactggaaaacaatagtaaagtgaccccagaaacagaaccaggtgcaccagagtctagttcgaaacccgttggtatgaccaatggcaagcaagattgatactgaaagcttttccatggtactaaaatcagacataaacctttttgaagatgtacttcttaaggttgttaatgggtaggggggaaagatcac

SEQ ID NO: 196733 - DNA, 740 bp, Gossypium hirsutum
  unsure (1)..(740): unsure at all n locations
ggaaattgtaagttgtgaccatctgaacagtattccaagaatgagtagattttcttctcttgagaccatcattattcaaaactgcgagaagttaagttggagagacaatgaactgtttccctctaggcttaaagaactaagaataacagaccgttggaacttaaggttcattccaagtcgtagagggtggtatctcttttcttcaacaacttcatggtgatgtggtgtaaaaaattatgtaaaataggagagggactgctcacctccacatgtctaacagatgtggacataagtgaatgtcctaatttgaggtctgctcctttcaatggccaatctcaatctcttttgagtcttcgattacgcaactgtgaagaattactggagatagagggcgtgattatctgcaagcacaagattggaaacgttagagattgcaaattgtcctattatgatttcaatttccagcttatatgggtttctcttctcttttaaaattagagctgaataaatgtgaagcatttacaagtctaccatctggattgtcaacttgtacttctctatggcgtngttcatctaccactgcaataatctggagtcaattccagatgatgttggaccaatgcgttgtttggaggaattgcgttttgtgattgccaagcatgatagggttcctaagaagacttggtgcctcacaattgagagatatatggtccttttaaaaacatagaattcaagctggt

SEQ ID NO: 196734 - DNA, 939 bp, Gossypium hirsutum
cccacgcgtccgcccacgcgtccgcccacgcgtccgcggacgcgtgagctcaactccacgcaaatggccctctttctttgcgtcttattccttctcctttctctctgcttctgcttgtgatcgctgcctgcaccagtccaaggctgcttatttctccaaagcctctgctctttcagcgggagcttgtggatacggttccttggctttaggtttaagtggtggacaccttgctgctggtgtttcttctctttacaaagatggagccggttgcggggcctgcttccagataaggtgcaagaattcaactctgtgcagcagtgaagggactaggatcacactaactgatctcaatcataataatgaaacggaatttgttcttagcagcagagcattcatggcgatggctaacaaaggcatgggccgagacattttgaaacttgggattgtcgacgtggaatataaaaggataccttgtgaatacaaaaaccagaacttagctgttagagttgaagaatcaagccaaaaaccaaattacttggcaattaaattgatgtaccagggtggtcagactgaagtagtagccatggatgtagctcaggttgggtctgcaaactggaacttcatgagcaggaaccatggggcggtatgggacacaagcagagtcccaaatggagccctgcaattcagatttgtggtgacatctgggtttgatgggaagtggatttgggcaaaaagtgtgcttccagctgagtggaaaactggagttatttatgattctggagttcaaatcactgacattgcaaaagaaggttgctctccttgtgatgacagccactggagatgagatcttagttgccaattacacatatagtgaatttgaatgttttagaagattaaagaaaatgaatatatagatagattttccttgtctctgtaatt

SEQ ID NO: 196735 - DNA, 406 bp, Gossypium hirsutum
cccacgcgtccgaactcaactccacacaaatggccctctttctttgcgtcttattccttctcctttcttctgcttctgcttgtgatcgctgcctgcaccagtccaaggctgcttatttctccaaagcctctgctctttcaggtttagccgcaatttgtttccttttttcctatcaatttcattaatacccagagttgttttagtgggtgacctttgttttgtgggtttgatattgcagcgggagcttgtggatacggttccttggctttaggtttaagtggtggacaccttgctgctggtgtttcttctctttacaaagatggagccggttgtggggcctgcttccagataaggtgcaagaattcaactctgtgcagcagtgaagggactaggatcacactaactg

SEQ ID NO: 196736 - DNA, 502 bp, Gossypium hirsutum
agaaactacaagagaaagttaaggaacaactttaaaaagtgggagaaaagatacaaattggggctatgcaccgtaatgagtgggtggaaaatgctgaccgatgggtcgctggattccttgagatgtttgaagccggttgccacaaaatgggcactgcaatcagagatcgaatccaagagcggttaagggggcagctgctgcaaaacggcaagggtgatgacgatgatgatgaagaatattattacgatgatgattattatgatgatgaagacgacgacgacgaattctactatgatgacaacgaatataatgatgagaaagatcagaaaaatgagaaagaacagaaataaaattgtttctgcttccagtttttactaatattatggggtaccttaaaagttctaaatagtagtgttgtgggatgtgtgatatgtcgatgttgtagctaaatcgagccaggcattgagcagaagctgtgatatgtactttgattattgatgct

SEQ ID NO: 196737 - DNA, 739 bp, Gossypium hirsutum
gctaccactgtggcagtgaagaggttgaaagaagtaacctcagctaaacgggagtttgagcagcacatggaggtgatcggtcatattagacacgagaatgtgtccgcacttagagcatattattattcgaaagacgagaagcttgtggttcatgattactatgaacttggaagtatctctgctttgctacatggtaaaaggggcgaagaccggacaccgttggactgggaaactaggcttaaaattgctattggtgctgctaaaggcattgcctatatccacagacaaaacaatggcaagcttgttcatggaaacataaaagcctccaacattttccttaactcaaaacggtacggttgtgtctcagatatcggtttagcagcagtgatgagcccgatgcctctgcctgtaatgcgtgctgcaggttaccgtgccccggaggtaactgatacaaggaaagcaactcaagcatccgatgtatacagtttcggggtctttttactcgagctattaaccgggagatctccaatacatgccaccggtggggaggagatcgttcatttggtgagatgggtgcattcggtagttcgagaagagtggaccgctgaagtgtttgatgtagaactcctacggtatccgaatatagaggaggaaatggtggagatgctacaaattgcaatgagttgtgtggcgagggtagtggagcagagaccgaaaatggccggactagtgaaaatgg

SEQ ID NO: 196738 - DNA, 630 bp, Gossypium hirsutum
gaaagctcgtcgtaatccgtatatgaaccaagcatgataacatggacccctgcaacttcgaaagaataataaagatttgaggtcgattcactttcctcaaacggcattttccatcttgcattataggactcaaatgcatctgtaaaaaatggtatcttctccttttcatggttgccttgtgttaccatccacggtctggcactcgcaagtggctgtaccagctcaccaaagttgtcccagagatgctgcatgcaatcagcataagaaaggtccccaggaagcagatgtacatcatatttgcattggtcgatgtggtctaatgttgatttagtccagccagtttgacctaaatcgccagctacggcaaaggtaacaggaaattgtccgggtggggtcttgagctgaaattcaggaccttgtcctccgcaccgatagaaataaatggtatcatgttccagaggcccaatgacagtatggtgtatctttccggagctataaaataagtaattataagaggcggtctctcctgatgatgaaaaggtgtattgtccaggcaaggttccgtattcaacaattgaaggagcggagttatcatcagtgatccatgaaattcgcatgtgattttctccc

SEQ ID NO: 196739 - DNA, 554 bp, Gossypium hirsutum
gcagaaacgtgttaacaaaggaaaatcagatccttgtggcaccgttcatattactataggagatggaggcaatagagaaggattagctcaaaagtacattcacccaacaccagagtggtcaatgttccgtgaagcgagctttggtcatggcgagctcaagatagtgaattcaactcatgcattttggagctggcaccggaatgatgacgatgaaccagtaaggtccgatcaggtttggataatctctctcatcggttctggatgtcttgcagaaaaggcttatgaatcaagtaaaattcttgtttctccttaaactaagacttggcggtcagtgtccctagattcgagccaagttgttgctaaacagcttgatctgtggtgtgtgtatatatatactaatactagaagacatggtttcaattagtaaaatggttattcgtttcatgtaatcgagcataaaggccatctccatctgaagttgtcctattgctcatttcttatatgtaactggggaaagagaatgcagtttccctatgcgcatactgaaaagttgc

SEQ ID NO: 196740 - DNA, 422 bp, Gossypium hirsutum
catggacgagatcagcaatgctgcggtggtgcacttcaacgggaacatgaaaccatggcttgtcctcccccgcgtccggttcaaacctctttggaccaagatacgtggactatgatctggagtttgtccaggcctgcaatttcggtgtttaaataaaacatcatcattgaaggttctgcactggtaaatgcttcaaaatctagtttttgttacagcaagagtttccaccataccatctgcattattatttcttcttgcacgttaaaattcaattgtctctaattctgcgtggaagaaaattagcatctttattcttagtatagaatactttttcatttttagaatttcttggtttataaattattctgcaaatgttgaaattatcctgcaatgataaaaaatgatgaagagtttttttgttc

SEQ ID NO: 196741 - DNA, 825 bp, Gossypium hirsutum
  unsure (1)..(825): unsure at all n locations
cccacgcgtccgaataaatttcgtcacccatcccggtcgagctactcacctgatcgcataggttttatccgaatttggaccagatgaattttaatttgaattgattttatttaagattcagagaagagtcaagtatctgaagagggagctttgatcaacaaaattccatcaatggcgggggtttctttgaagtgtggggactgtggggctctgttgaaatcggtggaggaagcccaagaacatgccgaactcacctcccattccaacttctcagagtccactgaagctgttctcaatcttgtttgctcttcttgtggcaagccatgccgatccaaaatcgaaagtgatttgcatacaaaaagaacggggcatacagagtttattgataagactttggaggcagtaataccaatcagtttggaggttccaaaggtagctaaggagtcagaggaggctattgctgcaggtagcaccggtgagcctgaagagatggttgttccagaggttgacaaaaaactgcttgaagaactggaagcaatgggtttccctacagcacgagcaacccgtgcactccatgtttctggtaatacaagtcttgaggctgctgtgaactgggtagttgaacatgaggctgacccggacataaatcagatgcccatggtacctgtcaacagacatgttgaggcatctaaaccttctcttacagcggaagagatgaaactcanagcacaagaactacgggagaaggctcggacnanganngaagaagaagagaggataatggtacgagaaatggataacgagacgattccagtgggcaacgtt

SEQ ID NO: 196742 - DNA, 754 bp, Gossypium hirsutum
  unsure (1)..(754): unsure at all n locations
ccctagcttccttcatctcctacatcgagcgaaaagagtaagagacaacaatggttactttccggtttcaccagtaccaggttgttgggagggctcttccaacggagagcgatgagcatcctaagatctataggatgaagctctgggccaccaatgaggttcgggccaaatccaagttctggtacttcttgaggaagctgaagaaggttaagaagagcaatggtcaagtccttgccatcaatgagatttttgagaagaaccctaccaagatcaagaattatggtatctggctccgctaccaaagccgtactggttatcacaacatgtacaaggaataccgtgacactactttgaacggagctgttgaacagatgtacactgagatggcttctcgccacagagtccggttcccatgtatccagattatcaagactgcaactatcccagccaagctatgcaagcgggacagcaccaagcagttccacaactcaaaaatcaagttcccattggtattcaagaaggtgagaccacctaccangaaactgaaaacaacttataaggcatcgaaacccaacttgtttatgtaatttgttttatcatttgatgagaaatttttgttagtgaaatcatatcagtctgttgatcagatattgtttntcatttgaanaggttggaacttttgtttgtttgggtttttcanntattcattntgttttatcaatcgcccgaaaagntgcatattaagcactctccc

SEQ ID NO: 196743 - DNA, 894 bp, Gossypium hirsutum
cggactcgtgggcggacgcgtgggcgcgactcctttcttcagatactatctttccctcaaaaatggttactttcaggtttcaccagtaccaagttgttggaagggctcacccaacagagagcgatgagcatcccaagatctataggatgaagctctgggccaccaatgaggttcgggccaaatccaagttctggtacttcttgaggaagctgaagaaggttaagaagagcaatggtcaagtccttgccatcaatgagatatttgagaagaaccctaccaagattaagaattatggtatatggctccgctaccaaagccgtaccggttatcataacatgtacaaggaataccgtgacactactctaaacggagctgttgaacagatgtacactgagatggcttctcgccacagagtccggttcccatgtatccagattatcaagactgcaactatcccagccaagctatgcaagagagatagcaccaagcaattccacaactccaaaatcaagttcccattggtgttcaagaaggtaaggccgcctaccaggaagctgaagaccacttacaaggcatcaaagcctaacttgtttatgtaagttctctcattgcaatgaaaagagagttgatgtggtttatagttctaaaatttttggtagtgaacatctggcagtttgttgattgggtattgtttttcatttgagaagcctaggccacatctgactggttgaagttgaattttctttaatttactatcacattttgtttacttcgaaaaaaaaaaataaaaaaaaaaaaataaaagaagagaaattcaactaaaatttatattcggaacttccataaaaatgaagagaattcagaaactttaccctttgaaggaaaatacctttt

SEQ ID NO: 196744 - DNA, 604 bp, Gossypium hirsutum
cccacgcgtccgcccacgcgtccgtgccgctactccctctgttccctcatttagcttcacaattttatggtgattttattatgttaagttatgcttggtttcggtccattcgaaaatttctttatttcattttggctagaaagttgtcagtaaatatgctggtttatggatctttaagtaattacagggaggagtgttgctttaagctgtatttgaattaatatgagaaatgggggaggggaagacagaaaattttgattttggttttggtcttttcctttaaaaatggttgctttcaggttgcatcggtaccaagttgttgggagggctcacccaacagagagcgatgagcatcccatgatctataggatgaagctctgggccaccaatgaggatcgggcaaaatctaagctctggtacttctcgatgaaactgaaaagggtccataagagcattgttcaaggactttccctcaatgagatttctgataataaccctaccgagagcaataattacggaatcctactccgtttccaaagacgaactggctaccacatcatgtacatacagtaccgtgacactactttgaactgagctgcttaac

SEQ ID NO: 196745 - DNA, 635 bp, Gossypium hirsutum
tctcgctctggcgggtataggcgatgcgcttgttcaaggtgggctcattggagcggctggggaattgcctgaacgctacatgcaggctatcgttgcgggatccggcggttctggggtccttgtttcaatgctaaggatcctaaccaaagctgtatttccacaagatggtgatggcctgagaaagagtgcctacctttacttttttactagcattgtgtttatggtcatatgcatagtcttgttcaatgtggcacacaaacttccggtggtgcagtactatgaggagttaaaggctgaggctgttaaggaggaaaaagcagagaaaggtcccatgaccgggcctgtttggagagcaaccttgtggaatatagtaggaacagtcaagtggtatggatttgggatcgtcctcatatatgttgtgactttatcaatattttcaggatacatcacggaggatgtgcactcattggttctcaaggactggtatccggtcctccttataacaggctacaatgtgtttgacctggttggcaaatcgttgactgcagtctatctccttgaaaatgcaaaggttgctatttccgcttgtgttgtgaggttacctgtctttcctctcttcataggttgtttgcacg

SEQ ID NO: 196746 - DNA, 768 bp, Gossypium hirsutum
  unsure (1)..(768): unsure at all n locations
atgacatactacctaagttgatgacgtccactggctcctatgaggatcttttcaggaaggagatagcgaagtatgatcacatttgtgaggaaattgcccaaaacattgaggcacaagaacaattattgatgcaaattcaggttcagaatgaagagtttggtgctgtctttaatcttgaagattataaagcatcacgagagaagtgttacaaacaaattcaagcagctttagccaagtgtaaagaaatcaaggaaaatattaacgagggcctaaagttttatgttactcttcaggatgcaatcaataatatcaagcagcaatgtagtgattttgtgatgactcgaaacatccagtgtcgagaaatgatggaagatgttcaaaggcaaatggcaggtttcaacttccangaccgtgagagcacagggccttacccttcagttggacagccccgtcnaattccaagatccagtacacagcagctaacagaatctcagagtatatcccatccttcaccgcaaaccccttattataggcctcctgagcagccaatgcatgggtatggtcatcctcctcccccatacactgccccacagcaaccatctccttaccatgttcccccatcaaccggtgctccttatcctcccccacatgcccaacaacatgcaccagtcggccatgaatacggccaacctgcctatcctgggtggcgtgggccatattataatgcccctgcagagcaatctgggtctcatcctcgacctccatatt

SEQ ID NO: 196747 - DNA, 840 bp, Gossypium hirsutum
  unsure (1)..(840): unsure at all n locations
aaaaagcttaagcgctgcaatggatgaaagtgggagaaagggcgagaatggaatagaattggaataaacaaaaaagtaaaagctaaaattaaaattaaaatgctaaaatgatgaatctatccacgatgatagcgtatggataccgccattgtacgccaccaataaagcaactcttaaactacactaccttccttcatcttcaccatcaccatcaccatcaccatcaccatcaccatcttcaaggccgccctctttcctttaacagtcttaatctccctaacctcaatctccttctcacgggtaattgtctcttcttcaggatgcagcgcttttggatcggaaatgggatcaacaaaaacaaacaaatggtggagcatttgcagcgttacggagtgatttcgtcaatgaaagtagctgaagtaatggagactatcgatagggcattatttgtaccggatggggcttcggcttatgctgatagtccgctggcaataggttacaatgccaccatttcagcaccgcatatgcatgctacctgccttcaattattggagcaaaatttgcagccccgcatgcacgctttagatgttggctcangaactggatacttgactgcttgttttgcgataatggttggaccacanggtcgggctgttggtgtcaaacatattcctgaattggttgcttcttctataaaaaacatcgaaaaaagcgctgcagctccactgttgaaagaaagttctctctcngtgcatgctggcgatggaaggcaagggtggccaaaatgtgcaccctatgatgctatacatgtcggggcagcagcaccggaaaatacacagc

SEQ ID NO: 196748 - DNA, 458 bp, Gossypium hirsutum
ttaagcaaccctatccattgatctgtggccatgtttaaattgacagaaagggcatctccttcaacttcgatcactacaaaccccagatccatgcccaactgtatactttgaacgcatgcaagagcctccgccgctaacaccaaggtttattttcacaaatgggttcttcggtggccgccacttttccagctctattttttaccaggtaaaccagtccataaactccatgtataatactgaatctggccaaatccaattcaattgatgccatatttcttttgtcatcggacaatcacgcgaatcatgttctcaggattccacctttcctgcgcatcttgggcatattgttgtatttgttaatcttttatactttagattacatagagtaggattttttttttgagaaacaccaaattgtaatcttcaatttcaatggtagattcaagccccataatttc

SEQ ID NO: 196749 - DNA, 405 bp, Gossypium hirsutum
cccacgcgtccggtactcccccatgcgccgttcgaagaaccagccgctcagagacctgccgacctctcgcccaactccgatggtagcggagtgaccgacagttcggcaatcaggtacctcatttccctctaatctcttattttttataaatatatatacttatatatgtattaataacaaaaacaaagaacaagaggaagaagaacgattggaaaaagaacagaatcacaaagagagaaaaaagaaaacctttgttgtattgcttttcttttttctttacaatctgtgtatgtgtttttgtattgaatcccccatttacagattctcgaaaatggctttatatagccaagataaaacaaacaaacattacaatgaaatatgtatttttatttgctgttggttttt

SEQ ID NO: 196750 - DNA, 968 bp, Gossypium hirsutum
  unsure (1)..(968): unsure at all n locations
ctccctttgggttctggggcctcgccacgtttaaggtatcnataagcttgatctcgaattcagcacgagggtttatcttttcactcactctgttggctaagctgcttttctagggttcatttatctttcgcctccctctcttttcttttttcaatcccctccttctttcaggtaaaatgcaacgggcagttcgagctttttcggtgcacggaaatactgtgaaaaatgcgatcttgcatcgcattcgggtggtcaatccggttatgcgacccgttatgttttccagatcacttacatctgctagtatggaagaacatggcttcgagagcaccactatttcagacgttttgaaagccaaaggcaaaggtgcagatggatcctggctttggtgcactacggatgactctgtgtacgatgctgtgaaatcgatgactcaacacaatgttggtgctctggtggttgttaaacctggagagcagaaatcaattgcgggtatcatcacagagagagattatcttaggaagataatagtacatggaagatcatccaagtcaactaaagttggggacatcatgactgaagagaacaagctcatcacggtcacacctgagaccaaagttctgcaagcaatgcaattgatgacagaaaaccgaatcagacacattccagtgatcaatgagaaggaaatggtaggcatggtttccattggagatgtggttcgtgctgtggtgagcgagcaccgtgcagagctggaccgcttgaatgcttacatacagggaggttactagatgatgatgatgatgatgatgatgatggaatatggggtatgtttcacttgttggacttaagcaagcaagcaaggggagagcttgcaaatatgctatgttttcgtggtttttctgtgaatatgcaagtgatgttggaataattaccatgtggactaagtgtttgacaataatcattctcat

SEQ ID NO: 196751 - DNA, 490 bp, Gossypium hirsutum
ctctcgtgtccgcacgatcaaaaaattcagagatgcattagtcaaacacacaccagaccggtgcagcctcagcacgacaaaagggctcgaggagaaggagcttttggcattatccgcgaacaaagacctttccttcaactacacaccggttcgcacacatgaagagattcttatttggaaacaagctccatctgattcaacgagaaagctcccgctttcagtcccgacaacatccgcaaaacaaagggacagtgaggagaaaactttggttggtgtcggaagatgatgtagttaggttttctgccatttccattgcccagtgtacattcttacagtataattggaggtgcagggcagtttggatttattttttggatcctagccctgcatgattcaagggtaagtttgaagaccaaaactagtgtgaatatttttgagggtgtcattttaatgttcaagggaaaaccccttttgtgaatctaaaaacctt

SEQ ID NO: 196752 - DNA, 602 bp, Gossypium hirsutum
aacagaagccagcttgaaactcactgatgatggcatcgcatccccacttcatatcgtatttatttctttgataatcactttcgatttgcctagataagatcaaaactcgcatttaaagcagatctctcttacactctctcttgttcaatttctttatatgatttaacttcacaacacacttgtcactcaaaaatcacaaaaactcagtgaactcagtgaagttactttataaaaaaaaatcatgcccatgtttgattatgttgaatttagtgtgtagtgtgaaggtgattgtggcttgaaaacagtattcataaaaggaacaaaaaaaaaaagatggggagggcaccatgttgtgacaagaaggggttaaagaaagggccatgggcacctgaagaagatgagatccttacaaattatatcaagaaacgtggccatggaagctggcgatcgcttcctaaacttgcaggtcttcttcggtgcggcaagagttgcaggcttcgatggacgaactatttaagaccagacataaaacggggtccctttacccttgaagaggagaagcttgtcattcagcttcatgccattcttggaaataggtgggc

SEQ ID NO: 196753 - DNA, 786 bp, Gossypium hirsutum
ccgatggctggattttggcggctatgagaataagatgaataaaactgctaaagcgttggatgaaatttccgggggatggctagatgaccacagaaagggtggacattgggatgaaaataaaaaggagaaggatttcatggatgtaatgaactctgttcttaaaggtgcaagtcttgcaggttatgatgctgacaccatcaacaaagccacttccctgaatatgattttagcaggcagtgacaccacaacagttactttaatatggggtctttccctaatgttaaacaaacctcatgtactcaaaaaggctcaagaagaactagacacccatattggcagggataggtttgtgaatgaaacagacattggaaaattggtgtacatccaagccatagttaaagagacattaagaatggatccacctgcacccctttcagcgccccgtgagctcagtgaaagttgttccattggaggctatgacatccccaaaggcactcggttaattataaaccttcacaagatccaaagggatcctaaaaaatggccagaaccatcggaatttaagcccgagaggtttctcactacccacaaagatatcgatgttaagggtcagcattttgaattgatgccctttggtagtggtaggaggagctgtcctggtacatcgtttgcacttcatatgttgtacttgaccatgtctaatttcttgcacgccttcgatttctcaacgccatccaatggtttgattgacttgactgggaccgatggattgaccaacattaaatc

SEQ ID NO: 196754 - DNA, 465 bp, Gossypium hirsutum
cccacgcgtacggtcctttgaaacttgaaagcgaaactctcccttcaatcattattcatggaccagttcctttataagcggtttttcattttctcaattgagctccccccctcttctctgatggaacaggtaatggcatcaattcctgattttgaaatggctgaacctggaatttcgaaagataatagtgcggaagcggagcagttcaaattccgggttgatgaaatctttcaaaaggttgacgagcttgagcaaaaggtgaatgaagtggaacaattctacttgagttcaagtaaaaagcaacagagcagttctaaaggaagctccatgggaaaggaacgagataaggaaagacaagttccaagcattaaaaagcagcaacaagatgcgtcacgacgggaagctgctgctgcaaagagaatgcaagagcttatgcgccaatctggcacaataatgcgtcagatc

SEQ ID NO: 196755 - DNA, 797 bp, Gossypium hirsutum
tctacgcgtccggaaagcaacttttagatgggggcatggctgtcatatgatcgtatggttgcagtgctttcaactttcaatgtggcaacaattgcagcaattaaattagttagattgacgagcttaacacgatgaagcggagcgcctcggagttggctcttgaggagttcagcaggaacactatgagtaccaccaccatccctgcaccctctgccttccctgatttcgctcttcatccgcccatcgcccatctttctaattctttccacttcactgaattttccggagatgcagctgagcttagccctcaaacacatgtattattgtcacagacgcttacctcacaccttgattctcaatcatccttctgcggaaatgagtcgtggggaagtacagtgtgtgaagggaataactcaaactataggagtagggagaatgaagttagaggagctacaactccttcctctgatcatgatcagtccgatgatgatgacgacgatgtagaagaagaagatgatgatgatgatgatgaagatgaagaaggaggagaaggagaaggagaagtagaagaagcagatgctggtcagtctgaacagagcttagacccctctcatttgaaacgcctccgcaggaagctttctaatagggagtctgccaggcgatcaaggaaaagaaagcaagagcaactggcagaacttgaattccaggctgaacaattaaggggagaaaatgattccctatgcaagcagcttaccaatgctcatcaactaattcgtgatgttggcactaacaatcga

SEQ ID NO: 196756 - DNA, 725 bp, Gossypium hirsutum
atcaaaccctaatattttgttcctttatttgagaattcttctcttcttctatcatcaggtgtctcctaccatcgtccatgtcttctctctctcgtctctgcaaatcaattgtgtttttcttcccttctcccaccgccgtgtccgctggtttttcccggatccgacccgtatccgacacggaaattatggtgtctggtttaataaatgcaaaccctattgtgtacgagaagaaagagcggcgggttcgtaacgaagcagctgtacctgatgaatacgctgttgaacctattgaccaactagaaattttttatcatattagagatataaaggatcctgaacatccctattctttggaagagcttaaagtaataactgaagatgctattgaagttgataacgagcgaagttatgttagggtcacatttactcctacggttgaacattgtagtatggctacggttattggtctttgcttgagagtcaaacttatgaggagtcttccttctcgctacaagatggatataagggttgcacctggaactcatgcaactgaagctgcagttaataaacaactgaatgataaagaacgtgttgcagctgcgctagaaaaccctaaccttttggatatggttgatgaatgtctggctccatcctatgcttgaattttttattattaccagacgtggtgaactagatttgtttttcttcatacaataaactttact

SEQ ID NO: 196757 - DNA, 761 bp, Gossypium hirsutum
  unsure (1)..(761): unsure at all n locations
gtggagagtctctctctggtctttttttccccaaattttttttatttctctttcttttaatttcttcatttttccctaattaggggtttttttttttgttaatttatgaactttttagggactttatttcaataaatttaccaagtttctcaattacttagatcgaaactcgaacgagagagaaaaaaaagtagcgttcttttctcaacagaaggaaaaagaatggagtcaaattcatggaggtttcgattttccaattcttcttcgtcttcctcaaggcgtcatcaatctcgatctgatccgtttctgggtggaggatatgaagaatttgatggagacgaggatttcaaggcggagtttttatgtccgttttgcgctgaggatttcgatattgttgggctttgttgtcacatcgatgaggaacatcctgttgaagtaaaaaatggggtttgcccggtttgcgcgaaaaaggtcgggatggatatagttagccacattaccatgcagcatgggaattttcttaaggtgcagcgcaagcgaagattacgcaaaggtggatccaatttgacattttctatgttgagaaaagaactgagagatggaaacttgcatgcccttctcgggggatcttcatgctttgtttctccccccaactgtcgaagccgatccattattgtcatcatttatgttcaatccacccacagccgatgagcctntaagctttcagtctctctctattgctgaatcaagtgcagacaact

SEQ ID NO: 196758 - DNA, 393 bp, Gossypium hirsutum
cccacgcgtccgacaacttccatttaagtatagctgctctcgatagatcattcaaccaagcaaagaaacgcgggctgaaagtgcgtggggttataatatcaaacccatcaaatccggctggcaatcttctaaaccgggaaacactttacagcctgctagactttgccagagagaagaacatccatatcatctccaatgaaatactggctggttctactcttggaaacgaagaattcgtgagcatggcagaaatcgtccaccaggaagatactgacaggaaaagagtccatataggatacgggttgtcaaaagatctctctcttccaggtttccgggttggtgttatctacacttttaatgaggatgttctggctgctgctagaaagttatcga

SEQ ID NO: 196759 - DNA, 548 bp, Gossypium hirsutum
cccactcttccgcggacgcgtgggcggcgacgcatcgttcaaatttctgccattgattaaaatcatcagggaacttacgattttctctatttgccaatagattttaagaataagtgcaatgtgggctatgcctttatcaatatgctgtctccttcacacattataccatttggcggggcatttaatggaaagaagtgggagaagtttaatagcgagaaagttgcttctttggcatatgctcgaatccagggaaaggcagctcttgttgcccacttccagaattcaagcttgatgaatgaagataagcgctgccgcccaattctctttcactctgaaggtccagatggtggcgatcagaccatcccagagcatttacactctagtttgaatatcatccgccagccaaacgggttaccctcgggtgattcttcaagtagccccaaaaagaaagatgctggcgaggagcttgaaaccttctagcagcttaatatcaagagattttgcccttgtaccaaattcatggggcagtgaaggctaacatatttcgt

SEQ ID NO: 196760 - DNA, 608 bp, Gossypium hirsutum
gtaaaagggtcgtcagctcccaagccttccattgcttttaagcccaatgatgtacgcaagaccacccaacttccttcagggggcaaacttgctttcagcttgaaacagaaatcaaagcttgtggcacctcctgttaagttggatgcagatgaggatgaagaggaccaagatgcagggaggctaaatgacaaaccggttaaaaagcaaaaattgggtcgatcagattcctctgaacaagcttcgaaacaagtggatgttgcaccaacttccccaagcgatctcactgtgaagaaagttgccgacaaacttgctagttttgttgccaaaaatggaaggcagtttgaacatattactcgtcaaaaaaaccctggcgacacacctttcaaattccttttcgatgagagttgttctgattacaaatactatgcataccgccttgccgaagaggaaaaagctcttttagagaataaggaagaacaaactcctcaaagcggcatttcagcttctaagtccacaagcagctctagtagggcagctccgcagcaatcaagttatcaaattcctgcctctgctttgtatgagaatgaggaacctaaatcttcacggaa

SEQ ID NO: 196761 - DNA, 753 bp, Gossypium hirsutum
taatgaatactaatctagttcagtctagtggcctgcatagtggtgggatgggaatagttggtttaccatctcctgcaagccatatatctccagatgtgatttcaaagaatagtgtagatacaactttatcaccggttccttatgtgcttggccggggaagaaaacgcagtgcagcattggagaaagtagttgagagaaggcaaaggagaatgattaagaacagagagtcagctgcaagatcacgagctcgcaagcaggcttatacatcggaacttgaagctgaagttgcaaaacttaaagaaatgaatgaagaattgctgaggaaacaggaagaagtgatggaaatgcagaaaaatcagatgctagaaacacttaatccagcatggggaggtaaaagacaatgcttaagaagaacactgacaggcccttggtagagtttgaggaactgctgattgtaaaaatgttgctttgatacacaatcttggtcggcgctacagtttaatgattgggatctgcatccattatctatatcttgatactgcttatggctagatagctgtgaatatagtagcaaagggttttgagttgtaagttatgaacttgacagtattagtttgtagttttgattttgttattggcttgatctctgtttgcctatcatgatctaaccttgtcaacaagggcgggcttgtaagataactagatggatgctccaatatggtctttatgctttgcctacagacttggtcagtt

SEQ ID NO: 196762 - DNA, 430 bp, Gossypium hirsutum
ggagtcttctccaaaatcctcacatccacccgcccccgcgtccgcaccaattgatgccatctgtagtggcctgccttgtttctaaaaaattagggaacaggattgctgacaatcactgggaacttagagattttactgcaaagttagttgcttctatatgcaaaagatttggccatgtttataacactcttcagacgcgtcttacaaaaactttgctcaatgcacttctggacccaaaacgggcattgacccaacactatggtgcagttcaagggttggctgccttaggaccaaatgtggtccgtctccttattctaccaaatcttgagccataccttcgactccttgaaccagagttgttactagagaagcaaaagaatgagatgaagagatatgaagcttggcggatttatggtgtcttgctgcgtgc

SEQ ID NO: 196763 - DNA, 379 bp, Gossypium hirsutum
aaaaaactcaagagggccttattctttttctctgctggggctcctgcgccgatcatgggtccggtcatcggactgacgtcatccgccgcgaggtcgctgtccagaaaatcgaaaaggcgcaagtggaggcactgactaggactgtggagtaggtggccgactggcatgggggatgggacagaggtcagaggcggcagcagctgatttagggtttttttgtttcacctttgattcgggctattagggttaatttgggcttggggtttaaatttagctgggtttagctatttgggtctgggtctgatttgggctttttgggttgcaattttagattgtaaaaaaaactgaacttttaattaaattttggtttttgtttatt

SEQ ID NO: 196764 - DNA, 460 bp, Gossypium hirsutum
cacagaccaggaaatccccaaaaccctaaccctatagttgcaatttcgacgtttctcgctcggaaaagaaaaagcgtcagaaaaaaaaccaaacccagttctgaaaccaaagaacccgaccaagatttcatggttaaaccctagaccaaattgtataacccaaacgacgatactcctaaagcgtgttcgatgcctgccgatggggattctatggttgcaagtattgctgcttctgctgacccgcttgcactctttaacgatagtactcctaaagaggggttgagaaatgttgtgttgcctgatggttgggattctatgttggaaaagaagattgtagtgatggaaatggaaaggaaggaatcggatgaaagcttgtggtgatgagaaaaatgaaggtgaagttcaagtgaagagaaaaaagaaaaagaaaagaaaaagaagaagaagagaagaagaagaa

SEQ ID NO: 196765 - DNA, 838 bp, Gossypium hirsutum
ccgcgcgtgcgcctaattccaaggtgggggctcctgctcgtgttggtctggttgcgcctattgatgtggtcgttccacctggaaacactggtcttgacccatcacagacctctttcttccaggtgctcaatattcccaccaagattaacaaaggtactgttgaaattatcactcccgttgagcttatcaagaagggtgagaaggttggttcttccgaggctgcacttcttgccaagctcggaattagaccattctcatacggtcttgttgtcttgtctgtttatgacaatgggtcagtctttagccctgaggtgcttgaccttaccgaggatgacctgattgagaaattcgctactggtgtctccatggttacggcattgtctctcgccatctcgtacccaaccctggctgctgcaccacacatgttcatcaatggctacaagaacgtattggccgttgctgtcgcaactgagtattccttccctcaggctgataaagtgaaggagtacttggcggatccaagtaagtttgctgttgccgctgcccctgttgctgctgctggtggtggtgctgctcctgctgctgcccctgccgaggaggaaaagaaacccgaacctgaagaagagtctgatgacgatatgggattcagtctcttcgactaaggtttatttgtgttaaagcataaacatataggattgttgacaggttacattatctgctttattgtttctcatagttctcgttgatgtactttgattgctctaagttttggatgatttgtgaagtcttaatttagtcttttcgcctgttctatctacatctcagtttccattttgtg

SEQ ID NO: 196766 - DNA, 634 bp, Gossypium hirsutum
gaacgagtgggttatttgtagagtattacaaaagagtcccaatggcacaaaggtaccatatgtcaggtttgcctccactaatggatccctcgccgcacaccagcgaaacatgaaccgtggtgggcgccggcgagacgtcaaacgtgacctgcttctccgatccaatagaagcaccgtagagctgtggtaggaattgatggacagctttcgacactttccttgcaccttgttcatcatcctctgtgaattctcttcaaaaagcttcctacaccacctaccaaatcacgtcgatcatgggaaacttgcagtacccggattggttttggattcaacaaccgttcttattaaagacattaattctaagcctaagattttcgttagaatttatattttaactgaatatattcttatatatttatcatgttatttatcatctatatgtattaatttatctatttatgattcttttggaatcatttacatcgatgttaattacatgtattaaaattattttatatttaattatattttaatatgtataatttaatgtatgtaacaatattttatatatgtgtttatttgagattcattttgtatttgtataattttatgattagaatatattatagttaat

SEQ ID NO: 196767 - DNA, 1069 bp, Gossypium hirsutum
  unsure (1)..(1069): unsure at all n locations
ctttttctctatccattttctatccggttatcgnacactgncatttactgtctgtaattcggcatattcaggaacactatccaccaggtatatctcctcccttttcttcattgattctctagctagtatatgtgttaaactatttgttgctcttgggatatattcaaacgttaagtttctagatctggacattatttgctggatatcatgtatatatgctctgatatgtgatttgtcctctctgttttccttgcatttcttgatgattgataatgaatcaccttcaataatgatcttggaccatttcatctctatcccgatttggactgctctacggcaagcgagtgcctccgcggcaaaagctgagcctatctggtgatgaatctctaagcaagatattagggcctttccttcagtgtttctaaccactatccccgaagccgcttgactagatctttcatcatatgctgcgtcaaaattaatcttcactgtctgattagattgtccataacgcgcaacaaaataatcagcataaggaaatgttattctgagcaaacacctagggcattcccggaagagatcgtccatcgtttccactactgattcacaccgggggcaaatgacattagtaattagctttttgtattgcatgttacctcgtgtagccaagtaattcaaggaggttttccaaactgtaatcttaattttggaggggggatttaatagccatagttttttatagaaactacttagtcagtttttaaagcataaacactaggatcttccgacctttgtaatagtttataggcactacggacaaagtattctctcgagagttcaccattccaagccagaaaatcatcacgaggtgctttcgcaagaggaatatgcaaaatcttctctgctacttcattcaaaaaggtattgacaatgttctctattttccagcttctgttattaacatcaataagctcagcaactttaaaatccctttnnnntaataatatatnannnnnnnnnnnnnnnnnnnnnnnnnnnnnnnnnnnnnnnnnnnnnnnnnnnnnnnnnn

SEQ ID NO: 196768 - DNA, 459 bp, Gossypium hirsutum
cctttgtggaggacatgaaggttttccaaagggagaggttaaacggccactatggtgtaactgcatttgttatagggaatacactgtcagctatgccattcctcataatgataaccttcatctctggaactatttgttactttatggttcgtcttcacccaggctttgaacattatatgttcttcgtgttgtgcctttatgcgagtgttactgtggttgagagtttgatgatggccattgccagtatcgtccccaatttcctcatggggatcatcacaggagcagggattcagggaatattcatgcttgtttctggctacttcaggctcccaaacgacatcccaaaacctgtgtggcgttacccaatgtcctacatcagcttccgtttctgggctttacagggacaataccaaaatgatctgaagggcctgttggttgattatcaagtcgacgcggccg

SEQ ID NO: 196769 - DNA, 572 bp, Gossypium hirsutum
gcctccagcaagtcaagcaccacatcgtagtccaaactcagcttccccaccaccgatctcatcatcttactaccctgcagctcctcacatgcttttagccctttcaggtggtttagctggtgcattagacaacaaccaccatcaaaataactctcatttacaaggcttaggaacccttaccccaaacaccacaaatctgggttcccactcaaagaaaagattcagaacaaagttcactcagtttcagaaagataagatgttggaattcgctgagaaagttgggtggaagattcagaaaagagatgaacaagctatccaagagttttgcagtgaagttggggttgatagaggggttttaaaagtttggatgcataacaataagaacacttttgggaagaaagatcaagccattaatgaaggagaaactggtattaacaacaatactgagaatggactcatccatgaataccaccatcaccacatcaacatcaatggtcaaaatctcaaccatcacttttaaacttataatgttgctaatgttgaaataaatggctcttcttccttttaaaaca

SEQ ID NO: 196770 - DNA, 470 bp, Gossypium hirsutum
aatgctcaactctactcatcagctgtcacaggagcggttcttgcaggatctacattcatttccattgcggcaggcgatcgattgggtcgaagagttttactgatcagcggcggaatacaaatgattatatgtcaggctatagttgccataatcttgggggtgaaatttggggacaaccaagaactatcaaaagggtactcaatattggctgtgatagtgatatgtctgtttgttttggcatttggatggtcatggggtccattagggtggactggaccaagtgagatattcccactggaaatcagggctgcaggccagagcattacggttgctgtaaatctcctcttcacattcatcattgctcagtgttttctagccatgctttgccatttcaagttcgggatcttcttgttctttgcatcgtggatcacggtaatgaccatcttcgtttactttttcttaccggaaac

SEQ ID NO: 196771 - DNA, 513 bp, Gossypium hirsutum
gatctgaaaaatcggcatctctttaggggaaaaaaggggaagaaatggcaagagcaggagggataacgaacgccgttaacgtagggatagcagtccaagccgattgggagaatcgcgaattcatctctcacatttccctcaatgttcgtcgcctctttgaatttctcctccaattcgaggctacaacgaagagcaaattagcatccttgaacgagaaactggacaccctggaacgtcgtttggagcttcttgaagttcaagttggaactgcgtccgctaacccttctcttttcagtacgtgattcatatttaaaagttgtatttgtttccatatctttgtcgtgattttgttcctctcctagttttcgacgttgtaggaaaacaaagttttcttctttttctgtttgtctatataataaccttggcgattagtgaacttttgctcttcgtttctttcgaatctgtcatatttgtaagacattagcatcttgctgttgaatttttctttcattc

SEQ ID NO: 196772 - DNA, 772 bp, Gossypium hirsutum
tctcaaggttgtttttcttttatcaactgttccaatccaaactcatagattcaatggccgaggatgacgttgtagctaaggatcgcaaaatcctggtggccgtcgatgaaggtgaggagagcacgaacgctctctcatggtgcctcaagaacgtgatttctcacacttcgaaagatacccttgtcctcctttacgctaaacctccacgagccgtatacacttccctagatggcacggggtatttgttttcttctgatattttggccaccatggacaagtacagcaacgatgtggcggattgtgtcatcgagaaggccaaaagggtgtgcagagagcaaggtgatcctgaggttaaagtagaggtgataatagagagcggtgatccaagggacgtgatttgccaggttgccgacaagatcaatgctgatgtgcttgttatgggaagccatggctatggcctgattaagagggcattcttggggagtgtaagcaatcactgtgcacaaaacgtgaagtgccctgttttgattgttaagaagcccacatgttcgtcttctgcaagtggaaccaaatgattgaaatttcggattacatagtcatactttgctttgtttacgtacaaatttcactttagtgggtatgtttctgttcttggttttcttttctcatatctttgtctgcttcattactttgttgtataaggttttatttatctctgaatgtacttttcatatttgaattaaaaagagtcccattatacattattgggaat

SEQ ID NO: 196773 - DNA, 535 bp, Gossypium hirsutum
  unsure (1)..(535): unsure at all n locations
cccacgcgtnncggtgtttatatttccttctctcttttttntcgttttgcttcagcttatgtctctcaactaaaaaaaaaaatgactgctcaaacagacaaagaggtcgaagagatcctcgccgctcatctcgatcaacagaaaatccattctgagcaacccgaacaacctgtagttgaagatgacgacgacaacgatgacgacgacgatgatgacgatgacaaggatgaagatgatgccgaaggccttcatgacgtagacggaactggtaggtcaaagcaaagcagaagtgaaaagaagagtcgtaaagcaatgttgaagcttgggatgaaaccgattcccggggttagcagggtcacaatcaagaagagcatgaattatcttattcgtcatctcgaatccagatgtcttcaagagccctgcatcggatacatatatagtgtttggagaggctaagattgaggacttgagctcacaactgcagactcaagctgctgagcagtttaaggctccggatctcagccatgtgatctcc

SEQ ID NO: 196774 - DNA, 599 bp, Gossypium hirsutum
  unsure (1)..(599): unsure at all n locations
ggaatggttcagggaagagttaacggaagctaatcaaaccattgctcctggctcagcagatgcttacactatcaatggtcatcccggagaaacatatggatgcagcaacgatacaacttttgagatgcaagtagattaccagggcctttaccttgttcgcgtaataaatgcagttgccaatgaaacaatgctgtttgacatcgaaaaacacagattgacgattgtcggacaaaatgggacatataccaatcgttcctttacaagttctttaaccctagccccaggccaagttattgacgtcttgttgtgtccaaaccaaaatgttggccgttattacatcactgctcgatcttcctccggcagacatattaccaatggaattctgcgatataccaccactactactagtttttaatataggtaaatagtttcgtccgttgctaanaaataataataagagtaatgttgaaataagagattaaatataatgtgtgtatgttcctttatatttgttgtgatcgttgttgtttgtttgaacgatgtgttttgaatgctgtaatgggaagatgttgtttaactaaaatgtacaatatttattc

SEQ ID NO: 196775 - DNA, 269 bp, Gossypium hirsutum
aaaaaaagaaaaggggggggggagaaattctctctgggcgccccacctccggcagttggaccaccggccgtccgtcgccggcgaccgccgtgcacggcggccagaggcgcaaaaatggcccattttaatacttcggctctccccacctcagatctgagtctcaaacgccaaaaaaaacccacggctggtgaaaaagaatgagaaaaccaatcggttttctttttttcgatcgctcaaaaaggttgctaggaggtcaacgttgttggtgc

SEQ ID NO: 196776 - DNA, 677 bp, Gossypium hirsutum
  unsure (1)..(677): unsure at all n locations
atttttgttagcaatgtgtcagctgacttggacccggagaagttgcttgagttttttaaacagtatggggaagttgaggaaggtccattggggctcgataagcaaactgggaaaccaaaggggtttgccctttttgtatacaggtcggttgagagtgcgaggaaagcgttagaagagcctcataaaaattttgaaggtcatgttttgcattgccaaaaagccattgatgggccgaaatcgactaaagggggttacggaggaggtacttccggtgggcatcatcagcagtaccaacagcatcagcatcagcaaggacatcagattcagtctcatttccatcatgctaagaagggaaagtactcatctggtggatcagagactggtcatttgatggctccatctggacctactgcagttgggttcaaccctggagttgctgctggtgggtttaaccctgctgctgctgcacctgctttaaacccagcgcttggacaggctttgactgcattgcttgctggccagggtggtttggggcttggtaatctgcttggagggcttagtggcgcccctgtgaaccaagggacacctgctgcagggtatgggaatcaggttgctggaggctatggagtgcanggtggatatcagaacccacagatgggtcanggcggtgcttgtaa

SEQ ID NO: 196777 - DNA, 868 bp, Gossypium hirsutum
  unsure (1)..(868): unsure at all n locations
ctacaccgtaattatgatttactcctccggcataggctacacatcgtgagggaggtactgttggtggttaaccattgcctcttggcattgcctggtgttgaaaancaggaagtgaaacgtgttttaagccatccccaggcacttgctcaatgtgagatggcacttaccaaaatgggcattgttagagtcagtgctgatgattctgctggtgctgctaagatagttgcttcgagtggaagaagggatatgggtgcaatagcaagtgctagagccgctgcattatacgggcttgacattcttgcagaaaaagtccaggacgaggatgacaatgttaccaggtatttggtactcacaagagaacccataattcctggaactgacaggctttataagaccagcatagtttttactctagaagaaggtcctggcatgctatttaaggctttggctgtgttctccctaaggggtattaatttgtcaaagatagagtctcgaccacaaaaagggcgtcctctaagggtggtcgacgattctaacaaagggagtgccaagtacttcgactatcttttttacatcgactttgaagcttctatggcagaaaaacgtgctcaaaatgctttggaacatttacaggaatatgccagatttctccgagtcctcggttgctatccgatggatgaagttctatagatggattaccccctgccctccaagggagagtacattttgtcaatatatttatttttctgtcaaaccancaagatggtgacggctcaacccccacaggcaatgtacatacaagtcctgctgaaaatggatgaagagtttactggaacatgttgaaagctntactttattaattcaaatt

SEQ ID NO: 196778 - DNA, 471 bp, Gossypium hirsutum
agatgtcagtgatatcgtgcttttggatgtgtccccgttgtcacttggtctcgaaactcgtgggtggtgtcatgaccaaaatcatcccaagaaacaccacacttcccacctccaaatcggaggtcttttcaacagctgctgatggccagacaagtgttgagatcaatgtactccaaggtgaaagagaatttgttcgggacaacaaatctcttggcagcttccgactcgatggtattccaccagcaccacgtggtgttccccagattgaagttaaatttgacattgatgccaatggcatcctttctgtaactgctgtcgataaaggaaccgggaagaagcaggacatcactattactggtgccagtactttgccaaatgacgaggttgatagaatggtaaaggaagctgagaagttttcaaaggaggataaggagagaagggatgccattgacacaaagaaccaagctgatt

SEQ ID NO: 196779 - DNA, 429 bp, Gossypium hirsutum
cccacgcgtccgcccacgcgtccgatctctttctttctttcttccttctcaaaccctaagatttcacccaaattgtcgattcgctttctcaaaacagcagctaacatattcaagccctgatagaagatttttcagccttaaggtctcttttcaactccgattgcaacgaagcaaaagaaactttcggcatatttgcaagataaggcttattcttctctttttcttttatttatctttaaacgcatatgataaaaaaaaagaaaaacagatgaacaattaatagaagatgaaagaaatttaaaaaagaaattaggaatcacttaaagagaaatattttcccctttttctattcggtattcgtaaaaaatatagtacattcagtcctccccttttatagcttaaaaatggaaattaaattaattaggaaaa

SEQ ID NO: 196780 - DNA, 686 bp, Gossypium hirsutum
cccacgcgtccgcacccactccttgtccaaggatttgactctgactccattcgaaagtctgactctgttggacaagtttctgtggaaatggcaaagtcacttcctagagaaatgctgattaatctagtgaactgcttggaagcttctgccatatgtcttgtatgcaaagatccacctgatgaccccgttgttaccatgtgttgtcatgttttctgctaccagtgcgtgtcggaacatctgactggtgatgataatacatgccctgcacgtggatgtaaagaacaacttggcgctgatatagttttctctagaagtactcttaggatctgtattgcggatggtcataatggtagtcttgtgcatcctcagtttgaaaattcagtgattttacaggatgagtacagttcatcaaaaatcaagactgtcattgaaattctgaagtcaaaatgtttattaaagaattcaagtctggaatcgcagagtgccattggatgcagtgaaacttctttgtcctctgagcagacatataaagaaactgaccattcaggcattagagttgtaaagcgcacaacagtttattccaactcactagctgaccgaccgacgaaagcaattgttttctcacagtggactagaatgttagacttagtggagcactcactacgtaatcatagtataaactatag

SEQ ID NO: 196781 - DNA, 431 bp, Gossypium hirsutum
gagagctgtgtggcatcgattattgggtatttggatcctccacaaatatgcaagttggcggggttgaacagagcgtttagggccgcttcttgggctgatttcgtttgggaatcgaaattgccaccgaattatgaaacccttgtcggtgaagttttgagctttgtgcctgagaagttgggtaaaagagacatttatacgagactctgtagagttaatacctttgatggtggcaccaagaaaatatggctggataagagcacaggcggtgtttgtatgtcgatatcttcaaagggtttacagataacagggattgatgatcgaagatattggaatcatattcctactgaagaatctaggttcggttccattgcatatcttcagcaaatctggtggtttgaaagtgatggagagggtggattttcgttttcttc

SEQ ID NO: 196782 - DNA, 493 bp, Gossypium hirsutum
  unsure (1)..(493): unsure at all n locations
gctttttccgttaaaaaaaaccctaaaattttttaattttctctcaacctccagccgtatcgctaatgtcctgacctccaatggcgcgcttgtaaccggcgaagcaaggccctccaacgaagcggtacgtggagatgtgaagagggcgttcatgggcgtgtcaacgtgaaatatgggaggtggaagcgtgggctgaagcaatggcgtgcgtagaggctggcacgaaggcagcagcaacgcaagggggaaagggaaagggttctgaaaactccaaaaacctgggcctactgggcttggttcatttcattcagtattaggccattgtaaaactttttgggcctgtttaaaatgcaataggtttgtattttgggccgggttaaatatgggttttacacttctatcagttaaagtgacattaaaatngcgatgttaagggaaaccattgcaactagtttaatgaattcatatttataaaactatcttgtatcataac

SEQ ID NO: 196783 - DNA, 536 bp, Gossypium hirsutum
cccacgcgtccgcaaactctcaagtttttaaagacaaaagtgccatttctagagttccaaatgtcagttattaggacaagtgctaacatgattatgaaacaactcctccatcacccgccgttatctttcatctcattctccggtcggccgcttcttccctgttcccgtaaccccctcatccgactgacgcccaatcgtggaatcagttgtagtcccattcgttgcgccgcacccgacgccgatgccgacagaaaagtctccgctcgtctctcgcaaatgcagcagctccttcaggaagcggaagagcgagccagctccgccgggaatgggcccactcctcaaatcactttggatcatgttacggtgagttttgcaaggagtggtggccctggtggtcaaaatgtaaacaaggttaacaccaaggtggacatgcggttcaatgtaaaacaggcttattggcttagtgacaggattagagagaggattatgcaaatggaaaagaaccgtataaacaaggatggagaagtcgtgatatc

SEQ ID NO: 196784 - DNA, 700 bp, Gossypium hirsutum
gcaagggcgcaggttgctgctgcagctggtcaccctcagattgcagctgactcccttgctaaggtgcctgatatccagcacatgcctgccactgttgccactcttgttgctctcaaagaacgtgctggagatataaatggtgcagctgctgtgcttgactctgcaatcaaatggtggaaaactgctatgaccgaggacgaccagcttagtgttattatgcgagaggctgcatccttcaaactcaggcatggcaaggaggaggaagctgcccacctatacgaggagcttgtaaaaggtaacggaaatatagaagcattggttgggctgataactacagttgctcatgcaaatgttgagaaggctgaagcctatgagaagcaattgaagccattaccaggtttgaagggggctgatgtggatgctttggagaaaacttcaggagcaaaacctgttgatggtgcttctcgtgccgggcttgctgaagctcaagaggatggtaagaccaaggagaaaccgaagaaaaagaggaagagaaagccaaggtatcccaaagggtttgacccagcaaatccaggtcctccaccagacccagaaagatggctccccaagagggaaagatcaagttacaggcctaaacgaaaggataagagagcggcccaggtgagaagatctcagggtgcagtggttagagataagaacg

SEQ ID NO: 196785 - DNA, 451 bp, Gossypium hirsutum
gacagagacctgaaacggctcctccaccaccacctattcagtttccccaaaatgggttcgggttcatgggaggcttgggaggttttgcaccaatggcaactgctcgatttgggaatttcacactctctgctgcttttggtggtcttatcccatccttgtttaaccttcaggtccatggatttcctgatgcggctatgtttggtccagctgctggttttccatacggctttccaagttcatatcttggtggccatgcttatggataccatcatcaccaccaccaccatcatcatcgcaccgcacaaggccagcaggatcattatctgaagatcgctgtttctgtttatcattgtttgtgttatctttgcaatgatttaccaatagaccatatctgctatcaaagcataaattgctaacttattttaggagtgccaaaaaaaaaaaaaaaaaa

SEQ ID NO: 196786 - DNA, 470 bp, Gossypium hirsutum
ttttcgaagaagttccatcgatttcagtttagcattcataatgtcaggaagaggaaagggaggcaaggggttgggcaagggaggagcaaagcgtcaccgtaaggtcctccgtgataatatccagggaattacaaagccggctattcggcgtttggctcgtaggggaggcgtcaagcgcatcagcggcttgatctacgaagaaacccgtggtgttctcaagatcttcttggagaacgtgattcgtgacgctgtcacctataccgagcacgcgaggagaaagactgtgactgctatggatgtggtttatgcgctcaagaggcagggcaggactttgtatggattcggtggttaaatgtgatttagggtttaggttttagaatggtggtgtcttaggggggatttgaagtcttgctgtcaagaatgtttgagctttgggttagggattgtaattagggggtgtttacccgttt

SEQ ID NO: 196787 - DNA, 416 bp, Gossypium hirsutum
acgcaactcatatttatgaaagaggaccgattgttttgttagcaccaacctgggcaatcttcggggcggtgtcttgtcaccctggatagacacctccagagctgattaattttgtggcacgatgcagttcaagacacggttctccccccacttgcatggccaagacctggtcatagcccctttgaaggccctttttatgctcacgatctggacatgatttatgaagaaatggcttaaataatgaccaacgcgcaggagctagcaccacggaggcaagggctagatctagcttatgtgacacctgattcttctgtaactgccaattcacagtcagatcttgataatttgcttctggttcaggaaatgttgaatgacctggtgaagtggaaagctaaaattaagcaacagctgacaga

SEQ ID NO: 196788 - DNA, 363 bp, Gossypium hirsutum
ctaatgtctgacatgcaggtgactcagatgaagtctgatgggacacttgaggaaagtggtgaagcacgaaggcttcgaatatctttagaggaaatggcagatgaagtctagagctctggccttttgaaggaatgtgggcgttcctgaggatgctctattggtaactccagaaaattttaaagagaacagatggtcctggtcagacgtaaaatctctctctggcagccttcttctggcccttgatgctagtctggagcatgcactgttgggctctgtaatgtccatggatagatatgcagcagcagaaagcttttacaagcttgcaatggcatttgccccttgtccagatcttcacataatgtg

SEQ ID NO: 196789 - DNA, 476 bp, Gossypium hirsutum
gacgaacacagcggttggtgcggagctgacccatagcttttcaagtaatgagaacactctcacgattggtacacagcatgctcttgacccgttgaccacagtgaaggctcgactgaacaactacggcagagcaagtggtcttatccagcatgagtggcgcccaaaatccctcttcactatctctggagacgtggacaccagagcaattgaaaagagtgctaaagtcgggctggccttggcactcaagccgtagggaaaggtaatatcattgtttgaatgaagggagggctttacttttgattggtgaaaccggaagtctggaagactggggagagtaataatgtgctttgacggatttttcatgatcttggattaaaaaaataattgtgattggcgaactgaaattggcaatttgttatgttaaattcgctagggcgtacgttgttttttttttttttagaaaaacaaggcttcat

SEQ ID NO: 196790 - DNA, 552 bp, Gossypium hirsutum
gaaaaaaccatccagtcttggcatcttgactgttattacttctttgttgccggatatggcggggggggctggacaaccgacgtaagaagacgaaaaaggtacaacctggttgatgcagtatctaggaacactgttcaggtttatcctaaatgctggacttcaattttggtctcattggacaacaaaggaatgtggaacttgaggtcgcaaacctggtcaaagcggtacttaggccaagaagtctatcttagagtctggaacgacgagaaaagcttgtatactgaaactgatattcctccaaatgcactattttgtggcaaggccgttcaatcttagaacaccattaatgtcctcttggtgtaatctacagcagctaatttattttctgatttttttgttctttttttaggagggtgggactgtttaggaagggaaataagacttaaaaatatagtaaatttattgaggctagattttaaaaaaaaattatattaaatcacaataatgagtttcttttatttatcatgtataaaataatgtggtgcgtgccat

SEQ ID NO: 196791 - DNA, 1114 bp, Gossypium hirsutum
taagaatccatcaacagggggggtatgctgcaaatttagctccagctaaattagttgataaattgctaaatttttttgatagtactgcacaccttgttgtggggagtctgccaccacctgctccatcggcatcaaatggaaattttcaaggtaatgatcagttccaccaacaaactgggccaagagtatctgctagccaatcaacaatggctatgtcatctttgatgccctcttcttcaatggagcctataagtgattgggcaggcaggggggctgatggcaaaatgacaatgcataatagaagtgtttcagagccagactttggcagaactccaagacaggttgattcatcaaaggaagcagaagcatccactacacaagtcaaagcatcagggtcggtaggggcatctcgctttggttttggttttggctcacagcttctccagaagactgtgggattagtcttaaggcctcgctcagataaacaggctaagctgggtgaaaagaataaattctactatgatgaaaaacttaagagatgggttgaggaaggtgctgaacctccagctgaagaaccagccttggcaccacctccaaccactgctgcattccagaatggaaggtctgactacaacttgaactctacattgaacagcgaggtctctccttcgaatgggagcccagaattaaaaaatctaaccccagttgaacctgcttctggggtcccacctattcctaccatctccaatcaattctcagctcgtggacgaatgggtgttcgagcaagatatgtggacacattcaaccaaggtggtggtggccaagcaaatttattccaatcacctgctgttccctctgttaagcctgcaatggcagcaaatgcaaagttctttattcccattcctgcatcaacaaacgagcaaatgatggaggcaatagccgaaaatgcacaagaagaaaatggaactagtaataaccctacgacatccaatgcgaatgagttctatgaatctgccttgaatatacagaagtttcctagcgtggataatattacaaaaactgccaatggttttccacttcactcaagacgaacagcctcatggagcggaagcaa

SEQ ID NO: 196792 - DNA, 886 bp, Gossypium hirsutum
  unsure (1)..(886): unsure at all n locations
cggacgcgtgggtttctttttctttttttaaaaaaaaaatatctgtgtgaagaaactggggttagggaagatgatgcagactgagcagcagcctcagcaccaaaatcagttaacggttcaaaactctgggagtctcagctttagcagtcatttgtctaaggaagatgaggagatctcaaagtctgcgctttctactttcagagccaaagaagaggagattgaaaggaagaagatggaggttagagaaaaagttcagcttcagttaggccgtgttgaagaggaaacgaaacgtttggccacgattcgtgaggagcttgaagcactggcagatcctatgaggaaggaagttgctgtggtccgaaagaagattgatgcagttaacaaagaattgaagccactaggccacacctgccagaaaaaggaaagggaatacaaggaagccctgagggcgtttaacgagaagaacagganaaagtacagctaatacaaaattatggagcttgtgaccaaatgaaaaggtggaggttgaaaacctggaaaacttggtagaacctgatatcctgcctctatatttaagccttaggtgtgtttaactcataggctgtgtgatgtattaagggtacttcatattataatgatggtgttactggttttcggttgggttactgatgatgtatttccgttgtatttcatagcattgatgaacttactgattagaaaggaatgccctataacagttgtactanctctgtgatgattgctcttgatttatgctaactttgcctntaatnnntaaagttttgaaaaaaaaaaaaaactagggggcgtccattncctttgggggataacactggcgtttacatgatggaacactgtccatatcctg

SEQ ID NO: 196793 - DNA, 662 bp, Gossypium hirsutum
gagaaacacaagctatcatttcaaaagcaaaagctaaagcaagaagataataaagagaggaattcaaggttgaaggagggtttctctttttctatttctttttctttttaaaatctgtgtggagaaaactgaattaggggaaaatgatgcaaactgagcagcagcctcagcaccaaaatcagttaacggttcaaaactctgggagtctcagctttagcagtcatttgtctaaggaagatgaggagatctcaaagtcggcgctttctactttcagagccaaagaagaggagattgaaaggaagaagatggaggttagagaaaaagttcagcttcagttaggccgtgttgaagaggaaacgaaacgtttggccacgattcgtgaggagcttgaagcactggcagatcctatgaggaagaatccttgtgcccattgctgtgccatcttttctgaggcgaaggttttgcagttgcgttttggttaagactctcctctgatttgatcagtctgtgattttttttaaaaggaaaagaaaaaaaagagtttacaatggttttgaggaggaaggtacgatgatggaacgaatttggatatgaatggtagggaagggttagatgtttacgtaaaagaagagcttgaaagataagcaaatgccctttttttg

SEQ ID NO: 196794 - DNA, 697 bp, Gossypium hirsutum
tttctcttttcaactacaccttcgctcttgccttcgtctcttcaggaaatggaatgcgttgaggcagctttgaagaccagttttagaaaggaaatggctttgaaaccaagcccccaggcgtttttggaggatatttgggttgttaatggacaaaatggggtgtcttgcgatgatttttcagttgacgacctctttgacttcagtaacgaagagggtttccttcaacagaaacgtgcggatgaagaagatgaggaggaagaagaagtaccagcttcttcttctttgcctaagagacaaaagctaagccaagacaacggccacttctctaacgacagtactacaaatttcgattatggttccttgtccaccaacgaactcgctgttccggcggatgacgttgagaacctcgaatggctgtctcatttcgtggaggattccttctcggagcactctacggtgtatccgaccgggacgttaatggaaaagcccaagttacttgacggcaaattgcccgaacccggaaaatcagttacgacgacggcatgtttcgaaactcctgttccagcaaaagccagaagcaagcgcgttcgaaccggaggccgagtttggtcccttgtcgccaccccttctctcacagaatcctcttcgagttccacgtcatcatcttcctcctcaagcccttccccttggatgtttt

SEQ ID NO: 196795 - DNA, 1015 bp, Gossypium hirsutum
  unsure (1)..(1015): unsure at all n locations
cccacgcgtccgcccacgcgtccttaaatatcagccaaacagttccctcaccttcagataaatcaaaataagtaaaagaagaaggaacaagtgctttgaaatccaaacttgagattcagcgaaccttctccacattcaaagcaaatcaaagggcacattgatgactttagttccaggccaatcgacccttcatcgccatcgtctgcatagaatctggcactccatcatcccagcccccaaaagcctgtcttctcagaccttccaagctaacgtgtgcgccgctccattcaccattcgaggcccaaagagtgaatcaccttccacgatcagtcgtcggaagcccatagcacccgctaaaagtagagccctttcgcatgcccgtgcctccgccacaaaagcatcaaccacatccttaaaaagataagtctccgcccccacaatttctccttccgaatttctagctaaaactgatgttatagcgattctatcaacactatgaaaagtcgcatcaaattttaacttaataactccagtgtctgggggtttccaaatttcatttgctatagatctaaaggatggacagaagttctattgattaagaataagttcttgattataccctctaataaaccccaatagctcctgcaaagaaaactttacactntcatgtatcaatttattccttcgatgccataaaccttattagggaagaacccttaattggccttgggtttccttctgctacagaaaagatgttagcaaaacgaatcttacaacttatcaaagcttaacgatgcccatacacactgtaggaaatcacaggaccacatcaggtgatcagcatcctctggatctttcctgcacaaagggctgacagtttcaacactcaaagttctacgcgctaggttgcagaaatggggcaaaaaattattaaacaatcctccatatgtgtatttttacttttgcaggaatgtgttaagcccataatgatttgtaaaaatcattgtattcctca

SEQ ID NO: 196796 - DNA, 481 bp, Gossypium hirsutum
ccatcgcgtccgcccacgcgtccgggaaagccagccgttgttgaatatggtaacacaggggaagatgttgatccggaaactggtggtcctgcttctgtaccagttccattacctgatatggtcctgccaccttcatttgatggtgataatccagcattcatgtaccggttcttggaacctacttctcatttcttggcgccgccagttttggacactcacggttgggaccatgattgtggctatgatggtgttaatgttgaacatagtccagctatcgccagccagttttcccgctgcagtttcctgttcaactctccatggataagaaagagtttaacatccatttggactcttcagtttctaccaagcatggtgaaaatggatcaaccatggctggttttgacatccaaaatgttggaaagcaattagcttacattttcagaggggagaccaaattcaaaaatctcaaaaggaacaaaac

SEQ ID NO: 196797 - DNA, 515 bp, Gossypium hirsutum
  unsure (1)..(515): unsure at all n locations
ctacttctctactgaatgcatttattctcctaatgcatatcgngggtttgctcgtgaattcataaaagatttggagagaatcaggcccagggctatccttgacatcattaaatcaggtgaggattttcgaatttccactacaaccaaaatgcctgaccagggaacctgtgaacgatgtggttatatttctagccagaaatggtgcaaagcttgtgtcttgctggaggggctgaatcgaggtttaccaaagcttggcattggtcgtactcaaggcctaaacagtgatggtaagaaagatagaaaaagagatagcagaacgccaagtattgagagcaagcaatgtggaagtttggaattctgatccagagttttagattgcttatggaattatcaaattgttgtttgattggccacccaagctctcatatcttctctttttagagcttccaaatgaatagttaggcaaacaaaagcagttaatcgcactgtttgagctattagaactaatcatggaa

SEQ ID NO: 196798 - DNA, 713 bp, Gossypium hirsutum
  unsure (1)..(713): unsure at all n locations
tttccgttgatcattctgctccaacacttatggggacgctaggtgtttcaaactcaattctcaagcagtatggagtagaattcgccgcagagcatatcctccctctactcacacctcttcttacggcccaacagttgaatgttcagcagtttgccaaatgcatgctctttgtcaaggatattcttagaaggatagaagaaaaccgtggggttactgtaactgattctggagtcccagatttaaaacctgctaccacttccaacgggcttcagtctcaagtcttgagcaaagcaaatggaactgtggcttctgcaaaaagcagcccagcatgggatgaagactggggtcctactaccagagcagctgccaatgccagtcacactgcccaccagcctcccaaggacaatttatcctttcactttattttggatgataagtcaattcaatcggcacccacacaatctcaatcttccttaatatccactatatctagccagcaaacatccaattcttgtcctgcagttgacatagagtggcctcctcgtccatcttcaggtgttactgtagagtcaggcattggcgagaagcaattaaatgctggaacatctttgtcatcaaattttgaagatttagatccttttgctaactggcctccacggcctagtgcctnctcaaatgactctggaactnttaacaatggtattatgggagga

SEQ ID NO: 196799 - DNA, 423 bp, Gossypium hirsutum
cgcgcgaagagctcctgaagcgccgattgcagcacttgaggaagctttctcgatgttacagagaccattactgggctcttatggaaaacctcaagatccagtacaggaactattattggaagtttggtatcagtccttccaagcaaaatgataatcaacagctagctgatgcccaagttgttgctaatcccattgtcgatgacattgaaagcccccctgcggataatgttcatgttgataataattttagttcgaattttaagaataatcaacattgtttgttcgttggatgtaagttcaaagccatggctttgactagattttgtcatctccatattctctccgattccaagcagaagctttataaggcttgcacttatgtcatcaaaagtgctcatgcgggacctataacatgtggaaagc

SEQ ID NO: 196800 - DNA, 754 bp, Gossypium hirsutum
gtgatttcactttcccgctcccagcccctaattcccaatgcctaattcactttaccgattacaacccctaattccccttccaaatccctaatcactcattcacagagacgacacctcccccaccaatctaggttttatttttgtttcttcgattcttcatttgttttttttcctcaaaaagaagatttgtttcggtttcttatcaacattcatacgaagacggagaagacgaagaagaaaaagaacattcccattctgttttttggtcaagcttcaatcaggactcaagaatggctgggaaggcagcacaatctgtggtgaaggcagtgggagaataccaatatccatggcgtgaaaagttggccaagtacaaagtagagttatcaaagggagtatggggctattgggaacttggagcctggaagcctctaggcatcagtgccaggcatcgagccagactccgaaaagaaatgcttctagcgggccaagattggccatacgatccagagaagaaagagatgagaagcaagatgaaaggtcacaagtgcgacagaatagccgcggagagaagggagaatactgctaatttgatgcagaaaatgcctgagatgttgcttgcttataagaaacgcagatgggagaagaaaatgaaggaagaagagaaagctaaagataaataaatctgcatttttttccttatttgggtggttgagaacaaaagaaaaatgttgaatcttgtactaatgaattcaat

SEQ ID NO: 196801 - DNA, 320 bp, Gossypium hirsutum
tggttgaagataatgatgactttatcgcatcagaatcagatagacaaatgcttcttataaagcagcaggatgaggagttggatgaacttagtgcaagtgttgagagaattggaggtgttggccttacaatacatgaagaacttcttgcacaggagaaaataatagatgacttgggttctgaaatggacagtacaacaaaccgactggattttgttcagaaaaaagtggctatggttatgaagaaggcaagtgctaagggccagattatgatgatattatttttgctaggtttgttcattattctattcattctgggcttt

SEQ ID NO: 196802 - DNA, 937 bp, Gossypium hirsutum
gttttaaccggatcaataaagtttcagctacctggagtaacaagcaatgctgaagttgatgcaggggaaactagttctgatactagtgaagcacagactgatgaagtaaaggcagagaaacctgatgacacatcaaagaatcgaccctcaaagaaaagcaagaagaaggaaagggagcttgcggaaaatcctcctgccaaagccacagccaaagccaaagccaaagctgagaagaagaggcttcttgctttacctttggaggcatctgtgatttcacttctcttactggttgtgctgggcgccttctatgtggttcattctgtttgggctgcagcagaagcttattcagctccttcaatagttttaaccactcgttcacgtgatggtctacatgtttttgatgattttagagaggcttatgcatggttgagccataatacagatgtcaatgataaagttgcatcatggtgggactatggttaccaaaccactgccatggctaatcgcactgttattgtcgacaataatacctggaacaatactcatatcgcaactgtcggtactgccatgtcttctcctgaaagggcagcttgggaaattttccactccttggatgtcaaatatgttcttgtagtctttggaggtctcattggttaccccagtgatgatattaataagttcctgtggatggttcgaatcggacgtggtgtctttcctcatatcaaggaaccagattatcttagagacggacaatatcgaattgactcccaggccactccaaccatgctaaattgtctaatgtataaactctcatattacaggtttgttgaaaccgatgggaaagcctatgatagagttaggcggacagagatcggaaagaaatattttaaactcactcattttgaggaggtattcacaacacatcattggatggttc

SEQ ID NO: 196803 - DNA, 502 bp, Gossypium hirsutum
gttttatgcctccatggattcagaacaagcggtgaaatcctgaagaaaatgatggcaaagtggcctcattccgtgctcaacaacttcgatttcgattttctcgacgctccctttcctgctagaggaaaatccgacgttgaatccctttatgatcctccttattatgaatggtatcaagtcaacgagatagagtgtgttcatttcgatgaatgtattgcatgcatagaagattatatgattaaacatggtccctttgatggtctactgggtttttcccagggtggaatgctagcatctgtggtgcctccaatgcaaagagagggtgccgcttttactagtgtgccaaagataaagttcgtgatcataatatcaggttttgaacttcgagaattgaagtctgggccgccgaaattgcttgctaatgtttattcagttccaattgactgcccatctcttcatttgattggagacaaggatttcctgaaagaacgagggttcacgc

SEQ ID NO: 196804 - DNA, 760 bp, Gossypium hirsutum
agagaacaatggaagcaaagccggaagagaaggcggaatttgaagaagcggagatagaatatgttagctatggaggggagcaccatctgcctctcatcatgaacctggtcgatcaagaactcagtgagccttactccatcttcacctaccgatatttcgtctatctttggccccaactctccttccttgcttttcacaagggtaagtgcatcggaactgtggtgtgcaagatgggagaacacagaaatactttcaggggttacattgccatgttagttgtaatcaagccttatcgtggaagaggcattgccactgagctcgtcaccagatccattagaatgatgatggaatctggatgtgaagaagtcacactggaagcggaagtgacgaataaaggagcactggcactttatgggcgtcttgggtttatcagggcaaagcggctttttcactactacttgaatggtgttgatgctttccgtttaaagctattatttcctcctcctcgccaagtattgtagccatgataacaaacggggatgcaagttatgaatttcgatccagacacttgaagaatgtgcaatgctggtgcttatgaatgtttaaggttattgctattaggtcctataaatttaagtacatcttctaagattatatacagtaatatattttcgtttaatatgctaaaaacgatgaataaagttgtccactggtaggatataatatgtatactcttgatttagtcaattcatttagactt

SEQ ID NO: 196805 - DNA, 715 bp, Gossypium hirsutum
tagcgtacgaccacgcgtccgggctgagcgaatttgcggtttgttagttcgtgtgtgaaagaggtaataaaaggaaaaaaacgatgggtgttttcacatttgtttgcaggagcaaaggcggtgagtggtctgccaagcagttggagggagagattgagagctctgctgcttccacttacgagctccagcggaaacttgtccaggccgccaccgcctgcgactcctctggtggtgtcacctcctctttctctgtcgttacccctaattctgccgttttccaggtggttattggaggtgctgtaggcggagccttcatcgggggtggaggagctgctgccgctccggctggaggcgctgccgctgccgctgaagctcctgcagctgaggagaaaaaggaagagaaagaggagagtgatgacgatatgggattctctctctttgattaagctcctttactgccttactgcctgtttagatcttagcaagttgttacattttcatttttcatttatgcgtgaattagactattttgggtgacattgggcacttttcctagttaggagaagccatttttcaggataaatttgacaatattatgagtatgttttttggcaaacaccttgatcgtaagggaggagtgaagcgtatcagtcggcttagtatatgaggaaacccgtggagttctcaagaatcttctaaaagggcggccctctct

SEQ ID NO: 196806 - DNA, 635 bp, Gossypium hirsutum
cccacgcgtccgcaaaacaatttcaaaattttaaatattctttctctttgatcgatacttgaataatatgtcaggaagaggaaagggaggcaaggggttgggcaagggcggagcaaagcgccaccgcaaggtcctccgtgataacatccagggaatcacgaaaccggcgatccggcgtctagctcgtaggggaggtgttaagcgtatcagtggcttgatctacgaggaaacccgtggagtgttgaagatcttcttggagaacgtgatccgcgacgccgtgacctacactgagcacgccaggagaaagacggtgaccgccatggatgtcgtttatgccctcaagaggcagggtaggactttgtacggtttcggtggttagattggtgtttactgttcaggattgctgaagttggctgcgatggcggcggcggcgatggtggtggggggatttgaagtcttgcggtcaagaatgtttgagcgtagtatcagcgttagggctttgtaattagtgactattagaaattagacattgggtactgtatgctttcgtttacgatttgtgattcttgtactggattacagattttaatgaagttttgagttcatttctaagattagaagtgtacttgtttgtt

SEQ ID NO: 196807 - DNA, 524 bp, Gossypium hirsutum
cgctagatcgttcgtggagaagaattacaaggatctcaagactttaaaccctaagcttccaatcctcatccgtgaatgccgtgggattgagccccaaatgtgggctagatatgatatgggtgtcgagaagggcattcgcttggaaggtttgagcgagccacagattttgaaagcactagaagaccttgccaaagcaggggcatcgaccaaagcctaaccatatcgctaccattgaatccaaaaggttcgaaataaaactcatgtcttttgaggaactgtttccttttaatggttgttgtgttcttccctctgttttcagccatcataactgattctgtgagatgattgttgaaagttgtcagtatttgtgttctttcccttgcattgcctttggcttgtaaggtttcaaatacccaagaaacttcctcttgattacttgtttgctgttattttcctttgtccttgttagcaaacatgttaattataaacacttatcaatcaccaataaattccaattttttttt

SEQ ID NO: 196808 - DNA, 475 bp, Gossypium hirsutum
cttttctgtgtaattataaggaaatctacatgaacttcagtcattgttaggcaagttgagcgagatgcgatacgtgttgctctgcaggcaacaatgaaggcaaggtccgatggaaaagaggttatggtggacatccaatattttaaaactaacaatccactgctgttaatcagcttctatgagcaacatcttaagtataaccctccatcttgatcacctaggcgtatttagtgtattgatgaagctgaaggccgccatactgattttgtttgtgtatgcattgttgtaactctattacattaatcgcagaagattgtgcaggataagcaagagctctcattttcaagtgccaagctgactgatataacgatagctctctcttataactaccattagtgtgccttaattggacatttagcatggttatgattaccattagtgttgcttaattggacatttaacgttgttataacta

SEQ ID NO: 196809 - DNA, 737 bp, Gossypium hirsutum
ggaggcagtgactgccttacttggaggtggaattcgtgttggggtactacttcaagggaagaaggttcgagatgacagccgaactttatcgcagactggtatttcctgcgaagaaaatctggattctcttggtttcactttggagcctggtcctgcgaaagctcctccgccagtgtgctcggaagaaccacatcttctgatgtcatgtgaaaaaggccctcaacaactaacaagccttccagccactccggttgtagatacagcgattcccgatgccacacctgacccactgttactaaccgatacagcacatcctgtggatagtaatcatgaaccggtttcctcccaaactgacgttctaactgatcaaagtctatcggagtctagagctatagttcctgttccagcaatgaatgttgaggcactagctgtcatccctgccagcccaaaagtccgaaaaaccgaacttgcacagcgtcgaactaggaggccgttttcagttttagaagtagaagcattggtacaggcagttgaggagcttggtacggggaggtggcgtgatatcaaactgcgagcttttgagaatgccgatcaccgaacttacgtggatttgaaggataaatggaaaacattggttcacacggcgaaaatttccccacagcaaagacgaggggagccagtaccacaggaactgttggacagggtattagctgctcatgcatactggtctcagcatc

SEQ ID NO: 196810 - DNA, 545 bp, Gossypium hirsutum
tttctctttctttctatttagggatttttttctctgtggtttctctctcctctttctctctccagaaaaaaggaaaaaaaaaccctaaagagctattttacacccccaaacttcatggatgacgatgcgttgaatatgcgtaattggggttactacgaaccgtcgtttaaaggacatctcggtctgcagctaatgtcgagcatggttgaacgggatgcaaagtcttttattcccggccgtgatcccaatctcatgattactaccaataccacctttcaccagcgggaccccgttgtttccgaggcacatatccccatgaattatgttagggatagttggattgctgacagagagaagcttttcaacatgttcccggccaccactcctaattacgccgttctcccggaaacgtcggcagctcattcattgtcaattttgcagccaccacctgattcttcaacaagagatgagagggtggctagtagcgttgaagagctgccagctaataaggacagtgttgaaccgaagaaaaggcagggtggggc

SEQ ID NO: 196811 - DNA, 721 bp, Gossypium hirsutum
cccacgcgtccgcccacgcgttcgcccacgcgtccgggaaggtggagatccaatcagtttgggctctgccaagagaaaccaggaagatttaagtggtcactacaatgaaacgggtttgagaagtgttgagaagaacgagaatccagttcattataactcttccaaaaacatagagacgatccttcttcagatgatgagcagcaagagtcaaaacgggggcgctccaaattggaacgttggacaagccataaggaaagggattacagtatcaatagcaagtcatctgcttcctcaaagttcaaggagattgagaagattgataatgtggatgccgcagaatcaaacaaaactctagatgaacctggtaagttggtcgagcctgctgagaaccatcaccctttgtctgacaataaaactgctggtgcgccagagaccaaggagaccgatacatggccattggacgaccggcatcttgacactgtcgagaagctgaagaagcgaagtgagagattcaaacttccaatgcccaaggaaaaagatgccatggcaataaagaaaatggagagcgaggcattgccttcagccaagaatgaaactcctgcggattccgaagttaagccagagagaccagcccgaaaacgaaggtggatcagcaagtaatagtggaacaagtaagcccacattgttgctgtgctgcaaggtctttaattattggacccca

SEQ ID NO: 196812 - DNA, 536 bp, Gossypium hirsutum
tcgttattcggggtctcaaaaggaataaaacgtggggaaaaactataatgatcacttaaacccgattcacataacgcatttccactcgcaatgggagagaaaaagaacggaaacaagcaaggaggagcggatgggaaaaagaaggaaatgagttcttcaacctctgttttcaaatttgagtgtctctgtgatggttgtgcttccaaaatcctcaaatgcattaatcactttgaaggggtggagacggtgaaaccagagatgagttcaaacaaagtgacggtgataggaactgcggatcccactgccattaaagagaaactcgacaagaaaacgaagaagaaagttgagctcatttcttctcaacccaagaaagatgataacaaagaggaaaaaaaagagaaaaaacctgaccaacagaaaaaccaggattctgataataaatcagacaaaaaacccaaagaggccccggtaacgactgcggatttgaaggtgcaattgaaatgccagtgtgatggatgctttgataggattcgaaa

SEQ ID NO: 196813 - DNA, 801 bp, Gossypium hirsutum
cccacgcgtccgcccacgcgtccggccatgtacaggaagatttacagaggagatttcaagtgcccaccttggttttcccctgaagctcgtagattaattactaagcttttagatcccaacccaaatacccgaatcaccacttcaaaggtgatggactcgtcttggttcaagaaatcaatacccaagactattagaaccaaggaggagctggaatttgaagccttcaatggcgagaaatcatccaagcctgagactctgaacgctttccatatcatttccttatccgagggcttcgatttgtcaccgttgtttgaagagaagaagagagaagagaaagaggagctaagattcgctacaacaaggccagcgagcagtgtaatatcgagactggaagaggtggccaagtcgatgaagttcagcgtcaagaagagcgagtcaagtgtacagactgcagggtcaagaatgtggaaggaaagggaaattagccattgctgctgacattttcgcattaacaccgtcgtttctggtggtggaagttaaaaaagaccatggtgatacccttgaatacaaccagttttgcagtaaagagctccgaccggcgcttaaggacatcgtctggacgtcgcccgccgataactcgactgtcgcttgacttttattttgttctagaccattgtttcataatgttgttattattgtttagaaagaaaaccagaaacagaggatgttctgggtttggtcgtttgtgattatgttaaagatggaatcatatgcgcatcattcgataaatttattgatgat

SEQ ID NO: 196814 - DNA, 346 bp, Gossypium hirsutum
ctgagactagaaaaatggggatttaaatcccttgaaattctgcaaatactaagggtgatttttgtgggtagctgtaaattccaaagcttcctgcaaaggtttttaatttcagcatgtactaaataattcctaggatccgcagtagctccttgcaatagtttataggcactacgtactgagcattttccctattgttcccctttccacacctgaaaatcttcacgatcggtctctgtaagcggaatctgtaggattttttgagcatcacctaattgaaaggtattcatgttcaaaatgcatcatttgaaaatataaaaaaaacaaaaataaggtcgatcactctaaa

SEQ ID NO: 196815 - DNA, 508 bp, Gossypium hirsutum
cccacgcgtccgcttgataatgtacaagtgatttgccattcaactataggctacaagaatgattcgaagccttattccttcttagttgacactaagccttttgagaacaaagaaaagtcttcagatgctactgaactgagcacagatgattctgtgaaggaaaatcagaatggggtcaggcgtgatataaagagcgatgaactggattcacatttctcaatatattcggagaatacacgagatgaatggacagcttctgaacttgattgttccaacagtgtacacgacttttctaatggtaatgaaaaggaggtccgagatattgtgacatttaactctcattcttcaaagaatatggattcatttcaggactcggttttttatttggacaaaagtgtaatggattgtgaattgcctgaattggtagtttgttataaagagagtacatatcatgttgtcaaggacatttgtattgatgagggagttccgacacaagacaatgtcttgt

SEQ ID NO: 196816 - DNA, 624 bp, Gossypium hirsutum
ggaggagttggactttcaggcactataaagtataaatctctctctctatctaatcattccccttttactgttttactctttacaaattttcctctcctttttcgtgtttttactcttaattttgctttttgttttggattgtctcttctgaatcagagaaaaccctacctttttttttctcttttatttctttgaattggaacgatcaaaagaaggaatgggttctgaaggatcgagggttgttgtgccaaggaatttcagattgcttgaagagcttgagagaggtgaaaagggaattggggatggaactgttagttatggaatggatgatgctgatgatatttacatgcagtcatggactgggactattattggcccgcctaacactgttcatgagggacgcatctaccagttgaaactattctgtggcctggattatccagataatccaccaagtgtgaggtttcaaacccggataaacatgacctgcgtcaatcaggaaactggagtggtcgaacctagccttttccccatgcttgctaattggcaaagggagtatactatggaggatatattgactcacctgaagaaagacatgatgtctccccagaataggaggctggt

SEQ ID NO: 196817 - DNA, 530 bp, Gossypium hirsutum
ctttctcttttaacatttctccttctacatctttctttcttttctttttttgggttggggtttggtactctcgtttgaatcaaagaaaccataactgtttgttctttttttctccctttgaattgaaacgattgaaagaagaaatgggttcagaaggatcatgtgttgttgtacccaggagtttcagattgctagaagagcttgagaggggtgaaatgggaattggagatggaactgttagctatgggatggacgatgctgatgatatatacatgcagtcatggactgggactattattggccctccaaacactgttcacgaaggatgcatatatcagttgaaactgttctgtggcaaggattatccagataatccacctagtgtgaggtttcaaacccggataaacatgacctgtgtcaatcaggaaactggagtggtaggtgatgttattcttaggaccttttatgccacaatatgtactgaaagccgctaaaattgtcaggttgaacctaacctttttcccatgctt

SEQ ID NO: 196818 - DNA, 477 bp, Gossypium hirsutum
cggacgcgtgggcggacgcgtgggctttcagataaagatgtgaagacaatgtgttggaaatatgcagagttagaaaagagcttaggagaaattgatcgtgctcgagcaatatatgtatttgcatctcagtttgctgatccacgctctgatgcagatttttgggataaatggagggagtttgaggtgcaacatggtaatgaagataccttcagagaaatgttgcgtattaaacggagtgtctctgcaagttatagccagacacacttcattctccctgagtatctgatgcagaaggatcagaacatcgatgaagctaaggacaaaatgaaacaggctggtatctctgaggatgaaatggctgctcttgaaaggcagttactacctgcggctgataatgctattgccaaagacaactctaggaaagtagggtttgtgagtgctgcagttgagtcacaagccgatggtgggttgaaaaca

SEQ ID NO: 196819 - DNA, 830 bp, Gossypium hirsutum
tcccacgcgtccggtgctacctacttcatctcaactatcaaacccagaaagctcaaaggaaaaaaaagatggctttggagatctgtgtcaaggctgctgttggtgcccctaatgttcttggagactgtccattctcccagagagctcttcttactttggaggaaaagaagatttcctacaacatgcaccttatcaatatcagtgacaaacctcaatggtttttggagataagtccagaagggaaagtaccagtggtgaagtttgatgacaaatgggtggctgattctgatgtaattgttggaatccttgaagaaaaataccctcagccttgtctcaaaacccctcctcaatttgcctctgttggatcaaacatatttggaacttttgtcacatttttgaagagcaaagacgctaatgatggatctgagcaggctttgcttaatgaactcaaggcattggatgaacatcttaaggcacatggcccattcattgctggggaaaagataagtgcagttgatttagctttgggaccaaaactttaccatcttgaggttgctcttggccatttcaagaaatggactgttccggaaagcttgactaatgtccgcaattacatgaagtcgatattcactcgtgaatcgttcgtgaaaacgcgggctgctaaggaatacgtgatcgccgggtgggcacctaaggtgaatgcatgaacaaactggaaacaatgaggtgtttgaagcgtatgagttatgtaataaaatgtgagggatggtgatgtaataaaatgtttgaatgtattagtgtcaatgctactaagtaattggtaagtcttt

SEQ ID NO: 196820 - DNA, 1322 bp, Gossypium hirsutum
  unsure (1)..(1322): unsure at all n locations
gatgttttgttcaggagacagacacatctagttctgaagatgtggttagtgccagagagtctctctgtagtgagggaaggagcccagatgctgagttctcagatgaaccatcgagtatattgttagcaggagatggtagttcaagaagaataacaaatgctgatgtgtcagcactgaacagtgagtcatcagactctgactcttctgaagaccctgaagtgattcaggggtcccccactttggacggcagggaggataatgatcttgatgtggcttcagaaaggaatgttcctccctcaagcactgaagggatatcaaagctacgtgcaactgaagatttttcaacctggcagcgaatcatccgtctagatgctgttcgtgccaatgctgaatggatgccatactctacttctcaggctttggtatcagatgggagggcacgccgttcagctgaggctgttgggttaaaggattatgatttcctggagccctgcagaattttccatgctgcacctttggttgctatccttgaagcttatgcactttaccaccctgaaattggctactgtcagggcatgagtgatctcctttctccaatattttcagtcatccctgacgattatgaggctttctggtgtcttgttggtttcatcaaaaaagcccgacctatcttcttgccttgatgaggttggattcccaatgccccttattattgtttcccacattatagattgtctggactctcctcctcttcaggcttttggagatgctgcacgcagaggattgtttttttgtttctacgatcgttggtggttcctctttaggagggaattgacatttgaacagacaatgtgcctatgggaggtaatgtgggcagatcaggcaacaattagagctgggctttcgaaatccacctggagtaggataagacagaaggcacccccgacagatgatctattgctgtttgcaattgcagcttcagtcttacagaggaggaaattgatcattgagaagtacagcagcatggatgaaattttaagggagtgcaacagtatggccgggcaacttgatgtatggaagctcctaaatgatgctcatgacttggttgtaactcttcatgacaagatcgagtcgtcattttgatcacctcgccataattttttgtcctctaattttatgtgcttcggttttacttcaacatggctttctgtgagtattacaagtcctccatttcactgcatgaaatgtnttctgtgcttgtgctagatattctcacttattgtttgtcaatgcttgaaaatttgttggagactgtacactta

SEQ ID NO: 196821 - DNA, 387 bp, Gossypium hirsutum
ggagtagttattccatttggctccatggaatgggccttacagctaaacaaatccatgggggcgttcttgtctcttcgagaaaagatcgaaacaccacgtctggaggatggtgaacttgataatttatgccaccaactccagcagctggtctcttccgtacagcccccacaagacataattgatcgcataatgagagtatttccaggcaatgtacgcttaattgttccttcaagtgccaatgttgaggatttggcggggatgtcagctgctggactttatgaatccatcccaaatgtcagtccttcaaatccaactgtttttgccagtgctgttagccaagtatgggcctcgctctatacacgaagagcagtactaagtcggcgagct

SEQ ID NO: 196822 - DNA, 1333 bp, Gossypium hirsutum
  unsure (1)..(1333): unsure at all n locations
gcaatgtagttggatccgcaaatgggcggtcgaaaaccatatgaaaaggaggagaggtgaggcttttgagaatgggttcgtggaggtaatgagcaattgcaggctcactatatgtagcatcttgatctgtttatgttttggtgcaaagatctccgaagaacggattaagaatatcgaaagcatactcaaagatgtaatgctggtaacatcgccgcagctaccggatttcttgccgatcctcactccgttgtttcgtcggctaatgaaagaggccaaagcactaagaaagaggcaattggattgcttggctccattaataaagaaccggagagcttttgttgagaaaggtgaaaaccctaacccagaaatggtgaggtccaatcggtgcagcctatatagactcactcttcggactagagccaccaacccgaggtccgttgggggaagaagagtacgttaccctatgttcagaggtgatcagtgccggtaccgatacgagtaccacgacagttgaatgggccatgcttaatttggtaatgaatcaagatatccaagagaaactttaccaagaaatcgtggattgtgtaggcaaagatggtgatatcaaagaagaagatatagagaaaatgccttacctcgaagccgtcgttaaagaaacgctccggcgacaccctccgggccatttcctcctatctcatgcagctataaaagacactgagcttggcggctacacaatccccgcaggggttcacgtcnagttctacactgcatggatcactgagaatccagatatatggtcggatccaggtgagttccgacccgagaggttcttgcacggtgacggggtcggtgtcnacgtcaccgggactcgtgcggtgaaaatggtgccgtttggggcagggagacggatttgtccggcttggaacctaggcattttgcacataaacttgttgataggaaagatggttcaagcattcaagtgggttccagttccgggtgccccaccggatttgaccgagacatattctttcacagttgtgatgaagaaccctctcaaggccgtgatcatgcctcggtgagaaaattgaaagcttaattaggcaatttatatatatatatatatatatatatatgtatttttactttaataatacttttgacatgttttgtttcattgttttgagtgtttattcatgtatttcaagcatgccattttcaaccattttatcaatcactttcagttttaatttaatgcttcaccaattgatggctatatataaaaatgataatttatttgataaaaaaaaaaaaaaaaaaattgtcgacgcggccg

SEQ ID NO: 196823 - DNA, 732 bp, Gossypium hirsutum
atttttcaagaaccctagtttccgaaattacctttccaaaatgccttcaattccagaagagccactgctggccgcgaacccagaccgattctgtatgtttccgatccaatacccagaagtatgggaaatgtacaagaaagccgaagcgtcgttttggaccgcagaggaagtcgatctgtcttccgatcttcgtcactgggaagctctcaccgctgacgagcaccacttcattagtcacgttctcgccttttttgccgcctccgatggcatagtccttgagaaccttgctgttcggttcatgaaagaggtccaaatctccgaggcgcgtgctttttatggtttccaaatcgctatcgaaaatatccactccgagatgtacagtctccttctcgagacttacataaaagattccgatgaaaagaaccgtcttttccgcgccatcgagacggtgccgtgtgtggctaaaaaagccgagtgggctatgaaatggatcgacggcggagaaactttcgccgaacggttaatcgcttttgcttgcgtagaggggatctttttctccggaagtttctgtgccatattttggttaaaaaagagggggttaatgcccggattaactttctcaaacgagttaatctcacgagatgaaggtctccactgtgatttcgcttgcttgctgtactctctcctccggtcaaagctgagtgaataacgcctgagagggatattaatggt

SEQ ID NO: 196824 - DNA, 241 bp, Gossypium hirsutum
cccacgcgtccgcccacgcgtccgcccacgcgtccgcccacgcgtccgcgttgtcgtccacgcctcctgattggatcggatcccatccccttctttacacaatttctttctttctgttgttaatttcgtttatgaatttgtgtgctgctcctcgtcgctgtcttacccaacattcttgtacttttataacccagtaatattacgatgaaattaattttacgaaaaacaaagagattgacac

SEQ ID NO: 196825 - DNA, 466 bp, Gossypium hirsutum
cttcggggaccccttggaccgaaggggcctatctggtcttaaaaccagtgtcccaaaaaggaggcccttgactactttgaacattgaaaagcacccaatgaattggccaccattagggacaaaggttagccggatggaatccaaaaatcaggaagaatttaggcatgatgtatggcagatttgcctacaacgctcatatctacaatgatggtcgtaatcctggtattccctctcttgccgatcagctttttggagctttgtgactacttgctacatgagtattctgataacctttggctgaagctgaaagcaggtataggggaagcttaatcggataacacatttaaaatcattcatcatctgaaagccaaaattccctcacagtagaactgctgcttctctgggttctaggggtttccaggctttgaaccatggtaatagagctttgcatatgtatagtcgaaac

SEQ ID NO: 196826 - DNA, 388 bp, Gossypium hirsutum
gctgctataagatttgatgcgggcttatttagtttttattttttactttagcccatacactgggactatcatattcccatatctatgcctgaaaatgtgttcagcatggatgtcaaacaccgaccaaagagtcccaacaacttagctataaaaattaaattattaactttgtactgcatgtttcagtcaagtgtgtttcattcccaacccaaatctatcataggagccccagcctacattgcaccagaggtcttgtctaggaaacaatatgatgggaagataattcttattccctgtttctgtactttttggtctataagacatactattccgagttgagctgagtagaacttcatatgaatgaaaacttagagactttttggaaaaa

SEQ ID NO: 196827 - DNA, 586 bp, Gossypium hirsutum
cccacgcgtccgaaagaaacgtaaaaaggacaatgttgtatgggatgaacagactggtgcatggaaacgtcgctttggttatgatcgtgtcaatgatgataaagacatacccatcattgaggccaagatgactgatgagccaggagaggatccttttgctaaaagacaagatgataaaaagaaacgggttgagaagcaagagaagaatcgcctccagaacttgaaacaagctgcaaaacttggtgctttgccaagccatgttcagcttgctgctacggctttgcccataacaggaacccaagctccacctaagaaagtaaccaaagatgaattggggaatgtagctgggatggctgctacatctacagccagtggtgggaaattcgataggaaattgccaggagaaaagcctgctaaaaagcaaggaaagcatcgcaagttcttaccagttgttgaagggtcagggataggctcaagggagaaggagcaaactgagaatgttctaaacaagctaatctctaagcattcacatgagatactcaacgttgacaaggctgttacgatgtataatgtgaaaaaagagaag

SEQ ID NO: 196828 - DNA, 462 bp, Gossypium hirsutum
ccaacaaaagctggactgaagcgtctcccatctgatcgtctagaagaaattgctgcaaagaggttgaaaaaacttagtcagttgaaatcattagctgcagagaagaagggcaatctgagggcttcggaagctccaaaagttgaagttaaagaacagccaactacagggcccccagcaagaccgactaaaaaaccagattctttaaggaaagtggagtctctacctagggctgttgagcctacaatgctggttatgaagtttcctcctcaggtatcacttccatcaggtgcagaattgaaggccagatttggacgcttcggctcattagatcagtcagctatccctgtggtttggaagtcctcaacatgccctggtggggttcagacaccagaattgatgctcaggctgcatatagatatgctaatggaaccaactccctttttggcaatgtgaacgtgagat

SEQ ID NO: 196829 - DNA, 443 bp, Gossypium hirsutum
gggatagccatataagcacagtcttgacaggagatgctctgaccttgaacaagctgaaactgaggtcgatctcttgggtgatgaggtggaagtacttctaggccttctcgagaaaatatacattgcacttgatcattattccccaatattgaaacattatcctggaattatggagatactgaagctggttcgaagagaattgagtggagaatgtgacacgtcactttgagttatccttcattagatgaatgttgattcttttgcacccctattcagcatgagggaaggaatggtcgcacggacaaaatgttccactgctgatacaatcaataacagggttatgtgcacgtgaacccggaaaaatacattcttatccctgctgattatgttattctccctgtatagaaacttagaagatagcacgtaaaaattgtggcgatggt

SEQ ID NO: 196830 - DNA, 692 bp, Gossypium hirsutum
atgatggatttattggacgggtttggccccagtcctcaaaagaaggacgaaaatggaccagcttatccttcattagttgcatatgagagcagcactctaaggatgacattcaacatctcaaagcaaccaggaaacccacaaactactttgatccaagctatttttacaaatctgtcacctaatgtttataatgattttcttttccaggcggcagttcctaagattcttcagctgcatttggatcctgctagtagcaatactttgcctgcaagcggtaatgggtccatcattcaaagcatgaaagccactaatagccaacatgggaagaaatcgctggtcatgcgcataaggatagcttacaagataaacagcaaagatgttttagaagaggggcaagtcagcaatttccctcgcgatttgtgaggatgattgatccagagatgctgaagatattcgtgtaccacctttcctttttcttttaactctcaaaaacctcatctcacaatttgtagtgatataaactggtaatgcaatctttttggttcaaaacttggtaccgggggggaacctaagaatttggtggggcttagggtggggtgcggtgaatctttaaaacttttctgaatttaagtgaatttatggattataacattctcattaatgatttaattcgtaatccaatatatattgtg

SEQ ID NO: 196831 - DNA, 575 bp, Gossypium hirsutum
ttctcttccactcaatcaaatcccagcttagcaacctcacaaattttttctttaaaaaacccatctttctggttctaaactcacccccatccatctcttttgcatataccttcagccactaagcaatagcagccactactgcaaatggcttccaacaaaacctgtgctgtccttacagttttctctcttcttcttttcaacttatcattcaccaatgcttgccattcatgcaagccaccaaagcccattccaccacctgctgcatgccctccaccaccagcaaagcctgcttcttgccctaaggacacattgaagctaggtgtttgtgctgacctacttggactggtaaacatagtggtgggaacacctccttcgagcaaatgctgtgctttgctccaaggcttggctgatttagaagctgccctttgcctttgcaccgccattaaagccaatgtgcttggggccaacctcaacatccctattacccttagcttactccttagtgcatgtcagaaggaaatccctccaggcttcaaatgttgattttttttaagaagcacaatcagttgttgatg

SEQ ID NO: 196832 - DNA, 480 bp, Gossypium hirsutum
gaatgataagttgaaaagaagaagagagaaaactgtaaggacagcaatgcttgccattcatgcaagccaccaaagcccattccaccacctgctgcatgccctccaccaccagcaaagcctgcttcttgccctaaggacacattgaagctaggcgtttgtgctgacctgcttggactggtaaacatagtggtgggagcacctccttcgagcaaatgctgtgctttgctccaaggcttggctgatttagaggctgccctttgcctttgcaccgccattaaagccaatgtgcttggggccaacctcaacatccctattacccttagcttactccttagtgcatgtcagaaggaaatccctccaggcttcaaatgttgatatttttttttaagaagcacaatcagttgttgatgttggctaatggctaagtttgctctactttaaatttatattatggtgctgcaaatcaatgtgtccttgctt

SEQ ID NO: 196833 - DNA, 457 bp, Gossypium hirsutum
cccacgcgtccgcccacgcgtccgcatagaagctcaagcgcaaatgaatgaggagctttccggatggaagcttgtcgtgggtgatgttttcagagaacctaatcactcgaagcttctctgcgtgatgattggtgatggagttcagattatgggaatggctttagtcactatagtttttgcagctttgggtttcatgtcaccggcttcacgaggaatgctactcaccgggatgatcattctctatcttttcttaggtatagctgccggatatgtcgctgtttgtctttggagaactctcaaaggaactgcagaaggatggaggtctctttcctggtcagttgcatgcttcttcccaggaatcgtctttgttatccttacagcattgaatttcattctatggggcagcaaaagtaccggtgcaatcccgatttctctctacttcatactcttatctctc

SEQ ID NO: 196834 - DNA, 455 bp, Gossypium hirsutum
  unsure (1)..(455): unsure at all n locations
cccacggttactgcacaaccatctggtacttctggtgccaccaccaatgtctcagtcatcacgagtttgcagaaagcagatgcgatccgtcaggctgatgcgagtgatgacagtgaagatgaggataactggagcgacacttaattatcttggaacatggatgcatcagataattgcaagtaaatcctgccagtctccattgagtatttttcacaattgggtttggagctcttcatagctgtctttgaattaaaccctctctttgatcgagccattgccatggatggacaaagctgtgatattgattcaaccaggtttggctttggttaccatgtgttaacaaatgttgcataaatttctcacattcaaaagattgataaacatcatgcatccatttagatcacgtatatcaactttggcacagnatattaagtctatggcttctgctattgcct

SEQ ID NO: 196835 - DNA, 456 bp, Gossypium hirsutum
cttttgttctcctaattttgattctttttaaagtatttcatttttagttcaagatatatgatttccattgggcttttctttgtctgattctattgcatgttcgattgaacagatgaaaagttctcttcttggtctttgactatttttcgaatggcttgtgattttgactagttgagttttctttatttgcatttcttgaattctttttaatgataaaattgtgggttttaatattaagaggatattaacatgaagtttatgtttcggtttctatattgaattaagttgaggtttttctttagaggatttttttatttctctggctcggtttacaggaaaaagagaccagcactgaccatttggtttcagatacaattcttctttcttggatttatagtgaatcatttctggacaaattttcccgtttttatatcaatcaattgaattaattactga

SEQ ID NO: 196836 - DNA, 1124 bp, Gossypium hirsutum
ctctgggcagctaattcggtgatcccaaagattcagcccgagtcataaactcggagctcgaactcaatcacagagagagaaagagagtcgatttccttttctacaaaacaatttaaaaaagaaatcttttattttctgtgaatttctctttgactctttcggcactctctgcaactgcaatcatgacctcaattgtgcaaggcttttccaagtctttggccatgactgtgctatcggagatcggcgacaagacgttcttcgctgccgcgatcttggcaatgcgccatcccaggaaacttgtcttgttaggatgcctggcagctttaattgtgatgactattctttctgctgttgttggctgggctgctccaaatcttatctctaggaaatggacacatcacattacgactctgcttttctttggatttggcctgtggtctttatgggatggatttatggaggatggggaggctgaagaattggctgaagttgaagcaaaactggatgctgaccggaaggcaaacccaggaacagtcaaaggggggaataaggctgatgatgattcaaaaaaggagaggcagccatttctcacacagttcttctctcccatatttttgaaggcattttccatcgcattctttggtgaatggggcgacaagagccagcttgctaccattggcttggctgcagatgagaatccatttggtgtggttcttggtggaattttaggacaagcactgtgcaccactgctgctgtacttggagggaagagcctggcgtgtcagatatctgagaaaattgttgcactctcgggtggagttcttttcattgtttttggaatccaatccctcctctcaacagttgagtcttgacgacttactaatggttagttctgatttttccatcaagaaaattgttcactagagttggcgtactccgttggggaggagttgggttgctatgaattctttaatgtttcacataaaacaggcgaagatcctaaatccaaattggacccgctgttttgttattacatttataattattcatacctgtctgtcatcttctcagtccaggcacagtgctgtgtcttacagtcattattagataggcaagcaaacgct

SEQ ID NO: 196837 - DNA, 753 bp, Gossypium hirsutum
gttattggtgaagaaacctctgagacagaatcgggggattcacttaaatgccacattgggcaagaagtgaaccatttacatgaaggtctaaagcatgctttgaaatcagaactggaaaaggcttctcctgccctcgggcgcagtgcaatttacttgaaagagtcccgaattaatggtttaccaaggtatttgactattcaattcgttcgttttttctggaagagggagtcaaatcaaaaggccaagatattgcggaaagttgattatccactggagttggatgtttatgatctatgttcagatgaacttcgcaaacaattggaaggtcctcgtcagatcctgagggatgaggaaggtaaaaagctcggtctgaaagctaatgggaaaagctccagctcaaaagatgatgatgtcaagatgatcgatggagaggggtcatccaatgcaagtggagaatcaactgtgactacatctcaagaaggggttccctctgacaaggaaacacgtttaaccgggatttatgatttggttgccgtgctgacccacaagggccgaagtgccgattcagggcattatgttgcgtgggtcaagcaagaaagcgggaaatggatcgagtttgacgatgataaccctatcccgcagcgagaggaggacattgttaaactttccgggggaggtgattggcacatggcatacatctgcatgtacaaggcacgcactgttttaatgtaatctttggttttattatgaact

SEQ ID NO: 196838 - DNA, 900 bp, Gossypium hirsutum
tcgctcacgcgtccggctttactctgccgtatctctccttctaaaaccctacttatctcctcctcgcaaaaccctagccccttccttttttctttcgtagtaatcatccatggagttctggggtattgaagttaagtctgggcagcctattaaagcagatcctggtgctaactacgttatccatctttcccaggcttcacttggagagtccaagaacaaagcagaatccgttccactctatgtgaatgttgatggaaagaaacttattctgggaaccctttcccaccagatttgccctcaattatcttttgatttagtatttgacgaagagtttgagctctcccacaactggaaaaacgggagcgtatatttcctcggttataaaactttcataccagaggaaggtgatgattttggtatgtctagtgaagaagaaagcgaggaggaggaagatgaggagcttcctgtcgctgctgctgctgctgctgctgcagtaaatggaaaagctaagccagatgcaaaaacagccaaggctaatgctgggaaacctgatgctgttaaacaatctggcaagatagcagaacctagcaataacaggaaatctgaggatgaagatgatgatgatgagtccgaggatgagagtggttctgatgaggaagatgattctgatgacgatgatgagtctgacgagatgtctatggatgaaagttcagatgacgaggatgaggagacacctaagaaggtcgagtcaagcaagaagagacctgctgaagctgcaacccctgcttctgcaaaaaaggctaaatctgcagttacacctcagaagacagatggtaagaagggtggacacacagcaacaccgcatccagcaaagcaatctgggaaaaattctgcaaagtc

SEQ ID NO: 196839 - DNA, 452 bp, Gossypium hirsutum
gcgcccacgctatctcccactcgtccggcctcacgctaaggctagtcaaccctaaccagctcaaagggatcaagtatgagcctttgaacgtcacggcttatgattttccaaacaaaagtaatgtcataggtaacattttgatgccagcgttttaccagggttacagacagaaggctacaaagcctggtcaaggcaccgctaacaccactgtggctttacgagcgtcgtctgagaacggaacaggagttttacggattgatatggcgacggcggtgaagcttaagaccttgtatggatattcgaagaggcataagattaggattggagcatatgtggtggtcaacgctagtggtgttaatgtccatcgtaaagggatcaggcttagatctatggcacccaagatgggaaattcttgtgtggtgctgcttggagctttgttcaatatcttgctc

SEQ ID NO: 196840 - DNA, 735 bp, Gossypium hirsutum
  unsure (1)..(735): unsure at all n locations
ttccggtacttaccgggtcggagccgacgcgtnccgaaacatcctttcttcatgagagaaagatgttatgagccaagtgtagctcaattggccggagggcgatgaggatactttacaaggtganccgntnagggtgatgacaagtatcttattgcaacagccgaacagcccctctgtgcttaccacgtggatgattggatccagccctcggagctacctataaggtatgctggattttcgtcttgctttcgtaaagaagccggttcacatggccgtgatactttggggattttccgggttcatcaatttgagaaagtggagcaattctgcattaccagcccaaatggcaatgattcgtgggacatgcacgaggaaatgttgaagaactctgaggaattttatcaggagataaagctaccttatcaaatcgtcgccattgtttctggcgctcttaatgatgccgctgccaagaaatatgatttggaagcatggtttcctgcatctcaaacttacagagagctggtgtcttgctcgaattgtacagattatcaatcaaggcgactagaaatcagatacgggcagaaaaagaacaatgaacaggcaaaaaacccaatatgttcatctgttgaactcgactctcaccggaacaaaaaggaccatgtgctgcatacttgagacttaccagaaagaagatggtgtcgaaatacccgaaagtttacaaccgtacatgggcgg

SEQ ID NO: 196841 - DNA, 377 bp, Gossypium hirsutum
ctcatatccgaattccgagtcgactcaggaatggcaactggaacagcaccaccaagaggaagtgcagcagcagctgcaaacatgcggaggaggagaacgacaagtggtgcaggtgcctcgggaggagctgctggcacaatgcttcagttttacacagatgatgccccagggctgaagatctctccaaatgtggtgcttgtcatgagcattggtttcattgcatttgttgccattctccatgtcatgggcaagttgtattttgttcgtaaggagtagggaggggctttcctcaatacctgtattaacaagtaccaaacaaagatcaatgttgtagttttcagttttgcttaataaatggattttgatttgatttctcc

SEQ ID NO: 196842 - DNA, 539 bp, Gossypium hirsutum
agccctgctccggttgttgctaagattgttattgttgaggaaggtgaagctgaagttgagaggaatgagaaaaagaagaagaaacataagaagagtgaagaggatgctgatgctgaaactgaagagaaggttgggaaggaaaaaaagaagaagaacaaggataaggttgaagcttcttcaccagatacagagaagtctgagaagaagaagaagaagaagagctaggagagcgaggaaactcctgttgctgttaatggtgcaggggatgataaaagcgaaaagaaaaaaaagaagaataaaagcaaagatgcagtagagccgtacgtgatgaggttttaaaacatttccttttagtaggaactcaaattgttttgcagttgtatgtttggtgcctacattaacctttttaagaagtgttttgcagtttctcaatgtaggttttggcataaacaattttatgatttacttttatgtaatggaatgcgttcattatctgcaaaaaaaaaaaaaaagggcggccgctcgcgatctagaactaa

SEQ ID NO: 196843 - DNA, 973 bp, Gossypium hirsutum
  unsure (1)..(973): unsure at all n locations
cttctatagtggctggattacctttagcaggaaacccactgtggtggagaacaatgtttggtattgctattgtccctgctattttattggctgtaggaatggctttttccccagaaagtcctcggtggctgtttcagcaagggaaaattcctgaagctgaaaaagctataagaacattatatgggaaggaaagagttgctgaaattatgtatgagttaagaactgcaggtcagggctctactgtacaagatgctggatcgtttgatctatttagcagcccctactggaaagttgtgagtgttggagctgcacttttcttattccagcagttagctgggatcaatgctgtagtttactattctacagctgtgtttcgtagtgctggaattgcatctgatgttgcagcaagtgctctcgttggggcatcaaatgtctttggctcagctattgcatcctctctgatggacagacaagggagaaaaagtcttctgatgacaagtttttctggaatggctgcttcaatgttgctactttctttgtcattcacttggaaggtcttggctccctattctggcacactagccgttgtcggaactgttctctacgttntatccttttcacttggtgctgggcctgtgcctggtctttttttgtcccagatttatgcgttcacaaatttagcctctaaccaggcggctttatcattgggcaatcttgggatctcacactttggctatggcttgattctctgggtgtggagaccattttggaaacccctgggtgccttgggaatccctggtgtgcccccttttgttgtttgaacatcctggaaactttgtggacacagggggcatacttggaagattagacttcgtttaatccgcactatttggacattccagggttcaaaatatcttgagtggtaagccatcaaggccttctttttgcttttggtaagccaaagggccttttt

SEQ ID NO: 196844 - DNA, 712 bp, Gossypium hirsutum
ccgatgcctgagaacacgggtttctctctgcatcacccccacaagctaaaagatcagcaaatgcccctattccagtaccacccttattgtttctgtggcgttaagagcagcaaaggaatggttcggaagcctgggccaaagcaaggaagtgtcttcttcggctgtgggaactggactgtcaccagaggtgctcgctgccactacttcgagtgggcttctccctaactcgagaaatcacaaaagggcttgtccatctttcttgatggcatcttaaacccttctttgatgtcattgtttaaagaaaatgtattaattgtttgtaatttgtatcgaaaaatattaggagcattaaaagcaatggtaatgggttgtctcctcgttgaagcacacataccttaagttgcttaactgcttgctgatgcttcttgttggtggaaaacaccgtagttgtgatcggcttatgaccgtgtacgaaagtaaacattgggtcttccgatgaatcgaagcttcaaacatgttaagctgacttgtttgacaggagaacaaatcggtaatgtgaggatttggcttagttaggattgatgcatttacatgcttaaaaaacatgctaaattatcatataataatcttatgagatagagacagcttgatttcctatgcttttctaatgggactaagcactgtttgctttcctatttatttctttgctttt

SEQ ID NO: 196845 - DNA, 405 bp, Gossypium hirsutum
ggaagttgaaagggagaaagctgctcgcttatttggaaaggacaacgcatgtgcattctattgctatatctgagcaagctccaatggcaaggcgacaattctgcttcggagaatggaagcttgtcccggaaactctctactgctagcagcctaggaagtatggaggaaagctattatctgcaggcatctttggactcatctgatggtttctctgaaaagagaaatattggagaggcaacattaagtcccgctctacatgaagagcatgacacccagtgcgtgtgaatctgcccttcctcagaaggagggtgaacttgcatcctacatgtctcgcttgtcttccatggaagctatccgtgactccttagctgaggagttggtgaaaatgacggaacagtgtgaaaa

SEQ ID NO: 196846 - DNA, 999 bp, Gossypium hirsutum
  unsure (1)..(999): unsure at all n locations
cggattactgtcctggtggtgaacttttcatgcttttggacaggcaaccaacgaaggtcatgaaggaagatgcagtaagattttatgctgcagaggtggttgttgcattggagtaccttcactgtcaagggattatatacagagatttgaagcctgaaaatgttctactccaggacaatgggcatgtagccttgaccgattttgatttatcttgcttgacatcttgcaaacctcagctgctgattccagccacagatgaaaagaagaaacggcagaaaagccaacagaatccgatctttatggccgaaccaatgcgtgcatcgaactcttttgtgggaaccgaagagtatattgctccggaaattatcactggggcaggccataccagtgcagtaaactggtgggctctacgcattcttctatatgaaatgctgtatggatatacaccattcacgggaaagacacgacagaagacatttgccaatgttcttcaaaaagaccttaaattccccaaaagtatacaagtgagtctgcatgcaaagcagttaatgtaccgcttattgcatagagatccaaagaacagattaggtgcacgtgaaggggccaatgaaatcaagcgacatccattctttaaaggtgtaaattgggctctcgttcgctggatgactccacctgagcttgaagttcccatctctgcaactgaaactaggaaggaagaagataaagcaatggaccctcaattacaggatttacaaactaatattttctgagaagcttggaatgctttatcacttcaccattagaggcttcgggttttatagatgttgtgtcgttctctcatgggccctaccattatgttggattcttcttttatcttttttgggaataaaatgcccccnttctggtgattggtaaataaaaatcaaattgttccttttaatttctttatatcatcaatacaggtaaggagatttggggggtattctttagattcttaaa

SEQ ID NO: 196847 - DNA, 788 bp, Gossypium hirsutum
  unsure (1)..(788): unsure at all n locations
ctactcaccagattcagcaaaatctattgttgttacaaaaactttcccaatcacgttttacttaaaagctatactgccacaactactactttgttaatttactgcaaaaatgaaggtgacgaagaaaaagagtgatgctactgctcaaagagcatggaggctactgcgtctattcttgttatggactagaaaaagtggggtgctcaggagacggcttatgatggagctaaggttggtgcctaagttcctcaagggtctaggacacacatccccttctcctcctggccaaatctattttaaggaacgccagctttttttcattcgatgagacacccattttccaggtgaagatgcgccgtcccgcttccatgcgcttccttcttccttgcatgagcactcaggatgtggatttcgattacgatttcggcatcgatggagagggacggagtttacgggtacgatagtggaatcaagagtcacttctgtgaaaagcaagggaggaacaaggaaatgataaggacagggagaggactgcttgtacattaccgctggaagaagaagagattgattccanggcgggcgnagtggttgttaaatgtctcttaacgagcgggaaagacttgaagaagaagagctacagcgtatacgacaaagcattggctttttttgcgctatataatnatagcggtttttaaatttttttttgtagtgataatgggctagaatacttttttaccaaaaaatattacatcacggcaaacttcgcattatatattggttgtgaggan

SEQ ID NO: 196848 - DNA, 699 bp, Gossypium hirsutum
cggacgcgtgggcggacgcgtgggggatgttcatcctattacaccctcgctggataagctgtgggatggtcatgatggtgcaaagaaagagcacctacccaatgataagaagccatcctccctgctgtttccttctagcaggaggtttgcttttgctgatgatggagccagtgatcacccaatacttgattggaagtccagttcaatgtctcaacaggatgtgacgaagtcttttacagctttggaatctacccctacaccatcttccaagagtgaagagacctccatcactcctccagaagcttggggtggtgagaagatatctgacaaatttgctcaccttcgccagctgccatctcgttttgggatgccagcttctggtggtctgacaacgagctctatttatgctggacaagatcagtcgtcaaagctcagtcagaccagttctaacctgagctatgaaaatttgcacacgaaagatgcctcttcaaatcaggaggcttcttcattgggatttcctgaacatttctcctcgagctccatgtctgctttatcttttggttcaaaaggcattactaaagctggcagccttgactcaccaaaactagcatctttagcaccgcctcgaaggttttcaacatatgctgagagaattagtactacatctgcttttagtgatggaacatcccatttggtggt

SEQ ID NO: 196849 - DNA, 832 bp, Gossypium hirsutum
  unsure (1)..(832): unsure at all n locations
acctcacctcacctcacctcacctttctttccatttccactccctttctctatctttacgagttcagtagagaaagaaagcaggatgatgctcggaaaacgctcacgtcagccgatcaagaggacgacaagcatgacgggtatcaccgtcgatgtctccgacgcggaggatgtcgtcgaccagcaccaccaagactcaatcatatctcatcttcctccccctcaaatccaccctatgcatgaatcccccgacggtacctccctctacgatcaccgtttcttggccatggtgtcgcccagaaacccaacttctttcactaaccgtatcgtcgacagtagcaccacagacactgcttcttttttgcgagcttgttggctttgtaatcgccgcttagctcctggtcgtgacatatatatgtatagaggggatacatcgttttgtagtcaagagtgcagagaaaaacagatgaagcaagatgaaagaaaagaaaagctaaacattaattcttcaaagaaagaagaccgccatgcccattcctcttcaaccaccacctcctccaagacttctaaagcgaagcctgtggttgctgcttgaactttgaagaaaggtagatcgatgattaatttcgataggaattaagccaaaatccaaacccagccagcctcaaaagaagaagagtagaaatcaatgggctttcgtcatatataatagtgggtgcagttaaattattataaagatgtggatggtgatgcaaataggcaaagctttaagcttcttatacatggattccaatgttataactctttctaatatagtttcctttntttactac

SEQ ID NO: 196850 - DNA, 345 bp, Gossypium hirsutum
ttcacgcgtccgcattaacaaccttaaaaacatcaacaaccttattaaccccaacaatgtccctttcctaacaggtctaacaggtgcacaaaccagtgccatcgtccaaaactcccacaacagcgacagcgttatcaattccgacagcaaccctttcgtcacagcaggccaactcccacccggctctctccaacgtctcatgttcggtaccataaccgtcatcgacgatcagctaaccgaagcccacgagttagattcagctatcctaggcaaagcacaagggttctatttggctagctcattagatggttctagccaaaccatttcgttgacagttttattaca

SEQ ID NO: 196851 - DNA, 439 bp, Gossypium hirsutum
  unsure (1)..(439): unsure at all n locations
gctggttctacttcgttatcgacacccgaaggtgaagtcaacagcctgatgcagcaggtggctgatgattacggattagaggtctccgttgggttgccaaaccctgctgctcaggctgttccgacgaagactgaagagaagggcgacgaggatgatttgtcaaggcggcttgcggagcttaaagctcgaggttagaatgaaaatggttgaattttatttgaatgagcttgtaatattatgataacattatgatgtttgggattataattgctgcttatatagatcataatctgtttgtaaatttgactgaatttgttgctttacaatgtcattaatgctgatgcccctttagtgtgagttttccaaaaataaaaaaaaaaaaaatatattaaaattttattaaatataaaatatannnnnnnnnnnnnnnnnnnnnnnn

SEQ ID NO: 196852 - DNA, 504 bp, Gossypium hirsutum
aaacttttcacttgtgccagtgagaacaatggaggaaaatttgcatacgtgcatgttgctgtagcatactatattatgattcgacggagggatatataatttttttagtgatgtagtttttgaaactcttggcagggaacttacaagtgtccaaggtctatcagactggttggattctgcatatagttatttggcaatggttaattacccgtatccttcaaactttttaatgcctttgccgggacatcccataagagaggtctgcaaaaagattgatgggtctcctgccgggtctagcattctggagcatatattcaatggagtaagcgtatattacaattatactggagaggttgactgttttcaacttgatgacgatcctcatggcatggatgggtggaactggcaagcatgcactgagatggttatgccgatgtctagtgatcgaaacactaacatgtttccagcatatgattgggattactctgctttccgagaagggtg

SEQ ID NO: 196853 - DNA, 546 bp, Gossypium hirsutum
tgaagctcccattttcgaaccagatttaattagagccattttcaagcacatttggataaggagagctcaagagcgtgaaaggaacggattcccaaacactgaggccggagattccgaggttggagctggaacatcaaagaagaatcgacccacttccgctaatacaaatgccttgaagctgagttgtgaacttcttcggatttttatcacagaggctattcagcgagctggtacaattgctgaagctgagggtagtaccatgattgaaccaactcatttagaaaggattcttcctcaattacttctggatttttaaggggttcagctcgctaactaattcgttggaactgatagacatcaatgcagtatctctacatcagctagtatgtagtattatcgtattgattatcgattgtgtagtggacaagtagactgtattggcctagtggtaatctagtatcaagtatatcatccaagtgtattattgctatgaacttactacagtattaatggctgaatatgaccgatgtcgattttagttgaaaa

SEQ ID NO: 196854 - DNA, 556 bp, Gossypium hirsutum
cggacgcgtgggcggacgcgtgggcggacgcgtgggcgagaaagagcttccttatgaagttgcggagagcattcggttacttcgctgcaagcctcccactgaagctgaagatggtgaggcagtggttgttcctttgagagagaaacaaatccggagaatacaaaaagctttagactccgacgatgttgagcttgttaaactgcttttaaccgagtccgatgtaactttggatgatgccactgccctccattacgccgcagcgtattgtgatcccaaggttgtttctgagattcttgccctacgtctggctgatgtcaatcgacgaaactctcgtggttatacggttcttcacatagctgcaatgcgtaaagaaccggccgtgataatgtcgcttttagcaaaaggggcatctgcttcggagttgacgttggatggacgaagtgcttttaacatctgccagagattgacgagaccgaaggattatcacgcgataactgagcatgggaaggaaacaaattaagatcggatatgcatcgatgttttgtatagagaaatt

SEQ ID NO: 196855 - DNA, 459 bp, Gossypium hirsutum
gcggaaaggaagggaaaggaatcaaagatggggggaggaatggaggcaaacaagaacaggttcattgaagattggagcagtgcgagagagaatctggagcataactttcgctggactcgccgcaacttagctctcgtcggcatattcggcatcgctatccccgtccttgtctacaagggcattgttcgagaatttcatatgcaggatgaagataatggtaggccatacaggaagttcttgtgagtttttctccgcaaagctggataataaatgttgacgagttcaactgggttttatcttggacaacaatttctgttatttacttggttttggaaattgtcatgttattatttgctcggtttagaaacaaattctgtgctctgcttcttttaagtttctggtgtagcttttgaatatttggttcatattacatgttcaaataatctgggtttctgctgc

SEQ ID NO: 196856 - DNA, 620 bp, Gossypium hirsutum
gtgagagagagagagagagagagagaagtgaaagatggtaagaggaaaagcactaagctgcgtatagggctcttctaagagccacccgcgggtcatttgccggcgacaccttgatgttgaacgcctctgccgttgaggttcgtcagaaatttgaagccaatcgtcatgtcacctcggagcctgagatccagaaactcctcgaggaagcacgggaggcctcccatttcgtttccaccatgattgttcaagccaagctcaacgaacgcggcggctacgaggtgaagccgagtaaggagcatgcaggagctactttggagattccttccgaagagatcatcagaaaatctgcatcacagtctaaacaatgaacttgggcttttatcagatgcactactgctctgtttgtttgctatttttgctgtctgctagtggatacatttgacccttgagcttacttctgttgcaaaacttggtagagatctatccaaagcaaaaaccattttaatgggttgctctaaaattttattcaatgtgaaacaattatgtggcaaattttgccttggtttatgagaggttcgtcttattaattaaaaaaaaaaacataccactgataatattag

SEQ ID NO: 196857 - DNA, 507 bp, Gossypium hirsutum
  unsure (1)..(507): unsure at all n locations
nnnnnnnnnnnnnnnnnnnnnnnnnnnnnnnnnnnnnnnnnnnnngactgcttatgaactatgataatataggaacccagttcctctagagaatttcaaagggcaggagcggatgataaacctgcatggattgcatgttagtgaagcccttcatatgctgaaacatgaactatcagtgctgcggagcacagcacgggcagcagatcagcgtctgcaggtatacatatgtgttggaactggccaccatactaggggttctcgtactccagcgagacttccagttgctgtgcaacggtatctgcttgaagaagagggccttgactatacagaaccacagccagggctacttcgagttgtcatatattgaagccatggaccttgacagcgttgagctataggaagtttttgacactacagaaaaaagaaaccatcaagtcatagtcaccatagtcattcttgtatctgtacatgggaagaaaatgaaaaggggaatgtagttgaatctgg

SEQ ID NO: 196858 - DNA, 689 bp, Gossypium hirsutum
cccacgcgtccggcagtcgcaagaactgctgtatcgtcggctctgctcttcatgccgggggccccccctttttaacttcgatttagacgaagcaaatcaggatgtcgacggcgcgcctatgttgatgcactggaggagaacgtgcgttgtgcgggggcgacgtagcctgattcgtctgcggcggaggcgtgcgagggagccttgctgacgtgcggcgctggggcaaaaggctaggttttttcggatgtgtgctgttagggctagctgtagaacccttcgatcaacaaagatgactggagatgcaagtgaggaagctgttcccgagatcaaatatgttaggacttcaaattcagctgaagatcacagcggttgggttttatcaaagcaggagtagcaagcggcaacttcggcttccggaccgagcagaaaaggccctggtctttagtacaaatctctctcattctgatttatgttgctcattactttccttatgtccttctggcttgtaatattcaggactctagtattggtacatatgttatataagttgagtttctagctggcatgtgtacagtttaaccatgtagtctggtaaacatgtcatcttgaacatggttgttacattattatattatacatcttgcagtttataaaataattctgcacgaactttctcgtggagtaacatg

SEQ ID NO: 196859 - DNA, 626 bp, Gossypium hirsutum
  unsure (1)..(626): unsure at all n locations
tcctggttctttttgcatccactgattttgcgttctttgttttgtggaatcaaagcttcgccgttgaccatgattctccggtcagtattggtcttggttctgttggtgggggttttattccgtgcatcgcaatctttgcgtttcgatctgcaatcgggacaaactaaatgcatcgccgaagacatcaagagcaattcaatgactgtcggaaagtaccacgttgttaaacctaacgaagatcatcctttgcccgattctcacaagctcaccgtcagggtaacgtcttcgtatgggaataattttcactcggcggaaaaggtggagaaatgggcagtttgcattcacggcgacggagcatggtgattacatggctttgcttttgggcgccggagcattcgccgccgatctcggtcaccggtgatttcggttggaggactggagtccacaccaaggactggactaacgttgccaagaaaggccaagtcgatgcgatggaacttgagctgaagaatctgtacgataccattcaatccattcatgaagaaatgttttatttgcgtgagagagaagaagaaatgcangaactgaacanagctacaacctccaaaatgttctggttggtcttt

SEQ ID NO: 196860 - DNA, 584 bp, Gossypium hirsutum
ccgggcgacccaggcgtcaaactcagggcagaaaaacatggtgacagcccaaggcaggaccgaccctaaccaaaacacgggcattgtgatccagaaatgtaggataggtgccacttctgatttacagcctgttcgtaaaaacttcccaacatatcttggcaggccctggaaggaatactcgaggactgtggtaatgcaatcaacaatcagtgacgtgattcaacctgctggctggcacgagtggagcgggagtttcgccctgaaaacactgttttatgccgagtaccagaacactggggctggtgcctcaacttctgcgagagtgaaatggggagggtacaaggtgatcactagtgcaagtgaagctcaggcttttactcctggcaggttcattgctggaggaagttggttaagctctacaggctttcctttcgctcttgggttgtaataattttaaagattgtattgtcaatgtacccacctacctacttcattgtttggtttgagatttgctttgcggccgtgtatctgttaaattattactaaattaatagtagtaataagcgaatgccaaggctttcttc

SEQ ID NO: 196861 - DNA, 398 bp, Gossypium hirsutum
cgttcgagataacagctacactggctcgagtgttggaggcacctattgggtatacagggtgcggattacaatcaagcgacggctgaagagacggatatttcaccagatgatgttgcgtatgttgaagagcggtccattgccacattctccagattctgtgatgactaaatgccatagctcctctacaatacagtcaaatagtacgacttaacttaaatttcactaaatttcgaggcataatcgtaaaggaaacactgtcaacctgtactataagtgctctctccatttgtgtctcaccttgaatggtaaatgggatggcaatattatataggataagcggtgtatgaaaacccgtagctttggcatttaaaattttagctgaatccaactttttgatt

SEQ ID NO: 196862 - DNA, 845 bp, Gossypium hirsutum
ttttccacgcgtccccccacgcggttgatatccaactatcactctttaggtttattgcattaaataaatcatgaaatctttccttcctttctttgcattcctctcacttctcctgtttgtagacaccattgcagcagctaggaaagatgctggagagtactggggagctgtaatgaaagatcagcctatgcctgaggcactccaagagcttgttcggattgaggctgccgttgccaaccccgatgagaaaaccaagtgccatacatcaggtaacattgagcttaaggaagagaagattattgttaatgaggagttcgaaccaaggccaaacatttcagcttacggtgatgacgctaatctaaaaggagataaatcatcatcttttgcagaagattttgaaccgagacctaacatttcggcttacgggggcgatgatgctggtcttaaaggacagaaagaatcattcactaaagatttcgatccacagccaaatgtctccgcttacaataactaattaaaagcgaaaccaaagtaccagtggcttagacccacatcttccaataatttcgtcatcagattgtgtgttgtactcttgcgtgtgaagctttatgttttatatttgtgaaaaaaaataagtgggttgttatgaatatctatgattatgtgaccactatcattacactagaatggcaaagaactgtcggtgttcgtagttatctcatcttgtaacatctctttcagcactcaatttcatttaagggtatgcattttctttttcaataacacgaaacacatcaaaaatcgattcacgttttctagattcccaaaaatgaattttgtttaat

SEQ ID NO: 196863 - DNA, 766 bp, Gossypium hirsutum
  unsure (1)..(766): unsure at all n locations
ggaannncccgggtgcgggccgacgcgtccgctgctcacttttctcctgggtttgtagacacgcagttgtctagcagctgaggaaacgatngtctggagagtggcggtggggatgctgtagggtgagaggaggcgagcctatanngcctgannggcactcncaagnnnagcttgtntnncggattggaggcttgccnnngttgccaacncnnccgatgagaanannaccaagtnngccataccatttcaggtaacannttgagcttaagcggaagaagaagatnntattgttaatgaggagttcgaacccaaggccaannnacatttcagtttaccggtcgatgaccgcttaatctaaaagcgagaataaatcatttcatcttttgcagaagaattttgaaccgagaaacctaacatttcggcttaccgggggcgatgatgcctggtcttaaaggacagaaagaatcattcactaaagatttcgatccacagccaaatatctccgcttacaataactaattaaaagcgaaacccaagtaccattggcttagacccacatcttccattaatttcgtcatcagattgtgtgcagattgtgtgtgaagctttatgttttatatttgtgaaaaaaatagagtgggttgttatgaatatctatgattctgtgaccactatcattacagtagaatggcaaaggaactgtgaccactattgggatctttgtgatgttaactctttggaacatcaaatcaactattattgcaac

SEQ ID NO: 196864 - DNA, 903 bp, Gossypium hirsutum
gcgccctcgcttgcgcccacgcgtccgcttttatctcatgaaatgcaagagtttctcctctttttgataaatacttaatttcgcttcatttgagtcttctttcttaaatttcgtctaaaaatcctctcccaatttcatttccaaagcttttcaattctcttgattgttcatatattataaatttcttctttttcagccatgggtgttgcagttctaaaaccagacgattgtttgaagctaccaaatcccgtgaaacaacgaaatagtctttgccttaatccgaaccgatcgaatcggtcacacccaaaccgtaaaactcggtctcctactacctcccctccttcccagtcggccggccccaaggtaccggctaaagatctcgtgatgggtcaagttaagatcctcaaacgcggtgaggttctaaaaaaaccgacgccggagaaatccgtcaggttcgaaaaggaaaacattgacgttgcagatctgggttccactaaccgtttgggtcctgatccccgttccgttccgacccagatccgactgaccaagtcaaacaacaattagaaggtcgtcccagcctctttttatgctgggtcggcctttataacctcgccgcctccgagttccgtcccgatgccggtgttttgcaccaagaagatcagcgttaccgtaaagaacgacgacgccacgagcgacttacggaggatattaaggctcgatttgtagtcatacccagaaattaattcgtgtcagtttctcgttttcatcgtttgggttctctcttatatttcgatcatcccttattttttcaaggggaaagatcgaaacaggagtagattttagcttttcaaatcatgttctttatgttgtatagcgtaacttgggtcttagatttgttgattt

SEQ ID NO: 196865 - DNA, 657 bp, Gossypium hirsutum
  unsure (1)..(657): unsure at all n locations
cgacaatgcagtccgccgtttttaaaaatatggtggagagcctttcagtgcccacatttcgagtggggtatcctgtgactacggacgcgcttgatgccttgtatgagaaggtgaaaccaaagggtgtgacaatgactgctttgttagccaaagctgccgcaatggcacttgcgcagcaccctgttgtgaattcaagctgtaaagatggcaagagttttacttacaatagtaacatcaacattgcagtagctgttgctatcaatggtggcttgattacccctgttcttcaagatgcagataagttggatttgtatctactgtctcaaaaatggaaagaattggtggagaaagcccgggcaaagcagcttcagcctcaagagtataattcggggacattcactctgtccaatctgggcatgtttggagtggacaggtttgatgccattcttcccccaggccagggagctatcatggctgttggagcatcaaagccaactgttgtagctgatgctgagggattcttcagcgtgaaaaacaaaatgctggtgaatgttactgctgaccaccgaattatctatggtgctgatttggctgccttccttcanaccttctcaaagattgttgagaacgctgnaagcctcactttgtagatgattc

SEQ ID NO: 196866 - DNA, 627 bp, Gossypium hirsutum
  unsure (1)..(627): unsure at all n locations
cccacgcgtccgcttcgcccttctgtaaatttcccttcaaagaaaagaagaagaaaataccaacaactatcagctaacgatgagttattacaatcagcaacagcctcccgttggcgttcctcctcctcaaggttatccaccggaaggttatcctccaaaggatgcttatccaccaccggggtatcccccacaaggatatcctcaaggttatcctcaacagggataccctccgcagggatatcctcctcaatatgctcagcctcctcctcctcagcaaaagcagagttcgggtttcgtagaaggctgtttggctgctctttgctgttgctgtcttctggatgcttgtttttgacgaccttttctccaatggcagcttagaaaaatattgaattgataggaggagagttgaattcaattaccattttcaaacttcaatttcaaatgttcttctttcccttcatcgctttttttcttgcttaataattgaacccttcattggatttgaactcttgttgacatacactgtaatattaggatctttttcctttgttctatatatttttggatttttattgtttttcatggccggctgattgattttactgttttatacttggaagcatntga

SEQ ID NO: 196867 - DNA, 693 bp, Gossypium hirsutum
aacttttctaggtgttccccaaaataatgttcacccacatattcacaatatatcctaataaggtcattagaaataaaaaaagagctttcacttactttttcttttaattgtaagaccaaaaaccattctctatcattcctcatctctttagagcttctcctctttctctcaatttttttttttcctttttgcatgcttgataagaaattgatggcaactttgatttttatttccttaggtttccatttttttaaccctagtgtgttttttactcatgggctttagtcaaaactcttactaaaacaattggaccgtgctattatgatttgatcgagtaattacatatttcaagtagaaaaattgtgtgaatggattgatgtattagtctaaaacttggttcactcttaaaggaaacatcttaattttatcttctcacgagtgaattgaatgttactaatatttactctatcaggatatatgaatttgactgatttttggctttgctgttctgatttgagttgtgttggggactgaaaactagacaacatttggatggttttctttatatatgcagctcttagatcttcatatgcaattaccgttatgcacttgataatatcaatttcttgtgtcaagtggttgagtatgtgaatgtgcacaggtgtggcagatgagaactggaccacgtctctt

SEQ ID NO: 196868 - DNA, 540 bp, Gossypium hirsutum
cccacgcgtccgggaggaagcaaggcagctagtggaaatagggctgggcggggatgttattggaagcaccttggggatgattaaaagagagagaggagaaagtgtgttgaatgaaattagaggtagctcctgtttgcggctggaggactttcggccttcgcatcccaacagatcaaggatgggagaaacttttctttatttagcacatagcaaagtgtagtgaatagtgattgctccctttgattttggtagaagaaaattcatggcttggcctagcctaatctagcattgggttcttgttaagttccatgcttcttggctatgtctgaactttattattattatcgtccgtaatgcaaatattcacttcacaacaaagaaaaaaaaaaaaaaaaaaaaaaaaaaaaaaaaaaaaaaaaaggaaggacaaaataaagaaaaaaaaaataacaaaaaacagaaaaggaaagaaacaacgatagaataaaggatagaaaaaaaaaaaacactggcacgaaatattactggggggcccctttt

SEQ ID NO: 196869 - DNA, 342 bp, Gossypium hirsutum
tcgtccacgcgtccgcggacgcgtgggcttgcagtttgttaggagccaagattctaatcgatgataatcccagatatgctgttgagtgtgctcaagttggaatcagagttctgctttttgattacgagaactcgtatccatggtgcaagacagagtcaattgataaacatcctttggtgactagggtaaataactgggaagaagcggagcaacaaatagctgcttggatttttagttctactatcccataggatgggctctatagagccttccactgcatatcattgggtattggttcttatgccccgaacattcaataaggccaaaatggtggcttattgg

SEQ ID NO: 196870 - DNA, 1050 bp, Gossypium hirsutum
gtccttcacttccaacatttgagaaacaagcaaagaaagatggccaatcttagaagtctcacaaaacatttcatatgtgcttgtcagcttctcttgttattgcaagccaaagtcttttgttctcagtacaaggttggagatttagatgcttggggcattccaacatcagcaaatccccaagtatatgccaaatggtccaaaaaccattccttcaagctcggagactctctcttgttcctatacccaccaagtcaagattcagtgatccaagtgacggaacaatcctacaacagttgtaacctcaaagatccaatcttgtacatgaataatggcaactcactgttcaacatcactaagcctggggagtatttcttcaccagtggggagcctggtcactgtgaaaagaagcagaagctttacatcgccgtgctttcaggcaacggctctgcagcacttgctccttcttacggtccttctgcattaccggacactgcatcgtcaccgtcttacacgactgtcttcggcaacatccctcaaccgccttcttcatcgccgtcactagggttcccattattcgttacagctgttgttgcatcagccacatggggaataatcaatgccatgatatgaagaaggggacatagttactcgatctctactgtcaaattgtcaaaccattccatttggcattggatttatttttcattcaaatgttatttctagaatttgggttttattcttcggatttgtgattcatttttcggtgatgaaacttgcaaagagaatacgaacagtgaaatgggagatctagacagtgttgtattgtattgtataatagcttattctttctgtgttttcatccatatagatttttacagacgggacaggaaagaatctatgagcttgaaaagaagagattttggaaaaaaacaaccttcttatgataaaagccgaaaaacaacaagtcgattatgaaaagaacatgatagccttctataagaaacaggctgttggccctcaacaagatgaggaggaatcagagaagtctgc

SEQ ID NO: 196871 - DNA, 460 bp, Gossypium hirsutum
  unsure (1)..(460): unsure at all n locations
gacgggcggaccgacgcgtccgaaggaactaaggacttcccgcagtgtggtggttcaaataccgtagtgcaaattttgaatgcttggaacgttccttttgaaaccataaacatattagagaacgaaatgctacgtatgggtctgaaggagtattccaattggcctacctttcctcaactttatatcgaaggagagttttttggtggctgcgatatcactgttgaagcatataaaaatggggaattgcaggaactattggagaaggcgatgtgctcttaaatacttatctgcattgaaaaacagatgtagttgtacttgttcgtaattagctgattacttattgtctcggctggcttaacttcttttgtgattgattntgttggtttcacattggaaataatccaagttggtggttggataataaaataaaaggatttaaatttggaccccatttttattc

SEQ ID NO: 196872 - DNA, 605 bp, Gossypium hirsutum
gtcaaaccctttggaaacgaggttgccgaacgcaccggatatggaaatctattctctgtatggagttggcctaccaactgaacgagcatatgtgtacaagttatcacctcatgccgagtgtagcattccgtttaagatcgatacatctgccgatgatgaagatacctgcctgagagacggtgtgtattccgtggacggggacgagacagtacctgttttaagtgcaggtttcatgtgcgctaaaggctggcgtggtaaaacccgatttaatccctccggaattcgaacatacattagggaatacaatcatttgcctccggccaacctattggaaggccgtggcacccttagcggtgcccatgtagatatcatgggaaactttgcattgatcgaagatgttataaggattgctgctggggcttccggtgaagaactaggaggggatcaagtttattcaaagatctttaactggtccgagaatatcaacttgcaactggacgaggagattccggtacatttgtccagttgatcggatgaaacagctttgtattgcttggtgtttctcgaacaaatgatgaacataatgatcaaatattatatggaat

SEQ ID NO: 196873 - DNA, 883 bp, Gossypium hirsutum
  unsure (1)..(883): unsure at all n locations
gtcaagggcaaggaagcatgtctatacagatgatggttcaaaggaatccaaattagctcagattaagagtggatatgagtgggcgcagaaagaatatgtattggcagcaaagcggtatgaggaagcattaaatattaaaccagattttcatgaagctcttcttgcattgggacaacagcagtttgagcaagcgaaactttgttggtaccatgcagctgggagcaagttggatttagctgctgggccttcccaggaggtcctacaactttataacaaggcagaggatancatggaaaagggtatgcagctgtgggaggaaatgaaggagaaacgactgaatgggctctccaaattcgacaagtataaggcccatctgcagaaaatgagtttagacgggctgtttcaagatgtctcttccgaagaagctgctgagcaagctgcgaatatgtgttcgcaaatataccttttgtggggaactttgctttatgagcgctctgttgtggaatacaagcttgagctgccaacttgggaagaatgtttggaagtttcgattgagaaattcgaacttgctggagcttctcctacagatatagctgttatgataaagaaccactgctccaacgtgactgcatcggaaggtgtaggattcaagattgatgagattgtacaggcatggaatgaaatgtatgatgtgaaaaggtggcagattggtgttccatcattccggctggaaccattgttccgtcgccgggctccaaagcttcaatctgccttggagcaagtctgagtttttcatgattggatattctttggaggcatttgacaagtacaagtgcttcagttttgtttaattctttttncaagatcagttttgtgtgctact

SEQ ID NO: 196874 - DNA, 1115 bp, Gossypium hirsutum
  unsure (1)..(1115): unsure at all n locations
gctggacctatttacaatgattatagctctgttgggtgctgtttgcttcttaagaaagagaaggcgattattgtgcagcctgatcgggtggtcattggtaatgggcctgcatttgggtgtgttttgatgaaagacttcctaagagagcttgccaagaggcttaagcacaataatactgcttatgagaattaccataggatttttgttcctgagggacaacctttgaaggcagcacctaaagaccctttgagggtcaatgttttgttccaacatatacagaagatgctttctagtgactcanccgtgattgctgaaactggggattcttggtttaactgccagaagctgaagttgcccgcaggatgtgggtatgaattccaaatgcagtatggatcaattgggtggtcagttggtgccactcttggatatgcacaggctgttccggagaaacgtgtcatcgcttgcattggtgatggtagtttccaggtgaccgcacaagatgtgtccacaatgctgcgatgtgggcagaagaccgtaatcttcctcataaacaatggtggctacaccattgaagtcgagattcatgatggaccatacaatgtgatcaagaattggaactacactgccttggttgatgcaattcataatggtgaaggcaagtgctggacagccaaagtattttgtgaggaagagcttatagaagcaattgagacggcaacgggagccaagaaggactgcttatgcttcattgaagtgatcgttcacaaggacgatactagcaaagagctgttggagtgggggctccagggtttctgctgccaatagccgacccccaaatcctcagtaaattcttcgcgctgccttctgcacatgatgctttatgctttgacctatttaagttgatgaaaatttatggtatgaaagctgagtttttcaacatttttccaaaatttgcggagtgcttgctcatatttgtgtacatcactttcaacgtcgtttccggtaatgaatgctatgttctggtttttttaatgctatgttcccgtttttttnnnnnnnnnnnnnnnnnnnnnnnnnnnnnnnnnnnnnnnnnnnnnnnnnnnnnnnnnnnnnnn

SEQ ID NO: 196875 - DNA, 436 bp, Gossypium hirsutum
  unsure (1)..(436): unsure at all n locations
tcggtcaaaccacgcatcggatgaagtgtatcttggacagcgaacacccatctgggccactgatgcaggtccgctacaagcttcggatgctttcaataggagacttgctgaaatcgacggggtgatcttaaagatgaacatcgacaagaaactgaagaaccggatcggtcccgttaatgttccttataatttgctccatcccaccggtgaaattggaatttctggtaagggaattccaaatagcatctcaatataatttaagtaaaagatgaataaggaataatttgcatgaaataaatgttggtgcagcacatcaaaagtattgttgtccatacttttgtgtaattttctcgaatgatagtgttattccaagtttgatgtaattgtgcgatgttattattatgaatannatcaaaatatcatgatggggtgggtg

SEQ ID NO: 196876 - DNA, 484 bp, Gossypium hirsutum
ggaaaagaggaaaggttttggccatgaaaaaatcgtcaaggactgctactgaggacgcgtcggcttgctctggctcaaactgggggcaaggctgctgtaattgaacttaattgcgagacggatttcgttgccaggaatgaaatttttgagtacttggctttggcattggcaaagaaagctttgtttgtccaaaactcttcccaacagattcctggggttttctcatttgggcctgagtgtttagaggacttaaaattaaatcttgaccatccaaaaattagtggggagacaaccattcaaaatgcagttacagaagtggctgcaatgatgggagagaatataaaactcaggaggggtgttgtgatgtcaacatcttcgcatggagttgtttctgcttacctccatagatgtcctcaaccaggtttgggtcgaattgctggaattttatctcttgaagttgagaatgagaattctcaatgggatg

SEQ ID NO: 196877 - DNA, 374 bp, Gossypium hirsutum
  unsure (1)..(374): unsure at all n locations
nnncnnncnnncnnncnnncnnnaannnnnnnnnnnnnntnttcccatttcattcttggatgtcaccataaaaggtggccaagttgagaaatctgtttgaggaatccaatttgcaggtcccagcttccttgtgtatataggttttcataattttcagggtcttgatgttagcagttttagaatgtttatcgagcaggtttactttgttaaaagcatttttcctttctcttttgcttatttcctcaagtggcacctaacttctctgcctgtacagaaaagtaacaaattgagcaatgaagtaattctttgtaattttataactgtgatgccagtccttggaaatgatatatataatataggtggtttttgggttg

SEQ ID NO: 196878 - DNA, 365 bp, Gossypium hirsutum
  unsure (1)..(365): unsure at all n locations
cccacgcgtncgtgaagcaccacaaagatggcgaaagctgatctgatgggtatttctttggtggtactagtaacactgggtttcacggcgggtgaccggtaccgaaggatggggggagggagaacggagataaccgacgtgaagaccaacgaggaggtacaagagctggggaggttcgcggtggaagaatataaccggagccacggcctggggcggtggcggggatttgtaagtagtagtaacggaagacgggcggagttggttttttcccgggttttagaggcgcaaaaacaggtggtttcggggataaagtactatctcaagatcgaagcaatggagaataaagctagcaagacgtttgaatc

SEQ ID NO: 196879 - DNA, 577 bp, Gossypium hirsutum
gatttttgggttggtgggtttggctcaagacaggggagtccaaaaaaaagaagaacctaccatctaagtgatgctcttaccaaaaccaacaaccacgggtatcccaattcatgggccgccctattggtgtccctggacaacccagcgtatgtgggacatgaggtctgcatcatgggaaaggcaatatctggggcaacaattttatctgagagtctggaatcctgttcggagtcttgctaacgaatacgacattccttctaatgtcttactctgcggtaaagcagttgggcgccacccttagccagccggtatgcccctagtggctattgtctgttaccagtcatcagagtttgactgctgataaaatagattgagagaaagaaattggattgaaatgtttcgcctttattcatttgtatatcttagaaagcaatagactaaaattatctattccgatagttattactttattatctcttcaattcgtgttctgcaaacagagttaaaattatgaggttttgtaaaattaatcattttcttttaagtattaggtgtgcaattttatatatattatttt

SEQ ID NO: 196880 - DNA, 627 bp, Gossypium hirsutum
cccacgcgtacgagagaggagctacatgttgtcaagagtcaggacgcagggcaaccttatatggccatgattattagataatgttcgtcctgatatgagaatagcatgggacgagccatttggacccggtttgcctgacataaggagtacttcagtcgaagaaggaattcatcattgtaatgctagcaactttggcctgcaaggttgtgtctgtacaagagatataagcgaagcaattctgatcagcgacgcaacggagactggtacagttcagatcaattctgctccggcacgtggacccgatcattttcctttccagggtctcaaggatagtggcattggatctcaaggaatcaccaacagtatcaatatgatgacgaagatcaagaccaccgtaattaacttaccaacaccttcctacacaatgggttgatatgaaaaattttcataaattcgaccgatgaaataatgtactagcttgtaaagtcaaccaacattatgagctcatatgcttgttgtctgtaggaaatgaaatgagtagtaagactataacttgcataagttgaaatcttccaacttccaactttgttaatccacctcctttttctctaaaaaaaaaaaaaaaaa

SEQ ID NO: 196881 - DNA, 429 bp, Gossypium hirsutum
  unsure (1)..(429): unsure at all n locations
nnnnnnnnnnnnnnncggaaagaggaaatagaatgagaggagaggagaggaaagtggagttttaaaacttgagagaaaggggagagttaataatttccaaagacatggggaacagctgaagatgttgtttggctcgtgttcttccctgtggagctctagacttgatccgtatagtccatttgaatgggtacgttgaatagcttactggtcctatcacagctgctgagatcctcagagccaaccctaaccttgtcctaagcacaccaacctttcaaggtgttctacgtagaatcttgatcctctctcccgattcccagctcaaaagacgcaacatctactgtttgattccatccccaccgtcactgccgcagaagaaaaaaactgttgtgcaccacatgaaatcttccaccaaaatgcaaagcaacattt

SEQ ID NO: 196882 - DNA, 431 bp, Gossypium hirsutum
aatttttagacaagaatgagcatgaaatctggtgcggtcatttttcatctccttcttcttctcctacttgtcatggtaatatatttatccattaaaatttaaggagtttaagatgttttatgtttagaacttactccgttgacctttctcctgcatggcgatggaagtggaaccgaggagatggctgatgatttaatctccaaagggaccagtgttctgaggctccatagcatggatcatgatcggcaaactgaagatgatggcactacagttcaatcaagggtagatccattatctcacatggatcacatggatctatcagtgatggtgtttctcaccttgaaagatctcaaagttgggaactcaatgccgatctattttcgtaagaaagactcttcaaaatcccctcggtttttgcctaaacaagaagc

SEQ ID NO: 196883 - DNA, 606 bp, Gossypium hirsutum
gtttcaaaccaagcaaagatacagatttgggtggtttagcatgaaactgaagttggtcggaggtgactctgctggcgttgtaacagcttactatatgtgttctgagaacggggcagggccagaacgagatgaactggattttgagttcttggggaatcgaacagggcaaccgtatttaatacagacaaacgtgtataaaaatggtgttggaggccgtgaaatgaggcacatgctttggttcgaccccactgaagagtttcattcatattccattctatggaacaaccaccaaattgtgttttttgtggatgaagttcccataagagtattcacaaacaatggtgatgagaaaaacgacttctttcccactgagaagccaatgtatttgttctccaccatatggaacgcacatgaatgggcgacgagaggtgggtgggagaaaacacactgggaaagagccccatttgtgtcgtcttacaaggatttcagcgtcgacggtggccaatgggaagacccttaccctgcctgtgtgtccaccaccaccaagaactggtgggatcagtacaaggcttggcgtttatctgattcccagaaaatggattatgc

SEQ ID NO: 196884 - DNA, 463 bp, Gossypium hirsutum
gaagcctaaagtcggcagttgattttaattctgtccaagtcccccctagccaccctctcaatttcgatgagactatactagaggacaatgcgcggcctttgccatcaactgaagttgatgaaagccaagaagttatatccgatgagccaatggcttcagaagaacatgatgctgaaaaagccaagtcaaaatctactacaagcaagcaaaacgagaagttatatgcagtagaaggtatgtttaacccaaaaatgaagagggcagagaaaaagagaaagaaaaaagccaaaaacaaatcaacattagggggtgatgccatggatgatgaaggcgactatgactttggtgtggattatgtgaaggggaagggtcaaaatacttgtggggtgccaatgtcaggtattgaagttgatgagtagtaaaaaactaaacatacctggaaatctcaaaatggctcatcttt

SEQ ID NO: 196885 - DNA, 432 bp, Gossypium hirsutum
aaaaataaacaactcaaagattaatccgttgatagaaagcgtgaagatcgggtctaagctgggttctcttgaaagtttaaccaattctttgaatcttttgtagtctccctcgtgtatatataaatcaccctcaagagaagagaaaagagctccgcaattcatttcatcttttttcctttttgtaacaactttttttttctaaaggtatatatatttaaagtcttgttgtagtttttagttgtcggtttagggtttttttctttctaaaatttcaatctctttttatcgtttcatgtgtgtaattacaacgaaaaataccccaagggttatggtggagtgaggtgtgattttggaatctgttactttcttctttcattttctagggaaacccaaacagtgtgcttgtttacttcaatttttctgcttttttct

SEQ ID NO: 196886 - DNA, 440 bp, Gossypium hirsutum
caagctttttctttccccatggctgctaaagctttttcaagaagtataactccttctttggtgcttttgttcatatttttaagctttgcacaaggtaaagaaatcatggttggtggcaaaacaggcgcttggaagataccttcttctgaatcagattctctcaacaaatgggctgaaaaagctcgtttccaaatcggcgactctctcgtgtggaaatatgatggtggtaaagactcggtgctccaagtgagtaaggaggattatacaagttgcaatacgtcgaacccgattgccgagtacaaagatgggaacaccaaggtcaagcttgacaagtcaggaccatatttcttcgtgagtggagcaaagggccactgcgagcaaggccagaagatgattgtggttgtgatgtctcaaaagcatatgtacattggaatctcttc

SEQ ID NO: 196887 - DNA, 363 bp, Gossypium hirsutum
actgcaagatgcccttcgaatttatgaaaagcccatgccagggtttcccccggtggagattgccgctggcctcactgatgtttctgccatctatgaatcaatgaatgaccttgatcaggcaatcaagttgctgcagaaggccttaaaaatatacaatgatgtccctggtcagcaaagcacagtagctggaattgaagctcagatgggagttatgcactacatgttggggaattattcagaatcttacaactccttcggcagtgccatttcgaagctacgcatatgtagagacaagaaatctgccttcttcggcattgctctcaatcaaatggggctggcttgtgtgcaacgctatgctataaa

SEQ ID NO: 196888 - DNA, 437 bp, Gossypium hirsutum
  unsure (1)..(437): unsure at all n locations
cttcgtcaaaagctgtcacgtcatcgttggggatggtgaagttggtacccttcgtgaagtcagcgtcatctcgggcctccccgctgccaggagcacagagcgcctcgagatccttgacgacgagcgtcatgttatcagcttcagcgtcgttggcggagaccataggctagctaactacaggtcggtgacgaccctccacccttccacttctgggaacggaacggtggtggtggaatcctacctggtggacgtgccgctgggtaacaccaaagatgacacctgtgtgttcgtcgacacaattgttcggtgcaacctccagtcactggctcagatcgcagagaatctctccaggcgcaaatagcaaacaacgaaaccaagtcattttcgtgagtagattcagaaccctncatcaaaatagattaatttctctccgtctc

SEQ ID NO: 196889 - DNA, 455 bp, Gossypium hirsutum
  unsure (1)..(455): unsure at all n locations
cgcccggattccggtcgaccacgcgtcgccacgcgncgcccacgcgtncgtttgtggggaaaatatgggttcgggcatagtgttcggtagcttgttggcgtggattgaagtgatcgagaaattgagtgagatgaagctgatttccgaagccaaaacgcccgggttggtgcagtgggcggattgcttctccgcccatgaggcggtgaaggatgtttcacccgacgtcgacaagcttgtggaatatgcgttgaagcttggggccagggtcttgaaagctacggcagccaccaattgaaatcgaagtttggagtatgtgttactttcttcttttgtcattgagtgaaacttgggtgagaattgttattatcatttagaaaataaaatatttttatttttataaagaaaacaattttatgcttctaagtccttttatgaataaaatggtgagtttttac

SEQ ID NO: 196890 - DNA, 353 bp, Gossypium hirsutum
ttgtggggtgattggccctgatcgctttaattgggatatcaaaccaatgtgtgacgaatatagcttgacagttgggggcaatagacctacatggcgtcaggcagcttcgatgacaaagtgccgaggaacaatttttggttgcccgcagctaagaatttaggtcccccacttttttttcttcttttaaagtagtctgctggtttttttgtgaaaagttaactccttattttgtcgaggcattgcaaatcttccttattggagatgagaaatgaatgtttctttctaatggtaccttggttttgtaagccataatcttgtctgtgttaaaagttaatgatctgtttcatggctta

SEQ ID NO: 196891 - DNA, 840 bp, Gossypium hirsutum
cccacgcgtccgcccacgcgtccggaataaggttcctaccctttttaatcgccatttaattcctgctaccactactacctgttccactactacacttgccactctttccctccacccaaaccccacttctttcaaaatcgccactaaaaaccccgctcctctccaaaacatcgtgaaatcctcgtcaccagttcctgggattgttgggttttcaatgatggcgtctgcaactgctggagaaaatggtcatttcaagttgtctgaaactagtgtgcttaaaatcaacaagggtgatattactaagtggtttattgatggctcctctgatgctattgttaatccagcaaacccgagaatgctcggaggtggtggcgctgatggagccatacatagagctgctggcccagaacttaaagaagcatgctataaggtaccagaagttcaacctggtattcgttgtcccaccggagaagcaaggattaccccaggatttaaattgcctgcatctcatgtgattcacactgttggaccgatttatgattccgacaaggaccctaaaggctcactgagaaatgcatacaaaaattgcttaactgtggctaaagagaacaacattaaatacatcgcgtttccttccatatcttgcggtgtatacgggtacccttatgaggaagcagctacagttgctttatctactatcaaagaatttgccaatgacattaaagaggtgcactttgttctatttgctgatgatatctacgatatttggacgaaaaaagcaaaggaattgctctaggtttagtgcatgctaggaactagaattgagaacttcttcatgct

SEQ ID NO: 196892 - DNA, 466 bp, Gossypium hirsutum
gacatgactgcagaattcatcagcgcattgatatgggggtgctttttgagaaactgaatttaaattacgaggagggtgacagatggattgtgaatctcatccgaaactctaaacttgatgcaaagattgattcaaagactggaaccgttattatggagcctaatcaaccgaatgtttacgagcagctgatcgaccacactaaggcccttcaagggcggacctacaagctagtcggccagcttctcgagcacgcacaagcacagcctgcacgttaagttggacggacaaggaagatcttttgaatttatatgcaattttgagctatttgctgattgtttatttctttcagacaaatttaacagtgattttagtttttgagtaggaacaagactgataaattattatctggtcactcaattattaatttaatattttaaaatttattaaaaaaaaaaaaaaagggcgg

SEQ ID NO: 196893 - DNA, 700 bp, Gossypium hirsutum
ccctcttttccgcccacgcgtccgggcaaattttcgagacctccctggtgtaattgttggagcagacaatgtggctcggagggatccaacacgggaaaagcagtttttaccttctggaaaaccattggttccagaatatgtatttacctttgaacaaggaaaatctaaaagaccatttgcaagattatggtgggatgagactgtgccgactgttgtaacttatccttattgtcatagccaggtaatattacatccagagcaagaccgagttctcacagtccgggaatgtgcaagattacaaggttttcctgattattatagattctgcgggacaattaaagataggtattgtcaaattgggaatgcggttgcaattccggttggtcgagccttgggatacacaatggggatggcatttcagaaagggagcgggaatgaaccactgatgatcctccctcctaagttttctctttccaccaatatccagttagcaaaatcattgtcccaaagcactgatgattgaaccaaaactgatttcttaactttatatgcatgcttgcactgcaccattcataatgtgtatctctgacataaagttttcatgcaaaagctcttatgcttgcatctttgtatccttgacctgccaaagcttgcagcctctactgtagtctctcaaatgtaatgaaatggtttcatttct

SEQ ID NO: 196894 - DNA, 426 bp, Gossypium hirsutum
gcaaagtttaaagagaaaaacatgaatgggatgcttcaacatttcacagtttcaatgtcttgtggtgggttttcatcatcatcttcatcagatgaggaatattcatcatcttcaatggcggctcaagtttcaccatttccaaggcctggaaggataagtagatcaatgagttattcagccaggatggtgaggagatcagaggcaattgtttgtcatccaaagagttcactagttgcagtgatgattcaagctattgctcatagggtgaactatgtttgggttatagaagaagattgtagcttggttgggattgttactttttctgatatgttaaaagttgtccgggaaagttttgaaaccatggcctgaaaaggaaaatgagatgagaaagtttttttgtttttttaataatttttggttgatcat

SEQ ID NO: 196895 - DNA, 695 bp, Gossypium hirsutum
  unsure (1)..(695): unsure at all n locations
cccacgcgttcgcaaacactcggcttctcccagatcttcaccaacctcccaaaatgacaacccgcttcaagaagaaccgcaagaagcgcggccatgtgagcgccggtcacggtcgtatcgggaagcacaggaagcaccccgggggtcgcggtaacgctggaggcatgcaccaccacaggatcctcttcgacaagtaccatcctggttatttcggtaaggttggtatgaggtacttccacaggctccgtaacaagttccattgccccatcgtcaacatcgacaagctctggtctcttatcccggaggacgtgaaagccaaggccaccaaggatgccgctccgatgatcgacgtgacacagttcgggtactttaaagtcctcggcaaaggtgttttgccggagaatcaaccggtggtcgtcaaggctaagttggtgtcgaagaccgctgagaagaaaattaaggaggctggtggtgctgttgtgctcaccgcataggttagggttcttggttttattggatctgaatgacatttctgttagattattgttatgtttcgttttttttttgagttaaacttgaaatgagatttttaatatcgtttaattttggatcaaactatatgttttatgtgataagttttttgccttacnnnnnnnnnnnnnnnnnnnnnnnnnnnnnnnnnnnnnnnnnnnnnn

SEQ ID NO: 196896 - DNA, 915 bp, Gossypium hirsutum
ggtaagtggtgaaaggagagaaaaaggtaatttaaaactctaatcggagaaggaaatcgttaagagaattgaaatgttgaagaagaataacaagaattttaggaaaagaagcatccaagaagacgaaggagatgaccccgcctccaaatcggacgatgaagaagacagacggttggcgttagaggaagtgaaattcctgcagaaacagagggagaggaaatcaggaatacctgcaattccttcggtgcaaacaggaggcatcgtcgccaaagttactgaaaaggccgaagctgatggagaaaaggaggagcttgttcttcaggacaccttcgcccaagaaaccgccgtcctagttgaggatccaaacatgataaaatatgtagagcaagaattggcgaagaaaaggggaaggaacatggatctgaaaaatgaagttgagaatgatttaacacgagctgaagatgaattgtataaaattcctgagcatcttaaagtgaaaaaacggaattccgaagaaagttctactcaatggactaccgggattgccgaagttcagctccctattgaatacaagttaagaaatatagaggaaacagaggctgctaaaaagctactacaggaaaaacggctcatgggacgggcaaaatcagaagttagcatcccatcaagttacagtgctgattacttccagcgaggcagggattacgctgaaaaacttagaagagaacatcctgagctgtacaaggaccgaggttcacaggatgacaatgctggctccaaaccaactgacgcaagcaatgatgctgcaggaagtaggcaagctgcaacaaatcagtttatgctagagcgcttccgaaagcgagaacgccaacgagtaatgcggagataacacagttacaagagcagcatatcaaa

SEQ ID NO: 196897 - DNA, 484 bp, Gossypium hirsutum
atttgcctcttgaaccatacatgatgcctccccgaaaagtgcgagaaatgaggcctcgtataagaagagctttgattcgagctcaaaagaaggctgaggagcaagaacaaggtgggagccaaagaaaaggcagaaagagggaggccaaaacagaagtggcagcatgaaaagtgatttgtgtccagtatggaagaaccgcaagtgtgggtgtagatcactttcattagaataatagtgtctttctcacagtttagcaaagtttctttatagctcaaacatagcatttactgttctgctttttgaggtactaatagttaggtgcagcacaagacgtggcttttgcctgcatttgttggctgcagccctctggttcccgaaagtctgaactcctttaaacataaattaaactatttctttgtttagtactattcgcctagcctataatttgaagaccatatcacaacttcagtttctatttgatttg

SEQ ID NO: 196898 - DNA, 681 bp, Gossypium hirsutum
atggatttcagtgttctcaatgtatgcgggggcctctaaatccttcaataagagcgctgatatacgcgataatcgcatggcttcaggtaccacccgagggcgttccttttcgagacgaatggcctttcgcaattcatcttctgggtcacatctacatcgatgatattaatagtgcaaggtttctttggaaatcaatacctcctgcaatcaaagagagccaaccggaggtggttgcggcctggaaaataggtcaaaagctgtggacaagggactatgctggtgtctacgaggctattcgtggttttgattggactcaacaaacacaagttcttgttgctgctttctcagagctttacactaagaggatgtttgaactgctgcaatctgcttattcgacaataagcatcgaagatgcagctcaatttcttggaatgagtgaggaagatgcctcgaattatgtactcggacaaggttggacagtcgatcctacttctcgaatgataaccgtgatgaagcaggctatcgtgaaggagcagaagttagacccgggcaaattgcagcgactaactgaatacgtcttccacctcgaacattaaatcatgtctgtaatttctgtgattttttgactgtcttgctgaaaatttcttttaagcaaagctaatggttctaatcattatgagt

SEQ ID NO: 196899 - DNA, 471 bp, Gossypium hirsutum
cagagaaagaaaagaggaagactgaaaaggaattggaggatgagaatggtggtgctggtgtgtattctgctagtttgaggaagaactatatattggcaaatgatgaatcggaagaggacacaatgcctgaaattcttgatggtcacaatgtgtacgattttattgaccctgatatcttgttaaggcttgaagagttggagcgtgaagagggtcttcgacaagcggaggaggaaggtgatgactttgagatggatggccaagaattatccctggaagagcaagaagcactggctgagatcaggaaaaagaagagcttgcttattcaacagcataggatgaagaaaagcactgcagaaagtcgacctgttgtaccaagaaagttcaacacagatagaaagttcacaacagggaggatgggtcgggagctatcttctttggggctggatccctctcttgcaattaatcgtgctc

SEQ ID NO: 196900 - DNA, 681 bp, Gossypium hirsutum
  unsure (1)..(681): unsure at all n locations
cttatgaggtcttgaaattgctcgaatcccgtttttgttaaatttttttcatctaattctcagttttcttttctatttatttttctcgagttctttttttgggataaattatcatggggactgaaattttacggcctcaggattgtttgattgaacagatccgtgtttcttcgacggcttgttctcgtcggagatatggaaatggtagctttaatcctacctataattataataatagtaatagcaataacagcaacggaaacgttagatttaccaggaaaccggtccagaggaagcgagtcgggtcggagcagcgggtttcgaagagatctggctccgtcgatgacttgaaggcggtggcgaacaatttcaagatggagaaggttacgattttgaggcgcggagagtcgttggattcgaagatcaagagcaacagcggtggtggaaaggaagacgggttggttgtcacgggtacggatcggttaggtccagatccagaaatggtttcgaaacagatcagatttgtggatatcaagtctccggtgacaggaaaatccgacgtgtacgctggatcgtctttcgctgcctgtccggaaccgagttctattcctttgccttctttctcgaagaagaagcatgttccgatcgatgattcnnncnttagagatctcatgcgtatac

SEQ ID NO: 196901 - DNA, 651 bp, Gossypium hirsutum
cttcggtatcccctcttcttccaagccaacaagcgtaaaggttgaatcttttcccccatttctccactcctaaagtcagggtttcgagcaacaatagaacaaaaatggggttctcaatgcagccttatggcatacaatccatgctgaaggaaggtcacaagcatctctcaggtctcgacgaagctgttctcaaaaacattgatgcttgcaagcaactatccaccatcacccgcacttccctcggccccgaaggcatgaataagatggtaattaatcatttagacaagctctttgttaccaatgatgctgctactattgtcaatgagctcgaggttcaacatcctgcggccaagattttagttctagctggtaaggctcagcaagaggagatcggagatggcgctaacttgacgatttcttttgccggtgagcttctccaaaatgcagaggagcttattaggatgggcttgcaccccagtgagatcatcagtggatatactaaatccattagcaaggcaattgaggtgttgggggaacttgtggagaaagggtctgaaactatggatgttaagaataaagagcaagtgttactcgaatgaaagctgtgttgtagtaaacacatggacaggagacatattatgtcccttatag

SEQ ID NO: 196902 - DNA, 922 bp, Gossypium hirsutum
tgcaattgctaaagaagttgaagctgagctggtttcgagggacataggctgccatctggttgaagtgctggaagcagtcaatttagttctttttgagtcaagaggcttgacaagatcccccgttcttgtagattctaagcattcgtacttacactcagtactgagctccagatgtggcagtgcaattttgcttagcataatttacattgaagtttgtcggcggcttggtctaaccattgtgggatctcgagttggggaagattttttgatatggccccagacagggtacccagaggaacgtcttcaaagtgacttcacgacacagcttgtttgctattgtcaatggaaggtgtgtggaggaccctagatcaatggcatcagattttactggtacttcactgttagggcttgagatagctacaaaccgggatattattgggattgcattagccaatttgattaagcttcactggaaacgtgcttcaagacaaatcatggattgatgctgacttctcccttaggcatgttaatgatgccagtgagaaacccaacatgatggataaatccaatgtccctctgctgcgcccgcaagatcttaggctagctatcatggcttcagaaagattgttgattctgcagccacataattgggcgctgaggagggaccatggcatgatgctgtattataatagggaatatggaaaggcagtgcaagagctgagcatttgcatggcctttgcgccggaagaagaggcagagattcttgaaccatttgttgagaaattgcatttgatgcggctggagtcatcatggaagtctttgggacacacaggtcgactcactgtgccttgaattttgtacataaccttctgtccatctgaaatcctccttgtattaagggatgaattctgcgattgtgatc

SEQ ID NO: 196903 - DNA, 441 bp, Gossypium hirsutum
cgcgacttcacgaatcttccgcagacacattggctctcaagcaactctctttcttttaaagtccacgccttctttcttcctcacattaagatttcaaatcccctttttttgcggcggttaacgtttgctgatcgttgcttggtttccgaggatcaatcatgactcgtggtaaccagagagatcgagatcgagaaagggctcaatcccgagcgggcggcaaaggcagcaagaccaaggacgatggcttaaccccagaacaacgtcgtgaaagagatgcaaaggccttgcaagaaaaggcggcaaagaaggctgcgcaggcggcagctggagggaacaatgctggaggcggtagtaaaaccaagaaataattatccgatgatgtcaaattgttaatgatttatttacgctggacgggaaagacagggttggttcgttgattgg

SEQ ID NO: 196904 - DNA, 842 bp, Gossypium hirsutum
gataagaagctgatcgaagaaagatgtgagcagctgaggacagccatggatacgagcagtgccatgtttgacagggagaaagcacaagaaagattatcaaaactatctgggggtgtggctgttttcaaggttggtggagctagtgaggcagaagttggagaaaggaaagatagggtcacagatgctttgaatgccacaagagcagctgtggaagagggtattgtgccaggtggtggtgttgctctcttatatagtacaaaggctttgcagaatcttcaaaccgaaaatgaagataaataaagaggcgttcagataattcaggacgctcttaaggtacctacttcaactatagcttctaatgctggttatgatggctctctggttcttgggaaactactggaacaagatgatgataatttgggttttgatgcttcaaaaggtgcatatattgatatggtgaaagctggaatcatagaccctctcaaagtcattagaacagccttagtcgatgccgccagtgtctcattgctattaacgacaaccgaggtatctgtcctggaaaatccagatgagaagaaaccaccaagtcgtatgccagacattgataatgactactaggtggactataccagttggagtacttaaaacactttttgtcatcctgcttaaaatagcagagaacttaaattgagagccaaggttcaaccctgatgaactcatttaagaggaatacatgatgatggtaaccaattataaaagaaaagataaataggatcatgcttattgatgtcattgcacaattagtgatctgggatttttgtagtacaaagaaaattagttga

SEQ ID NO: 196905 - DNA, 728 bp, Gossypium hirsutum
atcaaattcctttctcccaatttctatttatcttcttctccttctctttagtcttttacgctgcggccagaaagcaagaagaaaccatgccgaagaacaagggaaagggaggaaagaacaggaagagaggaaagaatgaagctgacgatgagaagcgtgaacttgtgttcaaggaagacgggcaagagtatgcccaagtgcttcgtatgctaggcaatggccggtgtgaagccatgtgcatagatggtactaagcgcctttgccatatccgaggaaagatgcacaagaaggtttggattgcagctggtgatataattcttgttgggcttcgcgactatcaggatgacaaggctgatgtgatccttaagtacatgcccgatgaagcaaggctcttaaaggcatacggtgagcttccagagaacactcgtcttaatgaaggtattgtcgatgaggaagatgaaggaggtgcagatgattacattgagttcgaagacgaagatatcgataaaatataaggttttggaattggttttgtttgaatgatttgcttaaatgttgggagaaaaaattggtggatgccgttttaaagggccggcatttttgtaattctccggttaggttattaaagttggcggaggtgtcgcctattaaatttagttggttccttttcacggaacctggtgcagtttctcaattttcctttggacaaaagtatgaaggttcaacct

SEQ ID NO: 196906 - DNA, 805 bp, Gossypium hirsutum
  unsure (1)..(805): unsure at all n locations
gtcaatttactataaaacttttgtagactcttcgtttcgaagctagtgtttggcctttggtgacgaagaatcagattggttctataagcttctcttatcttcaactcttgactctcaagtgttttactctacgcagcagaagcagaagtcaaaaaggcacaaggctataagaagagaccatgccaaagaacaaggggaagggaggaaagaacagaaagagagggaagaatgaagctgatgatgaaaagcgcgaactcgtgttcaaggaagacggccaagagtatgcccaagtgcttcgaatgctaggcaatggccggtgtgaagccatgtgcatcgatggtactaagcgcctttgccacatccgtgggaagatgcacaagaaggtttggattgctgccggtgatataatccttgttgggcttcgcgactatcaggatgataaggctgatgtgatcctcaagtacatgcccgatgaagcaaggctcttaaaggcatacggtgagcttccacagaacactcgtcttaatgaaggtattgtcgatgaggaagatgaaggaggtgcggatgattacnttgagttcgaagacgaagatatcgatnaaatatagggttttggaattggttttgtttgaatgatttgcttaaatgttggaagagagatatggtggatgctgtttanaaggctacaatatgtgtgatttctcctgtaaggtatttatatgtgctgaatgtgttccctattaaatatatgttgttacttttactgagaccttgtgccatatctcaaatttacttttgacagagg

SEQ ID NO: 196907 - DNA, 659 bp, Gossypium hirsutum
  unsure (1)..(659): unsure at all n locations
cccacgcgtccgcttacttttagtcgtgttaaacttggggacgaagataaacatgggaagaagaagagaaaactttcaaagttaaaggagcttgaaaatgcaatgaaattagaagcagctaagaaagatcccgagaaaggtgaggttatcgcgaagaagcattcatggaaggcagcaatggatagagctgccgggattaaggttcacgatgatccaaaattgttgaaacaaagtatacagaaggagaaaaagaggcataagatgaatgctgagaagtggaacgagagagttgaaacaacccagaagttgaaagtggagaaacaacagaagagatcggagaatatagcggacaagattcaccagaagaagatgcgacgcatcgcgaagagggagaagaagctgttgcgacctgggtttgaaggtcgcaaagagggttttattaatgaagggtcaagttaaggttcctttttttctttcaattttctgcatagcctgtggctttaactgatctgttccttttctgatggtaagattacatgctaggaatgccgttcttacaactggtttcccttctgttttctttttccacctagaagaaaatgtntgaatgtngntcacannactgatttgagttaatatactggannaatgtttgattc

SEQ ID NO: 196908 - DNA, 645 bp, Gossypium hirsutum
cttggtaaagacgggtcttgtatgcaagtaccatttttagcagaatgggtgcgagataaaggacaccgtataaaatcacaagtaaaggctgctaaaggtgctgttagtttaattcaaatacaagacgagctgaggagactgaaccaaggagcagacagagaagagaacatactgaaagcccttgaagaaaagaaggatgccatgcttcaatccctttggcagatcaacgtggtcgacatcgagtcaactttatctaatgtctgtttagaagtacttagagacgctagtgtttcggaagaagttctagtcttgcgagcgaaaggtttgaagaaactcggagccatttttcaaggagcgaaatctgcttatagtagagaaaacagtctgcgccgtgtaaatgtcgaaacggaaactgccggttcttagccatctcagcactctgatggatgttcacgttgggttagtcaatgtattcttgtgtgtgtcagacttttgaacatatgttcatcacaagtggtgtcagctccgtagcctaattgaaggaaaggcgatgagcttgaacaatgcgaataacgtgtggcggtggatacgcactttcgtatattttattgctcagcgtcaaagtgtgtataagtttttcattta

SEQ ID NO: 196909 - DNA, 703 bp, Gossypium hirsutum
catggatgttgcctttggaatggagtatctgcatggaaagaatatagtgcactttgatttgaagagtgacaatttacttgtcaatcttcgagatcctcaccgtccaatatgcaaggttggagatttgggcctatctaaggtgaaatgtcaaaccccgcgctctcgtggggtccgtggaacccttccatggatggcaccagagcttctgaacggcagtagcagtcttgtctcggagaaggttgatgtcttctcattcggtattgttatgtgggagcttctcactggagaagaaccatatgcagacttgcattacggggctattattggtggtatcgtaagtaatacactacgaccaccggttccagaaggctgtgacccagaatggagatcattaatggagagatgctggtcatccgagctaccagagagaccgagtttcaccgagatagcaaatgagttacggtcaatggcagcaaaaattcaaccaaaggggcaaatcccataaaataaagaaagcagaaaactcaaccctcaatttttcaaaatgattttggtcaatctggttattgtatggcatactcttgtttcctttgcattttgcatggcagatggaggaagaataatatggtgttcgtcaatgtgctgctccttggcatgaatgttgacagcacaaagaaaggaagggaaccatgatttctttttc

SEQ ID NO: 196910 - DNA, 1031 bp, Gossypium hirsutum
gcgctggttaagaaagatccagttcgacttcaagttttacgtgttaaaggttgttgggggggatcaaaagctgaaaatttattagaacaaggtgacatggttttagcagtaaataaagagcctgttacttgctttcgagacatagaaaatgcttgtcaagcattggacaatggggacaacagtccgccccctcgctcgaccatttttcggcagggacgtggaattgatcttcttgttggtaccgatgttagggatgggaatggcacagcacgagtgattaattggtgtgggtgtattgttcaggatcctcaccctgctgtgcgtgctcttgggtatcttcctgaggaagggcatggtgtttatgtggcacggtggtgtcacggtagtcctgttcatagatatgggttatatgccctacagtggattgttgaaattaatggaaaaccaactcctgatctagatgcttttgttaatgtgacgaaggagttgggacatggggagtttggtcgtgtgaggacagctccatctgaatgggaagcctcgagttttaacattgaagcaagatttgcactactggcctacatgggagttgagatttgatccagagagcgcgatctggcatagaaggatgatcaagaccttagattgtcgcaacttgtgaactgggtcatgtggtctaacttcttttcaggaatccacttcgaaattggcttggctgtggggatcaattgacaaattgatgaagactcagagagctggtgctgccattggtttctacctacagttgattggcttttgtacccaattggtggctgccaatgtgtgaggtttaagcttgaagaacgtaggttgacagtcaatccggtgaggcctaaagcatttattcagcaatttatatttattgttgtatgaaaatataaattaagtttcaacatctttcttatatataactttggtaaatcaaattatagacataggcaaatggttgcacgtaataaaacaacaaactttctttagtgtcgacgcggccg

SEQ ID NO: 196911 - DNA, 1125 bp, Gossypium hirsutum
cttacttgtccgcccacgcgtccggttttccccatgtgaaaaactgggaattgcagctgagcacggttttttcatgaggtggtctctaatgatgagtgggaactttgtgggcagatagtgagtttgggtggaaacaaatagcagagcctgttatgaaattgtacacggagtccactgatggctcctctattgaaaccaaggagagtgctttggtctggcaccatcgagatgcagacccgggttttggatctagccaagcgaaggagatgttagaccatctcgagagtgtattagcaaatgaacctgtggctgcgaagagtggccagtttatcgttgaagtgaaaccgcagggagtgagtaaaggtatggctgccgaaacgatcttcacaaccatgtctgagaagggaaagcaagccgatttcgctctctgcattggtgatgacagatctgatgaggaaatgttcgagatcatcagcaatgcaatttctagtggtattctatcctcaagtacatctgtttttgcctgcactgtcggccaaaaacctagcaaagccaggtattatttagacgacccggcagaggtcttaaacatgctcgaagctcttgcagaagcttcagaccccgaatccttcacagatactgaatcagaaggctccctttgaaacaccctccatcacttaatatcgaatttcatcgagcctgttatcgtatttgtccacttgggagaaaagaatgccatatgcctgacctatggtgaagggtatagatttcggtttctgctcggtctcgaagttcactattgaaaaggacattcatgaagggttgaggagaacatttttttacatgaactttgaaaaggggagggattcatggggacaaacatgggatcgaatgctatatgttactaaggttcgtgcagtcattgacaagggtttaacatagattgtgtgtattgaaatgcagtacagtcagagaagtatatcaattaatatcacaaaatgatgacagtttcacttctgctggtggtggtaacatgaaaaggtttctcagctgggttgaaaaatcatccttgtgaaatgaacaatttccaatggtcatttattatttttttttggaggtgttttt

SEQ ID NO: 196912 - DNA, 634 bp, Gossypium hirsutum
ggaaatcaacgggtgcggatcgtcccatcacttgtggagatagtctgattggtaccaagaagactttggttttctataaaggccgtacccctaatgggctcagaaccgattgggtcatgcatgagttccgcgccactgccgactccctgccccctaatgcgcttctagttcccaagataatgcagttggggctacgtctatggagtccaacagtacgcattttgatattgctttgcggatgtatatggaagaggaaggaatgtttgattctgatctcttaccatccggtggcttgcactgtttcccatcatccagtgccattttcaataatgaccagagcaggattgaagaagaacgtttctccttggaggattttgattaccaacagtctgatgacttggttgaaggtcaattcgtatacaccattgatgatgaaatgaaattctatgatgctctgtttcataatccagatgaacgtaccaatgcagaagctgagtacagggacaatgcatggcatgatcaaattgttcatatgtctgatgggacttgccatggccattcggaaggactcaatcagaggcgaatggaaacagggattcaataatgatgaggtcctgataatgaatcttggggt

SEQ ID NO: 196913 - DNA, 879 bp, Gossypium hirsutum
  unsure (1)..(879): unsure at all n locations
aaaacccagctcttctgccatgacaatagcttgtaaacacgcccttgcttcggccataaatggatctgaaatattatcccatggaaaggtacaggctgccataggcaaaccctctttatcacgtgcaatgattcctgaaatagagcttcttgtgattcgattaaatgaggcgtcgaaattaattttgatggtgtcattatccggtggtttccagactgagtctttcatgtcatgtgtattctgtaatatctcccccatactagaaatttctgcatagtaagccttgataaatccaacaacttcatgtacctgctctctgactccttcatgatatagcttgttgcgattataccagatggcccagtaagcgataaatttgattttgcatgcttccagactcttattttcaaaatccgctactaaccatgttttccaattggcttctctgttgcatgttgaaaatggcatctccgaaccccgcaaaacctgctgtgtgaaggaacactccctaaaaagatggtccacggactcttcctcagatctgcataccgggcataaaggattgacagccaattgacgagcttttagattatgcaaagtgggtaaatagttgttagcaattctccacataaaaatacgaattttgcatggcacttggagctcccataattttgtaaaaaaattagtaggaagttcattatgtattctagtacccccctctgtaattagccatctgtatccgctcttagctgtatatgtcccagtattatcccctcgccataccaatgcatcttgtggtctactatttgccaatggaattgtgagaatgcgcttcaactnnnnnnnnnnnnnnnnnnnnnnnnnnnnnnnnnnnnnnnn

SEQ ID NO: 196914 - DNA, 422 bp, Gossypium hirsutum
aaaaaatatttaaaagagaaagaaataaggtggaaaaaattctctcttttttcatcagatcgggaaaagcttctaaaagcgttttcgatcagaacccaatcgaggaatatggggaagaaaaggaagtccatagcgacgagccttgatgaggtggatcggactatgtatgcttcgttttgcagcgccgctaactctttgtctcaactttatactcaggctatgaaccagcagaaactctcctttcaagccggaaaaggccatagccttgaaaaactttatcagtggatttggagacaacaagagggaggatcaagggtaacaacaatggatatcctcaattaccttcagaatgagatagactactgtggtgaggagccatcaatgtcacctagagcaccaagccaacagcaccaatcccagcc

SEQ ID NO: 196915 - DNA, 676 bp, Gossypium hirsutum
  unsure (1)..(676): unsure at all n locations
caacttgtttgatagaggcgttttttatatttgaaccaaaaaaaaaaaaacgatcactgttttttctcctacgcagaggagagattaaatcactgtttccgaataatttggagtaagctttacaaagaagagaagaagaatccaagttttctcaacgaaaatggggctgatttcggggattttgctggggataatcttcgggatttcattgatggctggctggcgtcatatgatgaggtaccgaagcaccaagagaatcgccaaggcagctgatataaaagttcttggagctctcaacagggatgatcttaagaaaatttgcggcgataattttcctgaatggatatcttttcctgtctatgaacaggtgaagtggctgaacaagcaattgagcaaattatggccttctgtagcagaggcagcatcagcagtcatcaaagaatctgttgaaccactcttggaagaatatcgacctccaggaattacttcactgaagtttagcaaattgtctctcggcactgttgctcccaagattgaaggtgttcgtgttcanagccttaagaaaggttcaatcacaatggatattgatttccggtggggttggtgatcaagtataattttaggtgttgaaacagcacttgttgcttcaataccaattcagttaaaggatcttcat

SEQ ID NO: 196916 - DNA, 391 bp, Gossypium hirsutum
gtttgaagtcaatgacataatgtgttgtggatgatgcatgtggagagtttttaccaaaggagtaaggccgttgcctcaagttgtgttcctttaattgcttgcatagattgcctgtcttgctctgaagatttagatctgatgatccataaatctaacaatgcttgtgcactgaatggctgctatctcaattttaaacactcgtactgtggtggcagtcggttctcgctctatttatgaatcaaggattatcaatcgaggaactgtataatatcataatggcagagctctgtatcagctattgttagtttatcttattgtttgccactttggttaatcctttgtacacagttgatacctaataatacaattcgatgctttctttctagttggt

SEQ ID NO: 196917 - DNA, 422 bp, Gossypium hirsutum
cccacgcgtccgcctcgctaaaagacttttcagatgtctaacccaaggttggaaggtaaggtggctcttatcactggtggagccagcggtatcggtgaggagacggcgaggttctttgtacaacatggggctttggttgttattgttgatgtccaggatgatctggggaatcaagtcgctgcatcgatcggccttgacaaggttagttaccggcactgcgatgtacgagaggagaagcaggttgaggaagcagtaagtttcacagtggagaaatatgggaagctggatatcttattcagcaatgcgggtaccctaggctcgttaaccggaatcttagaaattgacctggatgactttgacaacaccatagccacgaacgttcgaggggtggccgccacgatcaagcatgccgctcgagctat

SEQ ID NO: 196918 - DNA, 929 bp, Gossypium hirsutum
caaagaacttgatttctctcatgtgctggagcatctgcgacggatacttagaggtcaggcttcattattggactggactagatcaacatcattagcaaggaccttatctccccgtgttttggaaagtcaagtagatgccaagaaggagctggagaaaagtttaaaagcaacttgcgaggagtttattatggcagtcactaagcttgtggatcctatgctgtcatttgttaccaaggtaacagctgtaaaagttgcattatcttctggtactcagaataaaaaagtagactcagtgatggccaagccactcaaagaacaagcctttgctacgccagaaaagggggctgaacttgtgcagaaggtgaattcagctattcagcaagaacttccactggtgatagcaaagatgaagctttatttacagaacccatcgacaagaacaattctttttaaaccaattaagacgaatattgtggaagcccatattcaaggtcaatcccttttaaaaaccgagtattctccagatgaaaaaagcaccatcaacatggtgaacatacgggaactgggagcacaactcgacaatctcctctagggggctagggaagcttattcaagtatttttcctcaaccccaacacctttcaggaatttttggcgatatcgggggtcagtctggtcataaggttatattgatagataaaaaaaaaggttacgtaagatggtttaattttccgaacattcattttggtaagtccatatcttttttgcctgccccaagaccaagagcataaagttcagttcttattatcttggcagtgattgtcgatcatatttttcattcaagttaatattttcggttcatacatttctttctggttattcacccctggaagtaataagaaaacaggtagcgttatctttacaaatttg

SEQ ID NO: 196919 - DNA, 553 bp, Gossypium hirsutum
attacattgattcatggtgtgttcactttataagctgttatgtgaacgttacccagctgtcaatctccctctcactaggccccacgcgctgttcactctccctataaagcaccaccctttcccagccctagtctccattcagatttctaatatctcaccatttttagaagaaaaatcccaaaattttcagcttttcttctcttctagaaatggcccaagttagcatgttgaaggcttttttattggcttttgtaatggcaatcctaaccgttgcctcggcgcaggttagtgaggcgccgtcaccgtcgccagacgctggagctggattctcagtcggagtttctaccgccgccattggcttctctttgatcgtttcccttcttgctttcttcaagcattaaattgaagggcttgtttggctctcctctctgtgtggctttcttttatatatatatatatgtatgtgtgtatgtatttatgataccattctttcttcgttaaatttattgtaatgaacttgattttttgaataaaatgcttccgttatgattta

SEQ ID NO: 196920 - DNA, 978 bp, Gossypium hirsutum
ctcccttgtctctgcaaatcagtttttttttcttctcatctcagttctcgcccaccgccgtctccgctgattttttctggatctgacccgtattccgtgtcggatcgttttgacacaggtactgcaccccaaattgccgagtcagggtaacgaagcttaccatcgcccctcttctctctctcgtatctacaaatcaggtttcttcattctcttctcatctcagttctagcccaccgcctccgctggtttttgccggatctgacccgtatcgcgtgtcggatcgtgtcgacacaagtactgcatcccaaattgctccgagcccggagatggctcaaatggctcaaatggtttgtggctcttgtcgtcaattgctttcatatcctgaaggaacctcggcaagctaaatgttcatgttgtgaaacagtcaactttgtactggaagctcatcaggttggactggttaggtgtgacagttgtgcattgttgctgatgtacccctatgggtcttcgtcagtcaaatgttcatcttgcctttctgtgacagaaattggggaacacaataggcgccctccatggtctgttcaacaggggcaaccaacccctcccaactctgtgcattaaactgctccaatgactttctaatccattgatccttgactatcttcggcatcttgatgtttagatgcattaacgatgtacaggaattagttccggtagtgccctaatggagcttgtaatcttttgttattcataaatggaagtcggagtccttgccatgaaggttgaacttgaatctcgttgtgtgtagttttaccagtgcaattcatcaccttatcatattattagattggtaatatttttgtgtaattttttatgtatgcattgaaactcataataattagagaaatcatttttgacgaaaaaaaaagaaataaaaaaaaaaaaaaagtttgaatgactaaagaaatctaacttagt

SEQ ID NO: 196921 - DNA, 606 bp, Gossypium hirsutum
gattgattagtgtttctatcaaagacccctccccccctcttcttcctctccgatcggtgctgtcgtttgctgtatttatatattttttgcttcaactcattcaatcaccacaatttctcttatttctttctttttataaatacccttttatttttacttgctttttctatttctcctttgactggttcagattagccgttgatagtttagtgattaatatatagaactctttaaagctttggaaagatccttttttttcacttggtatcaagcatggaagatcgcaaggagaaaaatgcaccatggctatcagtaccacaatttggtgattgggatcaaaagggacaggtgccagattactctcttgacttctcaaagatcagggaaatgaggaagcaaaacaagagggaagtttcaagagccagtcttggtaatgaagaagagttcattaacccaactgcaaacactgttagcactactcctagtgatgatcatcaccacaattaccctcagaaccatcactctccatctacaaggaaggagttctatagctacttcaattgctgcgtcaaggcttaagggttagggtttaagggctcgcatgaa

SEQ ID NO: 196922 - DNA, 663 bp, Gossypium hirsutum
cccacgcgtccgggaacagagagaatggagctgcagttttggttcacctttgttccggagatcaacaacatttagcagaggcccaggaactaggagtgatgggtcctttggtggacttggcacaaaatggtacagataggggcaagcgcaaggctgctcagttgttagagcgcatgaacaggtttgttgagcagcaaaaattggcacaggtgcaagctgaggccgaagtacagcagcccgagtctcagtctcagacacaacagcgacgaccaccctctggggcggttcctggccagggctgaggtatattttgccatgatgtttgttggtttcgtcatcttgtttctctctatgtattgaagaaggcagctttgcttggaaagaggaggtcgaagatcacctgttgaacctgtaagttattcatttttttttgagtggaattaatttattattcactggatcattacgtttcaaaaaagaagggtgggggaagaaagggatgagttgtattttacatgtatgtgaatttgttaatcctcagtttttgttcgagatgtttcttttattgtactgaaattaaacctactagtgataggcaaaggcaaaaaagaaaaatgaaaaaagggtacgcaatatatctggagtttgaatttccgtttctcg

SEQ ID NO: 196923 - DNA, 950 bp, Gossypium hirsutum
gaagtacaaggaaatgcttacaaggggacctttcaaaatcgaagtcgggctcgaggacaagcaagaactcgaagactcccgcaaaccctgtcctcctcctccctcaaccgccaacgccacctcttcttgctcccttcttcacctcctcgatcgctcccaccctaacccctcttccaaacttcaacgcatcggcctttccccctaatggaaggcgaaatcaaactccgcctacaggacgcctgcgcccaccgtcaattaacctccatcctttctcctttccactccaaaaccctccatcaagaaaacctcttcttcgacaccccagccaataccctttcctctcaactttccgttcttcgcctccgcttcctcaacaaggacgcccgctgcatcgtttccctcaaatccaaacctactctggtagatggtgtcagccgcgtggcggaagatgaggaggaactagatccgtgttctgcacgcgcttgcgtggaggacccggcgaggttggggaagattgagtcgaggattttgaagagggttaaagaggaatttggggttggggaagaagtgggatttgtttgtttaggtgggtttgagaataaacgagaggtttttaattggaaaaatctgaagctggaagtggatgagactaagtatggttttgggatatgttatgagctggaatgtgaaagtgaggatcctgatggcgttaagaaattgcttgaggagttcttgaaggaaaatgggattggttattcctactctaagatgacaaagtttgctgtttttaggtctgggaaattgccttagcgaagtgagtttgaggatgtcctgcggtatgattatcccattgttccttacatacaagcaatggtagagaagcaaggtttatcatcttcctcgcaaaaataaatgtttactttcacgcaacgcaattccgagatcttgca

SEQ ID NO: 196924 - DNA, 735 bp, Gossypium hirsutum
  unsure (1)..(735): unsure at all n locations
agcggctactgttgctgccgactccattagagcttcaagctttggcctcaagattgccaatgcgtggcgtggcttgggttggcctgatgaggccgtggttttcactcttgcaacgcttcctattcttgagcttcggggagctattcctcttggttactggatgcaactcaagcctacactcctgacaatattatctattcttgggaatatggttccagtgccattcattgtactttacctgaaaagatttactacatttcttgctgggaaaaaccaggttgcatctcagttacttaacagtctctttgagagagccagacagaaggctgggccagtggaagaatttcaatggcttggcctaatgctttttggggctgttcctttccccggaactggagcatggactggagccattgtagcttccattcttgaaatacccttctggtcagctgtatcagccaatttcgttggtgttgtgtttgccgggcttctcgtaaacttgctggtgaacctcggtctcaagtacgccattgttaccggtatctttctcttctttatatcgacttttatgtggcaaatccttcggaattttaagaatgtttcttcgnagncgcatcaaactaatgttgaattacttattgaaattgcccctttttcttttagcatgtctggatntgtatgattcatctttcaaaatcttanagggcatctctgttatatttttttttttttctc

SEQ ID NO: 196925 - DNA, 596 bp, Gossypium hirsutum
gaaatgcttaaatttccaccttctttattagctgctgctgctattttcactgctcagtgtactattggtgggtttaagcattggagcaagacctgtgagtggtatacaaactacaaagaagagcagcttatggattgctcaagaatgatggttactttccatcagaaagcaggggcagggaatcttacaggcgtgcaacgcaagtattgcacatctaagtacggttatgctgcaaaaactgaaccagcaacttttctccttgaggcaaaatcctagcacaacttgaaagcatttgcttttttattgaccaaataaagccgccaagaaacctaactatgaactgagaggggataggggagcaaaagagcaacgcaagttgccccagggcttatgaatatgacgctgtctaactcagtgtttgcctttttttagttttatatcttatttgaacttaaccagattatgtttgtttttcattttctctttcccagagagaataaattgtagaactgttccaacaaaaccatttttatttgtttatatatcacaagcaacttagacttaagccccccgcccccgcgattggataaatgatt

SEQ ID NO: 196926 - DNA, 825 bp, Gossypium hirsutum
ggtcgccgcgcacgcgtccgcccacgcgtccggttttaaccaaatagttctaaaaaaagaaagaagaagaagaaagcaaggaaggaagaagatgggtcttccatgcactatggctctttggtttcagcttctacttttgatgtgtggcagtgggatacatggtgtgaagaatttgagggaaaaacaaggggatgctcaacttgttagaaaggtggaggataaatattctcttgtttctaatatagcacatcctgcagctgaggagtcatcttctcaagttgctaagcagctgggggatatatattctagtttttctgtgttggtggacaaaagtactaagttgtcttctgatcaacttgctaaggagctggaggataaatattctagaattggctgcctggaaaccttttgttgacaaaactccccaatcgtcttctcaacttgctaaggagctggaggataaatattctagaattgctgcctggaaaccttttgttgacaaaactccccaatcatctgctcaacttgctaaggagctggaggataaatattctgctctatctggctacaatattccttcttaaccctcctcttctccatatagttaattagttccttcataaatattctactattattggaatgtaatcccacttaataaagtgtgtgaatttgtatggtatctgttttactttcttccaactttgcatctatttagtaaatattaataaggttaaattttgctattagcccctatattctgcaaaaggtgtgaatctaatctttatgttctaattcggtaatttataaacattttactttttg

SEQ ID NO: 196927 - DNA, 388 bp, Gossypium hirsutum
aggaacgacccacgcgtacgcaaaaatggtggcacctaagagcaagatcgtttcaatatgggaatgggtcgtcgatcacaggcttagaactgttgggtgtctgtggctgaccggcattgcgggttctattgcctacaattggtctcaacctgctatgaaaaccagcgttaaaattattcacgctaggttgcatgcgcaagcccttacgttggcagcattagccggtgctgcagctgtggaatactatgatcataggaacagagccaaagctgatccatatgcaaacgtccttcccgccgatggatactcgcacaaggattacaagactctggataggcgtttaaagtctgtaaacatactcggtttaataaaagttttttttaatttt

SEQ ID NO: 196928 - DNA, 435 bp, Gossypium hirsutum
gtctctctctctcatagttgtctgcttctctctcttaccattataacagctcattctctgcatcagcttttctttaacaatgcagacaagaactgtacaagtcaagaacctgtcagatctagctactgagagggagattcacgagttcttttctttctctggtgaaattgagcacattgatatcataagtgaagctagtcaatcaaagactgcatatgttacattcaaggatccgaaagctcttgaaatcgccttgttattatcgggggcaacaatcgttgacaagattgtgacgataatttctgttgaaaattatgtaccaaaacttgagattcatgaatcaagagcggcggacaacattgtgtctattgctcctgctgggcatagtgcatcaaatgatgagcagggcagaacgagttcacctggcagtggaag

SEQ ID NO: 196929 - DNA, 935 bp, Gossypium hirsutum
  unsure (1)..(935): unsure at all n locations
gaaaaggtgaaattcggaacattcgatattatatcagacaatgaagttcgggaaggtttaaagaagttctcaaagtggccaacttttcctcaactctattgcaaaggtgaacttcttggtggatgtgatatagcaattgccatgcatgaaagtggtgaacttaaagaagttttcagagatcacggagttgatattattgggactgaacaaggaaccggtggcatcttggaaccgaccggattgactgcaaacctaaattctcggcttcaaagcttgattaattcaagcccggttatgctgtttatgaaggggaagcctggtgaacccaagtgtggttttagccacaaggtagttgaaatccttaaacaagagaaagttgattttgagagtttcgacattctctcagatgatgaagttcgtcaaggactgaaagtttattcaaattggtcaagttaccctcagttgtatattaaaggtgaacttatcggtggatcagacattgcgttagagatgcagaaaagtggtgaactcaaaaggatcttaaccgagagaggtatcatgaaggaagagacactagaagaccatctaaaaagtttgatttcatcttcaccggtgatgctcttcatgaagggtacccccgataatccaagatgtggcttcagctctaaagttgtcaacgccctaaaagaggaaggcattgattttgggtcattcgatattttaccctatgatgaggttcgacagggattgaaagtcttttaatatggctgacttttcttagcttttttcaatagtgacctttcggaagttgtgaaaattcatgaactgttaaacttggttactttaaccatacttgtcgatttagatggttaatttgtttataatatttgattttgaggtcaacttttatttttccaatatatttatattgggtn

SEQ ID NO: 196930 - DNA, 528 bp, Gossypium hirsutum
cggacgcgtgggagaaaacaacggtaaaccctgtggaaacaagccgactgcaaaacgctgcagctgaagccctaacttttccgctcacctctctgcaccagccgctcctctattcgcatcttccatggctacgataccagttaacccaaaacccttcttgaacaatttgactggaaagactgttatagtgaagctcaaatgggggatggaatacaaaggttttcttgcatctgttgattcatacatgaacttgcagcttggcaatgctgaagagtatgttgatgggcaattcactggaaatttaggggagattttgatcagatgcaataatgttctctatcttcgtggggttccggaagatgaagatatagaagatgctgacaaggactagatggttcacatgtggttgaaatagaacctttggtatttgattagaggtgctgtaacttttgtttatcatggttgaatgtcattatgtcatttagtcgcccggacagacaaaccgcgatgtagttaattgtgcttttg

SEQ ID NO: 196931 - DNA, 1054 bp, Gossypium hirsutum
  unsure (1)..(1054): unsure at all n locations
taccgggttggaacacgcgtccggatgccttttgtcaaacgggcaccgaatgtttgtttcaagtttccaattggaagtgtgagtgtttctggcgataagtttgtgggttgtccaatgccttgtggtgttcagatcacaaggatggaacacatcaatgtgctttcaagcattgtggaatacctagcatcaagggatgctgcgatcatgcgaagtcggaatggtcatgctcctcttttcctttggtatactctcaatagaaaaggttataaaggatttcaaaaagatgttcagaaatgcctcagaaatgctcactacttgaaagaccgactgcacgaggctgggatcagtgctatgctaaatgaactcagcagtacggttgtgtttgagcggccccgggatgaggagtttgttcgtaggtggcaacttgcttgtgaagggaatatagcacatgtggtggtgatgcctaatgtgacaatcgaaaaactggatttcttcttgaatgaattagttgaaaaacggtcgacttggtatcaagggaatgttcaacctccttgtattgcagcagagatagggaaagcgaattgcgtttgtgctctgcacaagtgaaaaaaaatatcagtctatgattcgggaattcctctattttcatgcagcttgtcatttggttttaatgaaatatagattatattcataagtttttcgttttacattctcattgttatggtaaatagtagcgcctatcgacatgttcatatattggctattctgtctgccgtggtcaggggcttttgtgtgcggcttgtgacatattcatataccaactttattgaccgagtaacctatgtctggtcttgtaaggcatatgtcctgtaatgctcctaccacacttcgattatgtattatgccgtcatttttatgctgcacttctcgtagcaagaagttgtgagtaggggtgtaattgagtcgagctatgttaaaatattgttaagcttgaacttgatatttggctcgagtttgatcggatatttatttttaagttcgagttcggcttgng

SEQ ID NO: 196932 - DNA, 929 bp, Gossypium hirsutum
cccacgcgtccgcggaagttctcttactgtttggtcgaccgatcggcttcgtctaaaccatcctccctggttttcggtgatgccgccattcctcgaggtgctctgttcactcccttattaacaaacccaaagctcgacactttctactacgttgaactgctcgggatcagcgtcggtggtacacgtgtccccaagatctcaccttccttgttcaaaatggatcaagacggtaacggaggggtcattatcgactcaggcacgtccgtaactcgcttgactcaacccgcttacacggcaacgagggatgcattccgtctcggagctacaaatctgaagcgggcgcctgatttctctttatttgacacgtgctttgacttgtcagggcagacttccgttgaggtcacccgctcgtgttgcattttagaggagctgacttgtcactgccggcgaccaactatttgatcccggtagatagcagcgggaccttttgctttgctttcgcgggtacaatgaacgggttgtccatcattggaaatatccagcaacaaggtttccgggttgcatatgatttagcgggttctcgtgtcgggttttctccccgtggatgcgcctaaaaatggcggtgcttttaatttttatattaagggacaaagctctatccctatctctatattattttccttggatatttttgggggagggtaagaaaggaagaaacataataatgttttcatagataagaatgtaagggaaagatgatgaccaggaaaggcgggttgctggttagaagtagagaatgtcgttcggcgggttttcggttttcacgtgttgtccattgtacttttgaaacaaaagaaatggcatgtccaagaaagttatatatatttttaatttttaatttaataaaaaagattaatggaatcaccctt

SEQ ID NO: 196933 - DNA, 699 bp, Gossypium hirsutum
gtggaatgtatggcggtggccttggtggtggctttgggggtcctatgggtggttatgggatgggcatgggtccatatggcgagcaagatccaaataatcctttcggagctcccccatcccctccaggcttttggatgtccttcctccgtgtgatgcaaggtgttgttaactgctttggcaggatatctattctgatagaccagaatacacaagcattccacatgtttatgactgctcttcttcagcttttcgatcgcacgggattattgtatggagagttagctagatttgtgttaagactgctgggaatcaaatcaaaaccccgaaagatcaatcaaccaggaccaggtggactcccaggaccccataaccctcatgggaatcaaaactacattgaagggccaaaggctgctcccagtggtgtatgggacaatgtatggggagaaaatggcagcgcctagtttgattatcgacggtggcctagccaaagcacacgctccaatttgagtaccctgcttgaataagaccaggaggacctcatttgaagaatgtgaccgaagtttttctacaattgtctgaatataccacccactctcaatagtgttaaaaaaggaaagattgaaacttaataatagcccttaaatgtgtgcttataggtatcttgacactaaggcaataataattattatatttttgatg

SEQ ID NO: 196934 - DNA, 441 bp, Gossypium hirsutum
  unsure (1)..(441): unsure at all n locations
cccacgcgtccgcattcttgaaactgatgcaaatgtcattgccggaaaagttgatagtcagggtatggatgccggagctcctttgtccgagcagacaataactcaagcattggctaccgctcgtgaacatcttacgagatctctcctcgagtaaaatgtgtttacattgaaccaaacgagataagctcgacggtactatctttccgtaatgatactgtacttgatatgttttaggataatttttgtgccttgttttgaatgcgatagaactgaatatatacttgcggcggatgttgtttacattgatgttattgcaatgttgtgctttcttgatactacttgtcctgccatctcattgcatccaataaaaagcattcgattttgaatccgggaaaaaaaatttnnnttattaaattattaaatttttttatataaattata

SEQ ID NO: 196935 - DNA, 424 bp, Gossypium hirsutum
gttacggtcgaggtgattatttcctcgtcgttcatgatttcccagattacatggatgctcgagcccgagtagatgaagcttacaaggatcgcaagaagtggctaaagatgtctatactaagcactgctggcagcggcaagttcagcagcgatcggactatagcccagtatgctaaggaaatttggaatatcgaggaatgccgcgtgccgtaattccgacccaatctattttggcaatcaggttctagttttatgataatgaaaagcatatatatatataagaatgagtaataggatttgcattccaaaaccatatggcgttggcaaaaacaaaaaataagcgagaaaccctgcatctcgatttcacctttaaatgtaataaacaaagtaacgtgttttactgaattgcctttactagtttgtgg

SEQ ID NO: 196936 - DNA, 548 bp, Gossypium hirsutum
cattccccagagcttcaacgcattctttcacgggataaactgaaattgagtcgaacggcgggattgaaggggaagaagaagggagttaccttcactatcgattgttcgaagccagtggaggataaaatcatggacattgcccctctggaaaagttccttcaagagagaatcaaggttggaggcaaggctggtgcacttggtgaaaccgtagccctcactcgcgagaagagcaaaattaccgtcacttccgatggcgacttctctaagaggtatctgaagtacttaacaaaaaaatacttgaagaaacacaatgtacgggattggctccgagtaattgcttccaacaaagatcaaactgtttacgagttaaggtacttcaacattgctgagaacgagggagaggaagaagattgatttcttgggtgaacaaccagttttaatgctagctgatttgccaccttttttttttgtttgattgttggggctttagacaaccaggtttataaaaacttttgttatttactgaaacatgagactttgcaatggct

SEQ ID NO: 196937 - DNA, 666 bp, Gossypium hirsutum
ccctcgcgtccggtttctttctttcactagatctctcatggcttcctgcatcgctcccgttgccatctcaggtggttctcatcttcaggcaagtgaaatttgtttcgctaagtccagcacctttggcaaaataccaagtttggcagttcagaggaaaccaaaggcatctaatcatcggctttctgtttgtgcagagtaccgtgatggcactaagggtggaggaaacgattttgctgctggttttcttttaggaggtgctttatttggaactctgggatatatttttgcaccgcagatgagaagatccctgttaaatgaagatgaatatggattccggaaggcaaagcgaccaatttactatgatggaggtttagagaaaacgaggcagaccctgaatgcaaaaatccgccaactcaattctgcgattgacaatgtatcctcgcgtttgagaggtggaaacaattcaccaagtgtgccggttgagacagactcctgaagtagcaagctttactatgtaagacatagtttcgaatgtgattgagtcgatgagagttgccaagtttacccagtgattgggatggatttacctgttctgctatgcaattctgaattccaagtgtttgagaattttatacgggattaatgcagttttgttatgttcttagt

SEQ ID NO: 196938 - DNA, 374 bp, Gossypium hirsutum
cccacgcgtccgcgaaaaagaagaatccatggcagtaagaacacaaatattttataacaatggtgaaagcatctgtactcaataggattgtacgcatgagggtgccttttagagagatgatccagttattcaggcaatggtaaggtaattttcctctcaagtagaaatacaaccaagacaatcaaagtaaaacaggatttgtggaacacctgacttgatcgctataatctttacgaaatcatcgtaacgtttaacacattaaatttcagggaaaagtgtcatttttcttgttaggttagtttataaatttgtttacttcacactatcttttgcatggtttaacaagcttaatatatttataacatgttcccctt

SEQ ID NO: 196939 - DNA, 671 bp, Gossypium hirsutum
  unsure (1)..(671): unsure at all n locations
cttgaaatacgaagatgtgaaaaaggagcctttggggtgtgtgaggaaacttgcagggttgttgggggtaccctttacaccagaggaagaaaacaacgagactgtggcagaaatagtgaagttgtgcagtttcgagagcttgagcaatcaaaatgttaataaaagtcaaaccagcagtggagaacgacctgttggtaactctgatttctttagaaaaggagaagtaggagattgggtcaaccatttgtcacctaaaatggttgaaaaattgaatcaaattacagaacaaaagcttaattcaaggtactggattcaactttgattgactcctactactttatgatgttataatgatattagagtctataaatgatttgttcaccgtctcagtgaatctggtttatagaactaaataaaagaagtctttgtttgtngttaaaaaaaaaaaaannaaaaaaaaaaaaaaaaaaaaaaaaaaaaaaaaaaaaaaaaaaagcaagaactacaaaaaaaaaaaaaataaaaaaaaacaacaaaaagggggggccgttttaaagaaccaaagtttacatccccgggcttgcaacgtaatattttttttatggggcccccaaaatcaaattcgggggccgcggtttaacaaggcgggaatggggaaaaccgtggggttc

SEQ ID NO: 196940 - DNA, 529 bp, Gossypium hirsutum
tgttgggggatgacgacactggggaactatcattgctgatcgctgctcagcaaaaggctgtcgcagccactgctgctgctgctgccccaaagaagggcccagcaaagtctcaagctaagacgcagcctgcaactcaggctaagcttccctccaagcctctccctcctgctcaggctgtgagggaggcaaagaatgaaggtgctcgtggtggaggtcgcggtgggcgaggatatggacgtggtggtagtggtagtggtggttacagacgtgattttgcaaatgacgagaacttattcagcaataatgctgtacctgaagatggagagagtggaaaaccctctgaaaggcgtggttatggtggtcctcgaccttaccgtggtggtcgccgtggtggtttcagtaatggggaagatgcagacggcgagcgacctcgcagattgtatgaacgccgtagtgggacagggcgcggaaatgagctcaaacgtgaaggctctggtcgtggtaattggggaactcagactgatgaact

SEQ ID NO: 196941 - DNA, 544 bp, Gossypium hirsutum
gcaagttggtggtcggaaagctctctctgtcatttcaaactcgggtaaaccacgcttgaaggagacatcaaagaagaatcaaacttcaaagttaaccattttggcagagaatccaagtgaacccgaagatattgcgaaggaaggatttctgcacaatcacgatgaatgtatcaaagctcagaaaaatgctattagcacgaatgaatttttgcggatactccgattagaagatttctccaaacctgcatctgcaaagggaattcgtatgccaaatgaaatgcccatgagtccttcaaggtacttggaagctaaagagatgagtgagctactgatggaagattggtcacctccgaagtgtaagttgtcaaaaaaactcaactcagcttcacctaatgctgaaccactggatcatatgccgtgggatgatcctgaattggtttccgggtttgtgttgattggatcaccatgatgctgaaaccattggattcaatttcttacctggtagcatattaaaaaatggtttggtagcaacttatgttgtatt

SEQ ID NO: 196942 - DNA, 430 bp, Gossypium hirsutum
gatatatactatagagatcaacaggggtttttcaacaatgattatctcacactaggggtggatcatgttcctctgttatctgggcggactgccctccagtgttatgaagatttcatgcttagttttgttaacaaatttgaatcctttattggaactgtaattgaagaaataagcatcggtcttggtccttctggagaacttagtgcaggtatcctgctcatccttttggtgatggtagatggaaattccctggcatcggtgaattccagtgctatgataagttcatgatggaggacttaaagatggctgcatgccgagaaggaaaacctcaatggggggacaaagggccacagaatgctggctgttacaacagtcttccatctggggtgcccttctttgaaaagggaaaagaaagctttctatctgatta

SEQ ID NO: 196943 - DNA, 512 bp, Gossypium hirsutum
cttatttattctcaaaaaaaaagcattctgtttagcggccggttcatcatctgctggtccacactttcgctcagccccttcatcgtcaactccgagaaaaggtccctcaaattggaggccagggccgacagagcaagcctaaaagggagaaaacacaggacgagaaatcttttaagaggagggcgtaatattttctagctgcacagctactcgcggttctgcttttcctctccgtgatgggcggttatgattcatggcgacctggagctcgaccacgaacatgaacgcatctctttcaattgaaacaaatctctcagctaccgggtactcattactgacatttttcccattattagttacaatgttagtggtctgttgaggttgagctattagtatttgcattaacattgtggtaaaaaataagaacatacatttaaagatatgatttatacaatatttaggcagcattttttggtttgaaccttttgtacttcatgtgttggatttttttt

SEQ ID NO: 196944 - DNA, 535 bp, Gossypium hirsutum
gatttactgccacttttgttaaactttacaatgctgggaagagagaggaagatcctttgactgatgtgaaggatccaaagcaattcttagtagcttcattggcataactttctgcacttaccccagggggatacccccagatcatcaatgaaaatcttgagccagcaaatcaagcagctttacttcagctttgcggcatttacaattgccaaatagtttgagttgcagggtttttctgttatctttattttggtgcattaccttgagcattcgtttgtcagcaattgatgcttttcgacacaaaagttggaaggattcagatgtggtgatggattttgcggttctactggttggcagcaaagtgagccccccacatagtttatggattttgtttggcatgcatatatatccacaagttacaggtcctgttgtgttatggtgaaagagagtttgtagtgtaaaacattgccttcaattttctttatttttgaaattacttgaatgctgaaacccaaagttggcaccaggggatgat

SEQ ID NO: 196945 - DNA, 666 bp, Gossypium hirsutum
taagtaaaaagtaccaggctatccaaccaagttttgaataacaaaagcaaatccaaggaatagaagaaaatggcgaggtacgatagagcgatcacagtgttctcgccggacggccatttgttccaagttgaatacgccctcgaagccgtccgtaaaggtaacgccgccgttggtgtccgcggcactgacatcgtcgtcctcggcgtcgagaaaaaatctaccgccaagctccaggactccagatcggttaagaagattgtgaacttggataatcacattgcactggcatgtgctggcctcaaagccgatgctcgagtcctcataaatagggctcggattgaatgtcaaagccacaggctgactgttgaagatccagttactgttgagtatattactcgatacattgcgggtcttcagcagaagtacactcaaagtggaggtgttaggccgtttggtctctcaactctgattgtgggctttgatccatactccggtgtaccgtcactatatcagacggatccatcagggacattttcagcctggaaagctaatgccactggtagaaactctaactcaatcagagagttcctagagaagaactataaggaaacctctgggcgagaagccattaagcttgcaattcgtgctttgcttgaggttggtgac

SEQ ID NO: 196946 - DNA, 667 bp, Gossypium hirsutum
  unsure (1)..(667): unsure at all n locations
ctgggcttgaatcttccactgagaagccagttggtaaagctaaaggctcaagtcttaatgctaagagatcatcattttggggaagaagtaacgctagaaagacaccatcaatggaatctgttgattcttcgggtgaagaagagcttgctatacagaggcttgagatcacaaagaatgatctacaacatcgtatcgcaaaagaggctagaggaaatgcaattttgcaagctagcttggaaaggagaaaacaagctctacatgaacgtcgtttggcacttgaacaagatgtctctagattacaagagcagctacaagctgaaagggatcttagagcggctctagaagttggattaagcatgtcatctggacaattttctagttcccatggaatggattccaagacaagggccgagcttgaggaaattgctcttgccgaagctgatgtggctagattgaagcagaaagttgctgaactccaccagcagctgaatcagcaacggcagcaccattacggttccctctctgatgcatgtgaccgttaccagcatgtccaaaatcataactctcaacagaggtttctccagcaagattttgacacaacccttgcttattgtaatcctgagagganacnaaaaacaaaggagagtttgttanggccacactggac

SEQ ID NO: 196947 - DNA, 470 bp, Gossypium hirsutum
gcaaagcagaaatcagctaaataaacaggaaaaatggacgcaattgactcagtttttgatccgctaagggagttcgctaaggacagtgttcgtctcgtcaagagatgccacaagcccgatcgcaaagaatttacgaaggtggcgctccgtacagcgatcggattcgtggttatgggatttgtaggatttttcgtcaagctcatctttatccccattaacaacattattgttggatccggttaggtttgctttcatgttactgactcaacagcacagatcgagagataaattgtctgagatctcgaactaatttcagtatagactttggttttcctctatattcatatttgctggattttggcttagcttctagcgttgaaatggatactacttgaagcaaattcaatccttgagttttggtccaaaataaataatttttatattttattttttttgtctgcctttttttt

SEQ ID NO: 196948 - DNA, 426 bp, Gossypium hirsutum
gaaaaaatcaaacctttttcatcgtagagcatagctaaaccagaagaaaggggaaaatggacgcaattgactcagttttcgatccactgagagagttcgctaaggacagtgttcgtctcgtcaagagatgccacaagcccgatcgcaaagaatttaccaaggttgcgttccgaacagcgatcggattcgttgttatgggattcgtaggatttttcgtcaagctcatctttatccctattaacaacattattgttggatccggttaggccttgtcaacgtttgctgaaaatcggtagaatgtttaagttaagaggtacgtcatgagtttatgaagtaatttcaatttagacttgggtttgtctttaaattcagttttgttgaaaaagggttcaattttggtgtttgtaatagaatcttgttgaagct

SEQ ID NO: 196949 - DNA, 480 bp, Gossypium hirsutum
cccacgcgtccgcaagaatcaaactctaccttcaaaactaggagaaaaaactaaaaatggacgcaattgactcagtttttgatccgctaagagagttcgctaaggacagtgttcgtcttgtcaagagatgccacaagcccgatcgtaaagaatttacgaaagtagcggtccgtacagcgatcggattcgtggttatgggattcgtaggatttttcgtcaagctcatctttatccctattaacaacattattgttggatccggttagccttgcttcatgttacagactcacaggaaggacgggaactggtagaaattttcaacactgagataaaagaagaactgtatgtttttagatcaagagctatatcatgtgagtttttgaactagttttaatttaagccccgggttgtcttatatttggttttgttggaatagaatcttgttgaagcaagtgagttttggtctaaatgaattttatg

SEQ ID NO: 196950 - DNA, 461 bp, Gossypium hirsutum
cggacgcgtggggcaaaaccaggaaagggaaaaatggacgcaattgattcagttttcgatccgctaagagagttcgctaaggatagtggtcgtcttgtcaagagatgccacaagcccgatcgaaaagaatttacgaaggtggcgtttcgtacagcgatcggattcgtggttatgggattcgtagggtttttcgtcaagctcatctttatccccattaacaacattattgttggatctggttaggaagcatgagaatcagtaccaagtttcagactgtaggcaaaagatagaagttagaactggatgcaattgactgagaggtacatcatctgatttcatgaactaattcaaacttagacatgggaatttctaggtttctttatattcaatatggttgagattatttttgttttagcattgtaatagaatcttgttgaaataaacacaatcattctgacctc

SEQ ID NO: 196951 - DNA, 361 bp, Gossypium hirsutum
atatccatccgcgcgttaccctagcatccatcttatgggactctacctccttaacctcatacacataaccacaccctataactctccccacccttttcccttcaccggttcctcctcaccggcgacaaatctacttccctctcaccgcaccggagccgaatcatataaatagcaattcaacaagcggcggatggaactttcagtttcgtgaatcgggctccattcaacgtcatatccctcgagttcagacttcagaccgactcagtcttcttataaggcaaaaggggaagggaagagattgaggaattagagtgatagaaaacgatgaagggcggtttacctattaaccgtcgatcgggtt

SEQ ID NO: 196952 - DNA, 602 bp, Gossypium hirsutum
ccgaaacccataatagatatcgatatagctagagaacatctgagagaagctatatttaagatgtgggaaatggaagcagctgcaaaggctgcaacttcagatgggatgaatgaagaggttttcgacaattctgttggtattgaaacctccgcgatcccaaaagttatcctaaaggagaactcttcttgtccaacatattcatctaatgatcaaagggttccatcatttcaaaatggcaataatggttcattgcataggaagagagcaaaatgtgtggaagaagaaaggttgcctgctgataaaccgaataatcacaacaaagaagcagggacttcgagaggagaagaagacttatgctcgacagctgagtcttcagcatcgaagaggcaaactattagcagaatgtcattctctgttccccagtcttgttcttcgtccgatggcaggcctatgctggagtgtgaatcgtctgatatgaagcggtcatggcaagaaaagatcgatttggaacagacatcaagcaagaatggtaattaagaagctgcaaagtttgatataattgtggttcttgctggttatctatctgatacatcagattaaga

SEQ ID NO: 196953 - DNA, 436 bp, Gossypium hirsutum
gaaaaaaacaaaaaaaaaaatcctctggagaggattcctggtcctctgagctccggcatttagccgatcagctctggtcatcggacctccacgctgagatccacgcgccgccaccgactccgccacacattacgggcggaacttgaaaagtttcacttttcaaggtacttgcgaaaaattcggcaatggcaaaggcttgatgatggtccaccggtggcgttgatctcggcgtgacttggggcctggaatcatggccttgacggggtagctggaacagcaggagctgaagggtcatgaggcttggcttctggaaccttctgtttgcggcgtgaggagaaagagggcagaaaccctagggtttcctgcctgggtctgcagatgtttgggccaattggacctctggaaattttgggtttgtaatgggtagaggtgtttt

SEQ ID NO: 196954 - DNA, 540 bp, Gossypium hirsutum
cccacgcgtccgcccacgcgtccgcccacgcgtccgagggttcacatttccatccagacggtgatttatttgtcccaaatgaaaggaaagatataatcacctcaactgcttgttggacagcaatggttggcttgcttgcatatttgtcgtttacaatgggaccaatgccattgcttaaactctacggcatcccttatgcaatatttgtgatgtggttggatttggtgacatacctacatcaccatggtcatgacgagaagcttccatggtatcgaggaaaggagtggagttacctgagaggagggcttacgacgcttgatcgggattatggatggattaacaacatccaccacgatattggaactcatgttatacatcatctcttccctcaaatcccacattatcacttgattgaagctaccgaagcagcgaagccagtgctcgggaaatactacagggagccaaagaaatccgggcctttaccattttatttacttgggatactcataaaaagcatgagaaaggatcattatgtgagtg

SEQ ID NO: 196955 - DNA, 1076 bp, Gossypium hirsutum
ccggaccggaaggcccggcccaggcgaccgctttaaaagaccgattgaaagagcttggttatgagctttacgatgaacagctgggcaacatattctggcgcttcaaagcagtagctgaacaaaagaagagagtcattgatgctgatctaatagccttggtttcggatgaagtttttcaacctgaagttgtttggaagcttcatgatctgcaggttacttgtggaactcttggtctttctactgccacagttaaactcattggtgctgatggcgaggaacatgttgcatgctcagttggaactgggccagtagattcagcttataaagctattgatctcattacaaaggaaccagttacacttcttgagtactccatgaatgccgttacagaaggcattgatgctatagccaccacccgcgttctaattcgtgctgagaaaagccgcatatcaactaatattttgaccggtgaaattgttcagcgaacattcagtggaaatggggcaggaatggatatcgttgtttccagtgtcaaggcttatattggtgcattaaataagatgttgggtttcaaggaacaatatcagacaaaaacttcgatagaacgaaccccggtttctgcttaaggcgggtatcgatcccgtacgtgcatgcatcatgtcagttttgtgaatacatgtgctctccttttagtgacaatgctttgaaaggtacttgtgtatacaagtttcataagcggagatgtttgtttcttttgctacatcatacacagaaatgttaagtaaagacaatgttggttttttgttatttcttgtgaatttgtagtaagaaattgtcaaaacttagtgaagcgtcagttgttatattaaagacaaacaagtttctttggaccaaaaaaaaaaaaaaaaaaaaaaaaaccaaaaaaaaaaaaaaaaaaaaaaaaaaaaaaaaaaaataaaaaaaaaaataaaaaaaaaaaaataaaaaaattttaatatttaaaaaataaaaaaaaggggggggcccttttaaagaatcaaattttatttcccttggtatggaaattattatttttt

SEQ ID NO: 196956 - DNA, 555 bp, Gossypium hirsutum
tcgtagaaagccttctcattacatcccagcaattataatattgattttgttgattttggtgtttttcggaagatcagttgcaatattaggtacttgtattggatggtatgtagctcctacaatcaatggggaaggatcaaatttaagaacatcaatgaaaaagaaagattatgggagaagacagagtgggggtggattggttggtgggaaactatccttccaaaagagttaaaaagagttgggtttacctctgcatcacaggatctgatgtaatcatttcgtttctattttaatgtaaaatacagtttgttgtattatacgagttttgagagcaaatctgagttaagttgccttgtaattgtataatttctagtggaaatggtttagatattagaattaatgtagacacgaagattgcatggatagcataacctttttgctaaccactcactattcaagtttcggacaattcattgtttccaaatccaaataaacgttttattttaaaaaataaaaaatctatttaatttcaatcatttttatataaaaagggcg

SEQ ID NO: 196957 - DNA, 438 bp, Gossypium hirsutum
gaagtctttacaaggggtgctgttggagaaagccactgaaagcctctctgaggttgaaaatcctgggcacaaccggcggccaactcgtggaagtgaagatgctgctgcagatgagaagcagcaaggagcatctgtatctccggatgacctgattgctcttgcacagcaatatagctctgaattgctacaaggagagcttgagaggactcgcatcaatacagcatgttttgtggaatcactccccatggaatctgctccagactcggtaaaagctgcatatgcatcttttagaggtccaatggactctcccagcaaaaattacagaggcacacaagcaacgggatcccctagtttcactcagcgtaggcgcagataaattagagccaccccagcagcagccatattcttcgtaaaaagtaaaaatttcttcattttgat

SEQ ID NO: 196958 - DNA, 483 bp, Gossypium hirsutum
aaaataatttccctcccacctgagattgttactgtgcaaaaaccggcgagttcctgcgaatccgacccaagatgcgcgaacatcgacgagaagaaaaggaagaggatgctgtcgaaccgtgaatcagcgaggcgatcgcgtatgaagaaacaaaagctactcgaagatttagttaacgaagtgagtgcattgcagaaaaataacacccagatctgtgaaaagatcaagttcacaacccaacgcttcgtcaaagtggaagcttccaacagtgtcttaagagctcaagtaattgaattgaccgagagcttgcagtccttgaactcgatgctgcacatggcggaagacggaagcgggtacgacgtcgatatcccggagatccccgttcctctgatgaagccatggcaacttccttgtgcgacgcagccgatatgctcgacttttgatggataaaaattaaaaaaaaaacaaaaaaaaaaacccttc

SEQ ID NO: 196959 - DNA, 412 bp, Gossypium hirsutum
tgaagaaagaaatgatgtctccacatattaggaggatggctcagcctcctgtaggcaatgcagaagcaaggctcgatcaaaacggtttagtggtgaagtgttgcttcgtttgaagatcgtcgcagttgtatcaacataatgtatatgcgatctatacgctagatacatccagcgcaccggcttagcaccatcaatatatatatgcttcctctgtatggcaaagatgtccctggctccacctaatggtggttaaataaagcgaacttcttaatgaagtgatgacatttgtcaatttatgacttgtgctcgctgctggtatccatgatatgttaggtggcgagcaattttgttttcttggttccctgggttttggttccatttgatgtaattataatgtaatggaggacaacat

SEQ ID NO: 196960 - DNA, 815 bp, Gossypium hirsutum
gcaacacatggtgcagacaacattagaaatgatattagtgcattagctcaaagatatgttgtgattgatcgcgatgaggattgtggggtctgtaggcgtaaaattttggccattggcggggattacagaatggctagcgggtatacagctgtaggatcaatggctcctttctatgtctttccatgtggacatgctttccactcccactgcctgattgctcacgtgacccgttgcaccaatgaatctcaagcggaatatattctggatttgcagaagcaactaactttacttggtagcgaagttcgaagggaatcaaatggcggtttgacaaacgaagccattactagcgtcagccctgccgataagctccgatcacaattagatgatgcagtggccagtgaatgcccattttgtggcgagttaatgattcgtgaaatctctttgcctttcatcatgccggaggaagcccagcaggttgcttcatgggagattaaaccgcaaaacctcggaaaccaaagaagcttttctttgcctgtatgattggattatgtatgtccaacgatacattcctgtccatctgcaacgagcccacgctacggctattcatagagttttgtgagtgttctctctctattttcttttaccttcctgcatcatttgagtttcgacgaatggttgcttattcatgcaatttatccatatttctgggtttcttcgtttgcatttcttcccatggcccctttttttgggcgagaaggtgatcagtcaatgtttgttactttgatatggaccatgaaatttgagtgtttcgtgct

SEQ ID NO: 196961 - DNA, 670 bp, Gossypium hirsutum
  unsure (1)..(670): unsure at all n locations
aaagaatcaaaaggcgtaggcataagagagaaacgtgagggagagagtagcgaaagctttgctggaaaaggaatctcaacaatgagccaaggtccaaagctctacgacaacaaacctaaaaaagctcaattgaaacaatttcaacaccatcaaaaaggaaaggaatttccttcaacatcatcaggtgcagcatcatatacaatgggtcagccgccgccgccaccacctcagcctccgaaggaatcgtttgcaaggcgttacaagtttctttggccccttctcttggctgtcaactttactgtcggagcttatcttttctccggtacgaagaaaaaggacacgaacttagcagaagaagatgttgatttgagtcctcctgtatcaactacacctgtcactgcacctccggttactgaaaccccatcacctgtatcatccatcacacagcctttgaagttgcctgaaccgattccggagagccaacagcgtgaactttttaagtatatattggaagagaagaggaaagtgaaacccaaagatcccgaggagaagaagcggctggacgaagagaaagctatactcaaacaatttatccgagctaaatccataccacagttatgacttgataatccattgttgaaactngnatatattaccttttgttgttggt

SEQ ID NO: 196962 - DNA, 908 bp, Gossypium hirsutum
gttaatgacagcaccagcagactcttcaattggtggttcatctggaaattggcgtttcaaaaacaaagaacacgggaagaccagtgccgcagcaagtctgggtatgattctattgtgggatgtcgactctgggcttgctcagatcgacaagtatttccatagcaacgataaccatgtgattgctggagcattattaggagttgggattgtcaattgcggtgttaagaatgattgcgaccctgcactggctctattgagtgattatattagtaaagaggattcttcagtccgtattggtgcaattatgggtttgggaattgcatatgctggtgcccagaatgagcagatccgtagcagcttgactctgatacttaatgatgcaaaggctccccttgatgtgatagcatttactgcaatttcgttgggtttgatatacgtgggttcctgcaatgaggaggttgcacaggctattatatttgctttaatggaccgaagtgagtcagagttgggggagcccctcactcgtcttctgccacttgctcttggtcttttataccttgggaagcaggaaagagtggaggcgactgcggaggtctcaaagacgttcaatgaaaaaataagaaaatattgtgatatgacactactttcttgtgcttatgctggaactgggaatgttctgaaggtccaaaaccttcttggtcattgtgctcagcatcttgagaagggcgaaacccaccaaggtccagctgtgcttggtatcgccatggtagcaatggctgaggaattgggtcttgatatgtcaattcgttcactagagcatcttttgcagtatggtgagcagaaaatccgtcgtgcaagttctttggctcttggtcttctttggatatcaaacccaaaggttaatgtta

SEQ ID NO: 196963 - DNA, 297 bp, Gossypium hirsutum
ataaattagagcctccccagcagctgccatattcttcgtaaaaagtaaaaattgcggcattgggattttgattttgggtttcggttgcattgttgtgtttcacttgttgatgatacatatgattttggaagacatgcatttgtctgttgtaagtcatgggtcatgaacttcaattgctttgataggtgggctaaattgttaacttgtattattttccatgtttgtatcaatgagcacgcattcttttctaaaaaccttttgattaacttaaatatatatactactttagttaggatc

SEQ ID NO: 196964 - DNA, 765 bp, Gossypium hirsutum
cgtcggttgcaaatcacccagccaagatccaatgctccgcaggcttcaatttcatgaagtctcaatcccccaaccccaacattctggtgggtgcagtcattggtggtcctgaccagaaagacaggttcccagatcaacggtccgattatgaacagtctgaaccagcaacgtacatcaatgcaccccttgtcggagcgttaacttaccttgctcattcttttggtcagctttagggccctacaggcgttactactactactactactttttagggttatcagtaactttttaacatatttaggtgttcgtaatgtattcccttttagttaattttaaaatattaaaaggttatagtaatattcctctggaagtgcacaaggcgtcgaggcaaatgggttcagacctaaggctcgagccacaaaccttgaagactgaatgcacaattgtcaaggatgaatgccattgtggggcgtgtttgtttttttcatctataacaatattattatcattgcaagtggtacgagttatcaaccattgtggcgttgtcgtgcaaagaacggcgttcaattgtaatgacatgctcaagctcagacttatgggctccaacaagtgataagcagttttggggctctgcttttcttttttaatgttgttttggaacttgtaatatatgcctggtctactactagcgtttaacttgtaaaaaacaaaccgaacggataatttaaaaaaaaaaaactaaaatcgggccggccgtttaaagat

SEQ ID NO: 196965 - DNA, 427 bp, Gossypium hirsutum
tggtgcgaaaaacccgcggcgacccacgcgtccgtccacgcgttcgttcacgcgttttgtttgtaagaggccaaataaaaacaataggcccttttctaatacacacagcgcgggtcctgagtaggaaagctgtaaatttctaattctctgtctaatgctgtgtacttccctacttatttgcggggtcatcatgatgctgatgctgtaagttttggcgtgtatatttttttaaattcaatttgcttagattccggtcagatctgattctcttctgcatataggttgctctgtatatgaaagactatggtggtggttttgaattccgtaatcggtctgaggacaagatatatgatgattcgggtgatggcaccaatggtgctggagcaaatccacacaacatggaactgtcacaagagaatacctttac

SEQ ID NO: 196966 - DNA, 437 bp, Gossypium hirsutum
atatccggacgaggtagtcggttaggccacgctcctcgcggaccgaggcagggattgatgcgtgggacatgaagcacggcaggctgatgagggacttcacgctcccgaagctgactgttacgctgaagtacttggtggtctccacgacgtgctttgagagggccagtgagccggtgagaaaactgagaacagagcccgctccctttgcctgcgaatagtgtaaagctcgcccaggatggtcaggaagcccagcgtagtttacttgcttgaccctcgggtgagacgccaggaattcagcaatcttctgggcattagcctgttgtgtcttcacccgcagagacatggttttatttcccttaaaccaaacccagcagtaaaatgggcccagaccttacctttaaccattttgcaaaaaccctacctttttatccaaactt

SEQ ID NO: 196967 - DNA, 602 bp, Gossypium hirsutum
gatctgcttatgtagaagaaagagtggtaaaaaaatggaggaaagggatgttgcccctccaaaacagtctgtggttgaaattccaagagataaaccagcaggggagagtgataatagaagcagcgggttatctggggtagtcaataaggaagctaagagtagtgggactaagaatctggtgtttttcgggaaggcgtcgatggcttttgatctggaggatttgttaagggcatctgctgaggtatcggggaagggaacattcgggaccacgtataaggccactttggaaatgggagtggttgtcgcagtgaaaaggttaaaggatgtgacagcgtccgaaaaggaattcaaggagaagatggaggtagttggctccatggatcaccagaacttggtcccattaagggcctactactttagtgcagatgagaaacttctagtttatgattacatgcctgtgggcagcttgtcttcacttttacatggtaacagaagatctggaaggactccattgaattgggacacaaggtccggcattgccctcggagctgccaaaagcattgcatacctccattccaagggccctggaatctcccatggac

SEQ ID NO: 196968 - DNA, 684 bp, Gossypium hirsutum
  unsure (1)..(684): unsure at all n locations
nncgccacagcgtacgccacgcgtccgagaacacaagtatccagtctagtcctccaatcaaacgccccttttgttaactgtctcaactttatccatttgccttgtttttagcaaaacaatgtctactttagttcctgatttcccaaatctttcttaatttttcttccgattttcattttcgggttttacaaatagatttcgtcttccaattttccctagaaaaagaaataaaaaaaatgatgccaagtgaacagcaaagtcatgatcaacatcgggatccgttatcgtgtgttatttacgagctgtcggcgctagtcctgaatctcctccgatcgccaccgacgccggttccgactaagatatcggcggtgggattcgcttggctgatgctagggatatcggtttctttaatgctttgtggatcagtgactttctttttagggttcgtgctgatgccctgggttcttggtctgctcatgttctttgacgttgccggagattgtttcaacgatttcgatgttgggccgttcgattctttgttatgccagggcacctccctcaccgaccaaatgtattaccgaatggaagcccttgtggtgattgatttgaaaaaaagaggggccttgctgcgtgaatttagtaaactttacttcctcccaaatttatgcacgagatgttgatatt

SEQ ID NO: 196969 - DNA, 512 bp, Gossypium hirsutum
ctgacgcgtccgcccacgcgtacggcttctgcaccttctccttcaatcgcttcccctccaggtcctaccccatcaagtggacctgctccagcctccgagcccactgccgaccaaggccctcctccctctgctgcctccaccaacggtgttttcattggtgcaatcgctcttgccgccactttcttcgctgccgttttggcttaagaaagtgaagtgaagtccagcttttttgggttttggatcatgattcttgagaatctttactttcatgctctcttttgttctttcgagtagtgtttttttctcttgctttatatttttcattgcaccctactttttggtttttggttaatttatttgttatgtatgtttgatgatgacgattctattattttgggttcggatggttgattgtattgggggtgtgacacgcgtaaagaccggatggttgtagagattggactgttgtacatctaattacactggaataaaaacactgtgttattttttat

SEQ ID NO: 196970 - DNA, 586 bp, Gossypium hirsutum
ttacaagctgcagtccgtgagcagacagaaatcacccagtttagccagcaggagtttgaaagacttcaaaatgaaaagattctctgtagagtttgcttcgaagaacaaatcaacatagtcctcctcccatgtagacatcatgtcctctgcagtacatgctgtgagaagtgtaaaaggtgcccaatctgccgtgtttctattgaagagcgactgccggtgtatgatgtgtagtctgaaattacctgtagaaaaaattcatgtaaagttttcaagaattgcttgtgatttttggtgaggcaagcattgagacgcaggtcaatttggtttcttggaacatgatacagttgtgtaatcgcacccaagaattgtaaataacattcgcttgcatttatgaaatgaaatttagggattttgacatgataattgttaaatattgtcacctaatttgatttgactatccgtccatttacgtcgtcttctctatcagaaccctctcatttaccaactcaatcgtcttgttacacatgcatttttcgccatatatcttatttacctagacgtccattcactatcgtcttcctagcaa

SEQ ID NO: 196971 - DNA, 614 bp, Gossypium hirsutum
gatatcagtggcgagcaacatcttgacataaaacatgatataattaagaaaagaatcagtactaacggtgatgtgatagaatccaagccagatggtataggagcaccaaagattgagaaacctctgcagagacatggtggcaggcttgaacaaaatgagacatattgtgggtcgtgctttggtgcagagcagtcagatgatgactgttgtaactcctgcgaagaggttcgtgacgcatatcgtcgaaaagggtgggcaatgactaatgcagacttgattgaccagcgcaaaagagaaggctttttcgaaaggataaaagagcaggacggtgaaggatgcaatgttcacggatctcttgaagctaatagggtatgctggaaattctcattttgcacctggcaaaacttttcatcagccgaacattttctttgatgacttgatgtctgtccataaggacagttacaatataagtcacagaatcaatcgggtagcttttggtgaatacttccccggtgtggtaaatcctcttgacgggggacattggacccatgaaacctcaaatgggatgtaccagtacttcataatgctgtacccacaatatatactgacattag

SEQ ID NO: 196972 - DNA, 691 bp, Gossypium hirsutum
gggggggccacgcgtcctaattaataaaaacaaaatttagataaggagagagaacaaacaaaaaaagtcttctctatctttgttcttgcctttaacatcaacaacaaaaagaaaaactgaattatcgaaggaaagatctgaaagagaatggcaacttttgcagggactacccagaaatgcaaggcttgtgaaaaaactgtttacttggttgaccagcttactgctgacaacaaagtttatcataaagcttgcttcaggtgccaccattgcaagggtacccttaagctaagtaattatagctcctttgagggtgtcttgtattgcaagcctcactttgatcaactatttaagatgactggcagcttggataaaagttttgaaggaactcctaaaaccgttagggtagaccgatcagctgaccaggtcaccaacagcaaattttcgggcttgtttgccggaactcaagagaaatgtgttgcttgcaagaaaactgtgtacccgattgaaaaggtggcggttgatggcacttcatatcacaaggcttgtttcaaatgcacgcatggaggttgtgttatcagcccgtcaaactacgttgcgcatgaacatcgtctatactgtaggcatcaccacaatcaactgttcaaacagaaaggtaacttcagccaactcggcaagcacgaagaagctaaac

SEQ ID NO: 196973 - DNA, 1039 bp, Gossypium hirsutum
ctttttgaaattattatttaaaaaaaaaaaccttttgttcctttctctcctcctttggcgaccgctaaaacgtttcctggtcttaatccaaattccgatcggaagatcaagttagggctttcagtcgattttcaatggagagaatcagaagagcttcgcatgcaggatcttggtacactgataacccgaacaagctggcggaagagcttgatggatggatcacggcggctggcttgcctaaatcctctgatgtaagaggtgtaattgctccgcatgcaggttattcatattcaggtcgtgctgcggcctatgctttcggaaatatagacccaacaaacatttctcgggtattccttcttggtccatctcaccattattacactccaaaatgtgctctgtcaactgctacagtatacaagacaccaataggggacctacctattgatttggaagtcatcgaagagctgaaagctacaggaaaatttgaactgatgaatcttcgtgttgatgaagctgagcatagcatggaaatgcacttgccttatcttgtaaaagtatttgaggggcattcagtgaaagttgtaccaattttggggggtgctcttagtgcggaaaatgaagcaatgtacgggaagttgttggccaaatatgtagatgatcctcataatttcttctccgtgtcatcagatttttgtcactggggttctcggttcaactacatgcactatgacaagaagtacggggccatacacaaatcaattgaggccctagacaagatgggcatggatataatagaaactggagatgcagtcgccttcaagcaatatctgtctgagtatgacaacacgatctgcggacgccatcctatcagtgttttccttcatatgctgagcaacagctcgacgagaataaagatcaagttcctccgttacgagcaatcgagtcagtgcaaaactacgcgagacagtagtgtaagttatgcatctgcagcagcaaaggtgggatcctggaagattgaaaaagaaaaaaaaaggtgggg

SEQ ID NO: 196974 - DNA, 538 bp, Gossypium hirsutum
tgtgaggccaactagttgttgtagctaacttgaccaaagatcaattaggacagtctgttcaccttgcacatttggagctcaggataacacatgcaggtggcggagtacctgaagcaatgctgaaccaaatgtttggaaatgaggaagacgcatcagaggagggtatcagtttgctcatcagccggaagttggtaaaactcatgaatggagatatcctgtacttgagggaagcaggcagggcgacgttcattgtgacagttgaacttgctgcagcaaatggtccagattccagaacctaactgactttgttggatatgatttgacaatggtgctgtacagttaacgagaagtttgggtgtttgacaatgtaatttgcaaaagcctgtgggttttatttgttgaatgagttgcactttcataagatgtctgttcttacaaggctgcagtaaaaggtgctcattaagttttgtgaacttattgttgagtgttgccaggccgactggtacttgggaaattgtaacatgtaattgtttcagtg

SEQ ID NO: 196975 - DNA, 442 bp, Gossypium hirsutum
cttagtacaaggacctccatggtatttttaccaatgattttcataatgttgaaactgtggggttcctgaacattggcagaaaacattgagaagatcatacaaaaggaatagaaaaaaaaagtcctctagctagctgtatagccaaaaaaccatacccaaaaactgcagcaatatcatcatcatatgatcattatgatcatcatcatgatgaatacatactacttacaatgaattaaagatacatataaatgtataggtaaaggacagtaggttctttttctctgtgtatgttggaccatacagtaaaattagacccagtaataactctcttttttttattacctgatactgtaatattatttcaggttaccctttgctcgaaattgtaaacaaatcctattttcgtgggtttttagtagtatagaatatgaatatacttcat

SEQ ID NO: 196976 - DNA, 610 bp, Gossypium hirsutum
cccacgcgtccgcaaacagcgcctgcaatagggaaaacagagaaataaaccgaacatcaaagatgaacacagacataacagcttcggccaaaccagagtacccagttatagatcgaaaccctcctttcaccaaagtcgttggcaatttcaacaccctcgattacctccgtttcactaccattaccggcgtttccgtcaccgtcggctacctctccgggataaaaccaggattaaaagggccttcaatggtgacaggagggttgattgggttaatgggtggatttatgtacgcgtaccagaactcagcgggtcgactcatgggatttttccctaatgatggcgaggtcgctcgataccaaaaacgtggactcaaaaactagccatttctctctttttctattctcgtctattcacttttatgtttttaggacaatttgaataatcttcattgctgtctttgatttcctgttgttcatttcaaggcatttgtattgctgcttaaaatatgacttatatgggtctaagatcccactgaaatgaggttgtctttgaataactgttagaaggcaccaaccttttgatgcaattgattgtttgcagcattaaaatg

SEQ ID NO: 196977 - DNA, 630 bp, Gossypium hirsutum
cccacgcgtccgcggacgcgtgggaaaaatatggatccaaatgatcaacaaaatgagaaggcaggggggcagcttgtcttggaagccttgtacaaacctttcaaggaggatgagataccaaaagacgttgacgactcaattatggtacaaaaggctccagaaggaacacctgcaggtggaggtttacttgtagttattgtgcatgaagctgaagatatcgaagggaagtaccacacaaacccacacgtgcggctgtcattcagaggggaggagagaaaaaccaagcgtgtaaagaaaagcagagatccgagatgggaagaagaatttcagtttatggtggatgaaccacccacgaatgataaaattcacatcgaagcgttcagtacatcctccaggatagggctactgcatcccaaggaatctttgggttatgttactataagcctagctgatgttgtgaataacagaagaatcaatgaaaggtatcatctgatcgactctaagaacggtcggattcaaatcgagatgcagtggagaacttcttagatatgccagcaatttgtttatgaggaaaggaaggtagtcgtgttacttgagactgtactgtcactatgtttctttcttcccttc

SEQ ID NO: 196978 - DNA, 546 bp, Gossypium hirsutum
  unsure (1)..(546): unsure at all n locations
gctagaaaatcagggcagaaggttattggagagcccgtggtttctggattggtcctcaatgagtctgggctttgggatcctgacttcgtcactgcagcaaagtatgtcatgagtcctcctataagggaatcaggacatgacaaggctctgcaagctgccctttcaactggagttctgcagctggtaggaactgatcattgtacttttaattctactcaaaaagctcttggcattgatgatttccggaaaattcccaatggtgtcaatgggattgacgagaggatgcacctagtttgggatacaatggtggaatctggccaaatttccgtcactgattttgtccggattacaagcactgaatgtgccagaatcttcaatatttatccaagaaaaggagcaattcttgttggatcagatgcagatattattatatttaatcccaactctagctttgaaataagtgcgagcatgcaccactccagaactgacacaaatgtctatgatggtaggaaaggaaagggaaagtnttgaagtgacaatagttgg

SEQ ID NO: 196979 - DNA, 618 bp, Gossypium hirsutum
  unsure (1)..(618): unsure at all n locations
cttgcttatgatcagtactccctccagaaactagaacctccacttgttcttcaggagtttgttaaccatggaggtgttctctttaaggtttatattgttggagaagccattaaagtggtcaggcgtttctctttacctgatgtaactaaaagagaactctctaaagttacgggtgtttttcggtttccacgtgtttcatgtgctgcagcttctgcagatgatgcagatttggaccctagtgtggctgaacttccccctcgccctttacttgaaagactggccaaagagcttaggtggcgactgggtcttcggctatttaacctaaacattatccgggagcatggaactagagatcatttttatgtgattgacataaactactttcctgggtatgggaaaatgccggggtttgaacatatatttacagacttcctcttgagcctggggcagagtcgatacaggaaaagatctagctagaaacttaatggaagcctaggacactccaaagcatcagatggtgttgttaataatcatatgcaggatatgatgtgttcgcggttgttccgttacccctttgtatancatcaagctggtggagggtgcacatcgaagcacaat

SEQ ID NO: 196980 - DNA, 446 bp, Gossypium hirsutum
atacaagctatctctttccttctccaatgattacccttttaagcctccaaaggttaagtttgagactgcctgtttccatccaaatgttgatgtctgtggcaacatttgcttggacattcttcaggataaatggtcatctgcttatgatgtaagaaccatactgctatccatccagagtctgcttggagaacccaacattagctcacctttgaacacccacgcagctcaactttggagcaaccaagaagaatataggaagatggttgaaaagttgtacaaacctcctaatgcataacttgagaaaccagaacaggagttttgttatgtttttttcttcttattattaatttttttttcttattgaagaaacgagaacatgaaatttgtcatttttctacagcatgtatgattttactttactattgaatgtgataatgataaaagct

SEQ ID NO: 196981 - DNA, 651 bp, Gossypium hirsutum
cccacgcgtccggtataatggatagaacgtttgcagactttccttggcaagttagagttggagtggatggtgttgagatagaggtccctgaggatgcagaaggggtacttgttgcaaacattggaagctacatgggaggtgtagacctttggcaaaacgaggatgatacatatgagaattttgatcctcagtctatgcatgataaaatactagaggttgtaagcatatctggaacttggcaccttggaacactgcaggtggggctttctcgtgcccgaagacttgcacaaggacagtcgattaaaatacagctctttgctgcattgcctgttcaaattgatggagaaccttggtctcagcagccatgtacattggccatatcacatcacagccaggccttcatgttgaggaggacagccgaggaatcgtctagggcatgcagctgccataataactgatgtgctcgagagtgctgaaacaaatcatgtaattaacgcatctcagaagcgagctcttcttcaagaaatggcattaaggctgacttaatggctttcttctatcacggtacttgctggtcagttagtcggtggttctcgttgcaccgaatttttctcaaaaatgtgttattttatatcaatatatgatctttct

SEQ ID NO: 196982 - DNA, 787 bp, Gossypium hirsutum
gctggggacgagggcagcattacttcagtcaagaaaggagtagtgcttgaaactgctacagaggcagaggggtcttatgttgcaggacctttgtatgatgacataacttacaatatcagggcttcgaagcctggatttcatctcaaacaagtagggccatattctttttcttgtcagaagcttagtcaaatatctgtgaaaatatattccaaggatgatgcgactgaacctatgccatctgttctgttgtcactgagtggggatgatgggtataggaataactctatgtcagggactggtggaatatttgtctttgagaacttgtttccaggaagcttctatcttcggcctctgctaaaggagtatgctttctcaccttcagcacaggcaatagaacttggctctggagaatctagagaagttgttttccatgctacacgtgttgcttacagtgcaatgggcatggtaactttgctgtctggccaacctaaagaaggtgtctcaattgacgcccgctcagagtcaaaaggctactatgaggtgacagtgactgattcatctgggacttatcgtctgcgaggactggttcctgatgcattgtattcaatcaaagttgtgaagaaggatggcttgggtagtgctaaaattgagtgagcatctcctgaatctggtcctgtaaaggttgggaataacgatatcaagggactccacttttttggtctttgaagaccagaaatgactatcttaagtgccatgttgaagcgaataggacaggggaattacattc

SEQ ID NO: 196983 - DNA, 513 bp, Gossypium hirsutum
gcagtgtgaaaatcgaaattttgtctctgtgcttacaccagatcactaggtttcatgaagacattcagtttgagctccattcatcatgtacttaatatttcaaactagaagttggaaagatgtgaaatataagggctgattgtctttgcattcccgatgatttggatccctcaagcacattgaattttgggatggaacatatacaagttatttggttagctttcaaattatgactttagttgcttaagttttagcatattctttctgaggcatttggtcctaaaataaaaaaattcttgtgccatagtgagtgtagaaataatttgagaatttattgacgattccccaattcagtgcattttatgttgtttttaggcactatttttgggtcccttcttgaggcctcgactcttctggttggtttttttggggattctctgtttttagtctcttcatatggaacttgtactgtaaacgtatttctacataaaacgcatacggttgttcaatcac

SEQ ID NO: 196984 - DNA, 491 bp, Gossypium hirsutum
  unsure (1)..(491): unsure at all n locations
aaaagccataattatgatgcttctcatctctttcttcttcctcatcttacctttagcttctttcctcctcctcctccctcttctcctccgccaccgccgtcaccgccaccgtcgtcaccatctccatccctcctctgggttttcctcgaaacagctcagaaagcttccccaattcagattctcccacgaaacggaatccgtcgggtcggattcggattcttgtgtgatttgcttagatgggttcaggcaaggtcagtggtgtagaagccgtcgttgcgtgtggccatttgttccataggaagtgtttggatgggttggttaatcaaaggtgctgcttgcccaatttgtagaacgagggttcgatttgaaaatgatgataattgcaattccggtccttgttgttcgaggagagcagagtttcagggcttgtttgatttgtaagtttattgcatatttagtcccntctttttgtattataaaaatggacagct

SEQ ID NO: 196985 - DNA, 483 bp, Gossypium hirsutum
aataacggtcgaagtattccacaaatgagaacacgtttactgttggaggggcgtttgctgttgatcatctcactctgattaaaggtaagctcagcagtcatgggaggcttggagcactgctgcaacatgaagttgtaccgaagtcgttgttgacaatctccagtgagcttgacacaaaggccttggaaaaaagtccccggttcggattggcgcttgctctgaagccctaattaggttttttcatttttggctattcaatgatgcttttggaatttgatacgttaaaattttttttcttggagattgattaagggtggcaataaatagttccacagatgataaatattcatttctaggttctcaaaagctgtggatggatgtttgatgatactttaggcttttccatgattcaatattggaagttttgagccatttgataatggtacatttaagccttgttttgcgagggttttcttttaaaag

SEQ ID NO: 196986 - DNA, 384 bp, Gossypium hirsutum
cggacgcgtgggcagtgaatccatggaggtaccctgtacaagtatgcaagaaaaataatggatgcgtacaaatgacaaatgcaagatcatgattatggtctatcatccaaattttgtgttacactcttatataatttgtgggcatgcactgcatagaaagaagaaacatcctgtatggaatatctttaatccataatctacaactaaatattaaaaaaagatacataaagcactgtagaagttatgctttcgaatgctgacacgttagcagttggtttttttttcttcatttcggtgaatgagaaagcaagggtgaaaaaatgactaattgccccttctataatttaaccaactgacagttgttaactcttctgcttatttaca

SEQ ID NO: 196987 - DNA, 325 bp, Gossypium hirsutum
gcgtccgccacgcgtacgcccacgcgtccgcccacgcgtccgcccacgcgtccggcacgccccgcctgcggaatcttgaagtgatcctgcccgtataagagcttttccacaagtatgttcaaaaccccaccaacctaaacaagatagaacctatggggctgaataaacccttctatatatatatattacttatttttatatatattttggggcgtaaaattaaattttggtgggatgaaatgaaagaacaaagaatgtatctatatatgtactgaattgatggggtttatattattagaagcggagttatttcttgtctttgatg

SEQ ID NO: 196988 - DNA, 400 bp, Gossypium hirsutum
ctccaatttcaggaattttctccgtcctaaattcgttttggtcgggagctctacctttgagttcgcagccatggcagaagagtccgacttcgccgataaggttcctccctccttttatgaaatgggaaacaagatcatttatgaaactgaagccaaagggttgaacccgggattgatagtgctactagttgttctggggctgctgctgatattccttgtagggaactatgtactttactcgtatgcgcaaaagactcttccacctaggaaaaagaagccagtatccaagaagaagatgaagagagagaggctgaagcaaggagtctcagcgccaggagagtaggacttcgaggtctgatctcttcagctccccatgttaaactgtttgcaacttcctgtt

SEQ ID NO: 196989 - DNA, 744 bp, Gossypium hirsutum
cacaggtttcccatgccgtcggtaaggactcgaggattggaccaaagttcttgaatgctagtgttgggtttggtggatcttgttttcaaaaggatatattgaatttagtatatatatgtgaatgcaatggattagccgaagttgcaaattattggaaacaagtgattaaagtgaatgattatcaaaagaatcgatttgtaaatagggtggtctcgtcgatgttcaacacggtttccggcaagaaaattggtataatgggatttgcattcaagaaagatacgggtgatacacgggagactccggctattgacgtatgtaaaggcttgttgggggataaggctcggttgagtatttacgatccgcaggtgactgcggatcagattcagcgggatttgacgatgaacaagtttggttgggatcatccaattcatcgtcagcccatgagtccaaccggtgtgaagcaagtaagtattgcttgggatgcttatgaagcaagcaaggatgctcatgctttgtgtattcttactgaatgggatgaattcaagacgcttgattaccggagaattttcgacaatatgcagaaaccggcatttgtgtttgatggccggaatgtggtgaatgtggagatgttgagggacattggttttattgtgtattccattgggaagccgcttgatccttggcttaagaacatgcctgctgtggcatgatcgacctatctttctctttataactatactacta

SEQ ID NO: 196990 - DNA, 737 bp, Gossypium hirsutum
gcgtccggaggaaataaagtatcggggaaaatgtcaatgtaaatatcggtaatcttctaccactttcggcttcacgacggccaatctactcgggctttgagatcaacattgaagcatttcgaaaattttaaatattctttcccatccaaaatccttcttcaagtttaacctcaaattaatcaaaatctggtttctttattttacttgtactaaatttgtatttgtttttaaaaaattgactatgaaagaatcgaaatcagttaaattgaattcacagcaacatcaacagcacgaaaacggtcacttctctccgttcaaattcgctaagttattagatccagaagcttcttgggacaaggatcaattaagagatgtattgcattggattcgacaagttgtagctcttttctgtggcttgttatggggagcaatcccagtggttggaggcatttggatcttcatttttctggccatatccactggtattatatatggctattatgcaatgatactgaagatcgatgaagaagaattcggtggtcatgcagcccttctccaagaagggctttttgcttcaatgactctctttctgttggcatggattctcgtatacagcttggcccatttttgatacgtattttagcatcaactccgcttccctctgtttctaaattcacatttcaaggatctctttagatgaggaacaattcattatctctgaaaacagtgcgaaactt

SEQ ID NO: 196991 - DNA, 814 bp, Gossypium hirsutum
  unsure (1)..(814): unsure at all n locations
cccacgcgtccgcccacgcgtccgcgatttctcctccatcaaagaagaagccaaacaatgccgcctaaattcgacccaacccaagtcgtcgacgtcttcgtccgcgtcaccggtggtgaggtcggagcagccagttccctcgctccaaagattggtccgttgggtctctctcccaaaaagatcggtgaagacatcgccaaagaaactgccaaagaatggaagggtctccgcgtaactgtcaaactcaccgtccagaaccgtcaggcgaaagtcgctgtggtcccgtcggcggcggctcttgtaatcaaggcgttaaaggagccagagagggataggaaaaagaccaagaacatcaagcacaacgggaacattaacctcgacgacgtcatcgaaattgccaaggtaatgaggccgaggtcgatggctaaggatttgagagggacagtgaaggagattttgggcacgtgcgtctccgttgggtgtactgttgatggaaaagaccctaaggatctgcagcaggagatcgatgatggagatgttgatgttcctttggagtgagaaagcttgttcttctcgttttttacgtctatcctcatgcttgcctcttttagaaaaatgttcaatataaagattttgaacaatttgcttatatttaattcagaggctgttttgaagtttaatttagatgattttaactattatggattctttatattgttttgtttcagnnnnnnnnnnnnnnnnnnnnnnnnnnnnnnnnnnnnnnnnnnnnnnnnnnnnnnnnnnnnnnnnnnnnnnnnnnnnnnnnnnnnnn

SEQ ID NO: 196992 - DNA, 416 bp, Gossypium hirsutum
  unsure (1)..(416): unsure at all n locations
caactcggaagcagcgatccaaaagaagcatgtgaaaaacgagactgtagagacttgagagacaaaagtgtttgtatatgaggtaaaattggattagatggagtgtgttatatatatatgtatatgggactgagtgaattttgataggtattagcactcgggtctctaaaagccagcatggttagtgtaacatcatcacccagttttatagggacaagattttggatattatctcaaacgttttaaggcctattaacttatggcgtaaattttaagcacaatccctatattattgtataaccatagatacagcccttaatctttaccattttggttaatttagtctgtaacatttcccttttatttcttcttcaattctatttagattctaccagaaagcaatttcncnnnnaaaa

SEQ ID NO: 196993 - DNA, 444 bp, Gossypium hirsutum
tcgaaaatgggaaagggatattatttcccaaagggggttgggagaaagatgaaggggagggaagaagctgtcattagagagacggttgtggaagccggtgtagttggcgtcatcgaatgtaaattaggtaaatggtgttataagagcaaaaggcaatagtatataccatgaaggccacatgtttggtctgcttgtgaagcaagagttagatggatggcctgagaaaaacatccgaaaacgggaatgggtgacagtgtcgaaagctagagaagaatgcccgcatttgtggatgatagaagccttagaagagttggtttggcgacaaacgcaggcaggtgcggcccaaggaggaagtaaatgaagtagcaactatggagttttgttgtttgaatttgtagggttaggaaaatagatcattgtaattaagaagacatcaaaacgtta

SEQ ID NO: 196994 - DNA, 656 bp, Gossypium hirsutum
ctagctgcaagatatgatatgggtgccatatgcttgcaagagcattctgagaagcttcaacaccttgtagatgatgctgtagacaaaggagccgaaattgtagctcgtggaagttttggccatttaagtgaaggcgcagttgatcaatttttcccccctacggtgctcaaaaatgtaaaccatacaatgaagttgatgcaagaagagacttttggaccaatcatgccgataatgaaattcaactcagatgaagaggttgtcaagcttgcaaatgattcaagatatgggcttggctgtgctgttttctccggcagtcaaaggcgtgccaaggagatagcttcccaaatacattgtggagttgctgcagttaatgattttgcatcaacttatatgtgccagtccctgccttttggtggcacaaaagatagtggattcggccgatttgctggtgttgagggattgagagcttgctgtttggtaaaggcagtcgttgaggatagatggtggccttatataaagaccaagataccaaagcctattcagtatcctgttgctgaaaatgggtttgagtttcaagaatcgctggtggaggcactttacggcttgaacatttgggaccgtcttcgagcactggtcaatgttctaaagatcatttc

SEQ ID NO: 196995 - DNA, 573 bp, Gossypium hirsutum
cccatgctttcggttttttgagagctaaataaaatgagtcagaattcacccacatcgggctcaatatcaatccatcattcccaacaacaagcagcggcgttagctcctttaaaaaaagatagctcttcgtcttcttctgtagctggtttctttggtaaaaatgggtacaaattctgggttttgactgcaatcatcttacttgctttttggtccatgtttactggttctgtttctcttaaatggtcttcggggaatctcactagtttctcctacgactctgatttctccattcgtgaagatcttgatgttcttgaattggaggaaagagagaaggtagtgaggaagatgggggatgtctatacacatagcacaggcattcgtttgcctagattttggcttgatgcttttgaagctgcttatgagaatttatcaagtgatgttaatggagttcgcgataatgccatatctgaaattgctaaattatctatgcagtccctaaatcttgttcccccctcggttcaatcaaagattagcagcagtcaagggagaaaaaagactaataaagaagcttat

SEQ ID NO: 196996 - DNA, 606 bp, Gossypium hirsutum
agaaagggaaccatcccaccatggattcggctggttcgtcataaaaggaaaagcatcaccagaaaccttcaccgaaccaccatacggcacagaaccatccaccactgccgcacccgaaccgttatcaaccgacctcgtgaagctcgcacccccgattccggaccaccatactcgcgattgaaacggtaatagcacagttgagccaagtgtccaaaccggccacatatctggcactgagcgcaagaccgaaacgctctcactcgactaacagacggtcgaccaccgcgcccagagtcaacaaccgctggcgtcgaaaaggcctctacgaaatgagcatggaccggcacctcttgaaccgctcgaacctgccgactttcaaattccaacagaacctccaccaaacgctgaaacggtagaggctcggatgagaatgacgcaagggtgagaacggtatcaaactccgacggcagtccggctaaaacgattccaaccttctccgtgtcagaaatccgagatccggccgcatctatcaaagcacacatgttctgaatcttcgcaatttaatccttaaccgacatcgctcccttcttgatcgaataagatcat

SEQ ID NO: 196997 - DNA, 522 bp, Gossypium hirsutum
tgaatttgcgagcagtatcttcggatccaacactcgtttcaagaccctcggaacggagcatcttaccaagtcaagcacccttgtccaaaactatactgttttaacaacaccagaagagataccagctccgatgatggtggcttgtcacaccgtgccttacccttatgctgtcctgtattgccatagccaagtgactgaaaacagggtgtttaaggtatcattggacggtgagaacggagataaggtgaccgcggtggctgtttgtcacaaggatactacgcaatggaaccgtaaccacgtgtcgtttcgtgtgttggggattgagccaggaacgcccggtgtctgccatttcttcccggcggataacttcgttctggttccagacccttgaatttgtagtaattgtctttcctaggatacgagacttgggttgtcataaataataatactcgattcctaatacttgatgtctggttatatctatggatgttgttctcatggtaacgaaatcaatgttttttg

SEQ ID NO: 196998 - DNA, 378 bp, Gossypium hirsutum
ggccgacccacgcgtgcggcccgcctcacattgcaaaatactatattttgcagcggcagaaggagctctctctctttctgtcttgagacatccttttagcttttgattttagtttataacaatcttaatccaaatgcctcctttggctttatctgacctcaaagagaagaaagaagagaaaatgatgaagaagaagatcgctctcgaaacacctgaatccgagaaaaaaacgaagaagatcaaggaacctaaggttagagaagaggaagatgattcggctgtgaagaagagtaaaaagaagcgtaaggcctcggagctccaaatggaagaggaggagaggagcgagacgagctcggagcttgttgagccggtggatcc

SEQ ID NO: 196999 - DNA, 516 bp, Gossypium hirsutum
  unsure (1)..(516): unsure at all n locations
gaatacccgggtccgaccgcacgcnggtccgctcaatttgcgaacttcttgtagaggagcggaagtgtgtaagacgatcgagtgtgaccggagcccagttcagtgtgggaggtagtaacacgaggtgttgcgtgagtgccnnattactcanncnnattatgaacacggctgtaaaggggccaggtacccccaactcccttgggctaccatgccactacttacttgtagaaataatggcgtttgtgttttgtcaatgataaatataatgcaagcgcacccaatgcatgaaatcctatttggtcgttcttttcgaggttggcagtgcttatatatattcgtttagccttgttatccctgttgaaatatttgattatagccattgaattcactagggttgtacttgacactgctattgtagatgaacaagcatgaattttgctctggtttgaagtgcgttatgttttttctttattgaatgatcacctgttcttaccatgaaaaanannannnnnnnna

SEQ ID NO: 197000 - DNA, 609 bp, Gossypium hirsutum
  unsure (1)..(609): unsure at all n locations
cttgagcgtgaagtggtttcaatactgaagctgtcaaatttctccgttatactccgtcctcaagaatcagtttcaaaaaccctcttccatttcgtaatataaaccatggcggctcaacccgaacgcggcggagtttccctacccgagaggcggtctgccgccaagccggaatccaacatcctcgccaggatcacttcctcccctctcgtttctcgtggtaagcaagccgcgtgcgacgccgctttcgtctccaagaagctcctccgtagcaccggaaaggctgcttggatcgccggaactactttcttgatcttagctgtccctttgatcatcgagatggaccgtgagcagcagctcaatgagcttgagctacagcaagctagtctcctcggtgccccgcctactgcgtccgtcagtaagtgatcaggtccgattgggtcctttcaggtcagagcttgttgtttcatcaattttttgcctgttttaggccgttccccttgatttacagtaacctttcgatcatgtatgagttttagatgtagttaaagaatcnagattttacttcttttttggtgtttcaagtttgaatntcttgtggaatggcgttgt

SEQ ID NO: 197001 - DNA, 584 bp, Gossypium hirsutum
tctcaatctcggacacgctgcggtctccgggtacggatctcctgcggtcaggctggctttccctcaaatttcgccggtcgccggttttttcgccaacggcgtctcggcagttgcagccccccaagttttttacttcgacgctttggtccgacccggtgttatgaaaggacagcagtatcaacaacggttgagattcgatcaccgtgattatcacgaaacttttggcgctggtgtacaaagcgactcagattcatcctccgtcgttgatttaaaccaccacgagatcaaacggcgaccgcttctcaatatcgatctcaaccaacctgctccggaagtcgcctgattatgattttttaaaatcgccgatatcaagaaccggaaaagaaaaacccacaaattttcaattttatctctttaaaatcgttaatcttctttttagtcccaattttgaaaattagacgagaaaattatacccaaaaagaaattacgcgagagcggcgtaaattgtgaatacgtagatgaaaaatctcctctttttcgcaacaaaagtaccgtaggttggtggctgtggttcatattaaatt

SEQ ID NO: 197002 - DNA, 533 bp, Gossypium hirsutum
cccacgcgtccgtccaagcacagcagatagagaaaacaaaaggttaagtgaagccgggagcagatcaagcactgaagagaattccacgcattaggggtcctcaaagacgagcgcctaggccctcgccttcaggttcaatctctgaaacacaagcaacacgcaaagatggaggtgtcattggtaacttcattgcaaggtcaaggttgagctcagatgttcctgctccgcccagcaacactgctgtaggaggaaaagcatctcttttgccaaaacgtactcctgtctctgagagggaaatcgaggctattctgttaggcggctgcttctgaattttcagctgtcaaagctagctttcccgaagctcgaaataaaatttctgatctgttatttttctcccatcttagttctctgatatgtaaaagaactgtttactgaagtttaaaaaagctcaaaagaatcaaaatttgtcttaaaaaatcattgtgggatgagacttgattctcagtgaaataatatgtggaaactctatttct

SEQ ID NO: 197003 - DNA, 584 bp, Gossypium hirsutum
  unsure (1)..(584): unsure at all n locations
gcgtatcacaaaaaaactaagagggctccaaaggtggaagttgggaccagggctcccgatgcttcactggatgaatggcttcagggaactgcttacactcagtcggcttccaaatcaaagaagaagaagtagacgagaaaagtgatcgctaaagtcgggctattgtaactcttgccaaggcatttggaaaaattgtaagtgagggcggaggtagttctgagaattaggccaggaaaatagacatatatacctttgctgttgtagcatttgaactttttcggttttcactacatcttttcttgaggatgcttaaatcgaggcttgtccgagcgaaactaactgtgatacgaggcaggactaatgggaccccttttttgttgctcggtttctttgttcatcggatttcggatttttggtttctgggttaaacttaagtattatcagtgtggtggtggtgtgttagaaatcttggtcacagctgctgtcacgttttcactgctattgggaagtatacattaaattcccttgttatgtttcttttgtaatcgatttcaggtttaaacnagaaaaaaaaaaaaaaaaaa

SEQ ID NO: 197004 - DNA, 701 bp, Gossypium hirsutum
tctttttgccatgggaagaattgctcagggaacaaaggttttagcagaaggtgggtatgagaaaatttttagacaaacttttgagacggtacctgaagagcaacttcaaaattcttttgcatgttacttgtccacatcggctggtcctgtcatgggagttttatatgtatctacagcaaagcttgcgtatggcagtgacaggccgctttcctatcaaaatggtagcaagactgaatggagctactacaaggtagttatcccattacatcaacttaaagcaattaatccttcaacaagcagagtcaatccttctgaaaagtacatccaagttagctctgttgatagtcatgaattttggttcatgggcttcttaaattacgagggtgctgttcaatgcctacaggaagctttgcaacagcatagcttacaatctgtgtgataatgatttgaccagtatatcggttgcaacatgttgtcatgcaagcatttggtctgctgcttcgaggcatttgatggtagatgctccttcggaagctcttcaatattctgtggcaatgaaaaaataggtgaaaacatagagtgatatctggatattatatggcaattagaagaaaagaatacaatgaatctgttctgttttaaactcatctgattgtaatttactataaacattcggtatgctataagttattggaaggatt

SEQ ID NO: 197005 - DNA, 668 bp, Gossypium hirsutum
tttatatggtcattgctaaacctggaagcgtgaggacatacaaaaggtttgaggcagagatatatgtcctcacaaaagatgaaggtggacgtcataccgcctttgaatcaaattacaggccccagttttatctgaggacagcagatgtgactggaaaagtggaattacccgaaagtgttaagatggttctgccaggggacaatgttactgcaacttttgagctcatctcacctgtgcctcttgaagcaggacaaagatttgccttgagggaaggaggtagaaccgtaggtgctggtgtagtatcaaaagtactgacctaagaagttgccattcccatagcaatgcctggttttctccatcttgttgatcgcagaaatggagaaattgatagaacaatcagttggtgatattttctgttctagaattactaaagagattgttagtgatatgaaaaatgagggctgttattgaaattattttgattcaatttcgctggtggttggtaagcagacagcatgtttttccctgtttccacccaaaaaatcacgattgaacagctttttaatgtcattgaaaataatagtcctgttgaacagagctatagtgccatgtaaacttggtattttgcacgtattaatcaatcatttttccttgaagttgtttcttgt

SEQ ID NO: 197006 - DNA, 511 bp, Gossypium hirsutum
  unsure (1)..(511): unsure at all n locations
gaagttctcatctacgcagcgttccataatcgtcgactttttgaactctctcagcaaccccaagacgacgtcacccccatctgtctcctgctgggggcgaatggactgccaaatacaggggaggttccagcagcgtcgttggggggaagccaaactctcgatggacaagtactctttaaggcaaagctcttaaaacttcccaactcggaagttttggctttcaaaatttggttttggagttggtaaagcggccaccgttgttctgactttccgctgccgtggcggtcgatgggttctgcatgagccggtgccgtacgcatggttcggttcaggttaagaagagcaggttcccttacgcttgggtaggtaactcggtgagtcagtgtcctggttattgcgcgtggccgtttcatcaacccgtgtatgggccgcaaactccccccatggttgctcctaacggagacgtangggtggacggaatggtgatcaactcggcaacggttttggcggg

SEQ ID NO: 197007 - DNA, 568 bp, Gossypium hirsutum
ggatgtcatttgccaagctaaatcagggatggggaagactgcagtttttgttctatcaacactacagcaaattgaacctagtccaggacaagttattgcccttgttttatgccatacaagggagttagcttaccagatttgtcacgagtttgagaggttcagtacttatctgcctgatatcaaggttgctgtcgtcgtatggaggtgtcaacatcaaagttcacaaagatctactgaaaaatgaatgcccccacattgttgttgggacacctggaaggatattggctcttactagagacaaggatctttctttgaagaatgtgaggcatttcattcttgatgaatgtgacaaaatgcttgaatcacttgacatgaggagagatgtgcaggagattttcaagatgaccccccatgataagcaagttatgatgttttctgctacgctcagcaaagaaattcgcccggtttgcaagaaatttatgcatgatccaatggaaatttatgtggacgacgaggccaagttgacccttcatggtcttgtgcagcactacatcaaattgagtgagct

SEQ ID NO: 197008 - DNA, 640 bp, Gossypium hirsutum
  unsure (1)..(640): unsure at all n locations
cccacgtgntcgggcccaccgaactgaacctcctctccagaggctttctctaccttttccacaccccccccccccaatatggcgatttcggcgctccaaaaactcacctcccaaatccaccgtctcccatatctctcctcccaaatcctcacccgatcctccgccaccttaacctcctccccctcctcttccaaaaaagttgctgatcggctcgtcaagctcttcgccatcgaccctgaaggccagaagcgtgaggttgtcggcctcgctggccagaccttacttcgtgccttgactaacagcggcctgatcgaccccgactctcaccgcctcgaggagatcgacgcttgctccgccgaatgcgaggtcaacattgcccaggagtggctcgagaagcttccgccgcgtacctatgatgaggagtatgtgttggtgaggaattcgaggggtcgcatcttgaacaagcattccaggcttggatgtcaggtcgtgcttacgcctcatctccaaggtatggtcgtcgccgtccccgaggctaagccgtgggatattccataaatatttgtaggggaaaaagagatgaatgtgggaacatttagtgcatttctggtggtttcctggaaagaataataattttggt

SEQ ID NO: 197009 - DNA, 683 bp, Gossypium hirsutum
  unsure (1)..(683): unsure at all n locations
gagcggccgctcgcgatctagacttgaattctactagttttcttctcttccaagcctagccatggttctcgaggcgactatgatatgcattgataactcagaatggatgcgaaacggcgattattctccgtctcgatttcaagcccaagctgatgctgttagtcttatctgtggagctaaaacccagtctaatccggagaatacggtggggattttgactatggcgggcaaaggagtacgtgtattggctactcctactagcgatcttggaaaaatcttgtcttgcatgcacggtcttgaaatggggggtgagatgaacctagcagctggaattcagattgctcagttggctctaaagcatcgccaaaacaaaaatcagcagcaaaggattatagtttttgctggaagtcctattaagcatgaaaaaaaggcattggagatgattgggaagaagctgaaaaagaatagcgtagctcttgatattgtcaattttggtgaggacgaagatggaaagccagaaaaattggaggctcttctcgcatctgttaataataatgatactagtcacatagttcatgttcctgctggtcaaaatgcactttcagatgtccttatcagcacgcctgtgttcaccgggggatggggaaaagagancngctttgctgctgctgctgctgcnnctt

SEQ ID NO: 197010 - DNA, 486 bp, Gossypium hirsutum
ctttttattttccccaaacgcttcccacaccttggacctactatcactaaaattcctctccttttttcgacgaaatctgcgtcccagaacttcttttttctggctcttttcccctttttgctggaatcaaaccattgatcttttggtatttttgtgaatggcggaaacaatttggagctgtagtatattgatgctctccccttgcaaatcgagggcgagcactctccttcctctttctgctgcttctgctttcgcattcggttcttgcaaagaaggctggtactaccgctgccttggccttgacccataaacaaccccacctcaatacctctattcctttccaccaataacccagatttgttttttttttgttatacgccccacaaaataacaaaacaaacccattgtttctcttttcgcggttgttggcgaattgctcattcatctgttttcggttttgattccttttcattttgaattttgaac

SEQ ID NO: 197011 - DNA, 985 bp, Gossypium hirsutum
acaatatttaactttcaaaccattcaattaagcaaaaaagcaaagaatttgaccttttttcttttaattttgaccctttttctctggattcgtaaaaaaaaagggaattttaaagatgtttcagttattgttcttggtgatattctccgagatggcggtgatcatggtattgtcgttcaaaacaccgctaaggaagctgacgctaatggttttggatcgggtgaaacggggacggggaccgttgatggtgaagacagtggcggcaacgatagcggtagtgatgatatcgagcgtttacagcatgatgatgatccagaagcgatggatcgatgatggatcggctaatccgacggaacagatccttatggtcaaacaccttctcgaagctactctaatggggggagtactattcctagcactgatgatagacagattgcaccattatatccgagaacttcggattcgaaggaagagcatggaagctatcaagaaacagggtcctgaggatggaaagtcgggtggctccgacaaagttaaggccttggagggagaagtaactatcctgcaggcaaaattgaagcagctagaatccgatctcgaaacaaagacaaaagaaatggatgctgcagaagctaatgcagttgctttaaggaaacagtccgaaggttttcttctcgagtatgatcggttactcgaggagaaccaaaaccttcggaaccaattggaatctttggaacagagtccgtcgcgttcggggaataagaagaatacttgaggaaaatgaggacctatggtaaattttctttttttaagtttcattatcatttttaatatagttatgcaatggatttgtgggttgcagcagtttagtttatatgattcatgtatgagttttcaagttttttaagtgtggacagaaaaaaaatacaaagagaaagagaaaaaaaaaagttagagaaattaagcccttttgtgtattttttgg

SEQ ID NO: 197012 - DNA, 480 bp, Gossypium hirsutum
cccacgcgtccgcccacgcgtcttagcgaattcatttcacagagctgaaccaagatggctgaggaagccaaaaggagagctgaaattgctaggttgagagaactgcacacactgaaagggcatgtggaatcggtggtgagattgaagaacctggacatagacacaatccagcaagcgtacacggtgtaaggcgggtggaatggtattccgaaggaatagtggaaaatgtaatgagagggagcgttttcctgcgagtgaagctctaatatatgtatcttttattaccttaatcccgtccgccattttacaagggaaaggttattgtttatggcattttatgtttatattagtagtaaaaaaccatgtgttttgcttttgttgtagtaaaaaaaaaaccaaaaaaaaaaaaaaaaacaaaactgtgatagtagaaataagaacccaaattaactttttcggataattccagttttcgagtga

SEQ ID NO: 197013 - DNA, 397 bp, Gossypium hirsutum
gtttttctattccttcctatataacattcaagtgtaggattgggtttggtctgtttagtatctgtcaggtgccgggttttttcggactcgtaatgtcatgttttttcggatgtagtcgtaaaattgaccgagggattgggttgtgactgagggattgggtcgtgtcggtgagtatagtttggtttgtatcatttttttcgttttcttcgtcgtggttcgtaaatttgtatgaatattttcgcttagaatgattggaactaatcgaagcgtttgtagcaaaagacaagaactggtaaaaattttaacactgagataaaagaagaactgtatgttattagatcaagaagctttttaatgtgagtttttggactagttttaataaaagccccgggttgtc

SEQ ID NO: 197014 - DNA, 863 bp, Gossypium hirsutum
  unsure (1)..(863): unsure at all n locations
cggacgcgtgggatctgactttctctgtaaccttagtttgttccacagaagtgattattggttgagaaaacatggggaaggacaagcataagcctgatgataagggtctgttttcacatcttgctcatggtggtcatggacaccctcctggcggatatccaccggctggagcgtacccccctcaaggctatccaccagctggctaccctcctcaaggaggatacccccctcacggctatccaccatctggctatcctggtgcatcccattcagggcacagtggcatgggagcgctgcttgcaggtggtgcagcagctgccgcagctgctatgggggctcaccacgtgtctcatggtgctcatggtgctcatggtgcttatggtgctcatggtgcttatggtgctcatgggtttggtcatggtcatcatgggaagttcacacatcatggtggtgggaaggttaagcatcatggggggaaattcaagcacgggaagcatgggaaatttaagcacggaaagcatggaggcggcaaattcaggaagtggaagtgatgttactgcccgcaaaagcatggagaattgggagtcaaaactgatagtgtcgaatgaatgaatgtaataataatttgacttcaactgctttgtattgaataatcacagacttgtttttctttctttttaattgttgacatataacaataacaacatttgattcaacgatctgatatatgcattacgacttacgagacataactcggaacatgtcattgtaaaccctgtttatttcaactttgaagcattgagtatttggtcaataaacctgataagttgctnnnnnnnnnnnnnnnnnnnnnnnnnnnnnnn

SEQ ID NO: 197015 - DNA, 489 bp, Gossypium hirsutum
cccacgcgtcggcccacccgtccgcccactcgtccgaacttgctctgtaaccgtagaagtgattattggttgagaaatcatggggaaggacaagcataagcctgatgataagggtctgttttcacatcttgctcatggtcttagtcatggtggtcatggacaccctcctggtgcataccctccacctcctggcggatatccacctgctggagcttacccacctcaaggctatccaccagctggctaccctcctcaaggaggatacccccctcacggctatccaccatctggctatcctggtgcatcccattcagggcacggtggcatgggagcgctgcttgcaggtggtgcagcagctgccgcagctgctatgggggctcaccacgtgtctcacggtgctcatggtgctcatggtgcttatggtgctcatgggtttggtcatggtcatcatgggaagttcaaacatcatggtggtgggatgtttaagca

SEQ ID NO: 197016 - DNA, 613 bp, Gossypium hirsutum
caaaaaatcaaatttaagaaagctccattaaatgaatcttcttgccgggagaagaagaatcacgaagcagtttcccatattgataaaggcagtgaaggactggaagaagcaacagaggaaggggaaaggaaatagagaatgaatcacaacccgcaatccagcgatgggaagcacgatgatgactctgctctctccgatttccttgcctctcttatggattatgctcccactatacctgacgaattggtggaacattacttagccaagagtggatttcaatgtcccgatgttcgattaataaggcttgtcgctgttgccactcagaagttcgttgcggaagttgcaagtgatgcacttcagcattgcaaggcaaggcaagctgcagtcgtcaaagacaaaagggagaagcagcaaaaggataagcgcctaatcttgacgatggacgatctttcaaagtcattgcgcgagtatggggtgaatgtgaagcaccaggagtattttgctgacagcccgtcaaccggtatcgatcccgcttctagagaggaatagttgggccatgttatttacatgtttgtatttagttgatctacatttttttgcaaatctatgaaat

SEQ ID NO: 197017 - DNA, 528 bp, Gossypium hirsutum
gaccaacccgtttttggggttgctttttttgtagtttaaacttctctcagtctacgacatgtcaaaggtcacgcaaatggaaagtctgacccgaaacgatgggttctacttctcggacagtttattgggctttgcactgcaagctatggttgtggagtccgccattattgctacaaagtctgtcgcttggttactcatgatgatgggaagtctgcctgatggaattgatagccatatcaaagagcctgaagcatatacagggtttccgcttgctcagcttcatgcagtgagaaaacctagtcctgagaacaaggatgcctgtgacaccgaggatgatgaggatgaggaagatgaagcaggagatgatcaagatgaagatgcagatgaggaggatgcatctggtgaagatgaaggagatccagaagatgaacccgaggccaatggggatggtgccagtggagacgaggatgatgaggacgaggatgatgacgatgacgacgacgatgatggtgaggaagaggaggaaga

SEQ ID NO: 197018 - DNA, 770 bp, Gossypium hirsutum
gttcacttctaccaattgttggaggagttgttcttgcatctgttactgaggcatcttgcggttggcctggattttggagtgcaatggcttccaatttggcaaaccagtcccgtaatgttcttagcaaaaaactcatggttaagaaagaggaatcgctggacaacattaccctcttctcaataataacaattatgtcctttatcttgctagctcctgtggctatctttgtggaaggcataaagtttacccctgcctacatgcaatcagctggtttgaatgttaaagaagttgttgtaagatctctgcttgctgctctatccttccatgcctatcagcagggtgcatatatgatactgcaaagggtgtcccctgttactcattcagtgggcaactgagtaaagcgggtggttgttattgtcagctctgttattttcttcaagacacctgtctcactgatcaattctcttggcactggaattgctctcgctggagttttcctgtattctagggtgaagcgatttaagccgaatgcaaaggcagcctaatttgtttgctttgctgataaattccagttattacatatgttttacgccactgattttaagcagagaacttaattttgggtattatttctccattctattccattttcatctttggataattttatatcttctctttaaaaaaaaaataaaattcaaatcgtcaattgattttgaaaaaaacaatttttagattaacctttataacttttgcccccatttaaaaac

SEQ ID NO: 197019 - DNA, 401 bp, Gossypium hirsutum
ggtggatagcctatcagatcttagttttgattttagtaggagatagtactgaacttccatagtggaaaatgagtcgaccaatggaggaagatacagtcaagaacgaggaagaggaatttaacactgggccactgtctgttctgatgatgagtcgtgaaaaataacacccaggttctcatcaactgccggaacaacaaaaaacttctaggccgggtgagagcctttgatcgtcactgcaacatggttcttgaaaatgtctgggagatgtggactgtggtgccaaaaactgggtaaggcaagaagaaggccctccctgtttacaaagacagattcatcagtaagatgttccttaagggagattctgttataattgttctcagaaatcccaagtagagtatcac

SEQ ID NO: 197020 - DNA, 826 bp, Gossypium hirsutum
ctcgacaaatgaagcttccttaaacccatacccactaacgaaatttctcacatgggttcaaattacaatacagacgctattcgggagcagttcacatctcttatttagtacttattatcagtttccaaagcatattagcatctgctctctttcgctcggcatcttcggttcttcacttccccagtctccagcaatgggagaaaccgattctttcttctcgaacaaatcagcgaagatcttcgtagcaggccatcgaggcctagttggttctgccatagttcgtaaacttcagtccctaggctttaccaacctcctactccgcacccatgccgatctggaccttactcgccaatccgacgtcgaatccttcttcgccgatgagaaacctcactatgtcgtactagctgccgctaaagttggtgggatccacgccaacaacacttaccctgccgatttcattgccatcaacctccaaatccagaccaacgtcatcgattcctcttaccgccacggcgttaagaaaatcctcttcctcggttcctcttgtatttatcccaaatttgcgccgcaacccatccctgaaaacgcgctcttatccggtcccctggaacccaccaacgaatggtatgccgttgccaagatcgcggggatcaaaatgtgccaagcgtacagaattcagcacggcttcgatgctatttccgctatgccgacaaatttgtacggccccaacgataatttccatcctgaaaattcccacgttttgcccgctttgatgcggaggttcctaaagccaaagtggatagagcaaaaaaagtagttgtgtggg

SEQ ID NO: 197021 - DNA, 573 bp, Gossypium hirsutum
tctttacccattcctcaaagggttgatggggaaacaagacaggcttcccaccatcattgtggttgggtcaatacttttagcttcggttctctctcttttatgggctcgagtcaacccctttgtttcaaaaggagatattgttttagaagtgtgcggtttggactgtgactaaaatacaggaaaagaaaaaaaagggggtcgtatttcatgaagaaaggttgtatgaaaattgcataaaatcaggcagcccttttggtggaaaatgaagacatgctgggatgcgacattgttgccctcagcatgtaataaggtaagcaaaagggaaaaacatgttggcatgattgtagatacatagaactgcgatccccatatttgttctgttgagtttttcattgattctttcgatacatgtcgattttgtgagttggaattcataaaaagtccttgtaatttgcagaggagagaagattgatgcctatggtatcatattcccttctcaataagggactttgacatatatgccatgaattgtaaaaacttggattggaatttgtttctgcattttattttaaa

SEQ ID NO: 197022 - DNA, 660 bp, Gossypium hirsutum
cgaacatggagacgtttctgaacaagaaatctgttagggatgctcttggtgttgggaatatagaattcgtttcctgcagccctacagtgtatcaggcaatgctggttgactggatgcggaatcttgaagttggcattcctgctctccttgaggacggagtcaagcttcttgtctatgctggtgaatgatcttatctgcaactggctcggcaattcaagatgggttcatgcaatgcaatggtctggtcgaaaagaatttgtagcatcgccagagggtccatttgtggttgatgggtcagaagcaagagtcttgaaaactcatggacctcttggttttcttaaggttcatgatgctggtcacatggtgcctatggaccagcccaaggcagccttagaaatgctgaaaagatggaccaagggttcactagctgaaggtggtaaggcagagaaactgtttgctgaaatgtgatttttttttttcacttttcactgcttgcagtcagtcttagttacccgctgctcttatagtgggaacaacgaaacaaagtaaacttcgaatacctgtatatatatgtatgtggatgccataggatcctggtcatctgggggttttgaatatacatactaaaaaatatgaagtgatttgaacttttttgtggtt

SEQ ID NO: 197023 - DNA, 419 bp, Gossypium hirsutum
ttttccattctttgaggctaaagcaaccatgtcggcaactccaacccagaaatcctccatcgtcaaccaggaggaactccaaaaagtcttcagccagttcgacgccaacagggatggcaagatctcggtgacggagctccgcgatgtgttgaaatcaatgggctccagcatcactgaggaagaactcaaacgtgtcttggaagacatcgacaccgacaaagacggcttcatcaacctctccgagttctcctctctcttccggtcttcatccgatgaagtcaccgccgccttggagctgcgcgacgccttcgatttgtacgaccaggacaagaacggcctgatttcgacgagcgagttgcacctggttctgaatcagctagggatgaagtgttcggttgattgattgtgctaagatgatc

SEQ ID NO: 197024 - DNA, 493 bp, Gossypium hirsutum
  unsure (1)..(493): unsure at all n locations
cgcgtccgattttgagcattcanaaacacaccaaacgaagctttctaactacaacctaacaacaatggctaccagaatttggtccctccttgcgctgcttgcgctatttgccaccgcaacaaatgcatccattattccacaatgctcacttgctcctagttctcattattccacagttcctaccaccagatacttcaatggccttcgaacacccatctgtgcaagcctatatgctacaacaagcgattgcggcgagcgtcttacaacaaccaattgcccaattgcaacaacaatccttggcacatctaacaatacaaaccatcgcaacgcaacagcaacaacagttcctaccagcactgatccacctatccatggtgaaaccctgtcccctacttgcaacaacagctgcttgcattcaacccacttgctctagcaaacgtagttgcaaaccacacacaacaacaactgcaacagtttctgtcaacgcttaatt

SEQ ID NO: 197025 - DNA, 744 bp, Gossypium hirsutum
gggggcaattttgagtcatttgtgggagtctaattttactcctcagaagattataagaggcttaggtccttggggtccagatcttgtacggaagtatacagctgctaggtttactaacagatattcacctgagggtgtatttacagaggaggagtctagacttctatctgattatgtgtaccatacctcagctgccaaagcaagtggagagctctgcttaaaatatatatttgcatttggagcatttaatcgggcacttttaaacagtgcatctgagtggaaagtgccaaccacttttatatatggggctgaagattggatgaactaccaaggagcccaagaagctcgcgagcaaatgaaggtcccatgtgaaattatcagggttcctcagggtggacattttgtgttccttgaaaatagagatggattccattcagctgtgttgtatgcctgtaggagatttctttcacctaaccctgataaagaaccctttcctgaaggtttggtatcagcatagaagaagcatagtatttttttaatttctctccacatgttgtatggcgcattacaccgagtttcattggccagaagattatttgggtaaagaaaaaaacattatttgcctgtagcttgtatcataatatttttatatacgtattatgtgttttgtagtaccttgaatctggttactggtttaagggaatggatattgaagaattgattttaacaaaaaaaaaaaaaaaa

SEQ ID NO: 197026 - DNA, 525 bp, Gossypium hirsutum
gcggatggcgataatgctcaatgatctcaattgacaggatgagaactgggaagagaggtcagatgggcaacaactcaggactaggctactgtggaggcaaagacatcagactagtacgcgctgatggcggaagacctgataggtgttataaaccaccgcccgaggttcatccggacagatgagccaattcctctgtcagccttgaggggttcaatgtcggcagtccagacccttattgtgggagtagttttctgaaaaaatcaccaaccaggatgccctactctgttgcagaggctctctgagtaaatctctcctttcatatcacggacaagaaaaagctcttcgcttttatcgatccttgtagataaataaagctttttcagctttccctatatggatgttggaacaatttacttaactgcaattacgcaatggttttttgacgattgtgtgggtttaaaagttcttttcctttgtaaaaagagtattactagcacctctttaatgagatctgaaacatatttc

SEQ ID NO: 197027 - DNA, 672 bp, Gossypium hirsutum
  unsure (1)..(672): unsure at all n locations
aatgaaagaagggccattggcaaatgccctctaactccagaggaggttggtcttgtcttgcgtgctatgggatttgacaactctacacggatatacttagctgctggtgaactatttggtggagatcgttttatgaaaccgtttcgggatcttttccctcgccttgagaatcacagttctgtggactcttcagaggaactagttgcaaacacacggggtttgttaggctcggctgttgattacatggtctgtcttctttcggacatttttatgccaacgtatgatggaccgagcaactttgccaacaacctacttggtcaccgtctctattatggctttcgaactacaataagaccggacagaaaaggtcttgctccaatattcattgatcgagagaatggacagactgctggttttgaacaagcagttaggcgtgtcatgctcaaaacgaatttcggtgggcctcacaagcgtgtgccaccggaatcattttatacgaattcttggccggaattgcttctgtcaaatatcacctagcaatcctgcagacaaatgccctccggataatgttttggaaattttagaaagccagttggagaatgaagtgaatagagacctagaaaccttgatggaaacnaattcaacacgtagaacggaaatatgagaattttc

SEQ ID NO: 197028 - DNA, 615 bp, Gossypium hirsutum
cggacgttcgaagaaaaaaagaagaagagagagccatgggtggaaacgacgatagattaagaacccgtgacaacatccctcccgctgacggtagtcgctacgctttgagtggcaaaatcatgctcagtgccatcgtggttttgctcttcgtagtggtacttatgtttggtctccacctttacgcacgttggtacctcctccgtgctcgccgtcgtcattcacgtaaccgacgtcgtcatcaccgtcgatcgcagctggttttttacgtagaccccgacgttaatggtcctcccgccgtggcttcacgtggactagacgcgcaggttctcaagtcgttaccggttttcactttctcttccgagacacacccggattctgctcgatgtgctgttggttgtcgaatttgaaaaacgaatggtcgggtataccaaatgaacatagtttcattagagtgatcattgtgtttcatctcatccagtgcctcttgtcaacttcgtgagatcgaccgttctgaaaccggagattgtatacgataagaacgcaatgaagccgatcataagacccattggtaaacagatgtcgcccgtgtcggggtgggatgcttaggtttacgaa

SEQ ID NO: 197029 - DNA, 756 bp, Gossypium hirsutum
aaaaaagaagaagagagagccatgggtggaaacgacgatagattaagaacccgtgacaacatccctcccgctgacggtagtcgctacgctttgagtggcaaaatcatgctcagtgccatcgtggttttgctcttcgtagtggtacttatgtttggtctccacctttacgcacgttggtacctcctccgtgctcgccacccggtcgtcattcacggtacccgtacggtcgtcatcaaccgtcggatcgcagctggctgatttttttacgtagaaccccccgacgttaatgggtccctccccgcccgtggccttttcacgtgggactaggaacccgcagggttctccaaagtcgttaccggggttttcactttccttcctccgagacacaccccggattcctgccctcgaatgtgctgtttgtttgtcggaatttgaagaaaacgaatcgggtcgggtattacccaaatgtaaacatagttttcatttagagtgtatcgatatgtggtttcattctcactccacgtgtcctctttgtcgaacttccgttgaaggatccgtacccgtttctgataacgcgggagatttggttattacgattaatgaaccgtcaaatggagagtccggatccaatcaagaacccgattcgtgtcagcacgaggatggtcggcccggttcgtcggcggggaggaagttgtcaatcgaggttcctgtaaggaatattgaaggcttcataaatgagtcgagtgagtgtgagtc

SEQ ID NO: 197030 - DNA, 685 bp, Gossypium hirsutum
  unsure (1)..(685): unsure at all n locations
tccacgcgttcgagtgcacctcgtatattgagaataaataaggttgttaattatgtcgtagaaaagatggtgcttgacaaaccaattgatactggaagtaccgatgggtcacttgctcctggacatggaggacaattgcagcattcagctgtcgctgatggttcttttaaatctggattgaagccttggccgaagcctaggccttctgttgagattttatgcaataatcaggtcttatctacagacatccgcctagcccctgtgcgggcctacatatggaagaaacctgaggatttggtacttaattacagagtggttcaaggcaggtgattttatcaactgctgggagcaggtgagtgggttacctgtgttgcttttaactagggttgagaaaattttggtcagaactccttacccaatgtcccgaccaaaactgttgttagtatcagttttagtattaaaccgaccaacttgatcaaactattataaattattatatttatatattttaaaatatttcattatataataaatatttntaatatattaatattcttaccctgacccaattaaacccacccaatccattacccaataaactcgttaccaaatttccaaaatagctgagcgaactaagttgatctggttattgccggttatcaatataaagtttggttggtttcag

SEQ ID NO: 197031 - DNA, 394 bp, Gossypium hirsutum
ccacgcctccgagagggagaagaaggagcccggaaggggaggaattatttttttcgttggcacttgttaaaccaaatacctttaactatcctccacaatgggatccaggtcaggcctccttgaccaggttccatggccaccatcctttgagagagaggccgaggaaaatagatcaaggctttttgattataaggtccgaattgcctttcaatatttgggggggggggggcaattctatgatagcaaaaggtgtacggttcaatcctgaaataaagcaagtgggaaattatttttctccaaagatatggagctttaccatgaagtctgtcgtgctgcaaacatgagatggtcattcagacggaccccaaaaaatggtgagtatgtgatcattagt

SEQ ID NO: 197032 - DNA, 434 bp, Gossypium hirsutum
gagggctccagccgctatccaattcctttgctggagagcttcccagtcctttaaagtttcattaaataaaccaattttaatgtcgtcgtcctcgctctctaatcccgctctctccactcctttcatctgccacaaccttcgtctaaatcagaatacgaaggatgggataaattgttttccctctcttagaaggcatagagtcccaagatgtgcagtggatatgccttacggaggtaatgctccaacttttcctcaaataagagtctgggatccgtataagcggctcggcattagtccttacgcttcagaggaagaaatttggtccgcgcgcaattttctcttagaacaatatgctggacatgagagaagtgaagaatcaattgaagcagcattcgagaaactacttatggccagcttccagcatagaaagaaaa

SEQ ID NO: 197033 - DNA, 470 bp, Gossypium hirsutum
ttctctttccttatcattcattttggtctcccaagtttcaccaaaagaaaccccgtttcacattcaaagcctttgatgcacacatactaaggtaacatcacgtctacctcttcattcatctcagaccaatccgattcgccactatgtcaatcaaaaccaaccatttccatcctctatttctatttctgaccataagcttcctaatcgccactgttgcataccccatcgacgctttggaatcaaggaagcttgacgagagcacagtaccaggtgatcaaggcatcaagtgtaccccatcatgcgtacaaagtcctccaccaccgtcgccgtcttcaccaagccctccaccaccatcaccgcccgctcttccgccacctacaccaaaaaaagtcgccatcccaatactgtccaccaccacctagcccgccttcctttatctacataactgggccaccggggaacctgtaccc

SEQ ID NO: 197034 - DNA, 375 bp, Gossypium hirsutum
ctttttcttccttcttatttacagcttcctccctttatctgacaggccatttccctttctgatatccttccctccctcactctctcttcttctgcctttgatctgctctctatccctttctctatagtatttagtggcatatttagaaaaagtgttagtgaagataaagcgtgagagggagattaaattttttgcattgcgtatatttggttttcagtttgtttgtttgtttgatgggttttacttctcttcaagtttgcatggattcatctgattggcttcagggaatgactcaggaggtgccaggaatggattcttcatccccatgtggggatattctcacatgctcaaggccattgatagaaaggagggcta

SEQ ID NO: 197035 - DNA, 541 bp, Gossypium hirsutum
  unsure (1)..(541): unsure at all n locations
cccacgcgtccgctctcttcttttttccttttttgaatggtgttgttgcagacatggccgttgaactcatgatgagttgcaggaacggtgacagcttcgcagccaaaatggaagaaaacgccgtcaaagaagccgcttccgggctcgaaagtgttgagaaactcatcagattactttctcaaactcaacagcagcagcaaactaacagtaataatcaagagaaataccaagcttcctctatctcaacaacatctaattccctggatttggaaatggactgcaaagctgaggctgatgccgccgtttcaaggttcaagagagttatctctcttctgggtcgaaccaggaccggacatgctcgtttcagacgagcccctgttcaacccgatcaagagcaagaaaccaaggtttattacgcaacaccgatccagcagattccgccaccagtgactactgcttatcctnttcctnctnctcctccttctcctnctaattatcatcatcgtgattttatgacggtgaaaacagggggttaagaacg

SEQ ID NO: 197036 - DNA, 403 bp, Gossypium hirsutum
gagggcatgggatgtggatgatgacactgccacggccctaattggtaaccaaaagggcaaaggcattgtcaagcttgatgccaatttcaagatgcctgaacccaagcccgatcaccgcaaaggaatggccttgaactgtgaagaagctccgttggacaccgacatcaagaatgccggcaacgtcgtgctcttgaacactaaaaacctccctttggtcggccaggtgggtatgggggccgatctcgtcaggctggaaggtaatgcaatgtgctcccctggcttttcttgtgattcagccttgcaggttacgtacatagtcaacggcagtggtcgtctccaagtggtgggcgtcgacggcaaaagggtcctggaaaccattgtgaaagccggcaatctgttgatt

SEQ ID NO: 197037 - DNA, 470 bp, Gossypium hirsutum
gttactaccaaacatctaagattatgccagccggaattgttgccgggatcagttttcttatgactgggttttacttgtacaaattagctaccggtggcaaccatattccagccaaggccgaatgacgatgttgagcatgttgacttttaccaattttaacagatctgacaagatcattgaagctcagatggttgtagtagaaaacttttaagtgtatcacgtatgctgtactctaccctgatgtgtgtatgaaaagggaaaaagacaaaaagttgtgttatttgtgaaagaaaccctggtttgtgatcaaaattgtgtttgtgtctatgcaattttctcatattgaagattaaatttctttttgttcttggaatgacttaaattccctgatgagttgtggtttataaggatgcaaatccaaacatgtatgaatttgcagaaattccaaggttcaccttggaacaggaact

SEQ ID NO: 197038 - DNA, 555 bp, Gossypium hirsutum
tgataattaacgacgtgatgcatttgagatgagaaggatgtgttttctttcttgtacctacctgtgcttttcagaatctttgtggtcctggtaaaatggatggccatggagaaactccacgctgagttagttgaacagtttagtagcgtctggcatcacagcagagttagaagataccttacatccgaggactggcccggtcctgaatccaaggggaaaccatggtacggtctgcttatgttgttgagaaaatatcctgaacactttgtcattaacacaagatccaagggtcggataacattggagttcgtctctcttgtatctttgctttcgtagaagaatgctaatgaagcaccaaatgacacttccccttgcatggtcatcttacatatgccatgtttgggaagacaaagaagttgcaaagtgtagaatatcatgatactaatgttgttcttatcttttagatccacccactttgagctctgaactggctttgctggctaaatgcacctggattttatggattttaagatatattgacatcaattttcattt

SEQ ID NO: 197039 - DNA, 921 bp, Gossypium hirsutum
  unsure (1)..(921): unsure at all n locations
cccacgcgtccgctccattggaatcttatgccgatataggaggtttggatgctcaaatacaggagattaaagaggcagttgagctccctctgactcaccctgaactgtatgaggacatcggtatcaaacctccaaaaggagttatcttgtatggagaacctggcactggcaagaccttgcttgcaaaggcggtggctaattctacatcggcaactttcttacgtgttgttggcagtgaattgattcagaagtacttgggagatggtcccaagttagttagggaactcttcagagttgctgatgacctttccccttcaatcgtcttcattgatgaaattgatgcggttggtactaagaggtatgatgcccattccggtggtgaacgtgaaattcagaggactatgttggagttgctgaaccaattggatggctttgattcgagaggagacgtcaaagtgattcttgcaacaaaccgaattgaaagtcttgatccagctttgcttcgtcctggtcgtattgataggaagattgagttcccccttcctgacatcaaaacaaggaggcgcatttttcagatacacacatcaaggatgacattggctgatgatgtaaacntggaagaattgtgatgacaanagatagttctctggagctgatataaaggccatatgtcctgaagctgatntgctgtttaagagaccacgcttgaagtgcacatgcgacttaagagccangaaaaggatgttaaagaaaaggttcacaggcctttttgaaaacttagtttatcattcctggcttgatcggtaaggtccaattctttattaggacttctttctaaaaatagtaaatatgtaattgggtttatttatttaaaataaaattggggtgcttttagttttagttatcctaagaacataataa

SEQ ID NO: 197040 - DNA, 483 bp, Gossypium hirsutum
cctactcgtccgaggaactgttaccttagaggatcatggacacggtggtaactctcaggatactggggaggaagttgatcccgatgagctttcatacgaggaactccttgcactcgctgaagtagttggaaccgagagcaggggcctttcagctgattcaattgcctccttgccttcactgatattcaaggcaggaaatagtcaaactggaaccaatgattcgtgcgtcatttgccgtgtagactacgaggatggtgactccttaacagcactttcttgcaaacattcatatcatcccgagtgcataaacaattggttgaaaataaacaaggtctgccctgtttgtagtgcccaggtcttgatctaatggcaacttgactgcttggttttaatatgcaaaatgtgtcttctcttttggatgggaaagaaaataatttggtatcagttttcttaagtacttttggtgtgaaccaactttggaat

SEQ ID NO: 197041 - DNA, 526 bp, Gossypium hirsutum
cggacgcgtggggttagcctgcatgtaccatggtttagcttactttattcaactgggggttaaatccctatgtttgcaaggcataattagcgatgttaggtgaagttgatcttcattaataaactgatttgaggatggaaacgtctttagccaatcctttaaattcaataattgaaaaatacccaaagaagaagaagctctcaatagggaatagtcctccacccaatggtggtagagccaccaagaaagtgcaattcagggaaaaagatggggtgatgaaggtggaaattctaagatgcatcaaactgagaagcctttttctttttgggacaagctgatggatgcaaatatgggcaatgaaaccgtagagaaggatgttattgagattatggaggtggataatgacattagaagttctctgcttagacttaaaattgaactcgattgttgtttgggttgagcttttgacaaagatttttagcttcaaccccattctctctctatattttaattattgttaaattat

SEQ ID NO: 197042 - DNA, 721 bp, Gossypium hirsutum
  unsure (1)..(721): unsure at all n locations
ggaatatggaagcttgatacagatgacgacatggcttccttctacttggtgcacatggagttggaatatggaagcaagatccatgtcatgagattattggccctgctttggtctcaccttataatgaaccaatgttcaactctgtcttttctttctgactaaacattaacatagcattctctgatctttaaattttcctaggcataataaaaatttgcggagccttttgtgaggattcccaaggtgacttggtaagtgttctatagtatgcatcttcttattaccgtggttgaatgtttgcaggcgttgctccatttcatttactgggatgccttgccagacatggaagagctcatgggttcaacttctaaatgggcttctacgcttgtagctcagcatctgcttgccgctgctgaccggtatgcgcttgagagaatgagattgctttgtgaggctaaactttgtgagggtgttacaataaacacagttgcaactacattagccttggcagaacagcacaactgtttgcatttgaaaggtgtatgcttaaaattcattgcattgccagagaatttaaaagctgtgatgcaaacagatggatttgagtatttgagggaagctgcccgggtgttctacctgaactgctgcatatgtngcgaaaatcggggagcattcttgtatttctttgggatatcngaaaagaagggatcgtggatgggtc

SEQ ID NO: 197043 - DNA, 556 bp, Gossypium hirsutum
  unsure (1)..(556): unsure at all n locations
cccactcgtccgggcatctcaaatttcagagtcccatctccttcacaaactcgacattttcaagatccaaggcaaagataaacgcggccacaagattcttcgcattaccggaaagtccttccccgctcggtttttgagcgttgatgttttgaaagagtatttagatgagtatatatttccaaggctttcaaagaagccgttttcggtgttgtacatgcataccggagttcaaaggaccgacaactttccgggaatctcagccctccgatcaatctatgatgctattccggtcaccgtcaaagataatctccaatccgtttattttctgcaccctggcctccagtctcggctcttccttgccactttcggccgccttttctttggtgacgggttgtacgggaaattgagataccttagcagggtggattacctgtgggagcacataaggagaaacgagattgaggtccctgatttcgtgtatgatcacgatgaagatatggagtaccgtccgatgatgatggagtacggttgggatantgatgatcctcaccctagt

SEQ ID NO: 197044 - DNA, 720 bp, Gossypium hirsutum
ctgattttaaagctgcacccgaagccaaaagaggaaaggaaaaaggaggattgtttgttttgcgatggcggacaaggcggtgacgatcaggacaaggaagttcatgaccaacaggctcctttccaggaaacaatttgtcattgatgttttgcatccagggaggcccaatgttgccaaggcggagctgaaggagaagctttctaggatgtatgaggtgaaggacccaaattcgatctttgtgttcaagttcaggactcattttggaggtggcaaatctactggatttggtttgatttatgattctgtcgagagcgcaaagaagtacgagcccaaatacaggctgatcaggaacggactcgataagaaggtggagaaatcaaggaagcaaatgaaggaacggaagaacagggctaagaagatccggggagtaaagaagaccaaggccagtgaatcagcgaagaagaagtgaggtaagatgcccggaacggaaaaaggcgaggatcgcgcttatcttaaagccgatgtttctcgagagcgatgcataagtagtccgaagtttttaggggttcttgaacctatatttttggaaactgagtttggtgttattttattatttagttatacgctacttatagtatctgattatcctattttgaaatattttagtgttatgcagttttatttccaataatataaaaataaataatttattatgatttt

SEQ ID NO: 197045 - DNA, 601 bp, Gossypium hirsutum
  unsure (1)..(601): unsure at all n locations
gctgtttgtaacttttggtgcttccactccgccgccgccaaggaaagaggaagatatttgcttgaccatggcggacaaggcagtgactattaggaccaggaagttcatgaccaacaggctcctttccaggaagcaattcatcattgacgttctgcatcctgggaggcccaatgtttccaaggcggagttgaaggagaagctcgctagaatgtatgaggtgaaggaccccaattcgatctttgtgttcaagttcaggactcattttggaggtggtaaatctactggatttggtttgatatacgattctgtcgagaacgcaaagaagtatgagcccaaatacaggctgatcaggaatggactcgacaccaaggtggagaaatcaaggaagcaaatgaaggaaaggaagaacagggctaagaagatccgtggagtaaagaagaccaaggccagtgaagcagcanagaagaagtgagctaaaaggatgaaagaaagagatctatggggcctctgaaagtgtgaaggtgagattatggctttgctgaagtgagtcatgccgaaattatgtgttgaaataggcatgaatgaccacactctagattaa

SEQ ID NO: 197046 - DNA, 752 bp, Gossypium hirsutum
gttggggaaagctttcactgtataactgctccgaaagaaaaggaaaaaaaaagaagagaaagattcttgcttaaccatggcggagaaggcagtgactattaggaccaggaagttcatgaccaacaggctactttccaggaaacaatttatcattgatgttttgcatcctgggaggcccaatgtttccaaggctgaactaaaggagaagcttgctagaatgtacgaggttaaggaccccaattcaatttttgtgttcaagtttaggactcattttggaggtggaaaatctactggatttggtttgatttatgattctgttgagaacgccaagaagtacgagcccaagtacaggctgatcaggaatggactcgataccaaggtagagaaatcgaggaaacaaatgaaggaaaggaagaacagggctaagaagatccgtggagtaaagaagaccaaggccagtgaagcagcaaagaagaagtgagagctaaaaggcaaaactcgtgcttatcacagagccaatgcttttcaacattgttttttagggttcttgaatcttttgttttggaaaccagatttttggtgttgttatctgatgtttagttatattattactatctgatttttcttattttgagaattctttcatggcatattttgaaatatcccatgttttgccattgatattgtcaggcagtacttgctctctttctaccaaatcttgaatcctaaaaaaaaaaaaaaaaaattgatgc

SEQ ID NO: 197047 - DNA, 594 bp, Gossypium hirsutum
cttttctattgatttgctgtctgtgtttgtatttgtgtgtttctctcaaaaaaaaaactttacaatcgaaaatcaataggcttttatagccgaatgtaaaataaataaataaataaatgaaaatacaattcttctttttttgtctttgctgcttttgtctgttctcctttgcaggtacgagtacgggactgtgcgttggcccttggctcgtccggtacggggtggtgctggcgtgtgtacgggagggtgcgtggcgccaggaggatgctggggttgctggttgcggcgcatgggaaggaaccctaaggttctaaaatttctgggccacttggggtgttcatatttgggctgtaaggctactggtttttttgtaatgggactaaagtattagtaatggggtcatgctattgggcttatgctatgtaattggactttaagtatttaagggactgttataattttatttatttatttatttattatataggtttgggatttctttagcgggcccgggccaaaattggtcactacaaccttgagacatgacctgaaccttgtaaacaaaggagctgaaaaaggcttagtgaacacatc

SEQ ID NO: 197048 - DNA, 600 bp, Gossypium hirsutum
  unsure (1)..(600): unsure at all n locations
ggaatggtgatccatgtgctcctactgattgggatgcttgggaaggagttacatgtcatactaacaagaatggaactggccttgtcattactcaaatagaacttggaagtcaaggcctgaagggttatatcagtgagcagattagtctcctgtcaaacttgattaatctgaacttgagtactaattctttggatggcacgctaccaattgggcttggacgagaaatcccttgcacgactggatttgtccgataatcaattctctggctccataccggaaagtttaacatcttcaaatctgcagcttgtgaggcttaacaataacttattggaagggagaagttccggaagaactttactctgttggtgtgcacggagggactattgatctttctggtaacaaagggcttgtgtggagttccccctttaccggattgtccccttttttgggagaatggtcgcttgtcgaaaggtggtaaaattgcaataggcctatcatgcttcctttttgttgctgtgctgctgctggtgatctacatattctgtatcangcggngtagaaatgattatgattttggtttaccttcagatttaatatcac

SEQ ID NO: 197049 - DNA, 312 bp, Gossypium hirsutum
ctgcctatattaaataagcattaagatccatattagcctattgtaatagctggtaggcacttttgactgaaaattcgctaaaatgttctcctcgccagacttgaaaatcatcatgttcatcttctgccaaaggaatttgcagaatcttctgtggtgtgtccgcttgaaaggtactatctttgattctatttgtaacaactcccgatacccaccgatcattctaaatagatatttgatctcccctactgactcgccaacataggtcatcttgcagtaacccttttgctgtccaaacgctcttccaagtaagtg

SEQ ID NO: 197050 - DNA, 738 bp, Gossypium hirsutum
ggcgaagatcatggatatggaaaccaagattgggaggagatttgaaggcaaagttgcaatcgtcaccgcatccacccaaggcatcggcttcgccatcgctgagcgtctcggcttggaaggagcatctgttgtcatctcttctcgcaagcagaaaaatgtggatgaagcagttgaaaagcttaaaaacaaaggacttgaagtgtttggagtggtttgtcatgtctcaaatgcacaacacaggaaagatcttattcaaaagactgttgataaatatggaaaaatagatgtgattgtatcaaatgctgctgtaaatccatctgtggatcccttgttgcgaaccttggaatctatccttgacaagctctgggaaataaacgtcaaagcaactgtacttcttctacaggaggcagctcctcacctccaaaagggttcatccattgttattatttcctcgattgctggctataatccacagcccgctatggctatgtatggggtaactaaaacagcacttcttggattgaccaaggcgcgtccgcacttgcaactgaaatggcccctgttactcgcgttaatgctgtcgctccaggttttggccctgccaactttgcagcatacatcacaaaagatgaggatgtgaagaaggttaacgaggaaaagaccttacttggaaggcttggtaccccaaaagacatggctgctgcagctgctttttttgtattcgaaaatgcttgtttt

SEQ ID NO: 197051 - DNA, 748 bp, Gossypium hirsutum
agaaacttctgcaatgcaaacgtctcagaaacataaaattacaggcaagtgcattgactggcccgtgcaagagctggagtcctattgttggcctcccaaccagagcttagagccataccagtcaggttctgatgatggcagcggtagtgtgcaacattcagttcctaacctggagcgatactgcacccttgattcatcgtccagtatgcagaattcttcttcgacagccagtttttcacccgatggcagtcctgtttcgcagcaaaactacacttacccattggaccttcatcattccccggaaaatacgtgtgcttcaccaataagtggttcttgtgtaatagacaatgaaaatgacttggggcttatgataagacaactggaaactgctatgctaggcatcgattcaggtgatcttgaccttcatgcaatagcagcttctggcagagccactaaagtttccgtagaagcggagaggtggaaatacatgaaagagatgatcgccagaggggacctgaaagaactgctttgtacttgtgccaaagctatagaaagtaacgatatgtatatgactgactgtttgattgcgcaattacgtcaaatggtgtcagtttcgggtgaaccaatgcaacgactaggagcctacttgttggaagggcttgttgcacggttggcttcttcaggaagttctatttacaaagccctaagatgcaaagagcctgccagtcctgaactgctttcatacatg

SEQ ID NO: 197052 - DNA, 451 bp, Gossypium hirsutum
cttgggttttaggcccagtttggaaaatagggtaagagatgagggagagagcaagaggagcagcgaccggcgagagagatggcaggagcgttttggggaacaagagtgatggagatagtgtagaagcacgactctggtggtctcgtttggaagagaattaagctcacttccacccgcaaagccaacgccaagaagcgtctccatcgcgtttggcagaatgaagctgttttgagagcatgcgcagaaccacctccttcgaaagcaacggatgtagctggtggtggtggtgagaaaggtgtggaacaatcaacttaatggacaattaaggaagacactacataagcctgaaaggaagaaattggtgactctttgggggttaatggtgcaaaacttttacaatctgagatttgaaatttagttgtatggtatcattgaccacctttttttttta

SEQ ID NO: 197053 - DNA, 729 bp, Gossypium hirsutum
cccacgcgtccggtgcagatccgtcaatatcaatgcacgagctgcagccacatgatcagttcgtgatatttgcatctgatgggctttgggagcacctaagtaaccaagaagctgtcaatatagttcaaaatcatccacggagtggaagtgcaaagcggctcgtaaaaaccgcactacaagaagcagcaaagaagagagaaatgagatattccgacttgaagaagattgaccgcggtgtccgccggcatttccacgacgatatcacggtaatcgtggtgtttctcgactcaaacctcatgagcagggctagctcagcaaagggccctaatctatccgttagagggggcggagttaacttccctccgaatatactagccccgtgtgccacgccaaccgaacccggcggcacctgatcatatatatatctatgtccctcgggtttttttttcgttggtgcatcattttcttatgtgaatacctggtagcttccgaaaagcgataaaaaccggaacaagccttcgattctttgatgtacaccaccgttacttttaaccggaaaaactaatacctgcatttagttttcgtctatgttgaaaaactcgaaacaaacctagagaaatagtacaaggtgttgattgttatagttatttctgggatagtttttttcttactcttttatatatataaataatatatactctccttttattcttcaaaaaaaaaaaaaac

SEQ ID NO: 197054 - DNA, 410 bp, Gossypium hirsutum
cccacgcgtccgcccacgcgtccgattatttgttgcaaagattattatctttaggaaaagaagttttgatgcaaagatcgaaggttgaaaagcaaagaagcaagttaggagaagaagaacaagctgctgttcttttaatggctctttcttatggctctgtttatgcttagtgttttcttacttttattctaatttaaaaatatatatttagaacagacataatacgatctttaatgggtatctaaccattttgaaatgtaaatctttggttaatttgtagctgtctttttagtggctaactattgtggttaattgggggtggttggagaagaaggcttggacggaaggaaagtggaagaagatggaaggtctattctatttttccttgaatcaacttgtattagtaattc

SEQ ID NO: 197055 - DNA, 639 bp, Gossypium hirsutum
  unsure (1)..(639): unsure at all n locations
gagaagtcgaaacatcatattgcactacattcagcaagcaagaagcagcaaagggtagttagggaattaaatttgagggaggaggatgagatggataatttggaaaaagtgttggggaaggaggaggtgaaggaaagaacagaagaacataaaggaagagcaggaaaggagagaagcggtgtaagttcactttctagtctcttcaggtgacacattctcttttccaacagcacaagtcgtgtaccaaagttgtgataaaagtgatagatagaggagaggttggtaattggatatggtgggattacaaatttcttaacaaaaatttgacagtttagtggttaatgtgctttatatcaattaaacattagcgtgttttgtattggtaacgttctttctattctgatgatgaatattactcgacccaattccaaacnnnnnnnnnnnnnnnnnnnnnnnnnnnnnnnnnnnnnnnnnnnnnnnnnnnnnnnnnnnnnnnnnnnnnnnnnnnnnnnnnnnnnnnnnnnnnnnnnnnnnnnnnnnnnnnnnnnnnnnnnnnnnnnnnnnnnnnnnnnnnnnnnnnnnnnnnnnnnnnnnnnnnnnnnnnnnnnnnnnnnnnnnnnnnnnnnnnnnnnnnnnnnn

SEQ ID NO: 197056 - DNA, 680 bp, Gossypium hirsutum
cgaagacggagcagccggtgctaggagtcccatactatgcagggccacggatggatggataccaacaggggaggataccagccaacgccatatacggcgatccaaagggaattccgattcagcaaaccatgtatcgggatactcccgctcctttcaattgcccttactgtggtaattccggtctcaccctcgtcagatctaagcctagtttggcagcagtggttggatgcatgatgccctttatgcttggaatctgcttcctttgcccttccatggactgtctttggcataaatatcattattgcccaacctgcaacgagaagattgctgattttgagaaatcagatccctgtctggtggtggatttgccccaatggatgcagaagagttttgctttgcctgcatgataaccaagtctactaaaacccatttgcttctgatttgctacaaaccattgtctatacaagcaactgtgttttgaataaaagctttccactcgactctgttgccagtcgcaacagcctgttgtgtatttttttggatacatacaatctatccatagctgaatttaatgttataagtcaatttgatcttagctccattagaaaaagcttcatgacattattgacgaatagccccttcggtttgaactatacaataataaacatatgtaatattct

SEQ ID NO: 197057 - DNA, 452 bp, Gossypium hirsutum
ccggtctatattaagcatcgacccacgcgtacgcccacacgtccgcccactcgtccgaaacatttatgagagaagaagggagaggaacacaggggagggagaggggaaggggttctcaacctgcgggccggtcaccggccgatcgtcggccactgtctgtcgccggcgccagccacagcgcacggtggccggagaaggtactggggcggtggagcagagagtgggtgaacggtgggtggctgaatgttagaggattcgccgtcacaagctaggattagggtttaggtattttttgtttctgattgggggtattgggcttagtgtttagttgggctaacggttttgtattgggtttgggtaatgggtaggtttagtgtgggttcaaaatcgctgagatttaatgtattgggctgagtaatttatggtggcccaaaattggcctttaacacatg

SEQ ID NO: 197058 - DNA, 772 bp, Gossypium hirsutum
  unsure (1)..(772): unsure at all n locations
caaaatttcttctgcaattcgtgtcatcccaaacttccccaaaccagggatcatgtttcaagacataacaactttgcttcttgataccaaagcatttagtgatactattgatttgtttgttgaaaggtacaaagggcaaaatatatctgttgttgcaggtatagaagcaaggggattcatatttggtccacctattgcattggctattggtgccaagtttgttcctatgaggaaacccaataagttgcctggggaggttatctcggaggagtattctttagagtatggaaaagacaaaatggagatgcatgtcggtgccgtgcaagctggagaacgtgctttgataatagatgatctcgttgccaccggtggaaccttgtctgctgcgattaggctacttgagcgagtcggcgtgcatgttgtggagtgcgcttgtgttatcgaattatcaggtttaaagggtcgggaacggttaggagatacaccgctgtttgttcttgtaaactcggcttgatctcacaagtgttgtggtggtggtagatgggcattgtttgttgcactttttaaagttttcaatatatagctacaactttgcctaaaggcctaacaagtctatttggttgaataaaaaaggctgcatttggtaaaagttttagtggattgaaccatgataatataaggtttaggtgttgttgatgatgatattcttccaggcgagtgttcattgcatttgtaataatattttgagcaaaagtggctttgagtganaggc

SEQ ID NO: 197059 - DNA, 948 bp, Gossypium hirsutum
gctaccttctttgcttagcttgtcaaccaagtggcatgtctgtgtactctgtcgggtgtggcttgggtggaaagcttggacatggctcaagaacagatgaaaagtaccctcgattaattgaacaatttcaacttttgaacctccagccaatggtggttgctgctggtgcttggcatgctgctgttgttggtcgggatggaagggtttgcacatggggttggggacgttatgggtgcttaggtcatggaaatgaagagtgtgaatcagttccaaaggtcgtagaggcattaagagatgtcaaagcagttcatgttgctacaggggactacacaacctttgtggtatctgatgatggtgatgtatactcttttggttgtggcgaatctgccagcctcggacataatactgctggtgaaggacagggaaacaggcatgccaatgtgttgagtccagagctggtaatgtcattgaagcaagtgaatgaacgggtggtacagatcagccttacaaactcgatatactggaatgctcatacatttgcactcaccgagtccgggaagctttatgcatttggtgcgggagacaaaggtcagctaggcatagagttagctaacaatcagacagaaagaggaaaccccgagcgggttgatatcgatctcaattaggaatccaatggcttctcctcccatttgcatacaccatgggtgattcattagattctggacaatcacgcattgcatgtggtgttttaagtttccctgtttattttgtaaatagaaacaagcaaaaaatgaaattgtgaagattttaagtttaggagtagcaaagggccttaagttggtctgatttcctaagaaaaaaatggttggcacataggccttaagttgttaatagctgaaacatctctgttcaggttcattgattacttatgttaaaaattgcattctt

SEQ ID NO: 197060 - DNA, 863 bp, Gossypium hirsutum
aatcttcttagtgtgagccacactttagtcacaatttttacagtgattttgttctttcttcttgtcactcccataattgttcctattgcattgagttgctccgaagagcctaaagatccggcagaagaagttcttctaccaaagtcggagcaacaagaagctggaaaacctgagcagagtgatcaggaacatgaagtgatattcagtgaggttgaagacgagaaacctgtggaagtagacttgcttccagcatcagaacggcaaaaaagaattgctcagttgcaagcagaacttttccaggccgctgctaaaggagcagtaagggtgaagagaaagagaggtcctcatagaggagaagactttaccttgatgcaggctttgatcaaagcagacttttggctcatctttttctctcttctattaggttcaggatcaggtttgactgtgataaataatcttggtcaaatgagccagtctctggggtatgataatactcacatatttgtatctatgattagcatttggaactttcttggtcgtgttggtgggggttacttctcaaaaattataatgagggatcatgcttatccaaggccagtatctatggctgttgctcagcttgttatggctgttggtcatgttttctttgctatgggatggcctggggcaatgtacgtccgtactttattaataagggctggctatggtgctcattgggcaattgttcccgctgctgcctctgaattgtttgggctggaaaaatttgggggcctgttcaatttcctcacgccggcgaatcctggcggtcccttggtctctcaggtttatggcaaccttatttccaccctgagcccaataaccat

SEQ ID NO: 197061 - DNA, 639 bp, Gossypium hirsutum
atttggaactttcttggtcgtgttggtgggggttacttctcagagattatagtgagggatgatgcttatccaaggccagtatctatggctgttgctcagcttgttatggctgttggccatgttttctttgctatgggatggcctggggccatgtacattggtactttattaatagggcttggctatggtgctcattgggcaattgtcccagctgctgcctctgagttgtttggcttgaaaaagtttggggctctgtacaatttcctcacgctggcaaatcctgcaggttcacttgtcttctcaggtgtaattgctagcagtatttacgaccatgaagcagagaagcaagctcatcaacatcatatccagctgcagatgtcaggcttacttttctcagggttgtatggtcaggatgaagtgctcaagtgtgaaggttctgtatgcttctttctgacttccatgatcatgtctggattttgtgtcattgcagctgttttaagcatgatacttgtgtaccgtactaagactgtttatgccaacctttatggaaagtctcgcacttgatttcaagaatgcaatctaggaaggtctctcatggatgttttgtcccttttaagtggcattttttcgtgaaaactg

SEQ ID NO: 197062 - DNA, 457 bp, Gossypium hirsutum
cccacgcgtccgatcaaatgaagagagcaaatcacttcacaaacaggagtctttaaaggccttgcggaacaaaatcaacaatgacattgtcaccgtgcaaaagaaggcaaggactatcaaggcacagctcgaagaaatggaccgtgccaatgcaactaacaagcgcctctcagggtgcaaagaaggcacgttagcttacaggactaggattgcagtaaccaatgggttgcgcaataagttgaaggagctgatgatggatttccaaggtttgaggcagaagatgatgaccgagtataaggaaacagtagggagaaggtattttacagtgactggcgaaaaccccgatgaggcaatcatcgagaagataatatcagatgggaatggaggggaggggttcttaacaagggcgatacaagaacatggtcgagggaaagtgctggagacggtggttgagatt

SEQ ID NO: 197063 - DNA, 723 bp, Gossypium hirsutum
  unsure (1)..(723): unsure at all n locations
ggaagaagaagaagaggaagaggaagaggaagagcagattgaagaagaggagttggaggatggaatccaatctgtcgatagcctttcaagtacccccactggagttgagactcctgatgtcattgaccttcgtaaacagcagagaaaggagcctgagaggcctctctatcaagtgcttgaagaaaaagaagagaggattgcccctgggactttacttggcacaactcacacatatgtagttaacactggcacccaagacaagtcggcagccaaaagggttgatcttctgaagggtcaaaaatctgacagggtggaagtcagtttacagccagaggagttggaagttatggacaatgtgttgcctgcaaagtatgaagaagctagggaggaggagaagctacgcagtcagcgtgaggactttagtgatatggtggctgagaatgagaaaaaaaggaagcgaaagatgcacgagaaagatggaaaatcgaagaaaaaggatttcacattttgagtacgcaagattctgttggtggtgtcnacatgaagcaccagctgacttgccattttccatggagaatgaggttctttttaacgtttgtgctaaatgtgttgtacttgatccgatttccgtattaacttgttcgctgtgtaactaaatatatcaacatcatttgccctcttgtcttgataattcctatgaattccactggcccgggttcctgc

SEQ ID NO: 197064 - DNA, 459 bp, Gossypium hirsutum
aaaaatcttaattccctctagaaaaaatctttgatttgtcaaaattgtcgggccgtgggaaaggaggcaagggattaggaaaaggaggagctaagaggcatcggaaagttctccgagataacattcaaggcatcactaagccggcgattcgtagattagctcgtagaggcggtgtgaagaggatcagtggcctgatctacgaagaaactcgtggagttctcaagatctttctggaaaacgttatacgcgatgctgttacctatacggaacacgctaggcgtaaaactgttaccgctatggacgttgtttatgctctcaagagacaaggaaggactctttatggtttcggtggttgatttagggttttagggtctttcttcttttgttgtaaatctttcgttgcaactgcttggtgtaggcttttttttttttgtttggatcgatgtattttcgtttcga

SEQ ID NO: 197065 - DNA, 989 bp, Gossypium hirsutum
cccacgcgtccgcgattcccttcgttgtttcctcaactttcagtgtttatttattattatttttatttttttggtttagtgtgttgcaatggccgaggagccgacaccaaagcgccaaagagaagaaacccagagctcaaacgaagaacatgttgaagaaacaaaacgccataagtcttacaatcacatactctctttgcttgaagtcgaagaggatgagcccagccaagacttgtcccccctaatcaccactttacagcaacagctctcctcggactccgttttggatgcccctttccctctttgtgaaccagcaacaccatcgccctcgaacccagacaaggaaaccgccaccaccgtcctcagcttagaagactgcacatcagcaacttgttccttgaaagaagatgatgatgatgatgataaagtgcaagtcataagacatttgcttgaagcctctgatgatgagctggggattccaaatagagaagatggcgatggagatggtagcggtggtggtggtgatgttggctttgaagtttttgagttggaagaaggtttcaacaatggcggaaatgggtttgcattgtgtgatgggttatgggaacttgaagatgaggctgctaattactatactttgttacagtctgaactcttcatgtagcttcatggccggagaaactacgaagcagaaagaaatggtaggggtaaaaattagagaaggggaaaaaaagggagtgcggggggaaatatgaaaaatgaaggcgattattttttttgggactaattcattttggaaccccccaacttctttgaaaatatcaggactttccccttgtttctttgttcaatattaaaattaaaatgttaaaaggaggaatatgctttatattttgtcccatatttcctaattattttatcccttcccattcttgctccaaacgtttttaagatgaagggttgaaaaataattattttattttggtaaa

SEQ ID NO: 197066 - DNA, 456 bp, Gossypium hirsutum
gaaaatatggagtccactaaaatctcacctctctttctcatttgcatgcttttcatttcctccgccactcccattcttggttgtggttcatgtggcactggcaaagcaccaccaaagccccctaaaggccccattacaatccctcccattgttaatcccccaatcaacctccctcccattctaaatccccctgtgacagtccctccggtgacggtggttcctcccataattactaagccaccaagtgggaaaccttgcccgtcggccacttgccccattgacacattgaaattgggtgcatgtgtggatctgcttggagggttggttcacattggccttggtgacccacttgtgaatgcatgttgtccagtccttgcagggcttgttaagctggaagctgctgtttgcttgtgcaccactctgaagctaaaggttctcaaccttaacatttatgtg

SEQ ID NO: 197067 - DNA, 566 bp, Gossypium hirsutum
gccaaccccaacaccaaccatatgctcagctttcttagtcccaagccagtcccgatgaaacagatgggttctccaccgaaacccaccaagctctacaggggagttaggcaacgtcactggggaaaatgggtcgctgagatccggctacctaagaaccggacacgtctttggttaggcactttcgatacagccgaggaagcagccttggcttatgataaagcagcctataaacttaggggtgattttgcgagactcaacttccctaaccttcgtcaccaaggttcccatatcggtggcgacttcggtgaatacaagcctttgcattcctctgttgatgctaagcttcaagctatctgtgaaagtttggaactcaaccaaaagcaagcgaacaacaacaaggacgaagaaatcatcgaaggagaacaaagtccaattggctgagcctgaggaaaagacagtgaaggtggagaactccccctcatctttatctccggttctgtcggagaatgaggggtcgacagaatcttcacctttgtcggatcttaccttctcggacttcaacgagc

SEQ ID NO: 197068 - DNA, 606 bp, Gossypium hirsutum
ccagaaaccgggtccgggaactgagcgttatttcgggttgttgtatcctaacgggacaaacatatacgggatcgatttgactgggaagactccggattcgtgtttcgagccgttgccgaggccagataataacgagccgtataaggggaagatttggtgcgtggcggctaaaggtgttaacgagactgcgcttagttcagcattgtcatacgcgtgttcgcaggggaataagacttgtgacccgattcaacccggaaagaaatgcttcaaaccggattcattgttttggcacgcgagctacgcgtttagttcttattggtcacaatacaggaagactggcgccacctgttattttaacggcttggctactcagacggctaaagatccaagttttggtcactgtaagtttccaagtgttactctttgatgaatacccaatcacaaattgaatcgaattttatttatttgtagtaagacagacctaaaaattattctaaagttagtaaaaaattttaaatattgtataaggggtgattacgatttcttcaaattgtatgatctcattcattaaatgaattaataaatttattataattttatcttgct

SEQ ID NO: 197069 - DNA, 473 bp, Gossypium hirsutum
  unsure (1)..(473): unsure at all n locations
gaaaccgccttccctgattggtttgttgcttttcagttgtatatggctacccccgggttgcaaaagatgtactcctgcaacggcacagccttggagttgaatggcgttaacaatactatattcatgcaaggtctgcccgggttaaactatatcgttgcagaaaccgatgcagctaaccctcagaaagatcctagggtgcccggaaaacaacagacagttatctcattcaccaagaaaacgaccccttccattaacattgctgcaggtgatggattcccctctaaagtgttcttcaatggcgaggagtgtgcactcccttcaatgctgccaacaaacagcggtaatcgaaagggctcaacgactgtaatctcgatcttgatagcagttcttgtgttcatgctggttcaacagtagctacaaatgtgccattactttgtggttgtgttggtcttttctgcangttcttctctttt

SEQ ID NO: 197070 - DNA, 629 bp, Gossypium hirsutum
  unsure (1)..(629): unsure at all n locations
cagatccaagaactccagtccgaagttctggacgtgacttctctactccagcaacgaacaagtcaagggctancacttcatggggcagtacttaatgggcantcgaatcagcagagcccagggagttcgagttggtggtcacccaaggcaagtagtagtgagcatgatgtcaagggaaagggctctcccgttgacggcatggctcagcctggtgcattgatcacacttccacctccgagggcagttgctaggccagagatacagaggaactccgtacctacagcaaatctagatgaggaagaatgggttactgtttatggattttctcctgctgatacaaatttagttttgcgagagtttgaaaagtgtggtgtgatattgaaacatgttcctgggccaagagatgctaactggatccacattctttattcgaaacgatccgaggctcaacgggctcttggcaggaatggaatgcaaattaatggagtaccaatggttggtgtgaagccagtggatcaaatgcaacgcgaggcattaaatgaaagattgaatcatcagggcttcatgactttgactccggcatcaagtaaaacatcaaagtgtaacaatntcaggccacctcgaccgtc

SEQ ID NO: 197071 - DNA, 1414 bp, Gossypium hirsutum
tcgaggacgcgtgggctctctctctctctcactctctctctctcatggattctctttctctcttctgtaccggggctcttttagccggcggtctgtactggttcgtttgcgttttaggccccgcagagcagaagggcaagcgagctgtcgatctctccggcggttccatttccgctgaaaaggttcgagacaactacaagcagtattggtctttcttccgccgcccaaaggagatcgaaaccgccgagaaagtcccggacttcgtcgacactttttacaatctagtcaccgatatatacgaatggggctggggtcaatcctttcatttctctccttccatccccgggaaatctcaccgtgacgcgacgcgtctccacgaagagatggccgtcgatctcatcgacgtcaaacccggagaccgaatcctcgacgtaggatgcggggtaggcggacctatgcgtgccattgcggctcactcgcgtgctaaagtcgtgggcatcacgatcaacgattaccaagtgaaccgcgcccggatgcacaacaagaaacccgggctagattctctttgcgaagttgtttgcgggaacttcctggagatgccgtttcaagacaacagcttcgacggcgcctactccatcgaagcaacatgccacgcgccgaaactggaagatgtctacgccgaggttttccgggtattgaaacccggatctctctacgtgtcttacgagtgggtcacaactgaaaagtaccgagcagataaccccgagcacgtggaggttattcaaggtatcgaaagaggcgatgctttgcctggcctcaggagctactccgatattgccgaggctgcaaaaaaggtaggatttgagattgtgaaggagaaggatctggccaagccaccgtctctcccctggtggactaggcttaagatgggtagaatcgcctactggaggaaccacattctcgtcattgtgctggctgccataggcatagctcctaaaggaaccgttgatgttcacgatatgttgttcaagaccgctgattatttgaccagaggtggggattctggaattttttcccccatgcacatgattctcctcagaaaacccaaggaggctccttcaaaatcctagacaatttctggaggtaacaccatgttgcagcattaattgtgttccacctcttgttactttacccttcttaatattttttttccttaaatttaatttccaaggtttcttctttttcccccctctttaatcaatcatcatgtacctcctttttagtttgatttaagttcaaagttgttgattttgggttttaatttttgtattgttggtgataaactgataaaaggaaaggaacgaaattttttgttctttttttttttcaattgagagtgaagaatctttgttgt

SEQ ID NO: 197072 - DNA, 619 bp, Gossypium hirsutum
cggtcgaccacgcgtccgcaagtactcgctatcttcttccttgccacaccatttgttaatccactggttctcaatcatcgactgatgtgtcatcgttttgtttttgactggtttcctggccaccattcttatgcgagtcctgaagaatgatttcatcaagtatgcacatgatgaggaatcggcagatgaccaggaggagtctgggtggaagtatattcatggtgatgtgttcagataccccaagcacaagtccttgtttgccgccgcccttggttctggcacccaactcttcactcttacaagtttcatttttatccttgctctagttggggtcttttatccatataaccgaggagctcttttcactgctctggtcgtcatttatgcccttacatctggcattgctgggtacactgcagcttctttctattgccagctagaaggaacaaattgggtgagaaacttattactaaccggaagcttgttttgcggacctctttttgtcacattttgctttcttaatactgacgcaattgcttataaagccacagcagcattgccatttggaaccattgtggtgatttttctcatatgggctctggtcacttcacctttatta

SEQ ID NO: 197073 - DNA, 424 bp, Gossypium hirsutum
ccaaattatgaaccgcaagatagtgagaagaaaaagatgagatctccctttagttgccgagcttcagtgtcgaagcaacagaagacttcacatgaatcaccttcaagaggctgcttgccaccatcgtcgaattcgaataattcaaacaatgttttacattgaaaggaaaggtggggttttcttttcgttggcattttgagtgcgtcccaagcaacctccaaagaaaaaaaaaaggaaaagaaaggcattaatgtttgaagatttcttttggtgttgtgttcttgttcctttaggaggttgtcttggttataacacaacaccaatgtgctttttaggtccttatttggagatgttgatttattcctttctgaaaaagcctaataaatgcaagtttctaaattaatgtattttattttatttttta

SEQ ID NO: 197074 - DNA, 435 bp, Gossypium hirsutum
caaaaacaaccccttcctcttcttttgtcctttaaacgtttcaatttcatgatctagaaaatgggatttggggctttaagaagtatcgttcgaccactatgtcggactctcctactatcccaggcttcccctgcttctggaactatgtcgactctcccttcttatttgtgcccaaaatcctgtttgaattcccttttgtgtgggtctatttaccgccaatctccatggatctcgatgtccaatcagttgcatagcttaaccaatactcgtttcccaaagagaaggcctcaagacaaggcacgccgaaaaagagccagcttgaaacctcctgggccatatgcatgggtgaagtatacaccaggggagcctattcttccaaataatcctaatgaagggagtgtcaaaagatggaatgagaaaaagagaatgaggctg

SEQ ID NO: 197075 - DNA, 950 bp, Gossypium hirsutum
  unsure (1)..(950): unsure at all n locations
cccacgcgtccggttgatgaatatggtttgattagacaaccgaagtatggtcatctaaagcagcttcacaaggctgttaagatgtgcgaacgagctttagtttcagctgatcccgttgtcacttcacttggaaacttccaacaggctcatacgtacacgtcagaatcaggagattgcgcggctttcctatcaaactacaataccgaatctgccgcgagagtgttatttaacaacatgcactataacttacctccttggtctatcagcatccttcccgattgtaggaatgtagtgttcaatacggccaaggttggagttcagacatcacaaatgcagatgttgcctacgaattctaagatgctctcatgggaaacttatgatgaagatacttccgcattagatgatagcttaatgataagtgctaatggtctactcgagcaaataaatgtcactagggacgcaagtgattatctatggtacattactagtgttgacatcggttcatctgaatcattccttcgcggaggagaacttcccactctcattgttcaatcaacaggtcatgcagtacacatctttatcaatggacagctttcaggttctgcctttggaacgagggaaaataggagattcacattcaccgggaaggtcaatctgcgtgcaggaacaaacaaaattgcgctgctgagtgttgctgttggattaccgaacgtaggtggccacttcgagacatggaacaccggaatcctaggtccagttgcattgcatggacttgaccaaggaaaacgggacctatcatggcaaaagtggacataccaggtcggactcaaaggagaggccatgaatcttgactcaccgaatggtatttcgtctctcgagtggatggaaggatcgttggccgcacaaacacagcanccattaaaatggcataaggcttatttcgatgcacc

SEQ ID NO: 197076 - DNA, 713 bp, Gossypium hirsutum
aaaaagatcaaataattctctgtttcgatggttttagagaactgaagaagaaccaatggggggttaatataaaaaatctgaaaatttataaaacaacaataaagataaaaggaaaaaacgggtggtgatttgagtttgatttgcagttagccaaagcaaagcgatgacacttcaagcaacttcctgcaactttggagccatttcatctctgcttcgtcctcctaaaatttcccgtcatcgtttcgtgatcagagctgaagtggaaccgtcagagaaatctgtggaaatcatgaggaaattctcagaacaatatgcacgtcgctcaggaacctatttctgtatggataagggagttacttctgttgtaatcaagggactggcggagcataaagattcgttgggtgccccactttgcccttggaggcattatgatgacaaagctgctgaggtagggcagggattctggaattgtccatgcgttcctatgagagaaaggaaagaatgtcactgcatgctctttctcactcctgataatgattttgctggccaagatcagtccatcacactggaagagatcaaggaaacaacaacgaacatgttgttcatgacattcattacttggttttcccaatcccccaaggaattccaaatgaaatattatttttgtatttcaaaaggggtaaattttttttcccttttttatacctaccttt

SEQ ID NO: 197077 - DNA, 514 bp, Gossypium hirsutum
ccccccggcccccgggaaacgcatcgaaaagttagggttttcgctccttacgattatcgagagcgtccttttgaattgaagtatgggaaagaggaaatcaagagcaaagcctgctcctaagaagcggatggataagcttgacactgtgttcagctgccccttttgtaaccatggaaccagtgttgagtgccgccttgatatgaagaacttgattggcgaagcctcttgcagaatatgccaggaaagctttagcactgttataacagctttgactgaaccaatagacatatacagtgaatggattgatgaatgtgaacgtgttaacaaccttgaagaagaggacgatggggatcaggatgaaggttatgtgcctagaaaacgggtttcgacatctgaatgggactagcagtagcgatggatgttttagtacttaccaaggctgtaattatgttagttttctgtggggagtagttgtgtgcaagtatgcatatcttacagcatcttatggtatgaa

SEQ ID NO: 197078 - DNA, 795 bp, Gossypium hirsutum
gtctgcttgatagcgtcaccgaatatcaacatcaacgctctacaatgtccaacaagctagaaggcaaggtagccataatcaccggcggagcaagcggcatcggagaagccaccgtccatcgtttcgccctccatggtgcccgtatgatcgtgatcgctgatatccaagatgaattaggccaaaaagtagtcgaagccatcggttcaaataagtgttcatacatgcaccgtgatgttaccgatgaagaacaagtaaaaaatttagtccagtcgacggtccaaaactacggcagcctcgacatcatgttcagtaacgctgggacagttagcaactcaattcaaaccgtccttgaactagacttcgcagcgtttgaccgccttttcaccgtcaatgtccgcggcatggctgcttgtgtgaaacacgccgcacgagccatggtggaactgaacgtgagaggaagcatcatttgtacggcgagcacgactgctagctgcggtagtgaaagggacactgattataacatgtcgaagcatgcggtgattggattgatgagatcggcaagcaaacaacttggagagcatgggattagggtgaacagtgtgtcgccgttcattgtgggaaccccattactctatcattacctggggacggaggcggaggtggagcagttgtttgagccctacgcacggttgaaaggggtggtgctgaaagcgaagcatgttgctgatgctgtggtgtttcttgcgtcacaggactccgaacttattaccggacatgacttggtggtggatgctg

SEQ ID NO: 197079 - DNA, 602 bp, Gossypium hirsutum
gttaacatgtgtgagaggaacagtgtcagtgaagaaatttctgggctgtatttataagttacaggtgatttggccttgaatctgaaagttttgatatagttgtagtgaatttctatttgcgatatatgcatggaaacaaattcaggtgttacagtgataggagctgaagctccatcaacttatcatatggcaccgaggactgaaaatgctaatcagatcagcagtggtttaacaccagtcgatgttccagcagttagtgtaggattaaccggtagtacagaaaagaagaagagaggtagacctagaaaatatggaccagatgggaaaatggcaagggcattgtcaccaatgcctatttcctcatctggcccacccggtacagctgagtttccgagtggaggaaagccagggagagggcgaggcagtgcttaccagattaagcatcataaaggaatggacatagataatttaggtgagtcgcccggcacttctgtcggaacaaattttatgccgcatgtcatcactgtcaatcccggcgaggatgtaacaatgaagggtgatatcgtttcgtcaacaaggaccacgagccatttgcatcctat

SEQ ID NO: 197080 - DNA, 462 bp, Gossypium hirsutum
cggacgcgtgggtgaaggccggaatcatgttccaaaggcaatgaaaatgaagcggtcggggtcacatgtcggagctgccgaaaagaactcccagtaccagtatcagtagcagtacccttggtccatcaaactcgatagatcatcggtttcgcttatagacagtgagtgcggttccaccagtacggtattgacaaacaccaactactgcagatcccatttcgggtacgatgtaagagtatgaaataacaccaaatggaatctcgaaaatgaattcgctcgattcaactgagggaaagtaatcaggagccaaaaaaaagtttgacttctatgactaatgtagaaggtttactgtgaacaatgacctgcgaaaattgcagggactagtgatgtagtaacattgtgtcaatagaaattctctggttgatttattttctgatgactaggttttttattttatgtatt

SEQ ID NO: 197081 - DNA, 643 bp, Gossypium hirsutum
  unsure (1)..(643): unsure at all n locations
cccacgcgtccgcccgtacaccattgtttgcatggattgtgggttattcatctggatgtgtagcaaccctccctcttctgtattggcgttatcgtcatcgtaaccaggcttctgagcaagactcagctcaaaatcgccatgcttcacacaataatgcccctgccagatccttttctctctctgttactaggacttctgatgggggtgatcatcgaactgcaactacatcacctagaggtggccaaaacatggcaataacaagtgccataataaaagctctagtggaatacttcagaacgatcttagattgcttctttgctgtttggtttgtggttggcaacgtctggatctttggtgggcactcatctgccagtgaggctcctaacttgtacaggttgtgtatagtttttcttacaattagttgtatcggatatgcaataccctttattctatgtgccacgatctgctgttgcctgccttgtattatttctgtccttggatttagagaggatctatcacatgcaagaggggccacacctgaatccatcgaggctttgccaacttacaagttcaaggtgaagaaaaatagaaatagtgatggtaaggatgtcaactcangcgccagtgagggtggggttgtggc

SEQ ID NO: 197082 - DNA, 429 bp, Gossypium hirsutum
ctttccaccatgagatgctgaatattgcctatagcaggccttctcgagaaggattggattggtagtagcaaacctcctttcggaactcgtgagttgctgttgcagaaattgcatcttttcctagacttccaagcaagttaaactataaaaagaaagaatgtgaaaagaacaagtagaaaatggtttcagaagcttgactgctggtttttctccggtttcggtccatcatcgcagttcatgctgcttttgttgaagaaaatcagccgttgtggaaattaaccatttgtgaggactattataggttctttccatttctatttttctttgaaagaaaagacattttaagttttttcatcttggctatgatcaagtgtcacacatgatacgaactacttgtgatattctattacaaagttttgctgttgaaaa

SEQ ID NO: 197083 - DNA, 469 bp, Gossypium hirsutum
cccacgcgtccgcccacgcgtcctcggactcgtgggtggaatgatgtccaaccgaggagggggtgactttgacaggatgaggcatagaagccccagtcccatggcttcttcaaacattatgtcaaatgtttctggaactggattaagcaactggaatagtcttcctcaggagagactaagtggacctcctgggatgacaatggactggcaaggtgcaccggcaagccctagttcatacaatgtgaagagaattttgcgtcttgaaattcctgtcgatacatatccaaatttcaattttgttggacgactcctaggccctagaggcaattctttgaagcgggtagaagctactactggttgccttgtatacatcagaggcaaaggatcaataaaggatccagacaaggaagagcagctcagaggtagatctggctatgagcacctcaatgatccactccacatattaatt

SEQ ID NO: 197084 - DNA, 455 bp, Gossypium hirsutum
cgaagatctctctcctttatttctgcagtctgtatttttcgcggccaccaacaaccaccgaagaaaatggcttcgaacgcggcggtgccgttctggcgtgcagcggggatgacatatatcacctactccaacatatgcgccaacctcgtcagaaactgcttgaaggaaccttataagactgaagccctttctcgtgagaaagtccatttctccatctccaagtggactgatggaaagcctgaaaagcccaccatccgctcagattcgcctgaagaatgagttgtgtggttggtcatcaaagtcgccaattgggaaggactcgaggagtttaatttttgttttttttgtaattcttgtacaatgcctgtgaacagatttcagggtttgagatgctgctgcattttcgtaataatctctactttgcaaataatagactgaggtttcattggactgct

SEQ ID NO: 197085 - DNA, 1213 bp, Gossypium hirsutum
tttgaaacaagccctgattatggacacttggcaagcaaaatgggatcagagtatcttgcaaaacttttatctcagcatttagagcttgttatcaggcagcgcataccaagcatcatttctatgattaataagacaattgatgagctcaacgcagagttggatcgcattggcaggccagttgcagctgatggaggggcccagttgtacatgattttagaactttgccgtgcatttgatcgtgttttcaaggagcacctggatggagggcgacctggcggtgataggatatatggagtttttgaccaccaattgccggctgcattgaagaaactcccctttgatcgtcatctttcattaaaaaatgtccagaaagttgtcactgaggccgatggctatcagccccatttgattgctccagaacaaggatacaggaggctcattgatggttccatcacctatttcaagggcccagcagaagcctctgtagatgctgtgcattttgttttgaaagaacttgtgaggaagtcaatagctgaaacagaggaactgaagcgattcccatcacttcaaaatgacatagctactgctgcaaatgaagctttggaaagatttcgtgaagaaagttgtaaaacagtggtgcggcttgtagagatggaatctagttacttgacggttgattttttccggaagcttcatgcagcaccagagaagaaaccagagaagaatgggaacccacctggcccaaataatgaccatttccatgatacttctctcgcaaggattggatcaaatgttagcgcttatatagccatggtttctgatacattgaagaatactattcctaaagctgtggtttattgccaagtgagagaggccaaaaggtcactgttgacccacttttatgcccaagtagggaggaaagagaaggaacgactgagtgccatgttggatgaggaccctcaactcatggaaaagagaacacagattgccaaaaggctggagctttacaaagcagctagagatgagattgatgctgttgcctggaaatgatatatttatatatatatccatcttcattttcttttatttttttctttcccacatccatccatttaagcgttctatattcttttacatatgagcaaacatattctgtcaacaacgtgtctcgtagtaaaatgcccaacttattgtttaaaaaaaaaaaaaaaac

SEQ ID NO: 197086 - DNA, 647 bp, Gossypium hirsutum
  unsure (1)..(647): unsure at all n locations
agcagaagagatttcaatacttccataagagcttgtgagaagtatggacgaaatgatataaaaagtattgcttcagaaatggaaggcaaaactgaggaggaagttcaacgatatgctaaagtttttaaagaacgatacaaggagttaaatgattatgataggataataaagaacattgaaagaggggaagccagaatctctagaaaagatgagatcaagaaagcaattggcaagaaattggatcgctacaagaatccatggctggaaatgaagatccagtatggtcaaaacaaagggaagctgtacaatgaagaatgtgatcggttcatgatatgtatggttcacaagcttggatatgggaattgggaggaattgaaggcagcattcaaaatgtctcctttgtttcgatttgattggttcgttaagtcacggacaactcaagagctggcaaaggagatgcgaatacccccatccgggtggttgagaaaggaaaatcnaaaactttgacgagaagggagcgacaagcccgcnagggagaacgaaacttgcccagaacatgacaccatctaaccgaggtgggaggcagccgattgaaagtcctgctcnaccgaaaaaaacaaaacagctatcaatggatgattacgtca

SEQ ID NO: 197087 - DNA, 351 bp, Gossypium hirsutum
cccacgcgtccggaaacttattcgatggtgatggagtttatgcgtgttatctagaattctgtctacaaatatggtcatgtttctgtagaataaaggttaaattttaatgcattgtgccttgttgcgtaaaacggaacattgtaacacacagaaaagcttgttcagatgtggtgtctatgttgtaccgtttagccaatgcattggaatttgttgtttatgtggttcggtattatggtttgggtagtcagattataaattccaagaatcatgaaagggctaatcataaatttgtgtcataaattcagcttggtttttgcctattaataatattccttgcaactgtgctacctg

SEQ ID NO: 197088 - DNA, 632 bp, Gossypium hirsutum
  unsure (1)..(632): unsure at all n locations
attttttttaggaattaacctttgagattttgaatattgtttccgccgccagggccaggaggcatgtactgcaattacccgccgccgatgcgggtcaactgctccggctgccacacccctttgcagcttccgcaaggtgcccgatccatccgttgtgccatctgtaaagccgttaccaacatcgctgaccctcgatccctccctcccgcgtcccaatcacctgctccttccacccacgcgcttccttctccctccccttacaatcatgctcctcccggggcacctccccacgcccacggtcgaaaaagggcggtggtctgtgggatttcgtataaatactcaaagcatgagctcaaaggttgcatcaatgacgccaagtgcatgcgttaccttctcgtcaacaagtttaagtttcccgaggattccattcttatgctcacagaagaagaaactgatccctacaggcttccaacgaagcataatataaggatggcattattttggttantacaaggtggtcaacctggtgattctctgttatgtcactattccggtcatggttcacggcaacgaaattacactggtgatgaaattgacggctacgatgagactctttgccctttggattttgc

SEQ ID NO: 197089 - DNA, 1090 bp, Gossypium hirsutum
  unsure (1)..(1090): unsure at all n locations
ggcctgagagctctggttttggtgatgcatttgatttttctttgaagtctgggagtgagcatagggtgtttctgaatcgcctcaagaaggtatggaaggccatggaaggcctagtcgattccggtttagttcgagctatcggtgttagcaatttcggtgttcatcagatcaaagaattgcttaaattcgcaaaaatcgtacctgctgttaatcaggtggagttgcatcctttttggaggcaagatgagctggtgaagttctgccaaatgaagggtatccatgtatcggctcatacacctttgggagtacctacttcaagtcctggagtgtccgatagtggatcgggtggggaagatgaacccggaactcctcggatttcatttcggaggtctagatcagtacatggaccgatgctgaaattatcaattgttggagagatagcagataggcacaaaaagacaactgagcaggtaattttatggtgggggtttcaaagaggaaccagtgttctaccatgtancctaaaacccgacaggataaagcaaaacattgacatatttaactggtctctgtcagatgatgagtggaagcgcttgaatcggattgaaccacaggtatgtttatatggcgatggtcctttgaacaatctctccgatcgaggcttcatgtttggtagtggtcctcttcaagctgttcgagcaatagaagatgacgctgtattcaacgcctaatatgttgtgagcatgttgttctaaggataatgtcccggttttacattcaatcatgtcattgctcggttataatatttgctgttgcgtcgccatcattagcataactttgagtttgttgacgatggatagaaggtcaaagagaagaacattgtaattgatcggtagttgcaggttttactttttatatgatcaaatggtgtttcatatatatgtgtgcaaacgtgttttgtttgtaaaacatcatgtgtgctcttcttcttagcttcatgaatgcacaaatcaattaaaactcagagctatttgtttgcttaataaaaaaaaaaaaaattatgttaaattaaaaaaatataattttgaat

SEQ ID NO: 197090 - DNA, 443 bp, Gossypium hirsutum
  unsure (1)..(443): unsure at all n locations
cccacgcgtccggaaaatgagccaaatgtgttcctggatatgnnaactccaagaaaaataaagaggattcttatgcattggctttctcaaacattctcnccgcaaaaggtaattacaagggaacaagcagttcaagatctggaggaatcggagagatgaagagaagaacttgtacaattgctgttggcagaaagggtatgagagaatgtggctgattaagtcaaatggagaaagggacatcatgtccttgttgtgtgcaagtgttttctccctgagacaggcaaggaacctgacatcaagaatggttcaacttaaagatgcttccttgtactcattctcatcctctttatatttttcgatgctttcttcaagtaggatactaagaatttcctgtactattctttctggttccttataaaattgtttgctcattagaaccttat

SEQ ID NO: 197091 - DNA, 1051 bp, Gossypium hirsutum
  unsure (1)..(1051): unsure at all n locations
cactccgcagcctcccccgttctttgaaatcctattttccctttatccgcactggggaaaagaatagagaaaaattgcaatagctttttttgatcgtcataaagaaaaagcgccggggcgtgacctgagatcatcaaaacctaaacacgatcctttgatttccgaaatatgtggagaaggctacttacttcacagttcaaatatctggcaacacttccatgccgatccgcctctaaaacggcgccgcttccattcaaatctcacatttctccttccccttctgcttccctcctcgttcgccatttctccgccgagtcagcggatactgctgtgaagaagagagttgaggatgtaatgcctatcgctacaggtcatgaacgagaggagcttgagtctgagcttcagggaaagaaaatccttgaagatgtaaacaaccctgttggtccttttggcacaaaggaagctcctgctgttgtcaagtcctactatgacaagagaatagttggatgcccaggaggtgaaggcgaggatgagcatgatgttgtctggttttggctggagaaaggcaaaccacatgagtgtccagtttgctcacagtattttgtgctggaagttgtgggacctggaggacctccagacggacatggcgatgatgatcatcattaattgcaactttgaatttttttttcctgttggaataaaattgcagaagacgattaaatgatgttccaatatacaatgcaccttcaaatgttcaaaagctgttatctgtcgtttggttttgagatggtattctctgtttctttatggtactttagactgatacacaggtatgggaatttttttggtaaacttaaaatgcatcgccaaataaataaatcttttccattcattcaaaaaaaaaaaaaaaannnnnnnnnnnnnnnnnnnnnnnnnnnnnnnnnnnnnnnnnnnnnnnnnnnnnnnnnnnnnnnnnnnnnnnnnnnnnnnnnnnnnnnnnnnnnnnnnnnnnnnnnnnnnnnnnnnnnnnnnnnnnnnnnnnnnnnnnnnn

SEQ ID NO: 197092 - DNA, 936 bp, Gossypium hirsutum
gtcatttccctcatttcgccgttccttttgcactgaacaacgaattttttggggtatttttcaaaagaagcgaaggcatcacctgagataaggaaacacttaaaaccctaaaatctttgaattcagaaatatgtggagaaggctgttgacttcacagctcaaaaccctagccacagctccatgcagatccgcttctaaaacggtgccgcttccattcaaatctaacgtttcatcatcgcctttttcctgtctcctcactcgtcacttctccgcctcgtcagcggatagtgctgtaaagaagacggttgaggatgtcatgcctatcgccactggtcatgagcgcgaggagcttgaggttgagcttcagggaaagaaaatccttgaagatgtgaacaaccctgttggtccttttggcacgaaggaagctcctgctgttgtcaagtcctactatgacaagagaatagttggatgcccaggaggtgaaggagaggaccaacatgatgttggctggttttggctggagaagggcaacccacatgaatgctctgtttgttcacagtattttgtgctcgaagttgtgggccctggaggaactccacaccgacatggtgacaacgatcatcatcattaattgcagctttcacgtttattttttcctattggaataaaattggagaggatggaaccaagtccagttatagagttcattgcaccttcaagtgttaaaaaaaaaatctatcatgtttggtttttgattggcccttggtcttgtttgagatggtatctctattttttcggtttttcagggtggtcatctttttgaactatgaatcatcttaggtttaacttcaatgattgccaaataattgatggctaccgtccccattgtttcattaaacatcttgatgttgaattttgaaggaatcttacaggttt

SEQ ID NO: 197093 - DNA, 814 bp, Gossypium hirsutum
ctcagttctcaagtttagaataaccaaaccgagtcggaagaaagaacaagtcaacaaatcaccaaaagtcaacattttcccgctgacactgggcaaccgtcccaaccggaacggcagcctcaccggctcaccctccaaaacttccaccaagttcgcacatgtaacgaatttggcacgtgccaaacaaacagtgaacactgactccaaaaacgcaaatcgctttttttgatcgtcctcagaaaaagacggggcctggcctggaagataaaaataaccaaagcttaaagatcttttgaattctgagagatgtggagaaggctagtgacttcacccttcaaaaccctagccaccgttccatgccgatctgcttctaagacgccatcgccgtcgccgctccgtttcaagtctcacgtttctccattcccttccacttatttccttactcgccgcttctctactggttcagcgggtactgctgtgaagaagagggttgaggatgtaatgcctatcgccactggtcatgagcgcaaggagcttcaggctgagcttgagggaaagaaaatccttgaagatgtaaacactccagtcggtccttttggcacaaaggaatctcctgctgtcgttaagtcctactacaacaagagaatagttggatgcccaggaggtgtaggtgaggatgaacacgatgttgtctggttttggctggaaaaaggcaaaccacatgagtgcccagtttgttcacagtattttgtgttggaagctgtgggccctggaggtcctccagatggacatggtgacaatgatcattattaat

SEQ ID NO: 197094 - DNA, 465 bp, Gossypium hirsutum
  unsure (1)..(465): unsure at all n locations
cgggcgnccacgcgtgcgntggaaaacaaacacattgtcttgtttcatgatccatctacagttgagcgaaatctaggctcctaagattatgctttgccccatacctacaatacatgttttttcaagatatagttttatagtagtatatatggactgtaaatatgcatgttgggtttatgtgactttactagataacaacgtttagtagagcagcgtgaaaataaacatttgataagccatgttgattacaatatatggaaaatggaagatggcccggtttgcctatttgtttttttttttaaataaaactatattttttacttttttttttttaattttttacctacatattttattaatctattattaattatattttttatctatcttattattacttatttttttaataatttaattattttggggggggccccctctttttagggaataaatttttttttt

SEQ ID NO: 197095 - DNA, 991 bp, Gossypium hirsutum
accagatggcacaatagatgtttcacaagataagcataagatggttgatgctgagccaattgatctttgcatggtgcttgaacgaaaccctggatacgagtcttccagagactcctggacaatggattaccaaatcgaattatgtttcacagaaacaaataaaagtgcagctagcaaatgtgatgatgatgttgagaaagttccttccaatcataagaacaccattgccaagcaaaatgaagcgaaaaagccagccaaagaagcaaggtctaaagctctaaatggacccattgggaagatcaaagctgaaaatgtgtctaggagcaagaaaccatctattgttagtaggtctgctattcagaaaagcaagttggagaaggaagaagagatgcgaaggaagatggaagagctacagatcgaacggcagaagagaattgccgagagaactgcagcttcgggatatgcttcacctgtatcctagaaatcacctgtatccaccaagagtgatcagaagaaaaatgtttccagtgctcaagcaagcaacaggatgaattctatcaaactcagagcaacttaagaaagaagccacagagaccctgcatcttatgaatggttaaagatatgaagatatgacacttattgtggacatattgatgcaagcctgaaatgcgtggagccaaggatagtcttacctgtgaaatgtggttggaacatgcactgcagatcatataatcaagaagctgatccagatgccagatttactactgtatacattgtcaatatttttgagttacacctgcaattcattcctctattgtttgttttaattagtaaaataaaacccaatcaacacatacttattagttcttcatatgtttatctattacgaatgtcagtcattgtcttggaaaatgtttgtttcgtgtataataatttgtatacttgagactttctattgagatatacgatgaataatatatatatataattc

SEQ ID NO: 197096 - DNA, 440 bp, Gossypium hirsutum
acgctatttttctccctctccataccagcttactttcatcagtatggcatctctccgaatgcgaattggtctgttccaagttattttcaaccatatattgtgacatcacatgggcctttccgcactaaatatgaaggggtaaattacattatgaacacattgctatcattacacatggtaatagctttcattgtggctgttatactcgacaacactgtacctggaagcaggcaagaacgcggggtttacgtatggtctgagtctgaggctgcaagaagggaaccagcaggcgtcaaagattacgagttgcctttccgggtcggtcggatcttcagatgggtaaaatgggttggtctttgacttgaacaccaacatcgcgaagagctggacgacaacgaccattagtaagacccattctctgtaatttatattgtagaaat

SEQ ID NO: 197097 - DNA, 496 bp, Gossypium hirsutum
  unsure (1)..(496): unsure at all n locations
cggnttggaattcccgggcacgacgccacgccttctaatggaaccacaaagcttgttctctgggttttgctcaaactcaactaccccagggtatagaaagtcctcaaaatccattatcttcctcaccaccttctctttcttttccttgtttcaatcaatccaaacatcaagtttcttttgaaatgcaatatctcctatcttctcaaagagtcgaggtctgtaagaagattactgtgtaaaaacagtgtagaaaaagtaagtaatcttgtctctgagaaggaaggttcaaaatcatgggttaagcggaaaacgctagctgcttttgtctctggtggaggctcgaatttcaggtcaattaaccaagcatgcgtcgaaggctttgtcaatggagatgttgtagttctggtcactaataaacatgcttgtggaggtgcacaatatgctagagataaaggcatcccagttattttgttcccaaaaacaaaagatgaacctg

SEQ ID NO: 197098 - DNA, 438 bp, Gossypium hirsutum
cccacgcgtccgctcttgggctcttgttacttaacctagggctgctctttattttccttttctctctgttcttttgtccctttgctttacttctttttgcttccatgtcgtttagaggattcagtcggccaaatgctacatcaggcatgggcgttgctgatcagaccaaggatactttcttggagctgaaaaggaagaaagtttatcggtatgtgatatataggatcgatgagaagaaaagggaggttgtggttgagaaaactggtgcccctgctgagacctatgatgacttcgctgcatctctgcctgaaactgattgccgatatgccgtctacgactttgattttgttacttctgagaattgtcaaaagagcaagattttcttcattgcatggtgcccttcatcctctcgaatccgtgcaaagatgctttatgcca

SEQ ID NO: 197099 - DNA, 764 bp, Gossypium hirsutum
tctactgcaattgaattgttcactctattaattattgtctttaatgatatttattgtcctttcagtgatatattgctttgcttgctatgtatattcttctctgaagtaatgtcttctgttttctgcataccagaaaggatcttttaatgttcacttatgcttacctcagactcttgaggctataaagaggatatgtccaaaacgagctctattaatcggaatgacacatgagttcgatcaccacaaggataatgagtttcttatggaatggtctgagagggaaggaatccatatacaacttgcacgcgacggtttgagggttcccttccacctattcccagaagcctctcaaatgcaagtgctgagaagatagcatccatccaaagaagctctttaccaacccagtacatgtcaaacagagatacatggtgtacagggtgaggaagtcaaaaagggcacaaggatgatgcgataaattactggaacataccccttccagaaccccttgtgtcaaattaaggcggccatctgtttgcttcagctcattgagaggtttaagaagcatctgcaggccatttgaagaaaagtaaaaaagaaaaacaacatatttcgttgtttaagattgtcactgcatggaataggagagaactccaccttacacaattggtaggactgcgatcttgccctaagcatgtgttgtgtccagccattgcataatactgagcagcagtaaagaaagacaaaaaaattggaggtggatgggg

SEQ ID NO: 197100 - DNA, 473 bp, Gossypium hirsutum
ttccggattggaggttcggcccacgcctacgcgagcgctctgatttcaaaagcaaaacggaatccttattcagagcagcaatggcggacactgtcatctctctcgataagctcaaagccttctggaactctcaagtccacgatgaagaaaactgggctcacaatatgaaactgctgcgagccgccggtttatttgctggatcgattcttctaatgcgcaattacggtgatctcatggctatataaggaattgaggattgattaagaggttcggagtaagctcagtttggaaatggatgcatctgttactttaggaactatatacatggttaatgatgatattgaaacaactttagtaactttttgaagtatgatgctcatatatgcttctaaatgttttggaatttgaatgaaatgaacccacttctggatttattttgaatgaaatggatggctttcctaacgtacggaacg

SEQ ID NO: 197101 - DNA, 689 bp, Gossypium hirsutum
ggaaagtggtgcgaaatcggactatggaaatactctcgccacccaaactattttggtgatattttacttacctggggatactttgtggcctctcttcccataattgaaggtgctgaatggcttgtactcatcgggccagtctttttgacattgctgctgctttttgttagcggcctaacaattctcgagaagtcaggagacaagaagtttggtaatgtggaagcatatagagtttacaagaaaagaactagccctcttattccactgccacgatcaatatatgggaacctgccgtattggttcaaagccgtttttctctttgaatttcctatctacaaccgttatttaaacagaaaccgtacgaagcaaggatagaacagaagttgagtttgtgcttcgttatcttgggattcgcgaggtcatagaccaggttttgaaactttactggcacatttctgatggggcatatggatttagggaaacctttggggaaggcccttttgcatttttaaatttattggacctttttggcaaacccgcctttaaacctgtttgtggactttgcgctttttacccgagatccacttgtgtgttaaaaagtcccccataaaaatttcgggtgttaatacttctttttcacaaaaaaaaaaactcaggggcgtcccttccctttgggttataaatgcgca

SEQ ID NO: 197102 - DNA, 705 bp, Gossypium hirsutum
gcgcccacgcgtccggtttcctttttgcaaaagattactggccagaccatacaattacccactaccgcaactgttattgtacccgcacctgcaccaccaccaccaccttcaccgacacaaccgaccgtctccgttgttccaccggaggtccctattgctccaccatcgcatcaaacaccgtcattaccacaacaaaagcaacaagaacaacaacagacgcatatatctcaccatcaaccaccaccaccacaacagcagccacaggttgttcaacagcagcagcagcttcaccatatggaacttgtgaggcatcaacaacagcccattactacagaaatagtaatggcaatcccggaacaacaggtcccaccacaagagactggtgggagtgggagcttggcggagccagcctcgtctagatggcctaaaactgaagttcttgcacttataaacctgaggagtgggcttgaatccaggtaccaagaagctgggcctaaaggtcctctttgggaagaaatctctgctggtatgtccaggttgggttacaagcgaagcgccaaacgatgtaaggaaaagtgggagaacatcaacaagtacttcaaaaaggtcaaagaaagcaacaaaaaacgtcccgaagatgccaaaacttgtccctattttcaccagctcgatgccctttaccgtaagaaaatacttggtggtgcc

SEQ ID NO: 197103 - DNA, 576 bp, Gossypium hirsutum
gggaatgtggacagaaccaagccaatcaattgtggacattgacatcaaatgataacacagttcgatctggcggaaaatgcttaaccacttatggatacagcttcaaaaattatgtgatgatctatgattgtgagacggctgttcctgatgccaccaaatgggaaatccgcagtgatgaaaccataagaaatcccagatctgggctagttttgacgggaagtagagatagttcaggtatgattaatttggttgtggatcataagtatgatggttctaggcaaactttctatgccagcaacaatacaaagccagcagtgaccaccattgtcggttacaaagacatgtgcttgctagcaagtggaagtcgggtgtggctggaagactgcgtgagcaacgatgctgaacaacaatgggcgatatatccagatgggaccatcaggccccaaaagaatagaaacgggtgcctcaagtattcaaatgattatagtgggttgcacaacgtggctacgtgtgatggatttgttgaggaacgatgggtatttagaagcgatggaaccattttgcataaaatgactg

SEQ ID NO: 197104 - DNA, 654 bp, Gossypium hirsutum
  unsure (1)..(654): unsure at all n locations
ctctttctctctcatattcatcactcgaagcaaaagtaaaagggaaagtaaaaggagggttttgaggagggtgaaagatggctggttacagggcagaggatgactacgacttccttttcaaggtggtgctgatcggtgattcgggagtaggcaagtctaaccttctctcaaggttcaccaggaacgagtttagcctcgagtccaagtccactattggcgttgagttcgctactcgtagcttgaatgttgatggtaaggtcatcaaggctcagatttgggacactgctggtcaagaaaggaaagaaaggggaaggaggatgcgataataaacccagaggaacaataaaaccatcgatttagcaacattttgtgctgtgatatgtaatgtctctatatagtttttggattcagataaagattgaaggaaatgcttctacatcattgatgagctgcaccaccttagttntagaatcatggtcaacggatgcatgatntgacccttgnnttcgnggatgatggtatagagtgtaatanggttgatagtntgttaatggctgatagtttcgttaaacctgctntttgactcaaagactgacttcttggaaagtttgttgttttgactcgcttcaaactgaagtccggcctacaatgctn

SEQ ID NO: 197105 - DNA, 928 bp, Gossypium hirsutum
  unsure (1)..(928): unsure at all n locations
atcccacttcctctaattttcactctcgagtccctcttctcagagacagcagtcttttacattggaaaatatttaaaaagaaatttacttttttttctttttcttttttttttgtagtgagagatcttaaagttgaaacgaaaccctcttttgcacgctctttctctctcatattcatcactcgaagcaaaagtaaaagggaaagtaaaaggagggttttgaggagggtgaaagatggctggttacagggcagaggatgactacgacttccttttcaaggtggtgctgatcggtgattcgggagtaggcaagtctaaccttctctcaaggttcaccaggaacgagtttagcctcgagtccaagtccactattggcgttgagttcgctactcgtagcttgaatgttgatggtaaggtcatcaaggctcaaatttgggacactgctggtcaaaaaaggtaccgtgccatcacaagtgcctattaccgaggagctgttggtgcgctacttgtgtatgatgtgacccgacactccacgtttgaaaatgtggagaggtggttaagagagttgagggatcacacggatcccaacatcgtggtcatgctcataggcaacaaatcagatctccgacaccttgtggctgtcccaactgaggatgcaaaatcctttgcggagaaagaatccctctacttcatggaaacttcagccctggaagcaacaaacgtggaaaacgcattcgcagaagtgctgacacagatctatcacatagtaagcaagaaggcaatggagacaagtgatgaaggggctgcttcaactgttccatccaagggggagaaaattgatgtcagtaaagacgtgtctgcaattaagaaaaggggttgctgctcnaacctaaggatgaagaagatttttaaacctgccgtctcttatt

SEQ ID NO: 197106 - DNA, 460 bp, Gossypium hirsutum
aacttcaatagcatctctcactttgatatcttttatgggtgctttgctcagctgggttgcttagaacaatggagggtagcaaaatggccatgattttgattgcctacgttacggttcttgccgttttcaccaatggagccacagctttgagggaagatcaaggggccgtcgcaccatctccgatggaaagtgcaggagcggctctgggtgttccagctgcagtagctgccttagcttctatggctgcatggttcttttgaagttcattccttggtatctatcttttcattccttggcgaatatggtctaaaccctttttaatttctctttctcaagatttgtcctgttggtttatttgagtttattattattccaagcaactggtattgtggatggagaccgaaatttttattcttcttttcaagtaattataatgttaataaaatcttaattgtagtgt

SEQ ID NO: 197107 - DNA, 842 bp, Gossypium hirsutum
gccatttccttcactcagcagcggctcccccccccccccggccttttccccttaaccctcaaccgcaaaaaagaaaaaaaaagagtagcagtaccggtttcaccagctatgggtatcgacttggtcgccggcggcaagagcaagaagacgaagagaactgctcccaagtctgatgatatatatctcaagctccttgtcaagctttaccgttttctggtaagaaggactggcagcaaattcaatgcggtgatcttgaagcggctatttatgagcaaaaccaacaagcctcctttatctctttctaggttgattcaattcatgaagggcaaggaggataagattgctgtggtagtcggggctgtcaccgatgacattcgtgtgtatgaagttcccgcgctgaaggttactgcgctaaggttcactgagacagcgagggcgagaattgacaaggctggtggggaatgtttaacatttgaccaacttgctcttcgagcacctcttggacagaacacggttctccttcgaggtccaaagaatgctcgtgaggctgtgaagcacttcggacctgctcctggtgtgccacacagccacaccaagccctatgtgcggtcaaaagcaaggaaatttgagagggctagaggaagaaggaacagcaaaggcttcagggtttgagattccaactgcactggaaaaaaaaaaaacttatcaacccatcatgataatgggaatgctcagttttgttttttttgctttccacctttcctgttctttttcttttccatgattgtaatttggaatcttttataatttgtttaacggaaaggattttagagtgactgaaa

SEQ ID NO: 197108 - DNA, 920 bp, Gossypium hirsutum
tttaatttttattttgcatacaagcattgggcgtatttagctctttcttctcccctttaatctatatttcttttcagttctttggggtggtacattcaagaaaaaaaaaccagtgaaaaattaaaaaaaaaaaagtggttatttgttattagatggaaatttttcagacaattattgtaattacaacatctctgatgctgctgagttcggtcgtttcttcagacaacaccatcaccacttcaaacacgacatcgaagtaccagatcgagtgcaccatgtgttcatcatgtgaaaatccatgtcagcaaactccatcgccgccaccaccatctccaccgccgcctaaaccatcttcaccaccacctacagttcctaaccccaaccactgcccaccccctccttctccacccacctccagcggtggtggaaactactactactctccaccaccaccttctcaatccagcggcggaaataactactacgctccaccaccacccgttggtgtcattggtggcatgtactaccctccacccacatacaaaaactacccaacgccaccaccacccaaccctatcgtcccttacttccctttttactaccatactccgccaccaccgtcagaggcgagaagcttatcatcaacagtccattggctttctatttttatttccatgttgggttttttcctttctttcttttaatattaaaaaaatgtaattaaagaagaaaagatggtgaaaataaatgtagaagatttgcagatctgaagaagccattgcagggatgaaaaaaaaaaaaaagggaactgagaaatttctgaagatatatgaagtaataatatttttctcttccttttttttttaatatttattttcttcttatgatgtagattttatcctttaatttttggttttatg

SEQ ID NO: 197109 - DNA, 680 bp, Gossypium hirsutum
cccacgcgtacgcccacgcgtccgctagcttttcatcagttgggatgtgtaaggcttctgaggaaagagtatgatgtagcaaaaggtctttttgagaaagctgtgagtttgggtcatgtttactccattgccggtttggctagactgggttacattaagggtcataaactcttttcttatgagaagctcagctctgtgatttcttctgttaacccactggggtggatgtatcaggaaaggtcattatactgtgaaggtgataaaaggtcagaagaccttgataaagcaaccgaacttgacccaactctcacatacccctacatgtatcgggctgcttccctaatgatgaaacagaatgttcaagctgctcttgctgagatcaaccgtgttcttgggtttaaacttgcattagaatgcatggaactccgattttgtctttatttagctattgaggattacaaagcagccattcgtgatgttcaggcaattctaacactttccccagattacagaatgtttgagggacgagtggcagcatcccatctccgtacgcttgtgcgtgagcatgttggcagttggacaactgcagattgttggatgcagctgtatgataggtggtcttctgttgatgatattggatctctcttccgaatctatcagatgcttgaatctggtggggc

SEQ ID NO: 197110 - DNA, 516 bp, Gossypium hirsutum
cacacatgatcttcaccctggtctttgtgctcacctatcaaaaatatggcactcgaagcgtgcataaagcactttgcttggttggtagctattgttcaaagtctcttgattgtggcatcccgcaaacattacacggttgatgtagttgtggcatggtacactgttaatttagtggtattcttcatagacaagaaactgccagaattgcctgacagaagcagtggaagctcaccaatgttgctaccattgagcaccaaagacaaggatagtaaaaccaaagaagagaaccacaagctcttgaatgggaattctgtagatcctgcagattggaggccgagaactcaagtaaatggcaagattcaggaagatggcaatggaatccatgatactgcaatgaacggagcataggtgatggaaattacatgctgtcactataatggggctgcctgcttgaatcctttatgtttcttccaaggctggtaaatttgaatttgtaatcataagaaaactgaacct

SEQ ID NO: 197111 - DNA, 438 bp, Gossypium hirsutum
cggacgcgtgggcggacgcgtgggctcggttagttctgtcctgaagctattatgttccgtccgaactctgttgatggcggcggcagaccacaaactagcatccgagcaagattcacagttctatcattttatggaactgaaagcactcaggcccttattatgcatacatgacggtgtggatgaaattaatcctctgaatttcctcatggtaatggaaatgtcagatgactcgttgtttttccgctcggataatttcagggctagtgcactgctaactgtgattgaaactttgcaaggatttatcgagatctatgatgggttgaactcctttcccgaaattttcttaccaattgcaacattattagttgaagtttcggagcagaaacacatgccgaaggcactgaaagataagttcaacaatgtttctcaactcattaa

SEQ ID NO: 197112 - DNA, 371 bp, Gossypium hirsutum
acccacgcgtccgccaaacgggcgctcattttcagacagtgttttggtgccctgccccattgagggcgggcacgatgatctgtgcgcaaagcggagcattactgtttgcgcccgattcaagagggcgcgctgctgtatggggatacgctggaggtaacgtagccatcatataatacagtggctgtctgtattcgacgatcggtactagcaacagttgtggctcgggcaatggcttaccgacactaggcaaacattacagagaagctaatgttgtcgaagaggagcaatcagagaagtgcattctggtccccaaaacgctaagaattgacaatccaaatgaagcttcaaggagtcccatatgggctacatta

SEQ ID NO: 197113 - DNA, 353 bp, Gossypium hirsutum
cacccgtccggggaacttataatttgttatcaattttcttaaagctaaaagctgccaaatatttcatggctttagactttaatttgtatgaatacgtattagccagccttataaattcttccctttgagttcctattagcttggaacatgctgggcctcaattgaaaggatacaccatagcaagttgattgcagattcagttgggttgaggctcatatcatatcctgaattttaaggcccagcagaaaacacccttctaacatcgtctagtaataaaaagcaaatagaaaatgttttcccagatccccttgtattgtaaaaggaaagaaaatcccagcattactttttgcttt

SEQ ID NO: 197114 - DNA, 382 bp, Gossypium hirsutum
cggacgcgtgggatgcaagtgcatcgtcttcttcagtctatcagcaggccattggaaaatggccatcctagatcgtgtggatgggccttttagcagagtttgtaagacattgttctacttgagtttctccaacattgaaggtatggaaccggttacaaatttgcgtacctctttagccggagaaaatcatacaaggaagaagctggtggtaaaatgataacaagagcaaatgctctgtagctacagggactttctggcaaagcaaagaagctgaaagcatgcatggctgtgagtggtgtgtagcttcaccagattttttccttccattttggtaattggacattataacattacaataaaagttccaatggtttaattgaat

SEQ ID NO: 197115 - DNA, 671 bp, Gossypium hirsutum
gtgcctacttgaataataataacacctcatcttagactccaataattatcttgctatgcctgacctcttttcagctattctgccttgttctgaagaagcctttcataaagaaaaaggtacagttagttgagatcatctctctttcgtgtgaggtggccatgtttgctacttgtttcgttctgttggacaaggaattttcgactacaatcggtatcttcatgcttactttattcctgattgggttcttagcacaaatgagtgctgaaaggtatgctttgtatgaacaaacaaagcaactagacaccagtgagaacaggttcttcacaggtttgaaaatagcatcagtcgggtttctcctatatttcgtccctcagaaactgatgaaaagctttgagagcaaattcccagtatttggattatgcatggatacaagtacaacaggtttaccatgtgataggaacagcagcagttcagagagagcatggccaagacaactaagggaaatggcaaaggctagctttagtaaagatggaagcaaagctccaacagatccttcaagcagcaaaagcaaatggagtgggttgtggggaacaaaaaggagtggcagctcttctttagattcctctttagattacaagtcaaagtccaaatcaaaagggttgtacaaagac

SEQ ID NO: 197116 - DNA, 371 bp, Gossypium hirsutum
  unsure (1)..(371): unsure at all n locations
cccacgcgtccgtgtaatgccagttttacggcaagttttgcatcggcgggaactgaaaatatcggcaatttttttcttctttgtgtttaattaatattgttaatgagtgaagttaagaatattaaacatctccgtcacagtaacggtgacggacgagtttgggtacgtgttttatgctggatcatgcttatatgtttgttttcgtgaaggcacgtgataagaacatttcaaaaggctaagttggtttattttatatttttttcttaataacatggtaaaaggttttttaccctactttagattcttattgnnaaaannnnnnnnnnnnnnnnnnnnnnnnnnnnnnnnnnnnnnnnnnnnnnnnnnnnnnn

SEQ ID NO: 197117 - DNA, 446 bp, Gossypium hirsutum
cccacgcgtccgcccacgcgtccgggtttatgcagtcttttatgttgccagtccagaagctggtgctgcaattttgtggaagactgccaaagcttcgcctaaggcagctgagaagcctgcactttcttcaaccagcaaccaagggataagaagtcccaaacagagcatgaaaagcatgtgatggatctgcatggggaagtgatggcatgtgcatacgaagatgtccaagtcatgtggtccattcttgacaagtccaagtccatggcttgtaacatcaagccttaggattccctttttaccctttctctttttttttcttaaatttaaattttctttattttattttgcatgtgatgtagataaagctacaaaatcgattgcaaatttgggggaaattaggagattggggaaaagagggcattattgtaatttttgatggagagaat

SEQ ID NO: 197118 - DNA, 434 bp, Gossypium hirsutum
gccctctccaacatttcctttttgtttccttaaaaccctaacgcctccatggcatggctacccagactccgagttgccagcgcctctgttgcttcatccgccgtcatcccactccgacggttggatccgagatatcggctcagccgctgcgttggagctcgactacgactatgactactacgagtatgagcgagctccccgggataggcgcctgcctcagcagaagcttgatgtggatggttcagtgccggagaggggaatccagtgggtgcttataggggagcctggagtgaaacgccatgcttacgccgagaggctttccaagcttctaggaatccctcatatttcaatgggttcccttattagacaagagcttgatccttactcctctctttacaaacaggtcgtaaatgctgtgaatgaagggaagcttg

SEQ ID NO: 197119 - DNA, 811 bp, Gossypium hirsutum
aagcaacctgcaacagaatttatctcctttacgaatagcttccatggtaggacgatgggagcccttgctttgacgagtaaagagcactatcgttcaccatttgagcctgttatgcccggagttactttcttggagtatggcaacatacaagctgcaatagatcttattaggaatgggatgattgctgctgtatttgtagaaccagttcagggtgaaggtggaatatacagtgcaacaaaagagtttttgcaagctctgcgttccgcttgcgatgatgctggatccctcttggtctttgatgaggggcaatgcggattgggtcgaactggttatctctgggcacacgaagcgtacggcgtattcccggatatgatgacacttgcgaagccacttgcaggaggacttccaataggtgcgactttggtaactgaaatagttgcttctgccatagcccatggggaccatggaagtacttttgcaggttcacctcttgtttgcagtgctgcaatttctgttttcaataaaattgcaaaccccagtttcttgtccagcgtctcgaagaaaggtgattacatgaaagaattgttgaaccagaagctcggagggaatccccacgtgaaagaaatacgaggatggggtcttatgattgggatagagttggatgtgtctgcttcgccccttgtagatgcgtgccgaaattctggacttattgtattgactgcaaggaaaggaaatgtggtgagactggtgccaccattgatcatctcagacgaagaattgaaacatgcagctgagattcttcatgaatgtt

SEQ ID NO: 197120 - DNA, 820 bp, Gossypium hirsutum
tttacgcgtacggttttatcactataaatctttgggttttcttaataaaattgaagcaacaattctatagttttcatctacatttcgccccagaaattatagtaaagcagagacaatgagaggaacattgatgttgagttggattctgatcatctgcctctcccaagtagcagtgcagagccaatactactcggagacccgaccatatcatcccaggccacctaaggtcaccaatcttcacttctttatgcacgaacatacgggtgttacagcagtcgtgctaacccaagctaacatcacaagcaataattcatcagtgccatttgccaccctagttgccgttaatgatcccctcaggactggtcctgagcctgactcagaggtgattggaaatgttcagggtatttccctcttagccggatcaaatgcatcgagcacgcagtacatagaatttggatttaataccggtaagtttaacggcagctctctaagcgtattttcaaggggagaaccagggcttgcggtggtcggaggaagaggacgattcatgatggcaacagggactgcactatttaaccctatccttataaatgccaccaatgtcattatggaatttaactttactgtagttcattactaagatgttatttacagactcaattctcttggattgtgtgaaagtcatatgattatgctccacttgttagaataaatgtatgagaaatatataggtttgtagtattaaaaattaaaattctcatacttgcagtcattgtactttatcattatacgagaaataaatattaaattcttagctact

SEQ ID NO: 197121 - DNA, 811 bp, Gossypium hirsutum
ttacatttcgcccccagaaattatagtaaaggaaagcagaaacaatgagaggaacattgatgttgacttggattctgatcatctgcctctcccaagtagcagcgcagagccaaagccccttccgctcggagacccgaccacatattcccaggccaattaaggtcaccaatcttcacttctttatgcacgaaaatttgggcggtacaaacgcatcagcagtcatcgtagcccaatctaacatcacaagcaacgacaataattcatcggtgccatttggcaccctatttgccgttgatgatcccctcaggataggtcctgagccagactccgaggtgattggaaatgctcagggactttcacttctggccggaacaaatccaagaacctcgacgacatactttgatttttggatttactaccggtaagtataacggcagctctataagcatgttttcaaggacagatcttgagcttgcgggggccgccgcaaagaggacgattaaggatggcaacagggtttgcactatttaaccctatccttataaatgccaccaatgtcattatggaatttaactttactgtagttcattactaaggtgtcatttacatgactcaattctcttggattgtgaaaaaggttgtatgattcccgctccactcggatagaataagtgtatgagattgacattctcatacttcatcattgcactttattattttattacaaatatatttattcagtatttatcttaaaaaaaaaaaaaaaaaaaaaaaaaaaaaaatagaaatcccaaccaaaaaaaggggcggc

SEQ ID NO: 197122 - DNA, 437 bp, Gossypium hirsutum
  unsure (1)..(437): unsure at all n locations
cccacgcgtccggcaaattaaggtgtgctcgggaatatgtagctgaatgtgtggaaaagcgtagttttccttagctgtggcccttaaggcaacttaaaataggtggtagttgaatgtgtggaaaagtgtagttttccttagctgtttcccttaacgcaacttaaaataggtggtagttgaatgtgtggaaaagtgtagtttcccttggctgtttctagtgtacattaggtccaggcataaaatacgttggtttgaatctttgatttgtacttttcaggatggcaatggcagccaatactggaccttatatatatgcatcctgaactgaatgttgttgtnnaatataaaatctgnctgaatcaatgcataaaatacccantacatanaatttgtatttaataccggtaagtttaatggcagctctctaagcgtatttt

SEQ ID NO: 197123 - DNA, 429 bp, Gossypium hirsutum
cccacgcgtccgcccacgcgtccggtttcaaacgacgacatcaaggaattgttttctgagggtggtgacctgaaacgattttcggtccactatgataggagcgggagatcaaagggaacagcagatattgtcttcacacggcgagcagatgctttggctgcagtaaagaggtacaacaatgttgagctcgatgggaagccgatgaaaatcgagattgttggaacaaacatcgctacccctcctgcacctttaggagctaatggtgcctttcgaagttctaatggagccattaaaggtggccaaggcaagggtggtggatttggtaggcaacgtggtggtggtgctgctggaagaggctgtggacgacggaagggtcgtggagaaaaggtttctgcagaagatcttgacgccgatctagagaagtatcat

SEQ ID NO: 197124 - DNA, 642 bp, Gossypium hirsutum
ccctcgcgtccgcccacgcgtccggtcagttggagttctttaatgtcgatgagctggaaacaatggcaactgctgaacattttatggccacagatattgaatgggatcccactggaagatatgttgcaaccgcagtaacatctgttcatgaaatggaaatgggtttcaatatatggtcctttcatggtaagctactctaccggatactgaaggatcatttcttccagttcttgtggcgcccaaggcccccacccttcttgagcgctgagaaggaggaagagatattaaaatacttgaagaagtacagtaagaagtatgatgcagaggaccaggatgtttcgatgctattgagcgaacaggatagggagaagagaaggatgttgaaggaagaatgggagaagtggataagcgaatggaggcgggcaagtgaggaagagaagttggagaggcagaagttgagggatggagaagcaagtgatgaggaagaggagtacgaggccaaagaagttgaagttgaggaaatcttggacttctccgaagaagtcctttttgaagagtgagttgattgggacaagatttttcagtatgtacgagtggagtagatgatatttcggctatttttattttagaattttgatcatc

SEQ ID NO: 197125 - DNA, 427 bp, Gossypium hirsutum
cccacgcgtccgccggctttacaacaactaatgatccaacaacttctccaggagatgtctaataacaacacgggagttcaacagcagtccgtgaatgggcagaatgagaatggaagtgcggggagaaacacctctgctctggctacagctacctctaccgtgtctggaagtgttgcagggcctgcactgagtcaaagcaacagtttcaaagccacttcaaacgacaactctttagctgccggtggcgacaacagattcaaccgaggacaacctgatttgccccagaatctccattcacaggacgatacagttccggatatagcaaatgatttcatggataatgggttttttaacaatgaccttgactataatattggttatggctggaaggcatgactaacataattttgccccatatcattgactt

SEQ ID NO: 197126 - DNA, 439 bp, Gossypium hirsutum
attacaattaccatggggatttcccttgggctcttgagcactttccggaatgtgaaagggggcttaaggctcattctcttttcatgacttcagttgctcatgaattgttcttgtctgccaaggactcacaggtatggaggattgccacatccatggagaaccacaagtctgaaattgaaaattgggatttgggagctggaatatatatatcattctatgtgctaagaagttcattccaggacgataacaatactatggctgaacttggttccctcgacagcaaaaatgctgcttgtagagactttcttggctgtttgaatgagtcctcagcagtttggggtggcaggttacatgttgatgctagggtagcatattcaaagatggcggatgaggtatgcaatttgttgctttcagatacaagcggaagtcgaacgcatga

SEQ ID NO: 197127 - DNA, 411 bp, Gossypium hirsutum
  unsure (1)..(411): unsure at all n locations
cggacgcgtgggcggacgcgtgggctggttccaaggtaaacctattgagcataccaaacatgctttgggaacttgccctcatgtctgtcggatacagaactcaaatgtggaaaattaactcctgaggttgggattttcccgaatccatcaagcaaacaatgaatgaagagaagcaattagccgattcgataacattaggttgaaagcattcttttaggaaaaaaggaatttacagtcagctgattgcagcttatcctagcttttttcattatacaatatcacagccagaacatgcagtttttttcagttgtaatagtgaggtaacactttaatgttttcttacatttttagtgttccaacttcttgaattccaaannnnaaaannnnnnnnnnaaaaaaaannnnnccccc

SEQ ID NO: 197128 - DNA, 1025 bp, Gossypium hirsutum
gtccttcaaagagatctgaaataggagctagttcaaagtctgtcgaagatggcaggaacaagctctgcgcggattgttttagttgttgtgtctggtgttttagcattgattgggtcagcacaggctcaactgcagatgaacttttatgccagcagctgtcctaaagccgagcagattgtgctggactatgttaaacagaacatccctaatgccccatccctcgctgcttctttcttaagaatgcacttacatgattgcattgtcaggggctgtgatgcatcagtgcttctaaacacctcattggccaagcttagaagaatgcagtcccaaatctaacactgaggggctttgatttcattgaaagagtgaagagcctcctcgaagccgaatgccccggcgttgtctcttgtgccgatatcctcactttggctgccagagactctgtagtaaccactggaggtccattttggaatgttccaacacgaagaagagacggtgtgatatccaatatcaccgaagcaaataccaacattccaagccctttccacaacttcactactctcctttctctgttcaataacctaggacttaactcgaccgacttggttctcctatccggtggtcacaccatcggcatatcccattgcccggctgtttcgccccgattgtacaattccaccggccccggcggaatcgacccaaccatggacagcgagtacgctgaaaacctcaaggccaacaagggtaaaaccgcgagcgataacaccacaatacttgagatggaccctgggagtcggaaaaccttcgatcttagctactactcactcttgctcaaaagaaggggtcttttccagtccgatgctgctttaaccactgattcaactagcttggctttcatcaaccagctcctttccagccccacacagttcttctttgatgagtttggcaaagctatggagaaaatgggtcggattaatgttaagactggatccgaaggcgagatcaggaagcaatgtgcacttgtt

SEQ ID NO: 197129 - DNA, 318 bp, Gossypium hirsutum
cccacgcgtccgaaatgactctcactatctagatgctgacgcccgctcgaaggctgtggattaaagttcaatcaatgttcttgacgagcttcgcggtggcgacagcattggctcctcgctggcagacctgctcggcttggttacaataaccctgggctccaccgatcacactggagttgtttggatgtctaaagcttgggctgagcttgtttgccctttttcttaatgttctatttttctgggctttggatgtacacatttatgagttaatgaaatgatttgaatttacttaattaataattttaatatttttattat

SEQ ID NO: 197130 - DNA, 524 bp, Gossypium hirsutum
gttcttttcccccctcactttccagaacaaaatcatagaaactgaaagattgaatttttgttctctcgatcattcatatctttctttgcaaaaaagttactgattcatgtgctttgggatggaacaagaagtaggggaggccgtgattcagctggggaactcagatggttctaattctagcagctcagatcccgtaactcgtgtaaggaagctattgtttcgccggatgctggtggggatcaaagacggccggtttttcttgggcactttccactgccttgacaagcaagggaatatcattctccaagatacaatagagtatcgtagtacccgtcggtcttctccgtctcctatggagcaacgatgccttggtcttgttctcatcccttcctcttgtcagaactcctgtcatgtggattgctccgtcgaggaacagttgtcactgctgaaggtataagaaactagaatcttatgttcccataaaatctatgtttgaaagaaacaacagttttcatgcaagtatt

SEQ ID NO: 197131 - DNA, 632 bp, Gossypium hirsutum
  unsure (1)..(632): unsure at all n locations
aaaaaggatacaacaatgttgcctttttctttttatagatctgngttttatctaacatttggcaaaaacaagagttgctgggttttcctgtttttctttttgtatcctaaagtaagtaaacgaagtcaacaaaatgggagacagcaagcttatcctttgttgcttcattgcttgcattttgttcctcggcgttaatggagaaaacccttatcgttatatcacttggaaagtcacctacggtgatatttaccctcttggagttaagcaacaggggatcttaataaatgggcagtttccagggcctcatatcgatgcagttactaatgacaacttgattatcagtgtttataactacttaaatgaaccattccttatctcttggaacggtgtgcagcaaaggaggaactcatggcaggatggagtttctggcacaaactgtccaattcgaccggggaaaaacttcacttacgttctccaagtgaaagatcagattggtagcttttactacttcccatcacttttattccataaggctgccggagggtacggtgctatcagaatctggangccgcccaagatccctgtacctttccctagtcctgctggggatttcactgtactggctggggact

SEQ ID NO: 197132 - DNA, 448 bp, Gossypium hirsutum
cccacgcgtccggaaatcagttcaaatgggagatgctgttgctttaataaggggcgagggaaagaatttgcggaggaaagagaaacgagtcaggatcgagcagattagagctaaccttggcctctcagattcacagagaacaccaacgcctggagaatcattgagggatttctatagacgtactaatttgtactggcaaatggctgcccatgaacatactcagcacactggcaaggaactccgtaaagatggttttgatcttgctgaggctcgttacagggaacttaaaccacttcttgacgagttggccatattagaggcagaacagaaggctgaagaggcagaaggaccagaaacaagttcgagaaagagagggaaaaagagagtttaagaatttagcaccctgcatttgcaatactttcagactttgggtaagctgtgaaatttt

SEQ ID NO: 197133 - DNA, 443 bp, Gossypium hirsutum
cccacgcgtccgggtgctactcctgggttgacgagaccaatgcaagaggttcaattgggcaagaatgtaaaattattgggctgtcctggtgttgttatgcttaaatctagtggaaatgatgcatcaatagctcttcgaaactgcaaaagaatagaaaagttggatgatccggttgctccagtgaaagagattctcaagctttgtccagagcgactgttggtgacaatatacaagatcccgggctttgaatcagttgacgaattccttcagaatgtagccactggaaggggtaagctcaaaaaaggtggtattgtggatgtcgaagctgctgcaaggatcattttgcacgattggaatgaaggtaaaattccctattacaccatgcccccgggccgaaatcaagaagagccttcggaggcaaggattgtcacagaacttggaaa

SEQ ID NO: 197134 - DNA, 194 bp, Gossypium hirsutum
cccacgcgtccgcaaaaatagtccgcgttttagctttggaacattacttacaaactttcaaatgttgagatacattgatgaattgttcaaaaacagagttaatttatactttcccttctgggatttcatctgttattaccattttcatgtaaaagatactgcttatggttttttgagcattcacatgttgtttt

SEQ ID NO: 197135 - DNA, 561 bp, Gossypium hirsutum
aggggctgtattttccagctctacaggaatcagctgatccgccataaagatttcttgttcctttgctgtcatacatagggaaaacatgaccccctccttctttccaagaaaaaacctccttacctcatccatcttctccctcctatttataaattccccagcgcatctcaacattcatacaaacttttaaattcctttgaaaaacatagtatattgtcattaggagtcaatggcagggattggtaaaacggctccagatttcgaggacttattgccggcgatggcggagaagctggggggagacgggctgatgagggagttgtgtaatgggttcaagctgttgatggacgaggagaaaggggtgatcactgcggcgagcttgaagaggaacgctgctgtgctggggttgcaagatttgagagacgatgagctggcgagcatggtaagggaaggtgatctcgacggcgatggggctctcagtgaaatggaattttgtgtgttgatgttcagattaagccctggcttgatggaagagtcccgattattgctggaagagatgct

SEQ ID NO: 197136 - DNA, 176 bp, Gossypium hirsutum
  unsure (1)..(176): unsure at all n locations
gcgtncgccacgcgtncgccacgcgttncgcttttggtagcttagctcattttagtttagagctttaacaaagtcatccttgtttgagaaaatcttattgtttaaagaaataactcggttttgtacaataatgtattgacttctttattaatactttaaacttatctctgtagttt

SEQ ID NO: 197137 - DNA, 386 bp, Gossypium hirsutum
gaggaactggggattttcttttagctcgaggaagtggcgattttcagtagaaaaaagcttgaggagttgaaatctgatgtgggcgactttaagatcccgatatctgcatctatctgcaactacgttgccttcctcctctctcacaaatggctcgtggaagctggggttttcaggtttaaatcagacgttctcttcatccactgtggagagaataagcaatgagttgctgagcctgcaagaggtggagaaggttctaagcgacgtgagagcagacgacgtggcggtggttccggttggtaaccaatgcgattgggcagatttcatggtgattgccaccggtaggtccccgtggcacgtcaagaacatcgcccaagccctaatttaca

SEQ ID NO: 197138 - DNA, 322 bp, Gossypium hirsutum
  unsure (1)..(322): unsure at all n locations
cccacgcgtccggtgaagtgtacgagattgaaagtgcttgaggtttgatgtagagaattaagaggcaacttgtcggatgttgtatggcaaagagaataacaagaagaatagtgtatgtgttgtatgaaagttaataaatattaagcttaatgcttaaaaattagatggcgtcttgtaccactggtgaattacatttacatttacccttgagtgacccttgcttttgggtttttctttattctcctttccgaggctgatcaagggcattgaatgaatggttattttggtttcttggtattttaaaaaaaaaaaatacncaaaa

SEQ ID NO: 197139 - DNA, 400 bp, Gossypium hirsutum
  unsure (1)..(400): unsure at all n locations
aacaaaccctntaattccttctttctttttcttcctttcgattgagtttcagagaaaaccatggagtttagacctttagaaatcaaagttatctccgccaaggatcttaaagacgtcaatcttttcactaagatggacgtttacgtcgtcgtttcgatcaacggtgattctcgcacagcgcaaaggactccggtcgacaaggacggtggttcaaacccagagtggaattacaccgtgaggttcaccgtcgatgaagctgccgcccgtcagaatgggcttaccgtcgtgtttacccttaaatcacaacgtcagcttggagataaggatatcggtacggttcaagttcccgtcaaggaattgcttgataacggtgatggaaaccggaaaggtcaaaataatc

SEQ ID NO: 197140 - DNA, 427 bp, Gossypium hirsutum
cccacgcgtccgcccacgcgtccggggaaccctttaagccgtagtcaagaaagatggggagggggtgtgggcactgccccccgaagaccttactgctagggtcaagaagttgatggaaggtttaagatccgagttcggcgggccacagttcgagccccacgtcacggttgttggggccatcagcttaaccgctgatgatgccttggccaagttctggtccgcttgtgatggccgcaaggcttataatgccaccgtcgatcgtgtggctaccgggactttcttttatcagtgcgtctttttgttgcttcatcccactcctgaggtggcggaaactagtgctcattgtagtagccattttggttacaagagctcaaccaccggagagaagaagaaagctcaagaaaagctaatatgctggatgaaagca

SEQ ID NO: 197141 - DNA, 456 bp, Gossypium hirsutum
  unsure (1)..(456): unsure at all n locations
ggagctttacctctctgaattctatttactgaagtagtgaagattttagaagacaagtgtgaacgcgtgataacggagctctcatgatgcttttaatatggttagtaaggatgagagaagcaatggattctttattaatccaaggagattttcttgcctcttagcaaatcttttttatttctcatcttttggttcatggatgggatttggaggggcagatggtatgattcacatatatatataaaaagagtggatttttgtgagttaatgtgtaatgagagggatagattattggtgatgggctttttacatttttggtcttgaattaatatatagttgtaatacaaggatccatggtttaaccttatgaagtagccaattcatcaaacannnnnnnnaatnaaaaaataaaaattantatatattttaatatcttatttttattttttttttttt

SEQ ID NO: 197142 - DNA, 523 bp, Gossypium hirsutum
  unsure (1)..(523): unsure at all n locations
catcaacaaggctgttgtcgcaataatcntgcccatgatcgntgaaggcagtggggggtcaggtttttgtgcttggggggggtgtccgtccgcccgggcccgtcaatgcccgtcggagctccgggttggagacggtgacgcttgcaagagcgcgtgtgaggcattcgggagtcccgagtattgttgcagtggcgcgtatagcacacctgccacatgtaagccttcagtttattctgagatgttcaaggccgcttgtcccagatcttacagctatgcatacgatgatgctacaagcactttcacgtgtactggagcagattatacggttaccttttcgcccctcttctcctagtcaaaaatcttcgagagatgctacgccagctacagaagctaccccagtgacaggctcaacgtcacaagggtcagggacacagcccgggtttacttattctggtaatggatatggatattcggtttcagggtacggataccctggttcgggttcaagtactgggtcaggatc

SEQ ID NO: 197143 - DNA, 374 bp, Gossypium hirsutum
ataaggcccttctctacaccgccgtcaacagatggttcggccgactcaaattcctgcaccaaatccggcccggattcaggcgagggaatcatagagcaccaccgcggcgtatccttgaaggtatttgtggcgagaaacgtgtgcgtggaggggagatcggccccgagacgtgcgccgattggagtcttactggcggcgctggaggtagtggctggtggggcgtttgaagagcggctagggttttgttctttttgttttttgctttgctgtattggctattgggtttgggccaattgactgggcctgaactgttttctttttgtgtttggacccaagccgattgggccttattacaatgtgaatgagattttttt

SEQ ID NO: 197144 - DNA, 738 bp, Gossypium hirsutum
cccacgcgtccgcggagatcaagcaaagcattttcataacccaattttttttcttcaaacacaaatcaaagggagaaaaaagaatggcagtggagggttcatcgaagaagatgatagcaacacaagcagagatggtggagaacaaggtccccatcccgtacagggatcaatgtgcacatcttctcatcccgctcaacaagtgccgccaagccgagttttacttaccttggaaatgcgagattgaacgccactcctatgaaaagtgcgagtacgagctcgtcatggagaggatgctgcagatgcagaagatccgtgaagaagaggccaagttgaaacaggctgggaaacagggcgcttctgttcctctcattcccaaaactgctaatgcttaagctgcctccagggaggttttagactactttggcggatattttgatgtttgtcacctgtctggggggagtttgaaactgtttgttgtggacgaatgtaaggactattttatttgtgatctgtcatcagctcatcaactttgtttatggaataaagttgctcatcaaattggacatctctttttcagatatagttataacaatcgttttcacttagccaactaggtaaatatgcttcagtttggtgtttatttaattgcaacagatatacaatggatatgcataaccggcgggatatgcgtcaaatgagaaataatatgcaatgacaatgtataataaatcttttgct

SEQ ID NO: 197145 - DNA, 688 bp, Gossypium hirsutum
cccacgcgtccggtcattccacattttataacgttgagaggtggttaagagagttaagggatcacacagatcccaacatcgtagtcatgctcatcggtaacaaatcagatcttcgtcacctcgtggccgtcccaactgaagacgggaagtctttcgctgagaaagagtctctctacttcatggaaacttccgctctcgaagctacaaatgtagagaacgcatttgccgaagttcttactcaaatctaccatatcgtaagcaaaaaagccatggagacagctgacgaagggactgcatcaaccgttccttccaaaggcgagaaaatcgatgttggtaaagacatctccgcaatgaagaaagggggttgttgctcaagctaagaaaatgacataaacccgaacatccaattgtttaacgacgcagctgggggttgttctgctgtgtcggttttgtagaatcttctcgaaaaggcgcctaacagtaggaatttcgggtgagatcgggtcggtttacatccaaattttttttccagggaattatattgttgaatttagataggtgaattgggctatcaatgatgtttgtagtgtttatgttagtttaggacatgcttttacctttttatgaatgttacaaaggacaattgtggtgtttaaaacttaaaatctttcaagcgtcgacgcggccg

SEQ ID NO: 197146 - DNA, 696 bp, Gossypium hirsutum
gttgtcttgtaatcttcaaacgcttttggtgactaattcacagcttttacttacacactcgtcactctttactagtttctgctctgttttcatggagttgatgagaatttttagctatgcttcgattattctttcgatttcagtttatttgcttccaattatggttaattcgattgggatcaattacgggcaaatagcagacaatcttccttcccctgaaaacgtagtgccgctcgtgaaatctattggggtcaccaaagttaaactttacgatgcagatccgagagtgctcggcgcattcgccaactccggcgttgaattcatgatcggattaggcaacggggacttggagaagatgagagacccgaacaatgctcaagattgggttaaacaaaacgtgcatgcccatttaccggacacgaaaatcacctgtatctttgtcggaaacgaggttctcactttcaacgacactaatctttccgataacctcgtcccggccatgcaaagcgttcatacggcacttgtaaacctcgggctcgacaaacaggtgacagtaaccacagcgcattctttaggcatactacaaacctcttttccgccgtcagccggagctttccgtgaggatttagtcgatattttgagccaaacattgagctttcatcaaaaaacagggtcaccttttttgatcaatgcgta

SEQ ID NO: 197147 - DNA, 414 bp, Gossypium hirsutum
  unsure (1)..(414): unsure at all n locations
gaaaaccggctcgacccacgccgtccgcggacccttggccgtacccgtgggtnataatttaatatatccctggatatacttaagaaggtgtctcccaagtagttgtgaatcaaggctaaagttcggttttatcatgtttagctggttcattggagaggctttttaaagggagatatcttgttcaaatggtggtgttggagaatatctaatttctttttgctcaggggaaggggttgttgaggttcaaaccctcgtcctggtgacaagctaagacgtgaaagcaatagaagtcttttgctattatactagtggtttggtttggagaatctctgattgatttcttcgtacattgcgtggattatttacaatagaagaagaagattacatgcttgattttcagncctgactgatttc

SEQ ID NO: 197148 - DNA, 470 bp, Gossypium hirsutum
gctttaaaactagctctatggttttagatgttcaatttagtgtcagtcaaacgagcttgagaatggttgctgcttactcagatggcttcgtgaaagtctttgagctccttgatcctttagaactaaagaactggcaacttcaggccgaatttcaaaacgttatacatgcggtctccatagtagggaaggcttcatgcttgacagcatgtatttcatggaatccacaaaatggtgaaggccaagaatcaagctttattttgggtttcaaattctgacactccacaactcaattcccccataggtggtgggaattggatccagctcatcagagatggctgccagtagcagagttggctttgcctggtgacaagggagatcaaatatactctggtgcatgggcaccaaacattggacggccatatgaggttatagctactgcatctcaaaaaggaatttctgtatggcgtgtt

SEQ ID NO: 197149 - DNA, 400 bp, Gossypium hirsutum
ccctcgcgtccgcccacgcgtccgattctctctccctaaactctcattctctcgctctctctctctctctctctttcttcacaagaaaagtttttctctcgtgaatccatgtcggaggaaaagggtcggccattgccaaaatttggtgaatgggatgtcaacgatcctgcatctgctgagggattcactgtgatctttaataaggcaagggacgagaagaaaacaggtggcaagcctgagtcaccggcaaagtctgattctaatgttaagcctggagctgatcctggcaaaacccaacctaaaaaatggttttgctgcgttcaagccccgcctgcggaatcttgacgacgccctactcgtataagacataagagcttccacaagtatattgaagccccac

SEQ ID NO: 197150 - DNA, 646 bp, Gossypium hirsutum
cagcccctggtgagcgtcttagtgaggttaccgtgatgttgagaaccaagttcagagggtacctgcaagctgctgttgcaaaactcgctgagagtaccatattacagaatgcgacagagttgaaaaagattctccatgattctaaagaaacagtgggagaatctgatatacgatgtagaatggggccactgaaagaacaggtaacaagttcagcctatcaccttcatacagtttttgagactcacgttttcattgctatctgccgatggtactgggatcgaatgggacaggatgttctcagcttcctggaaaacaggagagagaatagatcatgggataaagggtccagaattgctggatctatcctggatgatacttttgcgtcacagatgcagcagctcgttggcaatgcactcccggaaaaagaccttgagccacctaggtcaataatggaggtgcggtcgatgctgtgtaaggatgcacataatagtaaggacaactcattcttttactaagcacacagtttttgggtagtgagagatgaatgagtttggtgattcacgcacattatacatggaaagccttgagatatagaaaaccaccccacaaaagcaaaacatggagatatacaagttgccacacagaa

SEQ ID NO: 197151 - DNA, 567 bp, Gossypium hirsutum
  unsure (1)..(567): unsure at all n locations
cccacgcgtnncgaggaacattctngttgacatgggaatctactttcaagtacaggatgactatttggattgctttggcaatcctgagaccattggtaagattggaaccgatattgaagattttaagtgctcttggttggtggttaaagctttggaaatctgtaatgaggagcagaagaaagtgttatatgagaactatgggaaaccagaccctgccaatgttgctaaagtgaaggctctatacaatgagcttaatctcaagggcgtatttgaggactacgaaagcaagagctatgggaggctcgtaacctcaattgaagctcatcctagcaaaccagtgcaagcagtgttgaagtcattcttagggaagatctacaagaggcagaaatagaatccagtttccaaagatgaatgtggctggaaaacctctcccactcttctgttctatgctcatttgtttgtcttaatattttataatcaatcatcttcttgttttctattccgacaaacattcggtttcagatttaaataaatttcatagagttctgtctctagccaatttgnatt

SEQ ID NO: 197152 - DNA, 850 bp, Gossypium hirsutum
tccacgcgtccggaaccgttcagattttggttcacccgattgaaccgtcaggtccaggttttttcaaccatgctgttctgctgttctccgtttcccagtttttgataatcgaatcggtgaaggaagcttcttttgtttttgatcgtcgactgagtttgtgcgtccttagaatctaaaacattctgaccccaaaaatgttgaagctctcttcttcttcttcgtcgtcatcatcatcatcatcatcttcaagaattgcctgctgttctgaggttctcaaaagtttttcaattctccatctccttcaaaaagttttcttcccaatggcttcaatttgcaacagattcatcaccaccaccaccactgcgtgaacccccatctgagcccagaacctttgaagaaggatttcaatattccctaccctttaattctcacggcggacgaaaatgagcgcctcgagtttcattaagtgcgtcaccgtcggcgatggagccgacggaaagacctgcttgctgatttcctacaccagcaacactttccctacggactatgtcccgactgttttcgacaatttcagtgcaaatgtcgtcgtcgatggcagcactgtcaacttaggtttatgggacactgctggtcaggaggattacaatagactacgaccactgagctatcgtggggctgatgtgtttattcttgcattttctctcatcagcaaggccagttatgaaaacgttgccaagaagtggattcctgagctaaagcattatgcccctggtgttccgatagttcttgttggaactaagcttgatctccgagatgatcaacaattcttgacagaccatcctaacgcagt

SEQ ID NO: 197153 - DNA, 1096 bp, Gossypium hirsutum
gtcgatgtaaagcctgcaaacatggaagatctaactgaggtaataacatcagcagagtttcatcctacccactgtaatacgttggcatatagcagttcaaagggctcaattcgcgtaattgatttgcggcagtcagcattgtgtgattctcatgccaaattgtttgaagaaccagaggcacctggttctagatcattttttacagagataattgcctcaatctccgatatcaaatttgcaagggatggaagatatattctaagccgtgattacatgactcttaagttgtgggacatcaatatggattcgggtcctgttgcaactttccaagttcatgaatacttaaggccaaagctgtgtgatttgtatgaaaatgattcaatctttgacaaatttgagtgttgcctaagtggtgatggattgagagtggcaacaggttcctacagcaatctattccgtgtattcggttgtgcccctggaaacactgaggcaacaactctggaagccagcaaaaatccaatgagaagacaagttcagactccctcaaggccttccaaatccttaagtagcataacacgtgttgtcagacgaagagcagaaaaacccggaattgatgcgaatggaaatgcttttgatttcacgacaaagtggctgcacctaacttggcaccccacagagaactcaatcgcatgtgctgcagcaaacaacttgtacatgtactatgcataaaagatcgtccaagaagaaatatatttgcttggttaacttgtttccaattgctgatgacaaaaactcctttcccttccctttcccctcccagtcccaacagttagtgacaggtaccttgaatctccaccttccgtgccccttaaaatctgtagcgaatgctatagtatcggaccaagaaatggctgccatagatccccgaggaagcaaacccatatatgttccccggcacgcagtttggttcctctttaccgatgacttcacctcttaaaccctaaaaaattggccattcttttattaaccccttatgttttaaccccccccccatgaaaagtggaattaacgtttcccaaatttgtttcgggttggg

SEQ ID NO: 197154 - DNA, 828 bp, Gossypium hirsutum
ctaataggttgcttttttgacaccatttcaaaatcccctataaatacatatatactctgactgtccaaacactccggtacatcaccgatccaatcaatcgcttcaactatctcaccaaacacatatccaatggctccgatcgctgtcggcgacgtgttaccggacggtactctctcctacttcgacgccgatgataagctccagcaggtgtccgtacattccctggctgccggtaaaaaggttatcatctttggcgttcccggtgcctttacccctacttgcagcttgaagcatgttcctggattcatcgagaaagcaggggagctgaaatccaagggcgttgatgaaattatttgcattagcgtgaatgatccctttgtgatgaaggcatggaccaaaacttaccctgagaacaaagatgtcaagtttctagctgatggttcagcaacatacacccatgcccttggtcttgagctcaaccttggcgataaaggtctcggcactcgttctaggaggttcgcactcttggtcgatgacctcaaggtgaaggcagcaaatgtcgaatctggaggggagtttaccgtgtcaagtgctgatgatatccttaaagctctttagatttgctttgtgcctaataaggtctatgttttcttggcctcggctattaatatagattgctttatttagcacaccttttatggtattgttaataataaaatacgtctcttggaggatgtaagatcgaacgtgtttaagagcgaatatgttccgttttgtatcgaagaaccatgttccgttttgtgtcaaagaaccaattacttctttctt

SEQ ID NO: 197155 - DNA, 898 bp, Gossypium hirsutum
ttctacgcgtccgattctacacctcaaacatgcctatcatcctgcagtctgcacttgtttcaaatctttatttcatctcccagttgctgtaccggaagtacagtggtaacttctttgtgaacctgttgggcaagtggaaagaatccgaatattcaggtggtcagtttattcccgttggtggtctagcttactatgttactgcccctgcaagcttggcagatatggcagcaaatcccttccatgctctgttttatctagtgttcatgctttctgcctgtgccttgttttcgaaaacttggattgaagtttccggttcttcagccagggatgttgctaagcagctcaaggaacaacaaatggtgatgccaggacatagagattcaaatctacaaaaagaactaaaccgttacataccgaccgcagctgcatttggcggaatgtgcatcggtgcattaactgtcttagccgatttcatgggagcaatcggttcaggtaccggaatattgctagccgtaacaatcatatatcagtatttcgaaactttcgagaaagagaaagccagtgaacttggctttttcgggctctaaattttgaaaaaagtccggtttagtgaaaaaaaccaaatggttagagggggtggagacccatggaacaaattttgatttgaattaaaaatccgaatcttgataggtaggttccacctttggttaaacatgctttggatagaagaaaatgaggtctttaattgtaatctctgatgttgttttaggcttttttagccctttaatttccttccttttaaaaaaaaatctgaacttgtagatttgtccttttcagaatacgaactccatcgaatcctaactttttttccttggaaaaaggactggtttttttggtt

SEQ ID NO: 197156 - DNA, 621 bp, Gossypium hirsutum
cccacgcgtccgcccactcgtccgcccacttcttccggaaaaaacaatggctacccttcatttcacaccatctccttgtactcctcccttaattgtcaacaaaccaaaacaccccaccacaatttcaacctcccaatcgaagttcaaccccaaaacccaccatgggtctttcaaaagattgtcgactttgatagcaaggtcttacaaaggtgtattggagcatgaaggcaactctaccgagctagaggtggaagacgatgagaccatactatcaaaggcattggacttgggcataaccgtgccatatgattgtcagcttggggtttgcatgacttgccctgctaagctcttaagtggaaccgttgatcaaagtgaaggtatgcttagtgatgatgttatagaccgtgggtttgcattactttgtgtagcttatccaacttcagattgccatatcaggactatccctgaagaagaactgctttctttgcagttaaaaacagctaatgattgacactgaaactgtttttgtgtgtgtctgtatgttggatgctgtgtttttatcttgaacgaaatggagttaaaacctaatttgatatcttcataggttattttcccagattg

SEQ ID NO: 197157 - DNA, 608 bp, Gossypium hirsutum
atcgtcatcccttcattttctctgtgaaaaaatcatggagtttttggacgaagacgctagacccagattcctcttccaatcaaagcctcaatcttcttcttcctccgagcgatcaaaaccattccttttcatttccctttcaatctcttccattatcctttccctttccctcttctccattgaatccgaacccttcaaatctctcctcttttggttctctttctcccttttcctcggcccattcgctccctccttccctcaccggcggtgacatccgcgtcggcgttggccccaccatccctgatcccatcgaacaagacccacaacccgagactgaatctaagaaaaaatcatctcaaaaacgttcaaagcctgataaaatcgatgaaccaattggaaatcctggggagttagctggaaacggaaatgggttttcagagtcaaaggtgaaaagcaaagagtcgaagaaaaaagaagatctggggagcaatttcgatggagaaggtaaggaatggagtgaaactgaaattgagattttgaacaaacaaatggtgaaaaacccagtggggaaaccaagtagatgggaagctatagcttcagcatttaaa

SEQ ID NO: 197158 - DNA, 865 bp, Gossypium hirsutum
cccacgcgtccggtccctttcttctcccatttggatgatcagctgcttgatgcaatatgttgaacgcctagtgtcgtccttgagcactgagggtacttatcttgttcgtgagggtgaccctgtgacagagatgctcttcattggtgggggtagattagagagtgctgcaacaaatggtggtcgaactggtttcttcaactcaattgtgttgagacctggagatttttgtggagaggaactgcttgcatgggctttgctaccaaaatccaccatgaacttaccctcttcaactagaacagtcagagctttagttgaggttgaagcatttgcactacgtgctgaacatctcaagtgcgtcccaaacctgtttagacggcttcatagcaagaacttacagcataccttccggttttactcccgccatatggaggacatggagctgcctgcttcatacaggctgcttggcgtcggtacaaaaggaggatgatggagaacagtctgatgacagaatcactttctttggatgagacacacgatgatgagatcggggcacgagaaacacaagaatttccttgtaagctcctatccttctcgagcaacactgaatcttggagtatcaatatcagcatcgaggtttgcatctcacactatgagatgatctcaaaaaatcacacatgtttagatgcctacattgcttacaccacatgaacctgacttttctgccgacccctatcatgactgatctgatttcacgcgttatggtaaaacttatattttggctgagcttctccactgggggtcagacacttctaagtacaatagcctgtgagcagtgcaccaccttctggtgttgtcacgatctacc

SEQ ID NO: 197159 - DNA, 498 bp, Gossypium hirsutum
cccacgcgtccgtgtcaaaaggcctgcaaatttagctgcagcaatggaatctagagatggtgattttgatttggacatttctcgtgaccaaaagtctagacgatcaacatcagctcaggatgcttcaaggtcggaatcttcttcaaggctgcatgcttcaaggcctgatgcggcgccaatggactttgttgtgcgcccccagtctaagattgatccagatgaaattagggcccgtgcgaaacaagttattcaagatcagcgccgtttaaagatgaataagaagttgcagcagttgaaagcaccaaaaaagaagaatttgcaggcgactaaacttagtgttgagggccgtggtatgctgaagtacctgtaaatgataccctagatgcccaaattggctatggtgtggagcttactttgccgttattagagatgcaaaggccagtataaaaagtgtcttgatgcaaatgtttgtgtattacaattcagctggaataatta

SEQ ID NO: 197160 - DNA, 972 bp, Gossypium hirsutum
tttccttgcgtccgcggacgcgtggcttgtgggagttgtagagattattgcagcaatggcttctttgcaatgccagaaaaccattgagaaaggcttgggtcaaggatactatggtggcggttctagttggggaagccaggccactaaaatggagaacaaataccagaatggctatgcgatgtcttacagcgaacatgaacgccatagccaaatccgctgccccacctatggaatgagcgaatcctacactacttacggccaatctcatggcacccacaacggaaacgcaatgtcgaaaccccaatttcatggtcatgggaatggctacggcagccacatgagcaacgggatggctcacactcaagcatatggctctaaccatcacaacagccctggaaaacaccaaggccctgggtatggcagtggctttgggggctaccctcccaaaaaccatggaatgccgcatagcccaccgcaccacggcggcaaactgtcaggccaaggcaacgggttcctgaagccccaagcatacggccctgggagaagcatggcctacggaatgaccgaaaccgaaagttgcgagtaccgcagcgaagtatacttttccaacgagtcacactacaacgacggccgtggataccaccacgctggcaaaagtgaccaccctgtcaagggtctgctaaggaaaataaagggtggcatttcacgtaataaaagctgtagtgatagcgacagtggcagcgacagtgatgatgatggttacgggaagaagacggtcttcgtgagcaaggcaatatgatgaagacatatatgataataataatgataaatatggtgaagatgttggctatataaatgccatacaaaataaaataaaattaaagatccccctatgttgatgttttcgtatcatatgtacctttatgaattaagtaatgatataacctcttgctctggaggagttgggttgtt

SEQ ID NO: 197161 - DNA, 503 bp, Gossypium hirsutum
  unsure (1)..(503): unsure at all n locations
gaagaaattcaattgaaaagaaaaaagagaggtaggatccagtatggacaagaacatgttagcagcactcgagggtctccctgaagaagatatggcccgaatgtcagccatgatcgaccaccttcagcttcgtgacagtttgagaatgtacaattcactcgtcgagagatgcttcactgactgcatcgacaacttcactcgcaagacgttgcagaaacaagaggaaacctgtgtgacacgatgtgctgagaagttcttgaagcactcgatgcgcgtaggcatgaggttcgcagagcttaattcacaagcagcaacgcaagattgaagggtaataataagaactgcgagaaggggctcggaatttcttatttcgtaagaattttctttttggattaatcgagttcttcgcaatcttgtttcttggaagaatttgttgattttcactattgaatcaattacttgttatatggttagagtgnnnnnnnnnnnnnnnnnnnnnnnnn

SEQ ID NO: 197162 - DNA, 876 bp, Gossypium hirsutum
ggcttctggattaattaatagttctgatgtttctttgcaccttaatgaagaaatagaatccatctcttatcttggagaatattatgaacttaactccacaaaacgaaacagttattcatgtgaagttgcagtggttgctacaccccttgatgaagtaaacatccgattttcacctgctgtttcaattcctgagaggaaattgcagcatacacatgcaacctttgtgagaggcctcttgaatccagcctattttggtctgcgcactgttgctgagattccagaactggttggcacattaaaggatcctgaccttccattcacatgcatttcagttctcaagcaacttgatgaaaatgatacaacttacaaaatattttctcgagaaccaatgtcagatgcattactggatagcatttttagtgcaaggctgcagacaaacagaataaactggggagcctatccgcattataaagctccggaactgtttgcaccattcattttggatggtcaacatttgtattatgtaaacgcattcgagaatgcggccagcaccatggagacgggtgcggttgcagctgagaatgtagcaaggctcatattgtcaagatattttggtgaagcatccctgcagtcatcaaacttgcagagctttagtcccgatgcagacgtatcacacttcgacctgtaacttacggcgaatgtaatattggtgtgtaaatttggtgtctcaataatgtgaaatcgtagaatatacaaacgacaaaccagtgcttccaacgctttggtatttggaggtaattgtgcgtgatgaaatatgacttgtcatttttccttccgatatatattgtaaaatctggaccggctcatatgttctag

SEQ ID NO: 197163 - DNA, 491 bp, Gossypium hirsutum
tgaaggatcatgatttgctagctcatctcatgactgatccaagagctgatggttttggggtgtcttcatgcattgagagaagtcttgaagatgctggtgtgtcccctgaggaggttaactacatcaatgcacatgcaacttctactcttgctggtgacctagctgagatcaatgctattaaaaaggtattcaagaatacatcagacatcaaaatcaatgcaacaaagtccatgatagggcattgtctgggcgcatcgggtggtttagaagccattgccacagtgaaggccatcacaacaggatggctgcatccctccataaatcaatttaatccagagccttcagttgagtttgacactgtggccaaccagaagaaacagcacgaagttaatgttgcaatttcgaattcattcggatttggtggacacaactcaatggttgccttttcggccttcaagccttgaaagtctttggcatttaattttgcattg

SEQ ID NO: 197164 - DNA, 886 bp, Gossypium hirsutum
gggcttcccgaaagcaatttcttctcattttcgagaacatttttttaaagattttttctatatattctttgaagatattaatcagaaaaatggcgctggtttctttcatcggaagggttctttttgcgtcagtgttcatcctctctgcttggcaagagttcaatgaatttggcgtcgatggtggtccagcggtgaaggagctgaggccaaagttcaacgtcttctcaaagactgtgtcgtctcacacagggttgcaagtgcctgaatttgatatcaagtatgtggttgctgctgctgtagcctttaaaggtgttgggagtattctctttacctttggcagcaccgatcggagcttatcttctggttttgcaccaactcgttcttactcccattgtttatgacttctacaattacgacacggaaaagaaagaatttggtcttctttttacaaagttttcacagaacttgacgctgttaggggcattgctgttcttcattggcatgaagaactcaatccccacaagacaactgaagaaaaaggctccgaaaaccaaaacagtttgaagacgtaacacatccggttaaaaccgaagagggtctggtttttctcgttcgatcttaatttgtatacctcggtgtaactagatctgtttctgtatgcttgtatcaaggctttgttgttctttggaagttcatagctatttaatttgagttccacaaaaggatttcataattttgcccttcaatctgctgtttacctttttggattttgccaatctcatggaacttttaatcatggattcatggtattctagatgatatattaggaaatatacttattaggtaagttgggttcatttgtagtgaaatgattcatatgtttatg

SEQ ID NO: 197165 - DNA, 771 bp, Gossypium hirsutum
tttcattttttttttcttccttttgttcgtatgggccctgtttttcagttttgttctttatctagaagtgttgacttcgagtcaatcatcaagttttcgaaagattcaggcaaatcaaatggtttggaacggaaaatagttgatagtagataattgtgggtaataaaatcgagatgcagctaaagttttacaacagaaaacaagtcaaaaacttagtgaaggttagaagaaaatagtggtatattactgaagctcattaatggagggtaaaggtaccaaatcggggaaaacccgagctcaaaaggatgctcataacgcccgttgcgtacagtacaggcagaaaactaaccggcggctagaggagctggaacaggtgaagaccaagtactatgaaatgctcccaatcttccggcagatgcaaaccgaaaaccagcagatgaaaatggagttgaagcaaaacgagtctataattcaatatatgcaaaattgtattcaacagtttaagactacacttgaggcacaggggcaaagctatacttcttttgatgagtccataggatggtttctgtctcaaaccaatgtgcaacatggtctagtttcaccaacttctggaattgttgtacaagatgttaatgaattattgggattgggagtgagtggggcaaccaagtttcaagctttcatggacaatttgtatcagcaaatgggttttggccagtactataacaacactgctgcctctattgctgctggcccttcctctgttgcccc

SEQ ID NO: 197166 - DNA, 429 bp, Gossypium hirsutum
gtcaaatgtctaatgcagctttagtcaccattgctcagaactgtccaaacttcactcgttttcgtctttgtcttcttgatccaaaaatagccgactaccggacccttcagccacttgatgtaggtttcggagccattgttgagcactgcaaggatctgagacgcctttccctctctggtctcctcacagatcgtgtgtttgaatatatcgggatgcatgcgaaaaagctagagatgctgtccgtggcttttgcaggagaaagcgatttggcacttcatcatgtgctttctgggtgcgaaagcctccggatactggacattatcaactgccccttcggggacaaggctctattagcgaacgctgcaaagctggagacaatgcgatccctttggatgtcttcttgctctgtgagtctcggagcatgtaaga

SEQ ID NO: 197167 - DNA, 235 bp, Gossypium hirsutum
ttctctcgtccggtagccttttgtccgggaaaaatttgctgcaatagtatttatagtcaactgttgtgactgaagaattctatttgccctttttcttattccttcgcagtagggcttaaggaagattctttttcccccttgttcaatggaaaggcatcattgcttgcgaagcttgtgccatcattttttttttattttcccggatcataaagaaaatactgttaccatttcccat

SEQ ID NO: 197168 - DNA, 635 bp, Gossypium hirsutum
aataatgatgcacttatgaaagtccaacaacagttagacagacatactgctgcaatcacacaaataaatgttacacttcaagcattgaatactactttgaatgaggtacgagtgaatcaaaaacatcaatatcgagatccaattaagaaagatagggataaccagccccataggtgcaaccctcaacgtgtccctagaatggatgatgattgtcatgatcatggacaatcatctttggcaaaaccaaagagcgagcagcaacgagaacatctctttcatactcgctgccacgtacaaggtaagctttgtagagttattattgatggtgaaagttgctcgaacatagccagcacgacgatggtggaaaagctttgcttaaccactaccaagcatccacaaccttatcaactacaagggcttagcaacgaaggccaatttagggtcactcaacaagtgcgcatcgccttttctatcggtaagtatcaagaccaaattgtgtgcgacgtaatgcctattcaagcctgccatttgttgctaggagaaccgtggcaactggatcgaaaagtcactcacgatggtcgtaacaataggtattctttcaagcatcaaggaaagaaactcaccttagtgccgct

SEQ ID NO: 197169 - DNA, 297 bp, Gossypium hirsutum
aacaaacagaaaatggatcttcgagtcctttgaaagggatcccttaacgaggtccatttggcaccagttaccgcaactgactctggtcgggttagagtctgcctatgttaaagctgcattttgaagcttgtcggggcgaggttttgttcgaatggttttttaatgaaatccgaattgaaattttgggtgaaaaaaatgaaaataggaacactccattttcattgaaggagcattatgaactacaaactaactaaatcccagaaatactcttcttgttttgtgtgttttgtttacaat

SEQ ID NO: 197170 - DNA, 1019 bp, Gossypium hirsutum
  unsure (1)..(1019): unsure at all n locations
cgactggcacttttcttgtggtacaaaggaatacaaagttctcatggatcagtttcatcacgtgtctgctgcttttctggaactcgaaaaaggttatcaggaggcaattgaggacattacactaaaaatgggagcagggatggcaaaatatatttgcaaggaggtcgaaacagttgatgactatgatgaatattgtcactatgtagccggacttgttggattaggtttgtccaagctcttccatgcctatggatcagaaaatttggctccggaatcgctctccaattcaatggggttgtttcttcagaaaacaaatattatccgagattatctagaggatatcaatgaaataccgaagtcacgcatgttttggccacgccagatttggagtaaatacgtcaagaaacttgaggacttgaaagacgaggaaaactcggtcaaggcggtgcagtgcttgaatgacatggtcactaacgctttactacatgttgatgattgcctgaaatacatgtccgctttacgtgaccctgcaattttccgattttgtgctatccctcagatcatggctatcggaacactagccttgtgctacaacaacatcaaagtcttccgaggtgttgtgaaaatgaggcgcgtatttcaggtcgatgttcatttcatctcggcctcatttccaggtttaactgcgaaagtcattgatcgaacaaaatcaatgactgatgtctatggtgctttttatgatttttcttgcattttgaaagccaaggtcgacaaaaatgatcctaatgcacaaaaaaccgtgagccgactcgattcaatcctgaagacttgccgagactccggtgtgctanacaaaaggatatcatacataatcgagaatcantccaattacactccgtttgtggttgttttgcttttcaacatattcgccatctttttggttaaactgaacccaaactggcctaataactagtaagttcgatttctaaataatgatgccacagaattagggggctggg

SEQ ID NO: 197171 - DNA, 465 bp, Gossypium hirsutum
cccacgcgtccgcccacgcgtccgcccacgcgtccgctctcaacgactttgatcggttcaagcttatgttagctaagatcaagagggctggggttgtcaggcaagaactcgcgaagttgaaaaaggagaattcatcttgaaatgatacctgaatcacgaggatttgctagttttgtcattcaacattctgcaatgtgttctttcggaatggtttttttttttgtttgtttcaattaagatcagttgagtgcagtttcattggtctaagacagattttgtagtgaatttattgctagatttttgtttgtgaaaacttgtggtaatttatattggctgcatgagaggcataataatagtctctataagaacagcggtgtatttgtccttcctctgatggccacaaatgctttgaaaatttcttcaaaaaattccttaaaaaaaaaataaaaaataaaaaaataaatg

SEQ ID NO: 197172 - DNA, 623 bp, Gossypium hirsutum
aaagaaactctgaaagccaaagggagggcgagagtagtggaaatagaaaggaaaaatgagcttaaaacatcaccataactccaactccgcagcagctgctcaatctctctcttttgatgacattgccgacttcttctctcttccccttgacgacgccgcttccactcttggcgtttgcacctctgttctcaagaaaatctgccgtgaaaatggtctcgacagatggcctcaccgcaagtttttagctggaaagagcgtcgaagaaatcaagaggcatgcagctagagaaagaagaagggaaatcgctgagctttcaaaggctcatcggcagagctctcaacctcaaccccaaaacaatgaacaacccaaattacaaggtggctcagcattaccgaacttacagcagcaagggataagaaacatacaaacagcgcaggccctgaattttagccatcaaagcttgatgacgggagcggcaatgtcagatgaatttaagtttggattcccatccgatggcttatcggtcactacaaacaaatggtggggcagtagcaagtctgactgtaatgaagtcagtgatgctgatggagctgaaactgagggagaagacaagcatcaaacta

SEQ ID NO: 197173 - DNA, 567 bp, Gossypium hirsutum
  unsure (1)..(567): unsure at all n locations
cccacgcgtccgcccacgcgtccgacaatattctgcatccttgagaattaccagaaggaagagggtgttgaaataccagaagttttacggccattcataggtgggaagtccttccttcctttcaagaccaaaccaactgctgaaactaaagggaagaaatcaaaggcctagttatgtctcaccaaaccattggttaccattgaaggaacaagcgctcagattgcctgaaaactagttttgtttttcaaaaattgtggcctactgccatcacgacactgaatatataaattcaattgttttgtagtactttgcaaaaagaaggccccagccatgatactgtgacagacattatagacttggtgttttaagttattggatatcctttacaaaatttgtcatagaactgtaatcaaactaccataaatttgttttagttttctttctgnnnnnnnnnnnnnnnnnnnnnnnnnnnnnnnnnnnnnnnnnnnnnnnnnnnnnnnnnnnnnnnnnnnnnnnnnnnnnnnnnnnnnnnnnnnnnnnnnnnnnnnnnnnnnnnnnnnnnnnnnn

SEQ ID NO: 197174 - DNA, 389 bp, Gossypium hirsutum
ggctaggatggctaaaaaagggataaataagaacacaaatatgacatatcctaatatatagtagtggaggattatgggacaaaaaataaatccacttggtttcagacttggtacaacccaaagtcatcattctctttggtttgcacaaccgaaaaagtattccgagggtctacaagaagataaaaaaataagagactgtatcaagaattatgtacaaaaaaatacgagactatcttctggtgtcgagggaattgcacgtatagagattcaaaaaagactggatctaattcaggtgataatctatatgggatttcctaaattattaattgaagataagccacgaaaactcgaagaactacagatgaatgtgcaaaaaagaacttaattgt

SEQ ID NO: 197175 - DNA, 537 bp, Gossypium hirsutum
cccacgcgtccgtcttttttttttttaatttcatcccctaattacagctttagtaaacatgggttctgcttcgaaatcgaaagattttcaagacggagttgatggtgatgcactgagatcaacaatggctactgatcaaaacgtgttgcaaaaacatgctgcgttcttcgataggaatcatgacggccttgtttatccatgggagacctttcaaggttttcgagcaattggagctggttatttactgtcaatggcgggtgctgtcttcatcaacctttctcttagtggcacaactcgaccaggaaagtttccatctcttctctttcctattgaggttaaaaacatccaaatgggaaaacatgggagtgactctggtgtatacgaccgtgaaggaaggttcgtaccttccaaatttgatgaaatcttcagcaaatacgcacgaacacatactaatgcgttgacatctgatgaactaatggcgatgctcaaatctaacagggaacctaaagattacaaaggctggattggaagctggac

SEQ ID NO: 197176 - DNA, 414 bp, Gossypium hirsutum
agccttccgcggacccgtgggtgcagtcaaggaattcttgaatgaggagccgtatactgctcaagaggttgagaaaattactcagaaggatcttccatcaatcttgcgtgataacccaacttctttagatgtgctaaaagcggccaagcatttcaagttgcatcagagagctgctcatgtctactctgaagccaagcgtgtttatgctttcaaggatactgtggcatcaaagttaagcgaggaggaaaagctcaagaaactcggcaatcttatgaatgaaagccaccacagctgtagtgttctttatgaatgcagctgcccggagttggaggaaattgtaaaagtatgccgagacaatggcgctatgggagcaaggcttaccggagctggatggggttgtgtgccgtggccttg

SEQ ID NO: 197177 - DNA, 839 bp, Gossypium hirsutum
gcggcacccacactccagctctctctctctctaactttcaccgccttccaagcaacatcttcatatgctttccatagctaaatgtacgtatatataaccaacacaccctcactctcttcaatcaccaaaaatcaattttaaaaatcaaagaaaaaaatctctttttttttgttgtaatttcttggattttccaatatgggttttgaagattcagatagggtatcgaaaccagtaatgataagggaagtttggtcagataatttggaatcggagttcgagttgatcagccaagtgatcgacgaatacccatttatttcaatggatactgagtttccgggtataattttccggccaaaagtggaccccacaaggccgtacaacggtcagttccgaccggccgatcattacaaggtactcaaatctaacgttgatgctttgaatttgatccaagtgggtctaaccctcaccgattcttcgggtaatctgcccggatccgaaaacggaacccggttcatctgggaattcaatttccgtgatttcgacgtggagcgagatcctcacgcgccggattccatcgagcttttgaggaggcaagggattgattttgacaagaataaggaaatggggatcgactcgcttcggttcgctgagctgatgatgtcgtctggactcgtgtgtaatgactcagtgagttgggtgacatttcatagcgcctatgattttggatatttggttaagatcctgacccgacgagatttgcccgagaaattagacgagtttttgacgattcttaaagtgttcttcggtgaccgagtttatgatttggaacacatgatgaa

SEQ ID NO: 197178 - DNA, 639 bp, Gossypium hirsutum
cccacgcgtccggcgaaaactccgcgcttcatttatctaagattaaaatgggttggaaagcggctgagaagcttattaggcactggaaaattcttaggggtgacaatgtaatgataatcaggggcaaagataaaggtgaaactggcattatcaaacgcgttgttcgctctcagaatcgtgtaattgttgaagggaaaaatctggtaaaaaagcacattaagcaaggtccaggtcatgaaggtggtatatttactgttgaggctccacttcatgcctcaaatgttcaagttcttgatcctgttactgggaagccttgtaaggttggagttaaatatctaaaagatggaactaaggtgagagtatctaaaggtataggagcttctgggtcgataattcctcgccctgagatcttgaagataaggactactccaagacctacagttgctggtcccaaggatactccaatggatcttgtgttgcagaagacatacgatcctaaaaccggggtgggcatgcctgacctttaaagaaccttgttcaatctcattcgaggcaccaaacgtatggggcaaagaggctataaaaatatggtccatggttcaggggcatttgcctatcatcaataatactcttgatcac

SEQ ID NO: 197179 - DNA, 426 bp, Gossypium hirsutum
cggacgcgtgggtttggctcagtgaatcaactcgacggaggaagtcgaacgtgcaacataacccatatgtcctgcagggcctcacgaagaccacaataagtgctcagaattctccaggtcaaatcatgcatagtggatacactttttcccccacacagagttcgacgcgccagattactataatgaggcaccaagttattaaacaacctccacacatgtattttaattttctcaggaatttttagcaaccacaaatctgtgtgaaaactcttgtaatcctcattgtcgaaacctttttttggaaaaacgggaatcgacttagattttgaaaatgaaaatgaatagaggagtcgccaccaatcctttttgatgaggtgcgatcgggtcacctcgaattaatcattctaataaaagttaagatttact

SEQ ID NO: 197180 - DNA, 443 bp, Gossypium hirsutum
cccacgcgtccggggacttccagtgggtcttcaggtttagatccccgagctgagattcgcagacacatgcgacgtgggtgtaacttataacatcttataaagagtcgactggaatcgagagcagtgaacacaaagacaagggagttggatctgatccatcttccaagcacaaccaaaggcggagaaaaacataaaacgtctaatcaaaaatttgtagaacctttatgaactaatcaccagctggtttagggttggaatatccccctcatgcacagattcaatagtcatcaaacatcaaccatacttgtattttaggtttcctttacccttttttgaatgctcataatattatatatatcattattttcatttttcacaaatgccttgagttttgtccagctcttcacgtcttcttttctctttgtaatttatacttagacatg

SEQ ID NO: 197181 - DNA, 756 bp, Gossypium hirsutum
gtaatctcaatagccccatcaggcgccgccctcaagctctctctgactcgaaaccctaaaaccatggcgatcgacaaaaacgaacccagcaagctccgttggggagagcttgaggaagacgacgacctggactttttgttacccccaaaagaagtgatcggcccagacgaaaacgggataaaaaaggtgatagaatacaggtttaacgatgaaggtaacaaggtgaaaataacaacgacgacccgagttcgaaagctggcgaaagcccggttgagtaaacgggcattggaaagaaggaattgggacaagttcggggacgccgtgcgtgaagatgttgggagtcggctcactatggtttctactgaagagatccttcttgaacgacctagagcccctggtaccaaaccggaagaagcaaaggcttccggtgacggcttggctcagcttagcaaaggaggtgctgttctcatggtgtgccgaacatgcggtaagaaaggtgatcactggacctccaaatgtccttacaaggatcttgctgctccagtcgaatcctttgttgataaacccgcggcagccgagacctcggcagctgctcctggagctggaaagggagcctacgttccaccaagcatgagagccaatgcagagagaacaaccggatcagatatgagacgtaggaacgacgaaaactctgtgagggtaacaaacttatctgaggacactcgggaggctgacttgcacgaacttttccgatcg

SEQ ID NO: 197182 - DNA, 620 bp, Gossypium hirsutum
  unsure (1)..(620): unsure at all n locations
caagttttgaggtagaaaacaagagaccatggcaagagggcgaaccattctgacttgtctcatgtggcttttactcgttttctccattactttgtgtgcaagtgcaactgccggttctcgtctgggaacatcccaacaagttgtttatccccaagggtgtcgctgctgctatttcgttgggaaacctttcatgcttcggtgtggcaaagtatgctgcgatgatgattgctgttagctatgttagcatgagatttaaggttgaatcattatgtgcatcatcttttttcccctttgttgaatgtaatgtaattgtaccaaataaaaaataaaaataaggcttatccaattaaaaaattttcattttaaataanatccanaaatttacaatttaaatatcgcgacatttttgatcactaaccttaaaattaaggaaatggaatttattattaaaaatttaccttgggtnctttggtcatattatgaaagtatttccaaacattaccttcgaaaaatacgaaaattaaaaaattggggttatatttcccgttacatttcatcattgttccttactaggtatgattactcaagcttctttgtctttttactgaaagtttcatttt

SEQ ID NO: 197183 - DNA, 417 bp, Gossypium hirsutum
gaagaaaatgatgaactgcataaaaggatagaggtaaggaaaatgataccaaagcgaaatctggatgaaatggggtcctcgagtccggttaagagtcaagaaatgaaacgttcacggtttgccaccatagggtcacccttgcctaattcttctcatgtcaatgggttgcatgagcaacgtgctactagtctcactgaacgcatgaggttgtacgaaagtgctatttctggtcgtctcaccacttgttatcctgctgcctcagctgtaccacatggactaactgttggttctttgcctagaaatggagttacccagatggtaggaataaatggtgttggaagcagcagtatgatgacgagcataggtgccatctcaagaagttcttattccagggctcatggggagattgaagtcaat

SEQ ID NO: 197184 - DNA, 435 bp, Gossypium hirsutum
ctatcgaagagcaaaaaaaaggaaaagaaaagaaaagaaaagaaagagatattgtttactcctgaactatcttcatataatctcagaaagcacgagctgtgtaaaatccgtcggctctacaaaagagtttaagatctaacattccgcctcttaaattctatcagatctgcgtcttgctgattccatcttacattttcattgatagactttttctttggttagatccgtgatggatttcatgaaggtctttgatcagacggttcgcgaaataaagagggaggttaatctaaaggtattgaaggttccggagatcgagcagaaggtactggatgctacagataatgaaccatggggtcctcatgggactgcattggcagaaatagcacaggccacaaagaaattctctgaattccagatggttatgaatgtgctctg

SEQ ID NO: 197185 - DNA, 681 bp, Gossypium hirsutum
cccacgcgtccgctttccttcctctttctctccttttatcttggcttttcatttataacttaccaagtttttgctttagtttttcttccagtgtttgattacttggaatctgataaaaaatggaatatgaagatcagatcaaccaggccatggaccccaaatacgaatgtcttttatttgatctagatgacactctttatcctctgacttctggtatatcaagtgaagttaccaagaacattcaagaatatatgattaagaagcttggaatcaaggacaatgttcctgaattatgtgtttcactgtataagcattatggcacaacaatggctggtttaaaggctattggttataactttgagtatgatgattttcatagtttcgttcatgggagactgccctatgcaatgctaaaacctgaccctgttttaaagaatctcttgcttagcataccaattcggaaaataattttcaccaatgcagtataagaaccatgctgccagggtgctcaacaggttgggattggaggactgcttcaaaggattatatggttcgagaactttaatccaataaacaaaaaaacccttcaacttgtgatgatatcaaaccagacactgccatttgtgacatcaatggatactgcagtgctgttcttgattctgagcttaagcttccaagtac

SEQ ID NO: 197186 - DNA, 649 bp, Gossypium hirsutum
  unsure (1)..(649): unsure at all n locations
cggacgcgtgggcggacgcgtgggcggactcgtgggcccacccacaccaaactccacccgtcttcgtttccgtttccctactgctacttctattttctaaatcccaaaatgggaaggtctccttgctgtgagaaagctcatacaaacaaaggtgcatggaccaaagaagaagatgatcgcctcatcgcttacatccgagcccacggtgaaggttgctggcgttctctccctaaggctgctggccttctccgttgtggcaaaagttgcaggcttcgttggatcaactacttaagacctgacctcaaacgtggcaacttcactgaggaagaagatgaactcattatcaagctccatagccttctcggcaacaagtggtctcttatagccgggagattaccaggaagaacggataatgagataaagaattactggaacacacacataaggaggaagctattgaacagaggaatcgatccagcgactcacaggccactgagtgaggcaggtgttcatcangatgtgtcatccacaatatccttcaatggtgttaaacnagaaaatgacnagatgaataacccccatggttttgtggagacagatgagaagaanatcccagcagttgaagaaaggtgtccagacttgagtttgg

SEQ ID NO: 197187 - DNA, 393 bp, Gossypium hirsutum
tttttccaagaaaggctcctcccaaggaacacaaaaggtacaaacctgaagaaagctgtcttacgaggaaaggaaggcgaagttgattgataggttgaaggctttgaattcagctgccggagttgataatgattctgatgaggatccgtgatcaagccgctgaagttgatgctacggttgaggaaaacactgggtgaattcagcatcggaatttttgtttttgttctttttttttccttctaaaacttcatccttttgctgctagaatttaagaaaaaaaaaagactgaaggctttgcttctttattaggtatacgaggaactggcatttttgcctgctgcttccgttatttgatagtttaattttataagtactattctattcgtggcttct

SEQ ID NO: 197188 - DNA, 446 bp, Gossypium hirsutum
atcctccctagtcatcattcaggcttcagtttcatcatctgattttggtaaccttctgccggggagattaaagcacttggctcacaccatcacagagtctcctgctaacaatcttggtcttaataactcagtctttggcaaagttaaaagcattactttatcatcttatctcaagggtacacttcatgctactgctcccactgcttcaccagctccatctccagagccatctatttccccacatccttcttttaggcctactcatcctccagcatcatcacccaagagtcatcatccccaaccttgccgtaagtgtaaagctgcttctccatctggtaatactcccctgcattcaccaggtcctgaaagtggtccctacccttcttttcctcctctgatttctcctgcaccctctactatagctcctcccccctgtccatactctc

SEQ ID NO: 197189 - DNA, 448 bp, Gossypium hirsutum
gcgtcccattttcctcattttctttcacaccaagcgttgcgcgctagctacatcctaacaacaatgccgagccaagatattagccctccttgcgcttcttgcccttttagtgagcgcatcaaatgcgtccattatcccacagtgctcacttgctcctagtgccattattccacagttcctcccaccagttacttcaacgggcttcgaacatccagccgtgcaagcctacacgctacaactagcgcttgcggcgagcgtcttacaacaaccaattgcccaattgcaacaacaattcttggcacaatctaaacctacaaaccatcgtaacgcaacatcaacaacagtttctgtcatcactgagccacctaaccgtggtgaacccttgtccctacttgcaacagcaactactttcattcaacccactttctctggcaaacgtatcttcata

SEQ ID NO: 197190 - DNA, 399 bp, Gossypium hirsutum
ggatgaatgagtcaatcgtaaggagagccattctaatcatgcaccagagaggtgaagttgaatatcaacgagaaaggcatattatcgttcgtaaagtataaatcttgcggttgtaatgtttggaaccgaaattatcagggcagcagttttattgcaagatgaagttccaaattccaattgtagtggtggtcttgatcaggaatgaccgggctaacaaaaagttgtgtaatgttatgttgtacgtctctgcaacttgttttgatcttacattttaatggattcagtggatggattgtctcgagactgaattattttttttcaacaattaagaaaaaaagtaattgagggcaaaaacctgaaaaggacaaaccaacctcaagatccaccaagggcggaaag

SEQ ID NO: 197191 - DNA, 434 bp, Gossypium hirsutum
cccacgcgttcgcgatcatgcctaatgccgcaccttgggcaggctatacaacatcaggtcctgctgccactggagtcatgactggttccgcctcattaaagaagtcaaactctggacccctgaatagacatgggggtcctgctaagaaatcatctggtccacagtctggaggagtaacaacaagcggacgccaaaattctggtcctattcctcccgttctccctgcaactggccttattacgtccgggcccatctcttcaggcccattgaattcctctggggctcctcggtaattgtctggtcctttggactctatgggatcaatgaaagtaaaaagttctgttgttaatagtcaggctgtgaatgttcttagccaagatgatgacttttctttcaagaggaacttcccaaagctaatattttgggcactgata

SEQ ID NO: 197192 - DNA, 669 bp, Gossypium hirsutum
ccggggcggacccacccgtccgaaatctgtaaaaaaccttataaaagacttcacttttagcatctgtatataatctgccgcaaccccttcacagcaaatgtagggcggccaatccaaaaccctaattttgccataggtgagaagaaggtaaagaagaaatggcggtgccgcttctaagtaagaagatcgtgaagaagagggtcacgaagtttaagagaccccagagcgatcgcaaaatctccgtcaagacgaactggcgaagaccgaagggtattgattctcgtgtaagaagaaagttcaagggctatactttgatgcctaatatcggctatggttcagacaagaagacacgtcactatctacctaatggctttaagaaatttgttgtacacaatgttggagagctcgaactgttgatgatgcacaacaggacatactgtgcagagattgcacatgatgtttcaacaaagaagagaaaagagatcgttgaacgagcagcccagcttgatgttctggttactaacaagcttgcgaggttgcgcagccaagaggatgaatgaacatggaacttgggatcttgtacaccattcccattgcaaaattagcttgttattgaaagattattatttgtcaaaaaaaaagaggaaaaatttatcaggattttttcgc

SEQ ID NO: 197193 - DNA, 329 bp, Gossypium hirsutum
tgccatctctgactgtagcacaaaccaaaagccaaacaacgagtcaacctccagctttgagattggacagcttgaattgagatccatatagcgaaattgcaagctttgtgatcaaaagctggcatatggatatggaacagccaacaggtcattggtgtacaggcctgcaatgctttcaatggtagcagttgccgcagtatgtgtctgtgttgccctactatttaagagctgtcccgaagttctatacatcttccgtcccttcaagtgggaattgttggactacggaacaagctgaagtccaagtcgccctaagttggtaaccttcaata

SEQ ID NO: 197194 - DNA, 507 bp, Gossypium hirsutum
gaagacgagaacgacgtgcctgaacagctagaaccagatgtcataagtagtttaacttcactgattgatcatgacgaagaatgggatccaaacgactaactggatttatagacagtacgtttctatcggcatatatatcatcaacgggtgggaattcatttgctggagaactttcgacacggagagtagcaagtaaacatcattctttgatttccatagttacagtctctaatgtttttgaggtgaataaagtagtcaatttatttgtctttttcttttcttttattttatttttactagattcatagaaaccaaaagaattattccaatgtctttatacatcaaatagttgttctaacatgagaagggtgaaagattcaagtcatagattttgtcattggagaagcttaaagtcgttgctgtaatttttcttttagtatttctcactgtgcttcttcaactgggttcttttatcctatatttattggtattctttttggggtttaa

SEQ ID NO: 197195 - DNA, 542 bp, Gossypium hirsutum
cccacgcgtccgaggacataaagtgtgtgatcaactacgattttccttcgagtctggaggattatgtacataagattggtagaactggtcgagcaagagctaaaggaactgcttttaccttcttcacacaggcaaatgcaaagtatgctagggaccttatcaagctcctgcaagatgctgggcaggttgtctcccccgcattgtctacattggctcgttctgcaggttcgaagtttggaggttctggaggaaactttcgtgcccgaggacgtggcagctacggtaaccgggctatgatatcaggatcaaatgctgtatctctcggtgcaaagaagagaccctggtagtttcagcctagagttggctggtgtgctatgtgcccccccccaagaagaccatttgagggtttgttaaaggcaattatcctagtgttgcggtgtaggatgtttaggtttcacagattattattggatttcaattcagcttattatattcatgttgtaagctttacaaataaacagatagaagatgttagtttggca

SEQ ID NO: 197196 - DNA, 644 bp, Gossypium hirsutum
cccacgcgtccgcaaccagtttgtgtgtccgtcgtgctgtctattataaccctgagaccggaaaggaggatccgtcgaaaagtggtgtttgtagcaatttcctatgcaattgtaagcctggagagtaggttctgttcgctggcccttctggcaagataatgcttttgcctgaagataacccaaatgccaaccacataatgatagccactggaactggtgtagctcccttcagaggctacctccgccgcatgttcatggaagatgttactttcaagttcaaaggccttgcatggcttttcctcggggtggccaacacggacaggcgccgttatgttgatgagttttccaattacctcaaggactaccctgatcaattccggtacgacctagctcttagcagagagcaaaagaacaagagtggaggcaagatgtacgttcaggacaagattgaggaatacagtgacgaaatttccaagctcttggacgatggagcccatatatttttctgcgggctcaggggaatgatgcccgagacccaagaaacattgaagaggattaccaacggttgacggaggctcaaatggaggtcactggaagggcaagctttggtaggacatactgtactctgaagaacgttaacaaac

SEQ ID NO: 197197 - DNA, 593 bp, Gossypium hirsutum
agagaagtgagcgggtgggtgggtgagtgttttggggaagaaaacataaaaacaaaagcgccgtatttgattatagttttggagttgagagatcataaatgcttttgctgaagcgatacattggttggcagatcttggggagaagaaagtgaatggaaatgcaaggtgggaaaatggagaaagatttcgtgttgcaatggggaaacagaaagaggctaagatgtttcaacaaacttaaaaaacagcaccagcaccagtttggcgacagcggcggcggcacctctaccacgccgcactccttacctttgcccaacaagaagatgggctcctcgcctgttgccaatcgtctcaaaatgaattcggatttgggaacaaattagtcaagatcggcattgacatctccggagaaggaagataggtactatgcaacaaggggatcgggttccatagtgttggaagacaataataccaaggtttttgatggatcaccaccatgttaaggaagataaagggactgtgtggcccagattgttcaccacattatctaataaagaaaaagaacaggatttcatggcaatgaagggatgtaagct

SEQ ID NO: 197198 - DNA, 673 bp, Gossypium hirsutum
  unsure (1)..(673): unsure at all n locations
gttggattatttattttgtttccctcctcgttcaactgtctcgtttcatttcttaaaaaatgactaccctttcaaattctttggttttatcggcaaatcctccccttcaactattttctggctctcatgggagtgccagctccaccaacttggtattcaattctagtcatttgaggaaactgcatatttctacctctagaaggcctctcaccgttcaagcttcgtacagtgatggcgaaaggtcaagcagtgctaatgcctttgttggaggttttgttttgggagggctcgtggttggtgcacttggttgtgtatttgcccctcagatcagcaaggcactagctgtagctgatagtaaggaccttatgaagagactgcctaaattcatatatgatgaagaaaaagctttggagaaaactcggaaggtactgaccgaaaagattgctcanctaaacgctgccattgatgatgtttctggtcagcttcgatctgaagatgccccgaacggagttgctgtaaactctgatgaaattgaagctgccatatgaattgccttacgaacggtggtttaactagtctgttattaagaaataatagggaatntgttgtaattttcctgttttctcgacaaaacagtgtaactctgtcattttaatatgtggtgattgttgct

SEQ ID NO: 197199 - DNA, 487 bp, Gossypium hirsutum
  unsure (1)..(487): unsure at all n locations
ggaagccaaaagatgttcatccgccatcttccttgtgggtatcaatctacttttcctcacttcagtgagtggatgctacacttgtgttcacccaagaccaagtggttcacctcccaccaaaaggagctgccctagagatgctctgaagctaggggtttgtgccaaggtgctgaatggaacagttgctggcgtagtggtggcgaaccctccagatactcagtgctgctcagcgctaggggggcttgtggatttggaagctgcagtgtgtctttgcactgccattaaagctaatgttcttggcattaacattgatattcccattgcattgagtttgcttatcaacacttgtgggaagaacctaccttctgacttcatttgtgcttaaccaatgttttgtaggtaatttcaacaaattaactctgctggaatgtagccttttttttctcccattcagtactttataattntcctaattggacaattgttc

SEQ ID NO: 197200 - DNA, 731 bp, Gossypium hirsutum
aacaatttcacggaaactctttcttccttttcacaatttcctcttcccttgggcttcttcttcttcttcctatttccagaatttcagccccttattttcactatcaatagcatatgaacccttattagcctattccccctttcccctttttaccccctagttcttctagggcaaagatccctcgatttcccttcaatttcgatcctttatctctggaatttgattctttttttttttaattcaatcatggatggcaacaaagacgatgctttgaaatgcttgaaaatcggcaaagatgctttggacgccggagatcgagcccgtgccctcaaattcctcaccaaagctcgtcgtcttgacccatcgcttcctatcgagaatctcttatctgcggcggaaggtgggaaatctgacgatcggccggcttcggaacctgttgggtctgctaaagatccgtctgggtcttctccatctaaaccttctgatcaaccctcgattcgtcggaggaatataccgaatggatcggctgcgtgtgctagtgcttcttctccggcgtccgcgttagcgacagcgtcagcgtgagccgctggcggtacctacaccgtataacaaatcgtactcttgaagcatatcatgataaagactgattattatgagattctggggttagagaaatcgcgttccgttgatgatattccaatagcttatcggaaactgtctttgaaagttca

SEQ ID NO: 197201 - DNA, 1154 bp, Gossypium hirsutum
  unsure (1)..(1154): unsure at all n locations
cccactcgtccgatctcttcaacgttcacaatgggcgcatttcaccgactcaacttgctccatttcacgctctctttagttgtcattgccgtcaatggccacaatataacggccattctcgaaggttttccagattactctgtttacaatagtttcctcacccaaacaaagctggccgatgagattaacacccgagagaccatcacttgccttgtcctcaacaatggggctatgtctgccctcacatccaaacaccccctttccgtcgtcaaaaacatcctcagccttcacgttcttctggactactatgacccccaaaagctccacaaaatctctgatggcactaccctcaccaccacgctttaccaaactactggtaatgcccctggaaaccttggtttcgtcaacatcaccgacctccaaggtggcaaagtcggcttcggctccgcaattcctggctccaaactcgactcatcttacaccaagtctgttaagcagattccctacaatatctctatccttgagatcagcgctccggttatcgctccgggggtcttaacggctccggccccggcgtcttctggcgtcaacattaccggtttgcttgaaaaagccggctgcaagacttttgctagtttgcttaccagcagtggcgtgcttaagacttacgagtcggcgcttgataaagggttgaccgtttttgctccgtccgatgaagcttttaaagctgaaggtgtccctgatttgagcaagctcaccaatgcagaacaagtctcacttctagagtatcacgcctcgccggattacaaacctaagggaacgttgaagacgacgaaggacccgatcagtacattggcgactaacggcgctggaaagtacgatctgacagttacaaccgccggcgactcgatgacactacacacaggggttggcccatccagggtcgccgaagcagtttttgactcaccgccggtcgccattttcaccgttgacaacgatttgctcccttctgagctgttcggcaagtcaccgtcgccagcactcagccccggaaccagtttcttcgccttcaccgacaccatctntatctccagcccattcccatgtctgaagcaccgcaccacttgcagcttcaccaccagctccaccaactg

SEQ ID NO: 197202 - DNA, 556 bp, Gossypium hirsutum
tttcttctctccctcaaactctgagaaacagaaaatcgtaatagaagatcatcgtaaataaagaaagcaagtaagcttccaacactcggcagcatttttgaattctgtaattggatgagggttactaacctgaaataactcaaccaatctccatcgttggacgcacataagaaacgaaactagggccagggatccgaatttcaaacaccaagatctaaatgacggatccgaatctggatctgcaagaatcgggttgggaggaactcaggagagaggctcgaaagatcgagggtgatctcgatgtcaaactctcttcttatgctaagctcggtgctaggttcacccaaggagatacctgggtcgccaaccgttgggtcaagtagatcatggaagtctatggaaatggaaattcagtcattgctcgagaaactgctggacataaatgatgccatgagcagatgtgctgcgtctgctgcttcaactacttcagtaacccaaaagcttgcaaggcatagagacatactacatgagtttactcaggagtttagaagaatca

SEQ ID NO: 197203 - DNA, 567 bp, Gossypium hirsutum
agttctagatcgcgacggccgccttttttttttttttttttttttttttgccttaaaaagctgtatattatttattttaaaaaagttataattaagaaacaaagaaagatacattcaaactttgctaaattaatgctagatacatacatacatgcatacatacaacttcataactacacaattcttttttctatattatatatatatatatattagccctttgtattgtatatttatggatcgttaatcataattctaaggcttatgattttgagtataaatataatccaaatgagcatctgccatcatcctccttttcacacattcttcatctttctcataacactcttctgctcccatcaactctgagaaatcatcttttctatcagcttgaatcatcatcatctcgtttgctttaagctccttttcaccatggttgtggatttgcagcagcaaacgagcagattctgaggaacaacaaagaagaagaaaagctaagaacaaaaaggttataaacccagaaaattttgccttcattgttttaaaaagaaaaagcggacgcgtggg

SEQ ID NO: 197204 - DNA, 525 bp, Gossypium hirsutum
ccgggacactgaagccaaagcagcttaaggacccttgtaaccatggatgctctacaagaggtttacctacgagaaaaggtatatccaagttttataatggcaaatcaaagtccttcactagtcttgctgatgctgtcactgcttcctctgttaaagaatttgcaaaaccggacaatccttataatagaaaacgcaagaacttattaactcgtggttcaaagcgattaggcaactcatatggaagtgcaatggctttcggaactactatgagtagctcagacttgaacttgatgtcatcatcaccgtctagttgtcttccacctctacatccacagtataaaaaatcaactatgattagttcatcatcgatagctgctcaaccgaatttgaaccctccgtgccggtctttctccttgtctgatctacaatttgttgttgccgctgccgctgcaactcctaacatggctggtttggctgttcgtagttgcaacaaggacaacaaaatgcattgagttcaatgggaag

SEQ ID NO: 197205 - DNA, 1029 bp, Gossypium hirsutum
gtttctcttgatttcaaactcgaagtctccgccactactaccagctttctattcatcgctcaacccaatggcagtcgcttccaactcgctcgtttctttcatccacggctcattgagtcaacccggaaggacctcccactttcttccttcaccttctctttctttccccggatctcgctcgctctctctgaaactcacccgccgctccaactcgccccttctttgctctttagatgcaaccaacgccacagataaggacaccccaatcgaaacaaggttcccagcttatccaactgtgatggacatcaatcaaataagagagatattaccacacagattcccattcttgttagtggatagagtgatagaatataatccaggggtatcggctgttggtataaagaacgtgaccataaatgataactttttccctggacatttccctgagaggcccataatgcctggtgttctcatggttgaggcgatggcccaagttggaggtctagttatgctgcaacctgaggtgggaggttctcgggaaaacttcttttttgctggagttgacaaagtaaggtttaggaaaccagtcattgcaggagatactttggttatgaggatgacacttattaagctgcaaaagcggtttggaatcgcaaagatggaagggaaagcatacgttggaactgacttggtatgcgaaggtgagttcttgatggctactggtagtacttgattgtctcagtattttatactttgtgtatccactaattttcggggaaatcaccagccgtgttgtacccgacgcttttgttctgtatgcatccctttttagtgagattttcattggggtttttttcgacgacagtatgtttgtaagtttctttgtactttgcagacaaagaaaaaggttttcttgaggtttcttctatatgtttgtaagtttctttgtactttgcagacaatgaaaaaggttttcttgaagtttcttctatcatttcatgtaaaaaaaaaaaaaagtcgacgcggccg

SEQ ID NO: 197206 - DNA, 533 bp, Gossypium hirsutum
gccaaacaatcccctcaccactatcactgttaagtctcttcttgctctcaagttcccaatagcccaggacattgaataagcattaagtatgaaggtgcgagcatcagtgaaaaagatgtgtgagttctgtagaaccgttaagcgccgcggacgggtatatgtactatgcacttccaaccctaagcataagcaacgacaaggcatttccactttttgcttctgaaggcacactgccccctgcgacggcagagacaaatgtcaagcatccaatcattcccagttaccgcatgcggccaggactagcatcccttattcctaaaatgcaagagccgtcttcatcgattattgggtggagggctaacctggcatctctcatattcaaacgcggcaattagggaaaccacaaaaagagatacattacagtcgcctacttaatattcaactgattctgcgggaactaggattctatgattttgtttttaattgcaattatattgagtagtgatgatacatttggagccatgtttggtgtc

SEQ ID NO: 197207 - DNA, 668 bp, Gossypium hirsutum
tcgatcgagcagaatggtgatggggattctataacatttacggaatcagtgatttcaaaccttcagctccagtttgagaaggttgccgcagaagtgggtttgaatagcgatgttgcaactgcctgtgatttaccaaaagttaatggtgctgtctccaagaagagaaagagagcaaagggtgcgagtggccgaaaacctcagaatggggagctaactggtgaagctgatggtgaaggagatggaactgcgaaaacttgcgagaatagcacaaagagggtaagattttcaatgaaaagcaatctggtttggaagccccacagtcctttacctccattaagggggaggttacctccctctgttactcctagaggaagtgctcttaagcaaggaattcctccaggtcctataaaggaaatggctcctatgactaagaagggaaagaaagctaaatctgtgaagaaggctcggaaagtgataaagagtatgtatcctctagtcaaacgcacaaagaaattgaaatctacttcctcttagcagagtctgctcaagggaaatgcctcctatgtataagatggcgaagaaaactaaatttgggaagaatgctcagaaagtggataagaatgtgttttctctagtcaaacgaacgaaaaaaattgaaatccatgccc

SEQ ID NO: 197208 - DNA, 486 bp, Gossypium hirsutum
cccacgcgtccgctcttctcttattctaatataatctctatctcttaagaaagtagaaaatggcgagcagcaggacttccacaccattactttcattacttctttgccttgtgctactgtgtgaggtgggaatgctgatggctcaactttctgcagcacaagccccaggcccccaggacgcatgccccaacaagtgtgcaaagcggtgcaacctttcatggaagccaaagatgtgcaataaaacatgcatagcctgctgccacaggtgccccgatcactgtgtgcctgatggtcctagagctagccgagattcctgccattgctactcacagatcaagacccataacaagttcaagtgcccttaaattttacattacatcctcttctttttttctcttcttttattttttccagagtgggagagtttggaaactaaaataaaaggaataataaaatgacgttactgtttctgtggtggtttcaatt

SEQ ID NO: 197209 - DNA, 452 bp, Gossypium hirsutum
tccacgcgtccgaaccccttttactctaaaatctacctcttccattactcttcctctccctctccctctcactcgctcttcccgcttccgctctactcacgcgccgtctcctaggcccatcgccgcttccttctccgccgctgaatctaccacctccaccgacggtcttggcaactccaagacgcctcttctcgaagtcagaggtttaactgccgtgattgctgaaaccaagcaggaaatcctcaaaggcgtcaacctcgtcgttcaccatggagagattcatgctataatgggaaagaatggctctgggaagagtacgttttctaaggttcttgtcggtcatccagattatgaggtgactggaggagatgttgttttcaagggagagaatttgcttgacatggaaccggaggaaagatctcttgccggactttttatgagtttccagtccc

SEQ ID NO: 197210 - DNA, 561 bp, Gossypium hirsutum
cccacccgtccgcccaaatataacaacccaatcttttttccgccgctctctttcttccttcagacaccatatcttagggtttctcctcctctctacctccaatgggaaagggaactgggagttttggtaaacgaaggaacaagacccacacgctctgcgtcagatgtggccgccgcagcttccacctccagaagagccgttgctctgcctgtgctttccccgctgcccgtaagaggacatataactggagtgtgaaggctatccgaagaaagacaactggcactggtaggatgaggtatcttcgccacgttccacgcaggttcaagacgggtttcagggaaggtactgaagcagcaccaaggaagaaggttgcagcagcttttgcttaaaaggcaaattgtaatggtatgaggttttgttttggatgaagccatgtttatgaggaaacatttagtgatgaatagtgaaattatgttccattggatgctttagttatttagtttctatttgaatgtagctgtcttaaattttgaacaattattggagctaatgtttgaccct

SEQ ID NO: 197211 - DNA, 418 bp, Gossypium hirsutum
cttctggcatgccttggcctggagatgaaggtgagcagaggtgggagcaagcatggactgctataaagaaggtatgggcttcaaaatggaatgagagagcatatttcagcaccaggaaagtcaaactagatcacgactacctctgtatggctgtcctggttcaggaagtaatcaatgctgactatgcatttgttattcatactactaatccatcgtcaggggacacttcagagatctatgctcacgttgtcaagggacttggagaaactcttgttggagcttatccacgtcgtgctttgtgttttgtttgcaagaaaaacaatcttcaactctcctcacgtttttgggatattccaagcaaaccaattggtctcttcataaggcgttccattatcttccgatctgattctaatggtga

SEQ ID NO: 197212 - DNA, 860 bp, Gossypium hirsutum
ttatttatttattttaaaattggcggactgttatgttgctgccctattaaaactggagtgtgggttggtgcaaagagagacggggtactgaaagaatgagcccttcaatgaaggaaacatcattagaaacaatggagaaaaagggagaggatgttaatgggataatgaagaaggagcaagataagttgttcgatccaagtgaagcccctcctttccgtattaatgatatccgagctgctattccaaagcactgctgggtcaagaacccttggaggtctatgagttatgttttcagggacgccattgtcatctctgcactcttagcagctgcactttatttccgtagctggttcttttggcctttctactgggttgcccaagggaccatgttttgggctctctttgtccttggacatgattgtggacatggaagcttctctgataatcccatacttaataacgtgatgggacatatcttacattctaccatccttgttccttaccatggatggagaataagccatagaactcaccatcaaaaccatggaaatgtggagaaggatgagtcttgggttccgatgtccgaagatctttataatagtttgagcagcaggaccaagtttctgagattcaaaatcccattccccctatttgcataccctgtctatttgtggcacagaagtccaggaaagacaggatctcacttcaacccatacagcaacttgtttgctccccaagaacggaaacatataatgacatcaacaacctgttggatagcaatggtggttttccttgtgtatttatcctttgtaatcgggccatccatgacattcaagctctacggcgttccctacttgatt

SEQ ID NO: 197213 - DNA, 568 bp, Gossypium hirsutum
tttgtttaggtctgagaaacaaaagaatttgaaagctttaaaagataagaatagagaaggtttaggtgaagagaattgtgacgaagataagaaagaagagggttgggttaatggtggtcgtggacctttaatggctgcttcacaaggttcaattggttctcaaggaagtggttcttcaggcatatctgaacttgacagccaaccacctcaaggaacttacaaatgccaagggtcaagaagccctacgagtgtgcaatctacaacacaaaccgagcaaaaaccaaacatcatcaaccccggaaagatatcaactcagaaatccgaaaagttagccggaatcacagcaaagaatcaacataatcaaccaggagtagatgaaaaaagacttcgggcaagtttgaagaacataatggaagacatgccatgtgtgtcaacaacaggagatggtcctaatgggaaaagaatagaaggatttctttacagatatagaaaaggtgaagaagtgagaatagtatgtgtttgtcatggcagtttcctttctccggccgagttcgtcaaacatgctggc

SEQ ID NO: 197214 - DNA, 437 bp, Gossypium hirsutum
ttctttcgtccgaaaaggggaaaagttgcagagcaaaagaaaagaactccaatggtgtgcgagaagtgtgacaagaagctgtcgaaggtgatcgtgccggataagtggaaggaaggtgccagcaacacaaacgaaagcggtgggcggaaaattaacgagaataaactcctctctaaaaagcgaaggtggactccttatggaaatactaagtgcatcatttgcaagcagcaagtgcaccaagacggcaagtattgtcacacttgtgcttattccaaaggtgtatgtgcgatgtgtggcaagcaagtgctcgacaccaagctttacaagcagagcaatgtataataaggaaggggcattagctgttcttcaagtagataccttaattgctcgttgtcattgacaacacatgaacatgatcgcgaaggctgtataagatt

SEQ ID NO: 197215 - DNA, 437 bp, Gossypium hirsutum
ttcaccttttatttctttttttctcctatatcttggaatgctactttacctcttcatcagttgtttctccatcatcttctttataaagtccttaactttgaaaccactcccaccatgggcaactgagatgagactattgtctccctggtttaggaaagacgtttccttttttctcagttccagattgagcaaaaacattcttggtcttgcttattttaccacagtcgtttccaaaatgtctctcaaaaagatgtctttcacttcaaaagttgataactttgaggaggtttgaagtttgtcgccatgtcaattttggacctaccagatttggtcttggaatgcattcttgaaaggctaccacctgctgctctttggtagtatggctggtgtttgcagctctttgaggagtaggtgtattagtgaccatttctgggaaa

SEQ ID NO: 197216 - DNA, 1319 bp, Gossypium hirsutum
  unsure (1)..(1319): unsure at all n locations
caatcaacttccgttttgcctttcacaatcgctgaaaccaaaccttccaaattcctgcacagttaagcatttttcagggtggaaacaccattttgtttttctgtccaaaaaaccctctccaataacaatctgtaaagcttccttcacgtagaaaaatcaactctccctttccctcacgaaacttcgatttctttctcctcagcttcacttcctcgtaaaagtttcctttttgccgctccttccccctagggtttcgtatagtaaggaacgaggggatcgaacataatcaaatcgaatggattggggaaacgtaaccgcagaggatctgatcgacgcgcttcgtgaagttgactggtcatcaccgccacgacctctccccgaattcttctctcgtttcaccttccctcgatcatatgccaaatggaatagccgccttaaatgcaatctctactactaccgaaccaattatttcatcatgattgttgtcattcttggtttgggattcttgaggaggccggttgctgttttagctgcgatgttaacagcgctttgcatcgcttttctgaatgatagtttcgctggtacttttagtgagaaggtgactagaacagtgaggcaattctctccacatttagcagctaaaatgaggcctcccttaactcctgttattcgtggacgtccatcatctaaaagaacaattcacatatgcggtcggcctcgttgggtttttgtcttcatattctcttctgtgagtttcatcctttggtatgtatcttgtggtctcttgactgtgctatgggcacttgccattgcacttcttgccaccgtccttcatgcaagttttagaacaccgaacctgaaggctcgtcttaacactttccgtgaggagtttcgtgcagtttggcgcaattacagtgagctgtagctcatatagcctatagcatcctcaggcagtgaaggaaggttgtgataatgtggaaactcgtacaacatgttattgtaaggttggatgggtgctgttgatgtttctaaaaagatagcttgtttggctgaaggctgctaatctttgcaatagtggagaagttgtaaattgtcagttcctcatttgtttctgtaaagcagaccatttctgtgttgactccttattggagaatatttttactcgatatccctttcttcgagaagaaaaagaagtgcagaattacataagcaatgatagttgctgggacaggatttangtacacttgattcataattacttgtagttccttttgcgggtgaatttattgctaagatagtgtaaaacctcgtgccttgag

SEQ ID NO: 197217 - DNA, 623 bp, Gossypium hirsutum
ctccaaaacactcttgtcaaacaaaacacgcttcagccagcggccctcctcttccctccttcactcgtttctcgattttgtttccctcagcttcacttcctcttaagaaattcctctctttttgtcgcctctaatattgttaatttctagggttacgttgagtaatggattggggaaacgttaccgccgaggatctgatcgacgctcttcgtgaagttgactggtcatcaccgccgcgacctctctccgaattcttctcccgcttcaccatccctcggtcatacgtcaaatggaacagccgcattaaatgcaatctctactactatcgcactaattatttcattctgattgttctcattctcggtttgggattcttgaggagaccgcttgctattttagctgctattttgacggctcttagcattgcttttctgaatgatacctttgctagttcttttagtgagaaggtgacaagaactgtgaggctgttctctccacatttaccagctaagatgaggcctccctttacacctgttattcgtgggcgtccttcagcaaaaagagcgatttacatatgtggtccacctcgttgggtgtgtgtcttcatattttcttctgtgagt

SEQ ID NO: 197218 - DNA, 479 bp, Gossypium hirsutum
gccagacgtccggttcctgttttgggcgtacttatcgacaggaaggtattcgagcctaagccgcatgctgctgaagtggacgctgtgttcgacgttccactggaaatgtgacattaaggatgaaaatcgaattgctcaagagagagaaatgctgggagaaaagtatcttcttcacttctttgactatgaaactgagaataagaagtatctaatttggggtttaactgctggcattttaatcagagctgcttcagtggtctaccagcgaccaccggccttcccggaacagagtcccaagtatgaatttcttagggatgtgggcaaaattaccgacgctcattgaatatagtctaggaattttaagcttgccttgtattgcaatggggcatcttcaaaagtaataatcttgcaaaaaatctaaacagagattcattcaaagcaatctttcccttcgtttactcttctttaacaagattaga

SEQ ID NO: 197219 - DNA, 410 bp, Gossypium hirsutum
accgctctatctttgaacagacttgtttgatggccgagcagagaatggctgcagagggttgtaaacactgtaatgaaacgatttagatggggatttgtgcttgctggttttattgcactagccatggcagcaataagctggaatcttgaaagcagtcaaagttactggatttggcacagtgtttggcatgttgccatatattcatcttctttcttcttcctctgttcaaaagtaataaccataaatagtgggaacagaacacccaccgacgcaaactatcagttgactcagcaggattctctctctcaaggtgcataagaagaaggaagaattttcagagaattaaagttcacataaggaaaataagttactattaaaacatgcaggaaaaaagttttatctggcaatat

SEQ ID NO: 197220 - DNA, 451 bp, Gossypium hirsutum
gagaaaaaaggagtcagatggaggtggaacgagtccaagccattgtttcttcatctcgggctaaagacaatatcccactagagtttgttcgacccgaagatgaacaacctgcaattacaacatttcatggtctcatccctgacatccctgttatcgatttcaaccaccctgatcaggatcatatcatccatttgattgccaacgctagcagggattgggggatattccaggttgtgaaccacgggataccctttcatctaattcaaaaactgcaacaagttggaaaggagttctttgatctccctcaggaagagaaagaagtgtatgctaagccacccggtgcactcacccttgaaggctatggaagcaagatcgggaaagatgttaatggaaagaagaactgggctgatcacctttttcataagatatggcctgcttcatgcattaacca

SEQ ID NO: 197221 - DNA, 555 bp, Gossypium hirsutum
  unsure (1)..(555): unsure at all n locations
cccacgcgtccgcagagttttttttccatagaaagcgaagaaacttgaaaacgacgacgtagtgagaaaaaaaaaaaccatgtcttacgattatcttttcaagtacatcatcatcggtgacactggcgtgggaaaatcatgtttgctcttgcagtttactgacaagagattccaaccggttcatgatctaaccatcggtgttgaattcggtgctcggatggtcaccattgatggcagacccatcaagcttcaaatctgggatactgctgggcaagaatccttcaggtccatcaccagatcttactataaaggagcagccggagctcttctggtctacgatataaccaggagagagacatttaatcatctancgagctggttggaagatgctcgtcagcatgcaaatcccaacatgacaatcatgctaatcggaaacaagtgcgatctttctcaccggagagctgttagcaaagaaaaaggtgaacagtttgcaaaggaaaatgggcttttattcttggaagcatctgcgagaacagctcanaatgtcgaggagga

SEQ ID NO: 197222 - DNA, 547 bp, Gossypium hirsutum
cccacgcgtccgacctgctgaagctgcaacccctgcttctgcaaaaaaggctaaatgtgcggttacacctcagaagacagatggtaagaagggtggacacacagcaacaccgcatccagcaaagcaatctgggaaaaattctgcaaagtctccaaagtctggtggtcaattctcttgtggttcttgtaacaagtcgttcgggtctgagggcggtttagagtctcacaagaaggccaagcatggtggcaaatgaggtcgggtttacatgctctaatgtgcatgtttaattttgggggagagatgtttggcttgtggttttggttctttttattcttactagtaaaatgagtgatttatggattagaaaagacttcgggaaggtccttatgattagaaactatcgtcatattggataattattatgattatattttaggatgtgtaatgtttgcttcaaattttgtctgatttgcattctacatgcgtgatccttaaatggaaggtttatggttttccggaagtctgtgcttatataattggagttttg

SEQ ID NO: 197223 - DNA, 517 bp, Gossypium hirsutum
cccacgcgtccgcccacgcgtccgcccacgcgtccgcgaatacggtctctcggacgagaacaaagacttccagctatcccaaagagagcagctttatagaaccattcaggacatcatttataaatctgcaaagaagaaagggtcgggggcaggtgctttaggctggcagttctttgtagaaggaatgcaggaatatagtgatgatttcgggatggtaccatggcagtccccgccaatttacaaactcaccatagaacactcgtgcaaattggctagaatccaaggacttattcaagaaaacggaaacctcaaacaactgtgttccaagagaaagtaaagctagcgcttgctatcagaaaattcaattctttctggtgaggtaatttgtgcgagatatatattggtattggatcaatttttttcttctaatatccatacaaattactatgtattaagtagagagccatatatatatatagcacatgattgcaagttcgtgcaaaaacttgggtgaatc

SEQ ID NO: 197224 - DNA, 449 bp, Gossypium hirsutum
cccacgcgtccgaacgcagcaaagcaatagcagcagggattgaaagcgagaattcgaaatggcgcccagggccaccaagcgaaaggcgatggagggggacggcgactgctaccaacccaagccccaagttaaggaaacgttgaaaagagtgactaggagcatggcaaagcagccgcaccccgagtctctgcccaccaaggagaagccaaaagcgaaggccaagaagcagaataaatctgcagatgaggatggagccaaagccgaagctgcgcctgaggagttggccgtcgctgacggtgggtctcacatcaagactgtagtggttgaacactgcaagcaatgcaattcattcaagacaagggcctttcaagtcagagatggtttggagaaaggtgttccatgggtcaaagtgttgctcaaccctgaaaagccaagaagaggttgctttg

SEQ ID NO: 197225 - DNA, 678 bp, Gossypium hirsutum
  unsure (1)..(678): unsure at all n locations
ggcccctagaatcctccataactgttttctagtttccatccaagggccaccctctcagctgggcctaacactaatcctaacaccaatttcctctcccccaccgatcaatctaatcacgaccgggaatctatccctcccatgcaacatcacccttcttccgaaacggactccgatgctaaccctaattttcactccccacttttgaacccccccgattcggttcctccagccgtggctccgtcgtctcttctccacctctccttcaaccaggatcatggctgctttgccgccggcactgaccatggcttccgaatctacaattgcgatccatttcgcgagatctttcgccgagacttcgatcgcggtggcggtatcggggttgttgagatgctttttcggtgtaatattttggctcttgttggtggtggacccgatccgcagtacccgcctaataaggttatgatctgggacgatcaccaaagccggtgcatcagcgagctttcgtttcgttcggaagtgagatcggttcggcttcggagggaccgaatcatagtcgttttggaacagaaaattttcgtttacaattttgtggatttaaagctcctacaccagattgagaccatcgcgaatccaaaaggactctgcgcggtgtctcnaggagcagcatcattggttttg

SEQ ID NO: 197226 - DNA, 406 bp, Gossypium hirsutum
  unsure (1)..(406): unsure at all n locations
tctttacgcgtccgcccacgcgtccgacctaaagaagattgctgagaagatgaacggtgcttctggtgcggagcttaaggcggtttgcacagaagcagggatgtttgctttgagggaaaggagggtccacgtaacacaggaagattttgagatggcagtggcgaaggtgatgaagaaggagaccgagaaaaacatgtccttacgaaagctgtggaagtgattaagctttattttcattattgtgctttgctttctttgttacgggcaaaaaatggatggaacgtgtaaaactagacttatacagtgacattataataccgtgcgcctgttttctttgacaaaagcctgtcctacaaaatttgcaggtaaaggacttagatttttatgnnnnnnnnnnnnnnnnnnn

SEQ ID NO: 197227 - DNA, 495 bp, Gossypium hirsutum
ttaggacttgtcagttattccgggaatggatgagaatgctacatttcttgattcttccaatttactaaaatgtaaggtagatgaggtgatgagcattgaagagctaaatgaatgcattgcaattgaaacaaggaaggaatttcgcaaaaggctgcgtggaaaggatgccttagttagaagtagtaagagagcaaagcagatgatgacgaagacgaagaaacagcagaagattattatccaggatttacgttccaggatgataagtagaaagttttgcaacttcatcacttgtagtgtatagccattcaaggataataacttaatttttttggccaagagaaagcatttttattaagcttgaaaaactcaataccaagaacatttgaaaactgaatacccccattcggagaaaattttggggaagttaaaggttcttatggagattagaagaaagaatcagatttaaacttaataattcaaagtaatattcccctc

SEQ ID NO: 197228 - DNA, 568 bp, Gossypium hirsutum
cccacgcgtccgcccactcgtccgcccacgcgtccgcccacgcgtccgcccacgcgtgcggccaaacgcttccttactttgattctatcgtcgattcaaagcagctttcttatccatggcgtctacatttttggcactacccaaaaccttcacttcaaacaagcctaccttcccttctctttcaacccacaaacttcccgggactcgaagaaattcacttagaatcaatgctgtggccactaaatgggagcccaccaaggttgttcctcaagctgacagagttcttatccgtctccaagaattacccgagaaatcagctggtggagttttgttgcccaaatcagctgtcaagtttgagaggtacctgatgggggagatagtttcggtcggtgccgaagtaggaaacgtggaaactggaaagaaggttcttttctcggatataaatgcttatgaggtggatttgggaacagatactatgcatgtgttttgtaaagagagtgacttgttagcttgaattgattgaagtttttctggtcctttgtttaagatgaaaagtcaattgtatttc

SEQ ID NO: 197229 - DNA, 797 bp, Gossypium hirsutum
  unsure (1)..(797): unsure at all n locations
cttagttggaggatatgaaaatagttgcaacgggtgtatgttgccaatctcggatccattttattactgttcagaatgtgtttttttccttcataaagcgtgtgccgagttaactaagatgaagaatgtttggcatcatcattgccaagagcctctttcccttatttctgacaaagcttttgagtgtcaagaatgttggcacatatctaatgcctttgcttatgaatgttgtggatgcgaggaaaataaatgtctccgatgtgtgattgctcttactcctggtgctcgaacatgtttgaaacatgttcaccccctctatttctacagagactacgacggtcagtgcaatgcttgtggtgatacaacaaggggatatggggcattttgttgtaaggtccgcaattttgtgctacatcttcgttgtttttcacttccaattacagctcgtcacaaatgcgatgagcatcttctttcactcactgatcatgatgataacagttattcagagcgtcatcattgtgatatctgcgaagaaagtcgagatccaaatcgttggttttataattgtgcaacatgtgatacttctgctgatcgtaattgtgttcttggagaatatccattcctcanactcaggagcattcaagaaggaaatgatcatccacatccactcacctttgtgaagaagaagtattactacccagattgtgataaatgcggtaagccttgtgaaggtgtggctcttgaatgctcaaagtcggaatgcaaatatattgtccactggaaatgtgtaggagaca

SEQ ID NO: 197230 - DNA, 417 bp, Gossypium hirsutum
  unsure (1)..(417): unsure at all n locations
gcaaagaagctggaattgcagatggnggaagatcgngacgatagctngcaatcgaaggaacatatcgaagcgagcttattgagcaaacacatagctgcaatgagacgagaaagggcaatggcttattcatttactcatcagcaaacttggaagaatggttcgaaatccatgaatccgttattcatggatatgaacaatccgacatggggttggagttggttagaacgggggatggccgctcgaccatgggaaggacatggcagtgacgggaatatgaaccgatcatcgaccatgtcatcggttatgatatgcacatttctgaaggagaaatcagcttagcttaacgctcgtactcaactcaattggataataaacaatccccgaaatcaagccaaaagccaaaccgaacatcaagtc

SEQ ID NO: 197231 - DNA, 690 bp, Gossypium hirsutum
tttcacgcgtccgggaaatacaaaggacttcgctgctattctcaatttcaatttttatcctaaaacgcttagaaaaaaaaaaacaactaaaaagatggcgaggagaccggacgaggaatacgattacttgtttaaggtagtactaatcggcgattctggcgttggaaaatctaatttgctttctcgatttactcggaacgagttttgcttagaatctaaatctaccatcggcgtcgaattcgccacccgcactctccaagttgaagggaggactgtgaaagctcagatatgggacactgctggtcaggaacggtacagagcaataaccagtgcttactatagaggtgctcttggagctcttctggtgtacgatgttaccaagccaacgacttttgaaaatgtgagccgatggctgaaagaactcagggaccatgcggattctaacattgtaattatgatgattgggaacaagactgatctgaagcatctccgagcagttgccacagaggatggtcaaagctatgcccagaaacaaggcctttcatttattgagacatctgcactagaagcaatacttgttgagaaggctttcccaaccattccctctgaattattccgcaaaattagtaacatgtcaccttcttcagatgaaccccccccccctttttttaagaaaggaagacccttgac

SEQ ID NO: 197232 - DNA, 257 bp, Gossypium hirsutum
  unsure (1)..(257): unsure at all n locations
gaaacttgattaggcagtaaatccatgggttgggagcctgcccttccaagatttccatcaaatgtagaatgtgagatgcaaataaaaataaaggctatcaaataaccgaaaatttcccattacggggacttggtagtttcccccttcaatttagttgtgcagacaggctttgtctgctagtgaagaaccaagattattattttgagaaatgcagtcaattttttccatcggcaaannanaanatttatataaaaatg

SEQ ID NO: 197233 - DNA, 727 bp, Gossypium hirsutum
ccttctcttccgcccacgcgtccgataggcacaattaggagttccttagttgtgttgtaggagccaaagataaaaaaatggtgaagatagcttttggtagcattggtgattcttttagtgttgggtctctcaaggcttatttggctgaattcattgctactttgctttttgtgtttgctggtgttggatcagctattgcttatgggaagctaacgtcggatgcagcactagacccaccaggcttggtggccatagcggtagctcatgcacttgcgttgtttgttggggtagccattgcagccaacatctcaggtggtcatttgaacccagccgtcacctttggtttggccatcggaggaaacatcaccatcttgaccggccttttctactgggttgcccaatgccttggctcaattgttgcttgccttcttctccagtttgttaccaacggattgagtgtaccaacccacagcgttgcttcaggaatgaatgccgtcggaggcgttgtaatggagatcgtaatcactttcgccttagtctacaccgtctacgccaccgcagctgatcccaaaaagggttctctaggaatcatagcacccatcgccattggtttcatcgttggtgctaacatcttagccgctggtccattcagtggtggttcaatgaacccagctcgttcttttggaccagccgtagtcagtgggaactttgctgataattggatcta

SEQ ID NO: 197234 - DNA, 465 bp, Gossypium hirsutum
cccacgcgtccgcccacgcgtccggattcaagcacaagtgatggcccttcgggatggcttcgtctttcattgtatgggaattcacactctgcaggttcagcaaagacaaataccacggggagttatgcttcttccttgccttcgaacctttgtcgccacttctcgtttgctgagatcaaggctgccacgaagaacttcgatgaggccttagtccttggggtgggaggctttggtaaagtttacaaaggtgaaattgatggtgggactactaaagttgcgatcaagcggggcaaccccttatctgagcaaggtgtgcatgagttccagactgaaatcgaaatgctttccaagctccgacaccgccaccttgtttcgttgatcggttactgtgaagagaactgtgaaatgatcctagtttacgactatatggcttacggaactctgcgtgaacatctatacaaaaca

SEQ ID NO: 197235 - DNA, 518 bp, Gossypium hirsutum
  unsure (1)..(518): unsure at all n locations
tcgattggttcgactagtgcagcgagctaacatgagcaagagaacaatagggacggaccaaggcgcatctccacgaaccaacaacactgatgaacaacatgactacatgtcttaaattgctgtactgtagtagccttgcattttgaatgtaatcatgttgaatgtttttatttgattgcaagattactatataaattccaccccagctgtagctccagtttcaagctagccctgcattttgtattatgctgcaatacagtacttaccaggggcagttaagtgcccggcccgattttaaaaaattccaggcctgagactcagcccggccaggtctgctcaaaaagcacatattattgtttgaaaataataaaataacacattttttaaaaaaaaataaaatatttattatattttataatatttaataattattaaaaaattttaaataatattttaattttaattaaannnnnnnnnnnnnnnnnnnnnnnnnnnnnnnnnnnnnnnnnnnnnnnnnn

SEQ ID NO: 197236 - DNA, 570 bp, Gossypium hirsutum
atttggattatgttggttatctttatcaaaggatggaaccgctctcggagcaagaacggattgaacttggttatagggattttttacaggctccattgcaacctctgatggataatctggaggctcaaacatatgaaacatttgagaaagactcggtgaaatatattcagtatcaaagggcaatctgtaaagctttactggatagggtccccgatgggaaggcatcagcaataacaactgtattaatggttgttggagcaggacgaggacctctagtgagagcagcattgcaggcagctgaggaaactggacgcaagcttaaagtttatgctgtagaaaaaaacccaaatgctgtggtcacacttcatagtctggttaaactggaagggtgggaaaatgttgttaccatagtttcttgggatatgcgtctttggaatgctcctgaaaaagctgacatcctggtcagtgaattgctgggatcttttggtgataatgagctgtctcctgagtgccttgatggagcccaacggtttttgaagcaagatggaatttcaataccctcatcgtact

SEQ ID NO: 197237 - DNA, 398 bp, Gossypium hirsutum
  unsure (1)..(398): unsure at all n locations
cagtaatgttcatccggtcgataacgtagctgtttctgatgaactcgaagtccgagtttgagtggagaaaaccaccacgcttgctgatgattcctagcagagtctgcttcccctgagaaaatcattaatctctggtgcaagtataccccaagttctgatccatcaggtatggaaaataaatcagcattgggtctctggcaatcaagattctactttccgaggagcgtgatgtgtgtaattcttttataatgggggcagctcagccccccacttgaaaatcatttttaaccttttgggtctattattgtaattactaccaatttgagaaaataattttaacctttttctctcccannnnaaaaaaannnaaaaaaaaaaaaaaaaannnnnnnnncccc

SEQ ID NO: 197238 - DNA, 633 bp, Gossypium hirsutum
taaaggctggcaggactacaatactcttgagcatcatcatgaacagaaattgcgtgagcggctacttgtgaatgggaaccagcagtttagcttactgcctgggcagtatccaggacaatcagcctggacaggtccttattttgtgtgaaatcaatatgcaagtgtagctggtgagaaggaacttcactcattttccacctcttggttttgtaatttgattgtaatgctttctaaactccttttcacataacctgttcattctagatttgtttttgttctcaaggttcttgagaatggttactgtgaatgtattgcttccatttgcctgccaagttcaagtccaactttgaggcactgtcagtgttgagtttttgatggagcatgggaagcattggcttccagcaggcacttgctgctagacaaatttagccagatttgtagaggaagattgaggaaatcaatcaatcttatgagatgcggaatttgcaagggagtaaatgccttaaccagtcactttgggatggagatagaaggcctaaataaagatgatctgttgatttttgaggctatctatcttgaggagttttggtgaaataaacttggtttagtatgctatataactttccaaatgtc

SEQ ID NO: 197239 - DNA, 596 bp, Gossypium hirsutum
  unsure (1)..(596): unsure at all n locations
cccacgcgtccgctaagactgtagacgcatacctggcggagatagcaactgcagttgaacttgccatctccaagttcaacggcatcgccaatctcgtccctaaaggagccagaaaggtggaggatgatctctaccgggccattgacgtctacctcaagtctcatccaaatctggacgagatagagagggagaaggtagcctccgccatggaccccctgaagctgtcctatgaagctcgagtgcatgcatcccaaaacaagcgcttgcctgtgcagattgttttgcacgcattgtactatgatcagctaaagctaaggagtgggggggcggatgaccgcaaccagccagacgccgtgaccaccaggaatcagttgcaggcagacgtgtcgctggtaaaggagaatgaggcattgcgaacggagcttttgaagatgaagatgtacatatcggacatgcagaagaacaatcaaactggaactagttcaaagagcgttgggaccagaaagcctaccttcttctcttccatgttcaagactctaggcaagctaaatccctttcgacatggcttcaaggacactnttccatatcgatgataa

SEQ ID NO: 197240 - DNA, 541 bp, Gossypium hirsutum
tctctttgcgtccgtggacgcgtgggtctgtgctggggatcctttgacgggatcttgggttttcagaccgtccgcggagtattcattggttaggcatctatttgtagttggttctaggggctagagatatgaattgggcccaacgcaagatctatctctacaatgacacatttggactctacatgttggattggtgggagcgttaccttttcaacacactggttattgtgttgatgtggttcatcttttacaacagctcgcgatatgtcacggagttttacaagaggcatctatcctagggttgcgaggcggcaggggtgatggaagtgtgaaatacttttgaattatttggctgaaaatcttgcttatatgtggatttttcatacaacatttttagcatgtctcacatatattgtcgtactgttttcaaagctattccttgcaaaaaatttaaaacattgtcgctgttgtaactattgttgaaactcttctacaattttaaaaattataattagaagtaaaagcactttttgtccaaaaa

SEQ ID NO: 197241 - DNA, 432 bp, Gossypium hirsutum
  unsure (1)..(432): unsure at all n locations
gaccacagccgtccgccacacccttcgattccaaaaggagctttgtactttcgttccgatcaccggaaccgtaattttcgggaccgtcggcggcgtatgcaggggttaggcagcgagggggatttgtttttaggggttagagatatgaattgggttcaacgcaagatctatctctacaatgtcacctttggactctacatgttggattggtgggagcgttaccttttcaacacactggttattgtgttggtgtggttcgtcttctacaacagctctgcgatacgtaacggtcttttttcaagaggcatctatcctagggttgggaggtggctatgtttatgtatgttataannnnnnnnnnnnnnnnnnnnnnnnnnnnnnnnnnnnnnnnnnnnnnnnnnnnnnnnnnnnnnnnnnnnnnnnnnnnnnnnn

SEQ ID NO: 197242 - DNA, 612 bp, Gossypium hirsutum
gcttaacaatcttttgatggaagtggaatctgcattaggagaatccagggcaaaggggaagatagtagtaggtcaccatgcaatcaagagtgcaggacaccatgggaacgctaaggagctcaacatttatctccttccacttcttcagacatacgacgttgatctttatattaatgggcatgaccattgcttacagcacataagcagcagggacagtggaacccaattcgtgacaagtggagggggatcaaaggcatggaggggagacgtgagttggtggaatccacaagaactgaaattttatcatgatggacaaggtttcatgtcagtggaaatgactcccactgaagttagcattaaattctatgacgtttttggtaatgttttgcacaattggagcagttccaagcaactttcttttgctatctaagccaacgttttaagcctttaaaacaccttccattgcctgaccaaggagctgccatattcagaagcaggggaaatgaataggagacgaactctgttaatatgttttctttggtacaagaaagttagatttggaagtataagcgtatgttatttttaaaattatatgcaagaatcaagtaagct

SEQ ID NO: 197243 - DNA, 573 bp, Gossypium hirsutum
gttgaagttttccatctcaaacaaaggttgcaatcaatggagaaccgagcacccactcctaggaaaccattcaatgtatagtatctcagatcagatcttacccattgtggtcattcatgtatctatttgccatacgtgatccctggtacatgaaaaactgtcgaacctggccggagtcgagcctttgtctgcaaaacaaagcatgagatctgtattctgtagtctacctcattcccatgtaaatataaacaattaagtcgcatgtttcctcgtatgtatcctgtttctagttcaaagacaacgggcgaacttacagcaaggttgcggttagagttggaaaattggtgctgctgaggagttttagcctgtttctttgcctctcaattcaatgcaaaacgtgtgttcaattgccttggaacttattctgtatatttattgcaagatctcattttgtacatcttattcttgccaatgtgcaaagaattcgaatccatcattttcagttttacattcttagcttttgttgtgtcttctttcaagggttcatttgttcaatggtaaaggttttttttt

SEQ ID NO: 197244 - DNA, 472 bp, Gossypium hirsutum
gcacatcaaccgcttcacttttccttcttttcatcttctcaatcacaccaccgtcctttgggttcgagggggccaacgctacaaattatcctgtgctcgacatcgatggtgactggctccgcacaggcgttgaatatctacgttgtgtcagcgtatttttggtgctggcggtggggggcttgccctaggcaggtctaccaaacaaccatgcccggaaatcgtcgttcaaagacgatccgatttcgacaaaggtacaccggtgatattttctaatgcagacaccaacgatactgtagtccgcctatccaccgatgtaaacatagagttcactcccatcaggaccaaactctgccgaacaacaacggtgtggaagattgacaattatgatgattcagccgggaaatggtgggtgacaaccgatggggttagagggaaccctggtcccaacactttgaccagttgggtaaaatag

SEQ ID NO: 197245 - DNA, 552 bp, Gossypium hirsutum
ttccacgcgtccggtttctaattgatcaaggttatagctttaaggtgataacaagcttgcctccttctgatgctggtgccgacttgagttactaccatctcgatgagcagttggctcttttaggaaaggtcttgactgctggtgatgatgcggttggtttggagcagttagaagaagatgcagatgatatagcccttcacaaagctcgtcgctctatgggatccatgagtgcaatgtcgggtgcaaatggaatggcctacatggaatacagcactggaaagcataaacttatggggcatggccagaataagagtaaacctaaggatccatccaagcggcatcatttgtttaagaaacgctttggttgagatgaaagccaaaccatgcagaatgatggttgttttatgacaatctacgaggttacttcccgcattgttttgtttaagagatgctatggtcgagatgaaaagcataaacccgaattacgtttggtttatatatatcatctaagaggttccaagaagaagaagaagaagagttttatttcttcag

SEQ ID NO: 197246 - DNA, 706 bp, Gossypium hirsutum
cggacgcgtgggctaccatagtgcgattgtttggtacgaaaccaacaaagaaaagcggacagtgaggagcaacagcagcaacaatggtgaagttcctgaagccaaacaaggcggtggttgtccttcagggtcgctacgccggtcgtaaggcggtgatcgtcaaatccttcgacgaaggaacccgcgaccgcccttacggtcactgtttggttgcagggattaagaaatacccaagcaaagttatccgaaaggactcttccaagaaaacggccaagaaatcccgcgtgaaatgcttcctcaagctcgtcaattaccagcacgtgatgccgacgcgttacaccttggatgtggacttgaaagatgtggtcaccgtcgactccctccaaagcaaggacaagaaagtctctgcttgcaaggctaccaaccaaaaactcgaggagaggtttaaaactgggaaaaacaggtggtttttcacaaagttaaggttttgagatctgggtggctgttattttggattgattttgagagtttatttagtgtgttgaccacttgtgttatcatcacatattattgctggttttgagcatccctttatgataaatttgagctttgctttatgataaaagttgcaaattgaggggatgtggttttcaaaaaaacatgaagctttaggcaaatggttaagaaaaaaaaagagagctagttt

SEQ ID NO: 197247 - DNA, 691 bp, Gossypium hirsutum
atacgattactgttccttattctttgacgctttggcctcctctccgtccttccatcgagcagtgcaaagatgtttttggccctgatatcgccgtctttagtaactctgctggtcttttagagtatgattatgatggttcaaaggcgaagaaactggaagggactattgggattaaagtaataaggcacaaggtgaagaaaccagctggaacagctgaagaaattgagaaacactttggatataagtcgtcacaacttatcatggtgggtgatcggccctttacagatgttgtttatggaaaccgaaatggatttttgactatattgactgaacctttaagtgttgttgaggagccattcattgttaggcaggtgcggaaactagaactgacccttgtaaattggtggtttagaaggggtctgaagccagttagtcataatttattatcagatgccacacagtgtgtgaaagatccacatcccctgtaagaatgttgtggattggatataagtggaagtaattgtttatgtagctgatgacaaattttttagtcgtgattatttgcttttgccaaccatctgaattcattaattctttcatttagtacatcataacacattaactgttatattgtatgttatagttccctctaaaaaaaaaaaaaaaaaaaaaaaaaaagtcgacgcggccg

SEQ ID NO: 197248 - DNA, 548 bp, Gossypium hirsutum
gcggccgctcgcgatctagagaagctaaaaaaactgaaaccgaaaattccaaagcaaagccagtgtcacaagagtccccacctttaaagaaagagagtgaagaagcttccaaaaatgaagtcgaagttcctgaagccaacccagcttcacaagaagttccaccattgaagaaagatagtgaagaagcttgcaaaactgaaataaaagattctgaagcaaagccaccatcacaagaagttgaaccagtaaagaaagatagtgaacaagctttgaaaactgtcgccaaggactcagaaactgtggcgcagtcttccgaagattctacaacaaacaaagataccgaagaagcagcaaaaacagagaattcggtcaagggttcggaaattagcactaatgaagattgaagatggtaacagggacttcaaatcatgatgtttggactttaaccagccatagacatgaaatgaagaaagctttcagcctctacaatatatgtggattttttttcctatattctttcatttcggttgaatttttggattaatatt

SEQ ID NO: 197249 - DNA, 607 bp, Gossypium hirsutum
gtcgtatgttgggccatggaactttcgctaaagtctaccatgctcggaatcttcagagggggaaaagtgttgccatgaaagttgttggcaaggagaaagtgattagagttgggatgatggagcagatcaagcgagagatttccgtcatgaagatggtgaaacaccccaatattgttgagttgcatgaagtcatggcgagtaagtccaagatttactttgccatggaacttgttcgaggcggtgaactcttctcgaaaatcgccaagggtcggctcaaggaagacttggcaagagtctatttccaacagttggtttccgttatcgatttctgtcatagccgtggggtttaccaccgtgatttgaagccggagaatttgctcttggatgaagatggctgcttgaaggttacagattttggtctcagcgctttctctgagcacttgaaacaagacgggttattgcacaccacatgtggaacaccggcttatgtggctcctgaagttattggtaaaaacggatacgacggagctaaagcagatctttggtcttgtggggtaatcctttacgtgcttctcgctgggttcttaccatttcaagatgataatat

SEQ ID NO: 197250 - DNA, 263 bp, Gossypium hirsutum
  unsure (1)..(263): unsure at all n locations
ctttctttattacttttaagatcatatcttgtttaattttgtttatctgtatggttttggagaatttacggatattttctatcagagattggtggggaggttaattttagatgatgttaacatttgtgggtcatctttatggctatatatgtgatgtttagttatatcctctgtttgtcctttatattgtattttttttcgtaatgcaagtcttggtgttttgcttannnnnnnaaaccataaaacataaaaaantataacat

SEQ ID NO: 197251 - DNA, 530 bp, Gossypium hirsutum
  unsure (1)..(530): unsure at all n locations
gacgaccggccgaatcccggtcacccaccgtcggggaaggttacattgtgtgttggagtaagagacagcagattngacattcaagttggaggtgggtcctgaatggggtcaagggaagccggtgattcttttcaatggatggattggcatcggcaaaaacatgcatgagggcggaaaaccaggagctgagctgcatttgagagtacaactcgatcctgatccaagatacgtgtttcagtttgaagatgtgaccatgctgagtcctcagatagttcagcttcgtggttccatcaagcaaccaatttttagttgcgaatttagtcgagacaggttatgtaaaactatataatttcatcgtccatcttccattggttgagttcaattttaaaagagctgcaattactcagtttttaaaaaactatatttggacacctttaaacaactcttacaacccgncgttaaatataatttttattttttatttttaaaaatggattataattttngtttttttggttttttttttttta

SEQ ID NO: 197252 - DNA, 934 bp, Gossypium hirsutum
gttttgttctcaaggtggaaacttctctaaaggtgaattacaacggtttgggaatattgaattaaatccctcagctggggtcttaaattatgggcagggattatttgaaggtctgaaagcctatagaaaagaagacggtaatattcttctttttcgccctgaggagaatgctcttcgaatgaggcagggtgcagagaggatgtgcatgccagcacctactgttgaccagtttgtggaagctgtaaaggaaaccgtcctggcaaacaaacgttgggttcccccaccaggtaaagggtccttgtatatcaggccattgctcatgggaagtggagctgtacttggtcttgcacctgctcctgagtacaccttccttatttatgtctcacctgttggaaactattttaaggaaggtgttgctccaataaatttaattgtggagcatgaattgcatcgtgccactcctggtggcactgggggtgttaaaaccattgggaattatgctgcggttctgaaggcacaatctgctgcaaaggccaaaggatattctgatgttctctatcttgattgtgttcacaaaaagtatttggaggaagtttcttcttgcaacattttcgtggtgaagggtgatgtcatctcaactcctgcaataaagggaacaatcttacctggcatcacaagaaagagtataattgatgttgctcgaagccaagggttccaggttgaggagcgttttgtgccagtagatgaattgcttgatgctgacgaagtgttttgcacagggacagcagtagtagtgtcgcctgttggcagcattacatacaagggtaaaagggtgtcatatggcgtaaatggttttggggctgttgcacaacagctctactctgtgcttaccaaactccaaatgggtcttataaacgacaagatggactggaaa

SEQ ID NO: 197253 - DNA, 464 bp, Gossypium hirsutum
caaagcttaggaagatattggatggcttatgcaaagggtaactgcggtacttgtagttacttggggacattccgaactacaaagtgccagagtggttgtgaccagccaacccaaagatggtaccacgttccaagatcatggctaaagccaacaaaaaatttgttggtagtctttgaagaacttggtggagatgtatcaaaaatatctcttgtgaggagatcagttttataaacattgcctagacaacaccacaagtctgggagctgggaaggaaaacaaggtgcaagaatataggtggagaagacatcccaggttcactggctaaattctttttcactatttgtttatttggttacttaagcagccggcattaaactcaccatgcattaaaagaatgctcttgtaagaaaatggggctgatgggaaactaaccctgtaatatctgaggttgaaaaaccattttt

SEQ ID NO: 197254 - DNA, 500 bp, Gossypium hirsutum
tttattcgtccggaaagtgttgaataaaaaacagaaaaaaaaaaaaaaacgaaaaaaaggaagtaaaaaattgtaaccgaggtctgtaggcaatgtcgaggaggccagtgaatccctctagacgttacggcgatgccggcggcggagctgctctcttttcgctgtctaaatctcgttctccgcctttgctctccattgttctcattgtcctgggggcattgcttattgttgcgtatttccatagcggatcaggatctggaggcataaggagccttgtttccagagttgaaggtgacttttcctgcacatttgaggttctacgggcgcttcctattctgaagaaagcttatggtggtggcattcataaagttttgcatattggtcccgattcttgttcagtggtctcaaatttgttaaaagaagaagaaactgaagcttggggggtggaaccatacgacattgaggatgctgatgctaactgcaaaagactagtgcgtaat

SEQ ID NO: 197255 - DNA, 568 bp, Gossypium hirsutum
ctcaattagctcacaactgcctccaccgggacccaaaatcccgtcctacaatggatgaagtagtgaaagttctcactccgttgcaagaccttaatgatctcgccatcttatcctaccactctcgtctatctcaacaagggaggcgaaagaagaaaccagagggatctcagcaactctccaacactcaatctaaaagcatcagcggttctcctttgaatactggcaaacagaggtgtagatgatctgtaaccgactcctgccatcattggctcagctatcaaatgaaaacagatgttgggatgccatggtcgcattttcgattgtgtgaagacatatatgtcaggcttggttgtgcaatttcagggagtttgaaaactttggtagaggtaaaaccaatttattacactagatagctaaccatccccactgttgtaattgaggagtatctcttgtaattagatcaaacctcccatttgaatgactggtatttgcagctacccgaatgtctaatttcttattgagttttggaacctgcagtatgtttctccattgacacttgtatgatttt

SEQ ID NO: 197256 - DNA, 378 bp, Gossypium hirsutum
gcataatttgcattcaaaattccttgttcttaatacaaagggggggaaaacccataaactgaatcataattttctttccttcatatttgttaacaatttctctgcaattctacaaaaaaaaaaaaaagcttcctgcaaatgaggccttcctgtttagaagcagtctgttttctggtgttgttcattttcctttatagcgttgaagggattcgattggagggaagttttagatcatcaggacatgatcttaaattgcatgaagaagctttgatgaaaataagcaatggagttatgggagatgtcattttctgcaaacaagggcaatgtagaggaaacagtagaaaacttcttacagcaactactactgcaactaccact

SEQ ID NO: 197257 - DNA, 301 bp, Gossypium hirsutum
aagatgtgctctgcagaatgcttcttcagttgcaggaatggtccttaccactcaggccattgttgttgagaagcccaagccaaaggcttccgccgccgctgctccatcaggtcttgctgtataatgagtaggatatatgcgctcattaggttttctgaagatgaagagcagtattcttgccgtgaatcacaagaaaatgccggatgaatagagattgtccttgtaagaaaattttccttttatttttgtttttctcttgtatggactaataacgaaacagctttatcttgggatttgcgaa

SEQ ID NO: 197258 - DNA, 353 bp, Gossypium hirsutum
tcccacgcgtccgattgcctcaatcttcaactgcaatttcttcacatgtttgaggtcgacggtgacggcggcatcaacggtgacgatgaggatggggatatatcatgatcgttgaatagtagctgttcaatcagttgggcaacttaagactcttttggcagttcatcaagaatggggatcattgtggctcaatccaagcgtataaatgaccggataatagttaagttattttcagcatttgcctgtactatttagtatttatgcctgaacttgagctttcagaaatgaaagtgaaaacattagtggttgaaactaatattattagagctctttttgcaccttaattctgccgg

SEQ ID NO: 197259 - DNA, 1171 bp, Gossypium hirsutum
  unsure (1)..(1171): unsure at all n locations
gcacaagattcagctttctgatccattcttgtcaaccgtgaatgtgattcatccaaaaaaaggaggagagggttttcatgcaaaaggaaagttacccatttgttgttttgtttgtttagatgccatggcttatccacattatcgatcaccttttggtgacacaacgtttaccaaagtgtttgttgggggactancttgggagacccccactgaggaaatgcgtaggtattttcagcagtttggagagattcttgaagctgttatcatcactgataaaaacactggcaaatctaaaggatatggctttgttactttccgtgatcctgaatcanctcggagggcttgtgttgatccaaatcctgtgattggtggaagaagagcaaattgtaacattgcttcactcggaaggcctaaaccttcaccgccacgaggaagaaatcaaggtancantccttttcagggagttgcacagcaaggtacaccgtcgtatagtggagttgcancagcagtgcctccaccaccaccgccgccactaccacctgtcatttatccaccatatgggttcccaacttacagtcctgaatacgggtatcaccaagctctctataatccacaaatccagcaggcacaatactatcatcaactgtatggttcatcatcaacctcaatggggtctccatattattttggctactctttgcaagctcccaggggaacattttctgcaccccaggctcaacgtatccccggaccgtcctatctttactatcctgcacaaatggaggggtccttctccacctatcctcccccaccttttcatcccactaggcatccaattccatctcctgcagattcacagactcctcaacctacctccacagaatcagaatctggggccatcacttctgaaagtccaaaaacctaaagggaagaactcatccctgatgccaaaatgttcaaattgtacaatcttgataagttttttatgcccttcttatcacctcatttcactcttatattctcaacattttagccatagctgactactgcatcaagttactgctatggcctaaggtaagaaaaggaggactaatcaaccacccttatgctgatttttttcccccttattctatttttttccccaaaagtttttatcttaagttattcattc

SEQ ID NO: 197260 - DNA, 726 bp, Gossypium hirsutum
  unsure (1)..(726): unsure at all n locations
tttctgctccactaggatccaacactggagggggttaattaatagattcttctttaagaggggctgatatggccgacttgagaagcaccgctcttcgaagtagaaggtatggatccccttctcagtatcaaggcggagcaactggttctttcaggcctagttctacggatccaagctctagacctgcttccatcgatcctaattatagagcggatccaagctccagatctgcttccattgatcccagacccgcttccattgatcccaactatagagcggatccgggctctagagctgctcccattgatcccaattatagagtggatccgagctctagagttgcttccattgatcccaattatagagcggatccaagcgctagaggtgcttccattgagcccaattatagagcggatccgagtgctagaggtgctccgattgatcccaattatagagctgctccagagctgaagtataggggtccaaccctggaatctgctgggttttctaaacgaagagaaagtttatttgtgaacagccaggttgtggatgacaacagttaactgttaaaaaccagtttccattaacttacatttcaaggtgggttgcttttaagttgtcctttgcccttccataagatattatgaaagccatttgagcttgccatgttgtatttttaatttttagcaacataaacgaagaataattgcagaagtttttagcntt

SEQ ID NO: 197261 - DNA, 418 bp, Gossypium hirsutum
ggaccaaggagtctgacatgtgtgcgagtcaacgggctagaaagtaaaggctccagcaaagaagacagtcgctgtcttgaagccgtagagtgttaaatctccggctaacaaagcggcgccaaagaaggcaaagaagtgaatcgaaaggagtgtttgtttgtaggaggttgttcttttttatttttgttccttcctttttttcctttgcagatggtgtaaatttgatggcgaggtaggggtagtcgtggaatttagatccatatatgtagtatgtattgattatataaagcaggttacgggttttattaatttatcctatgttactactctgttttatgaaaaaactcattagtcaggtttcaatcgtggttggatatttatttatatgttttatttaataaaaatttaatatttatgt

SEQ ID NO: 197262 - DNA, 667 bp, Gossypium hirsutum
gggcgccacgcgtccgcttagtttcctcttagcaaagacttcagccacccacgcagcccctttaccgatccaaacaatgggacgcgtccgtacgaagactgtgaagaaatcgtctcgtcaggtaatcgagaggtactactctcgcatgacgcttgatttccacaccaacaaaaaggttatcgaagaagtagctattatcccatccaagaggctccggaacaagattgctgggttctcaacccatttgatgaaacggatccagaagggtccggttcgtggcatttctctgaagcttcaggaagaagagcgtgagcgtcgtatggattttgtccccgatgtatcggctattgctgttgattcaatagaagttgataaggaaaccattgatatgctttcacttcttggaatggccgatcttcctgggattgttaaggttgatccggttgctgttcaggttcctcaagtcgggttcggacgtggtggtggacccggaaggaggtcttaagtggtgggttttccatggatatgatgggttcttaattttaagtttgatatgttttcttttgggattttgtgtttttgttggaaccattttagttatgtctaatgctactgaaaatttattaagtttgataagaacttcctttcgaaggtttttggaatgggt

SEQ ID NO: 197263 - DNA, 620 bp, Gossypium hirsutum
  unsure (1)..(620): unsure at all n locations
cgaccacgcgtcgggacgcgtggggggaaattggcacccaatggaaaggtagttgaggcacgttccaatctgaattccagtgatatcgagggcaggcttcagactccttgttctttgctctacgactcgaattgcccatcagaagaacacattaagggtgatctaagatatatgttagattctttgctcgaccctgaaaccatgtcggcatacaggcctcatgcaacaagggaacgcgtgatggatttggctactaaacttcttgattgcaagcaatttttgaaagactacaaaccaagtgctcacaatccctgcgctatttgtgtttggtgtcatttagagctttctaaccctactaaagatgatccagttccaccccccgagctcatcattctacctctcagtgctactgtcggcgaccttaaaactgtagctacaaaaggttttgtagatgtatatgccatgtttaagaggcttcanaatgaggacctacctgactatggttctgtagaagacagcataaccctgaaaatgttgattggcacaaactggtcagttcgagtgcgaggcaaatgtacatcaagacatggccttaaatcgttccgaatggagaggggaac

SEQ ID NO: 197264 - DNA, 463 bp, Gossypium hirsutum
cccactcttccgcccacgcgtccgggaggcggtgcctactcaggaatatgtcggcgaagcacaatttatctcgtaggacaaggcggcacgaattcgatctccaaagggagagggaagagaatgaaaagaaggttaagaagcttcaagcgaagaagaataagatgaaggttgatggtagtgagaagaaaaagaagaaagctggaagtgggtttcaagtagggaaaagaaaattgaagaccaagttaactgaagttgctaaagctaaagcagctctagcaatggagcttgacaaatgagcttcatggttatgtaattttagagggaatattcaatatcctcttcttattcttctttgtttatttttacttttatttctgttaaattttgattattgagatgaatgcatatgttagcttgagaaatgagaatctttatttaaattatatattaataaatttggggc

SEQ ID NO: 197265 - DNA, 489 bp, Gossypium hirsutum
atcgccattgtttactgctagtaaagaccctaagcctaacctaacctaacctaacctaacctgcagactgctcgcaaaatcattaggtagcaatgggtacagttacagtgaagttggttgttgtgattatgataacggtgggtttaatggtggaagggtcaagagcaataagcttgtgtgacatgaacgatgagggtctggaagcctgcaagccatcagtgacccagccggatcctgtcgacccaacacctcaatgctgcgaggctcttaaaggagctaacctcacatgcttgtgttcttataagaattcaatgttgctgccttctcttgggatcgatccaacactcgccatgggtttaccagcaaagtgcagtctcgatatgccttctgattgttgattaaggtattttcggaggataatgaaccatgaagcggctttcatgttcgtcagcctttcacaagttgtttttatttatttgtacgtggaaa

SEQ ID NO: 197266 - DNA, 764 bp, Gossypium hirsutum
  unsure (1)..(764): unsure at all n locations
cgcagtcctcctattgttcatagagatttaaaatctccaaatcttctagttgataaaaaatatacagtgaaggtttgtgattttgggctttctcgtttgaaggcaaacacatttctctcatccaagtctgccgctggaactcctgagtggatggctccggaagttcttcgtgatgaaccgtcaaatgagaagtctgatatatatagttttggtgtaatcttatgggagcttgctactttgcaacaaccatggggcaacttaaatcctccacaggttgtagcagctgttggtttcaagggccaaaggcttgaaattccacatgatttgaatcctcaagtggctgcgataattgaggattgctgggcaaatgagccttggaagcgtccttcattttccaatatcatggatcgggtgaaaccattgattaaaccctccactccttgaccagatcctggcatgccattgcttacctgcatggcaggaactcctgcaaagtcttcttgcacataatacatcattctttttgacataatgccttcaacactacacgctgttaactaatctcaggtatgctcgttgtccttctctgttctaatagacaattgggaccctttgtgattnttggcatggattaaaagctcccctccctcttgcccaagatcatttgttttcgattaagtaaaatttcacatgcaattacgtgaaaaagtgtatcatattatatcgtcttgcatggtttagttctatatgtaatgatttcaact

SEQ ID NO: 197267 - DNA, 624 bp, Gossypium hirsutum
cccacgcgtccgaattacagtggcaaatccttctgatcttgtgaaagttcgacttcaagcggaagggcgattacctcctggagttcctaggcgctattctggggcacttaatgcttattcaactattgctagacaggaaggagttaaggctctttggaccgggattggacccaatatagcacgaaatgctattataaatgctgctctcttgcaagctacgatcaagtaaagcagacgattttgaaaatccctggattcactgataatgttgtcactcatctcctttctggtcttggagctggattttttgccgtctgtattggttctccagttgatgtggttaagtcaagaatgatgggagattcagcttacaagagcacgctcgattgttttatcaaaactttgaaaaatgatggacctatggctttttacaagggttttatcccgaatttcggacggctaggatcatggaatgtgatcatgtttcttaccttagaacaggcaaagaaaattgtgagagatctagagtcatcttaaggagcttaaaaagaaccaaaatcccacaaagcaaggaattgaaggtgggactgccattgaaattgaagatttacagagaataaattt

SEQ ID NO: 197268 - DNA, 461 bp, Gossypium hirsutum
acgtccacgcgtccgcccacgcgtgcgcccccccctccgctcgggtgcttcaaccaaatcgaagctagggttttgcagggagctttaaaacgacaatgacgaccgtcgttcccacctccgaagaagatcccgtcctccccgtcgtccgattcacggccgacctctcttgggctgatgccggtcctgaggttgcggaaccgctagtgacgaggctttgtatggaagcgcaagagtgtatggtgatgggaagatggttggatttggcttctttaatgcttacttctgctgagttggtctttcccaaggtctctgataaagatctcgagtgtatcttcactgttatctgcaatctagcctcaaagctcgaaaatccagatgatgaacttgagatggcaaagctcatatctacaaaaatcagtcaacaaccaaatgataagcctgcaatgcgtttaaagatcttg

SEQ ID NO: 197269 - DNA, 753 bp, Gossypium hirsutum
ctgaggttgatgatacatccgttggtcgtgttggttctccacttccttgctcctttgtcaggttagtagattggcctgaaggtgggtatttaattagtgattcaccaatgcctcgtggagaaatagtagtcggtggtcccagtgtaacacttggatacttcaaaaatgaagagaaaacaaaagaagtgtacaaggttgatgagagaggaatgaggtggttctatactggtgatgtaggacagtttcacgctgatggttgcctcgagataattgaccgtaaaaaggacattgtcaagcttcaacatggggaatatgtttctttgggaaaggttgaggctgctctcagcatcagtccctatgtcgacaatattatgttgcatgctgatccgttccatagttactgtgtggctcttgtcgtggcttcccagcatgcagtggaagattgggcctctaagcaaggagttgcttttactgattttgcggagttgtgtgagaaagaagaaactatcaaggaagtactctcgtctctcgttcagatcggcaagaaggcacgactggagatatttgagattccggctaaaatcaaattgctttcaactccatggactccagaatccgggcttgtcactgcagctctaaagatcaagagagaggccatcaggaaagctttctctgaagacctggctaagttatatacataatattttcaagaagattttgcttgtttttacatgggactttgctgatgaattt

SEQ ID NO: 197270 - DNA, 606 bp, Gossypium hirsutum
actttgtttaatttcatagggagtttatgtgtttatggtactatttgtaagcatttgaacgtgccttttgtgtttggagggacaagtgagtgttgggaagagagttatatagacggctccgatgccagactcgtcgccgaacaacaaatttgggcagccaccaggaatggcgatggagtgtcttccaacggcgaggcgttcaatgcatcaacggttcgagtttcagttggaaggagatatggccaatattgggaaagaaatttggagttagagtgcctaaagagacgtgtatggaggaattttggtatacgagggccatgggagacaagaaaagggtatgggaagaaatagtggagaaggaaaggttggtggagacgaagatggaagagttggcaaattggcaattcatggacatcttgcttaggttccgagccaaactgttggggtccagagctaaagttgatgggctaggttttacaatgagatgcaacacatttgattcaatcttgtattggattgatgtcatgagacatgaaaacttcattccctaggcattttctttacaaaaaattaattaaaggaaaaatatgatttatggaaagcaaa

SEQ ID NO: 197271 - DNA, 560 bp, Gossypium hirsutum
  unsure (1)..(560): unsure at all n locations
tctgatctgagagcaaggtacgttactctttctcctttttatgcttttttgaataataaaaaaaaaactaaagcaaaagaatggggaaaaatgaaaggaaacttgctccttactttcaatcactgtttttcgtattatttcaatggaagttacagaatctcttctcctttttttacaaaaatgaaatggctttatatatagcttgaaaaagaagaaaaaatagatcaaatatagttgctattttgctgttttttttcttcggactcttttagtccgttttgcaagcgaacgtggtggaaacggcacgcgtggaggccgaaacttgcggcgactggagactgctggggtgtttgagggcggcggctacttgctgctactagggttttctgcttttatttaagtattgggcaatttagtgattgggctagggttaaatgtttgggcttgtttgttggtctgggcccgggcatatttgggcttgtacaccccangcttaagtttccatatttcaagctatatatacctngacatngaatataattggtggaatttattttatc

SEQ ID NO: 197272 - DNA, 479 bp, Gossypium hirsutum
  unsure (1)..(479): unsure at all n locations
cccacgcgtccgcccacgcgtccgaatcaaaaccatgcccaacagataagttgatttgttgtttttttctgaattactgatcgcgagtcactttcaatctcatcctctctcaaccctagagataactgaagatggacgcctagagacatgccatcgcttccgcagcaaaaacagaagcatcaaagttgattcaaacccacggatcagtcggcgcgacccatctacccgtctgaagtcgattcactgaacactccctgaaaacatgctccttcgtttctgtcccattttggcacctttgacaagttgcggacgccatcagtcttctataatgtagattaccaaaagtaggcaaaaaattacaagaaaacctccagtttgtaattttaatttttgaaggtagatctaggctccacaatcttttgtaaaattgtttgtagtctgtttgcatttgattctnnnnnaaaaaaannnnnnnnnna

SEQ ID NO: 197273 - DNA, 513 bp, Gossypium hirsutum
cccacgcgtccgtcgatgctaaacataaatgctttctttaattttcagcaggagccatcatttccataaaaaaaacttccaaatatcacaaatcatcctggcttttcaaccttcatcccaaaaactttccgacagtaaatccaacgattcagtccccccaaaaaaccttccaacttcgatcggccaccatagcttcctccgctccaatcaaaaccatgcccaacagataagttgatttgttcttttgtgagcctctttcgctatgaaatgagcaactttattagattctctagggataaaccgaaaaatacaggattcaaaggcaaagctcagatgctttaaatctgtaatgaaaatttcgatttctaatctgtcttccttttctttttacagtttctgaattactgatcgcgagtcactttcaatctcatcctctctcaaccctagagataactgaagatggacgcctagagacatgccatcgcttccgcaaaaaaaaaaaaaaaagaaaaa

SEQ ID NO: 197274 - DNA, 537 bp, Gossypium hirsutum
tgcgtttctctttatatcacccaggtctactgcttccagtcctagagaaggtaatgttggtagtggtaaagtcaatgaagaacccgagaagtgctctttgcaagacttcgattatggctgcttcagatatcttcaatgcctacggcgaaaaattgcttgagtcaactgattccactgcatttgatcagctgttactgcagttgttactgaaagcctctcaggacaagaagtttgtgtgtgaagaagccgataagtcgctgacagcaatggttaactccattgctgctttacccctgcttcaaaagctccgcggatttgttaaccatggcaaccttagagtcagagccaaagctgcagtttccatttccaattctgtttacaaaatgggatcagaagaaatcaaagagttcgggtcagttaccttgcttcaaatggcttcggatttgctaaacgataggctgccagaggccagagaagcagcaagaagcattgtactttcagtatacgaggcatttacagaaaacgaaaagcttgata

SEQ ID NO: 197275 - DNA, 642 bp, Gossypium hirsutum
ctgacgcgtgggtgaacgcgtggtgaaccctccaaagcaagctgtttctgtttttgctgatactcaaagcagtgaaattaaagataggatatttgatgaatttaacagtttatctgtcttataccagaagccatcttacatgtttacagacaaggagcacaggggtccacttgagtttgcagatgaacttggaaatctatctattggtgaagcagcaaataatgttgttcctactcagatggtggaggaaaacgacaaggatctgcttttaacgacttcagagaaggaagaaactaaaggttcacgcaataatggttctgcttatactgttccttatgatggttcgtctacatccgtctttgcctcacaagcacagatagagtcggcagtttcaaatcccaccttggcaggccattctcctcaagcaagcttcgcaatagacgatcttcttggtcttggcataccagcaacacctgctgtgccgtctcctcctcaattgaagcttaacacaaaagctgctctagatccaagcacatttcagcagaagtggcgccaattgcctgttgctttgtcgcaggaaatctcggtaaacccttaaggtgttgcagcattgacggctcctcaagcgttacttcgacacat

SEQ ID NO: 197276 - DNA, 778 bp, Gossypium hirsutum
cccacgcgtccgctctttatttctccccaaattttcaatcctaaatactcgatccaattgaaactcaattttgattttttaatcattattcttattatttattcgatgtgatcatgcccgcgacggattatcaaggaacttcgtcaccgttgacaaatatcggccgttcgttattaccagtgaggagggatcaagtacacgccatggaatcgccgatcggtggatcggcgtctaacgaggcggagatcgagtcctttcaaaggcaagtagctgacagatttcacgatttagcttctgtcccttccgatgaattgctttctctgccgtgggttcggaagttgctcgacgttttcctctgttgtcaagaggaatttcgggtcatgctttttaacaacatagctctagtgaagaagccgcccatggaccgtttgatcgccgatttttacgagcgtactgtcaaggcgcttgatgtttgcaatgcgattcgcgacgggattgaacagatcaggcaatggcagaagcttctagaaatcgttctttgcgctttgggtgatagtaatgttggttatcagagaagtctaggagaagggcaattccgtcgcgcgaggaaggcgttgatagatttagcaattgggatgcttgatgagaaagattcaggtcaagccctggctcataggaaccgttcctttgggagacacaacactagcggcagtcactccaaggatcatcaccatcgatctttgggtcatttcaggtccttgtcttggagcgtttcaag

SEQ ID NO: 197277 - DNA, 421 bp, Gossypium hirsutum
atttttcctgctagcaaaacagaggatctgctgccaattgatcgctttgttgttgaagaggctttgctggatgtgcttttgttcttcaatggatgtcgaaaggaatgtgctgctttcatggtaggcttgcctgtgcccttccgatatgagtatctaatggcagagacaatattctcccagctgcttttgttaccacaacccccattcaagccaatatattacacactggttattatggatctctgtaaggctctccctggggcctttcctgcagttgtagctggtgcagttcgtgctctttttgttaaaattgctgatttagacatggaatgtcggacacgccttatcctttggttttcacaccatctatcaaatttccaatttatttggccttgtgaagaatgggcttatgtcctagacc

SEQ ID NO: 197278 - DNA, 711 bp, Gossypium hirsutum
tttgtctttcgctctcaaccctcgaccaagcgccaatcttcttcttcttcctttgcttggctactgagcagaattaggaggttttgatttgttggtctgagtttgggtttgggttaattactacaattgttttcaaattataatttgtgaataattatgagggaagaggattcgaattggttctctagatgggaggaagagctgccatctccggatgagcttatgcctctttcccaatccctaattactcctgatcttgctatggccttcgacattcgtaaccccaatcatcaccatgctcaacagcaacagtcctcagtacagcctgctcctcctgcaccttccgccgctgttcagccttcttctcaacctaccttagctgaattcgccgctgattctggggacttgggatccggggctgctggggatgagccggcacggactctcaagcggcctcgtctcgtgtggaccccacagcttcacaagagattcgttgatgccgtggctcatttggggatcaagaacgctgtccccaagactatcatgcagttgatgagtgttgatggtttgacaagagagaacgttgctagtcatttgcagaagtatcgcctttatttgaagagaatgcaaggtttatctggtggtagtggtggtggtgccaatggtggatctgggggtgccggattaggtgccttggcttgatcagccaca

SEQ ID NO: 197279 - DNA, 699 bp, Gossypium hirsutum
ttccactcgtccgcccacgcgtccgcccacgcgtccgcccacgcgtccgcccacgcgtccgcaacaactcaagttgaccttcgaaaagatgaatcatctgtgacaccaggcgcttctcttcctcagaagctcgtgttttacagcacaagctcggcaagtgggcatgatttacttccgaacgaacaccgtcggaaggacctcaaagcttctctcatgaatgacctaaagagtgaagatgaataccgatttggaaggtcatcaaacaatgatggatttgacagcttagaaagcatggttagaattaaggaagcagaagcaatattgttccaaagcaaggccgatgaagcacggagagaagtggagagctacatgaggatgatccgggccaagtccgaaaagttggaagaggaatatgccgagaagctatcccgactttgcttacaggagacagaggaaaggcgaaggaataaaatggaagaacttaaggttttggaacattcacagtgtgattactacaaaatgaaactaagaatgcaagcagagattgccagtttgttggagagaatggaagctacaaagcagcaatgggtttaactcttttcttttctttttttttctttttttccttaatttattggttaacaattaattaatgtaaaacgtgtggtttgttccaaagttttaaccttatggattcta

SEQ ID NO: 197280 - DNA, 531 bp, Gossypium hirsutum
ccctcgcgtccggtgcttttgtggttgctgacagctgcttgcatcaaaacgggaaggccacaaattgcaagacgcgcaatagaccttgctgagacacgcttgttgaaagatgggtggccagaatattatgacggcaaacttgggagatatgtcggtaaacaggctaggaagtatcagacatggtcaatagcaggatatttagtggcaaaaatgatgatggaggatccgtcgcacttggggatgatttctttggaggaggacaaacagatgaaaccattgataaaaagatcatcttcttggacttgctaaaaaaaggaaaaaagaagaaaaaaccagaattgggaaatggaaacagaccaactttcgaattttcattgtaccggtaccagtcttgcttcttttacgttatgtttccaagtcaagaaaatagtgacaaaaaaaaaaagttaattttgcagccatagctgatggctcatgcattgtttatttccattacaagtatacattaaaaggaagtttaagtttcccggt

SEQ ID NO: 197281 - DNA, 529 bp, Gossypium hirsutum
tcaaagattttccaggcttggaacaggaattaaagaaaacgtgttccgggaaaattccagactacctcgaatctattgcaatccaaatcgaaaaagatcgtggaaaaactactgatatttttcatatccccactcaagttctgctctgcgctgctatcagagagatgaaagatttttcggttggggatttggatttgggtaccttgaaaaagtggagcgcgacacttaattacgctaagaaatatggttttcaagtgggatttgctgataatctgttgaagaagaatttgcttgcctattttgcaattcaatgtctgcccaaatcgataaaaatatagcttcccaagagcaaatggttgttttgttgttgctggcttgctgcagtctacaaaaatattggctttaacgatatctacatttacttttctgtatgtgtgaagtttatcttatttgagattaatgctttgttaaactgagaaattatgtatcaaaaaaattaagagttgaatttaagttttaaattttattt

SEQ ID NO: 197282 - DNA, 681 bp, Gossypium hirsutum
cccacgcgtccggtacaaggatacagggcaacacttcaatggtgagttctcgatggcagtggggcaggccaataatttacttgaggatcagagccagcttgagtctggttgtttgagttcacatgagtgcggtccctatggtacttttgttggtgtatatgatgggcatggaggccctgagacttcacgttacatcaatgatcatctctttcaacatctcaagcggttcacctcagagcaacagacaatgtcagttgacgtaatacaaaaagcttatcaagcaacagaagaaggttttttgtctctcgttaccagacaatggcctatgaacccacaaattgctgctgttggatcctgctgcctggccggtgttatctgtggtggaaccctttatgttgccaacctcggtgattcccgtgctgttctagggagagctgtgaaagccacaggaaaggttctagccgttcagctctcagctgagcataatgcgtgtatagaatctgtgagacaggagctgcaatcattacacccggatgactcgcaaattgtagttttgaagcacaatgtgtggcgtgtaaaaggtctcatacagatatccaaatctattggtgatgtatatttaaaaaaggctgagttcaacagggagcctttgtaccctagattccgcctccgtgaaccttt

SEQ ID NO: 197283 - DNA, 504 bp, Gossypium hirsutum
ggggagcctaatgatgatgctgtaactgatttcaaacaaaatgcagccatagcaaaggaggcttcggaaaaatcaacgtctgcatcgacggcggaggtagcgaaggcgaatggagatgttaaacatatagaagagaatggatcagttgttgtaaccgaagatggccccgtgaaaccggtgtgtgcagccagtgcttgctaaattggattggtagatttggaacagggttgtacttcgggtttgttatgaagaagttagataaattggtatcaggtattgggactggtcttattgcttattccttagaatgtaggaataggtaaaagcaccttttacagtgttaaaaaccatttcgctacgggcagaatgtgactgctcattagtctttataagttcttttcttttctttttgtcattttcatctgttcttatttttcttggtttttcttaatgagaaagagttgacaagggaaaaaaaaagcttaagcagaaaagtttagtctt

SEQ ID NO: 197284 - DNA, 717 bp, Gossypium hirsutum
gttcttgtcaatgaagcttgaagcagttaattcaagaatgaatcctaccattgaagtggggcgctcttaaagattatggccaacaaacgtttgatgctactggaatggcatttggtccacaagcaacgagggaatacagtcgcggtgcatcaccagagtggttgcatattcgtggtggtttcgaaagaacaacataatctcaacagttcattgtcaatcagcaataagaacattaatttcccaatgaatcctctctttcagtcatacccaaagaagcatattgcatcctggtaaaaccagcgagacactctatgtgcatgctcaacatgaggcattgagctctaaaagaatgctaaagtcagtacctgaacattttgattgttgtgtttgggagaatgtgttctttttcttcatatatgaaatgtcggccttgtctgtactaatacctgaacagaatctcctagactgatttatcgttgggtgtacaagaaagttgcttgttcagaattactgtctgatgctgacatgttgaatcaactttgttttagtgtcttgttagttaaacagtttgaaattgtgataaataaataaagccagtttactgttatcttttaaaaaaaaaaaaatatttaatatataataaataattattaaaaattattaattttaatattattaaaataaaattatatattaatataggggcggcccttttaa

SEQ ID NO: 197285 - DNA, 415 bp, Gossypium hirsutum
tgcattatcttccagtctcttgatctagcatggactttgcttcgtatcttccctcgtgaacttctccatcgtatacctgcaaagacgcgttgaccagtactacagtcgcgaatcgtgaaagcaacaagctgagctggtaaagcatttgcatttgctgcatggccttaacccagtaatccgtcttggtgaatggcttcattgcggtgtgctacatttgtttcatttccttttcagatacagttccaatcaagttcatgctctgtgattataatttattttagctgttgagtattctttgttttgagaacccaacccataagctttttcgagaacattattttcagcttgttattctcattcaaacctgttgttaagacttggattgccaaggaaaagactggttctgttttaagtt

SEQ ID NO: 197286 - DNA, 615 bp, Gossypium hirsutum
tccgccacgccgtccaaccgatgatgatgataattgctatgaaaaatctgctctcgaattacttgcggaagatattattattaagattatttgtggtgtggatcatgaagatttgaaacggcttcctattgtttctaaatcaatcagagaagctgctatggttgcaaagcaattgcattttgcatatagtacaccaacaaaggtgaaagcttttaaaacatcaatagatttcgatgaacaaagtgaatcaaacgacttggaacttgaagctccaaatgcacctcaacaatggcggtcacacaggtcaatcaacaagaaaaaacttgcagatatatcaatacaattgtttttgtaaatagcttgttgtttgctattaaatcagtgcattacaagccattattttcttcaaagttttcattgaagaatgggaatttttggcttgtttttatgcatcttgttgtacaaaaaaagaagaaagggatagtatttgtttgaagggtcgtgttcttgacccttccgatttgattaaaaaaaaagagttaagcttaataaagatggttcatattcaatcttaaaaaaaaaaaaaaaaaaaataattaattttttttttttttt

SEQ ID NO: 197287 - DNA, 441 bp, Gossypium hirsutum
cccacccgcccgcaacctcgattcatggttcagcttttgcacaaagccagaagatcatcggtgccaaccaaaacatgttaattcttgaacattcggctaagaactgttccacaaaaacccaagtaaaagcccgtccggtagttggttctaagcttgtagcacaaggtgttcttcgtaaacccgggaatggctcagctcttggtcccaaggctccggttcaaccaccacctgaaatatggacaaggggaaatggccttgatgaagttgttgacatggcagatatgttgcaaatggaatcccaagattggttcctaggatttgtcgagaaattcttggatgccgatgtagacacatctgttctatccgacaacggtcaaataagccgggatgttgacacagctcaagagtgttaatgacttgttagatgaaattagttcgagt

SEQ ID NO: 197288 - DNA, 551 bp, Gossypium hirsutum
cggacgcgtccgcccacgcgtccgcccacgcgtccgagggattaatgtcattacattctatgctccaatactattcaggacaattggtcttcgtgaaagttcttcactcttgtctgcagttgtgattcgttgtttcaacgttggctgtacattcatatctatgtttgtagtcgataagcaaggtcgaagagtactgtttatgcttggtggaattcaaatgcttgcaacacaagtaacaattggagggtttatgacagctttattaggtgatcatggtggattgagcaaggcgagtgcttatgtggttctagttttgatatgtatatacatttctgggtttgggttatcttggggtcccttgggatggttagtccctagtgagatttatccattagagattcgatcagctggccaaagtattacagtagcagtcagttttttcttctgttttcttattggacaaacttttctagctatgctttgccacatgaaggcagggattttcttctttttcggaggatgggtggctctgatgaccctatttatatact

SEQ ID NO: 197289 - DNA, 444 bp, Gossypium hirsutum
tttaagagatgcggtttcacgatccaccacacaggtatatcctaaatcatggactgctatttacatggctcttgataatgttggaatgtggaatgtgagaagtgagttttgggcaaggcaatatcttgggcagcaattttacttgagagtttatacacctgtgaactcactcagggatgaatatctcattccaaagaatgctttgctttgtggcagagcccaaggaagaagcacaaggcctctttgaaacatttccagtagccgaaattgttgagaatcaaccattagtcaattataaaatatgcctcaattcttttcattttttgtttcaccagaatctgtatttggttttgtatctaaagaaatgaaaataattgtattaaattagaacattctttttgctgaggaaataatacaaggctcaattttctgtgttaaaataaa

SEQ ID NO: 197290 - DNA, 482 bp, Gossypium hirsutum
ccggaagacgtcgcagccgcagccctagatatcgtaggagcccaagctatgggcgcagaagttacgggcctcgtggacgatcccctaggcgtcgcagtccctctcctcgtgggcgtagctacagcaggtctccaccataccgtggtcgtgaggaattgccatatgctaatggaaatggtgcaagggaacgccgacggagcaggagttaagtgctgcaaggatgtaactcttatgtgaagggactgattaagtttgtttagtttgttgacttcagtgctactgttttaattgggcaacgcccgcagcatcttggatttggttaagttactttctgtttttccttatttctatgatggttttatttgctttatctatgctaagtacttttttatgctttgggggggaatctttaattgacctctttatttttatttagaaatcattttttttaatttttatttttattatattttttccttttt

SEQ ID NO: 197291 - DNA, 578 bp, Gossypium hirsutum
cccacgcgtccgaaagcggcagcaaaggtgtcatcttcgattcccaatggtgaaaggtcgccaaggagagcgcatcaggctctatgttcgtggagccattttgggttacaagaggtcgaagtcgaatcagtatccaaatacgtcactgattcagatcgaaggggtgaacaccaaggaagaagtgggatggtactgtgggaagcgaatggcgtacatttacaaggctaaagtgaagaaaaatgggtcacattatcgttgcatttggggtaaagtaactaggcctcatggcaatagtggtgttgttcgtgctaagttcaagtctaatctccctcctaaatccatgggtgataaagttagagttttcatgtatcccagcaacatttgagatgcgaggtaggaattgcaagttggtaggatgagttgtgcaagtcgggactggattgcaatttagagctatattttatatctatgatgattttggtagctttttgtatttcttaagataatcaatattgttaagttcaaaatgtggaatctttgttatttataaaatatcagtatatttttggatcttaaaa

SEQ ID NO: 197292 - DNA, 526 bp, Gossypium hirsutum
  unsure (1)..(526): unsure at all n locations
tcaaaactcacaagagaagcagccgctcctccttccatctcctaaacaagaatggattcgcaaattaagtttgctgtggtggtgaaaataatgggaaggaccggttcaagaggtcaagtgacgcaggtgagagtgaagttcttggacgatcagaaccggttcattatgaggaacgtgaagggaccggttcgtgagggagatatcctcacattgctggagtctgagagagaagctaggaggcttcgttgaagggttatttttatactttttggggtttatgcttgttttgaattgtctaccgtattgcttttgaattacgtttagtaggtattcgtatatcgagacttgcgatttgggagaatggttgttgcttaaacctggattttatgatgattatgttgaaatgaactgaattggttttgagttttggttatatttttgcctcccattttgagaaaaatgttcggattagatttgtttgtctgaatgatcacttgttatgattatganaaaaaaaaaaaaaaaa

SEQ ID NO: 197293 - DNA, 717 bp, Gossypium hirsutum
cccactcgtccggtatggtggtaggggtgatcgtcatggtggaggtggtggccgttacggtcctgatcggaatggagatcgatttggtgggcgcagcagggatgcaggtagtcgtgggggatctggaagtgatagatacaatcgtgatcgatctggaccctatgaccgtcgtggaactggaggtcctcgttctggttaagatgactgcttgtgctgatgaactaggttgctgctttttggcaaagcatgaagtttcttttttacagaatgtgctctcttcattgttgtctgggtggaacaatataatagttcagtcctttgaagtgtgaaacttggcacaaacctacaactatttatgtgttcgtaaaatgctgtgttcgatggagttttgtgctttcttgacaaaaaaaaaaaaaaaaaaaaaaaaaaaaaaaaaaaaaaaaaaaaaaaaaaaaaaaaaaaaaaaaaaaaaaaaaaaaaaaaaaaaaaaaaaaaaaaaaaaaaaaaaaataaataaaataaaataaaaaaaaaatttaaaaaaaaaaattggggggggcccctttaaaaaaacaaattttattgcccgggggatgaaaagtatttttttttttttggggaacaaaaaataaaatagaggggggggttttttaaaaagtttggaggggaaaaaccgtgggataccaaaattaatttttttgggaaaaaatccccttt

SEQ ID NO: 197294 - DNA, 626 bp, Gossypium hirsutum
ttgatcaaagccttgatgaaattaagcttctcaagtatgttaacaaacatgatccagctgataagcatcaccttctccgattgtatgattacttttactaccgagagcatttgctaatagtgtgtgaacttctcaaggcaaacttatacgagtttcataaatttaatagggaatcaggtggagaagtctacttcacaatgccaagattgcagtcaattaccattcagtgtttggaggctcttcagtttttgcacggccttggcctagtacattgtgatctgaagcccgaaaatatcttagtgaaaagctatagtagatgtgaggtgaaggtcattgatcttgggagcagttgttttgagacggatcatttatgctcctatgttcaatccaggtcctatcgggctccagaggttatcctagggcttccatatgacaagaagattgatatctggtcacttggctgcatcttggcatgaactctgtactggcaatgtcctgttccagaatgattcacctgcgacattacttgcaagagtaattggaatcataggtcctatcagacaagacatgcttgccaaaggacgggatacgtacaaatactttacgaagaattacatgctttatga

SEQ ID NO: 197295 - DNA, 683 bp, Gossypium hirsutum
  unsure (1)..(683): unsure at all n locations
ggtgtaatggacggtttcgaacgattcgctcagggtcaattaattactcttttttctgcaacaaactattgtggtactgcaaacaatgctggagccatattagttgttggtagaggactggttattgtcccgaagttaatacatcccttaccacctcccattcagtctccagaaacatcgccggagcgtgttggagacgacacatggatgcaagaactaaacatccaaagaccaccaacaccaacttgtggtcgccctcaacccgaccacgaccggagctcaattgcatatatatgaacacggcattacaaattcaaggacttacaaccttttttctaattgacaaatctttgtgtacgtattattgctcgtgtagtttctcgaagatggaagccattgtttattgtatgcatagctatggagtttgaagatcagtatttaaccagtgaaattcaatatatgcatatagttttgttagttatttaaagagggattttataggataatttatagtgatttgggtcaaattaatttttttgttttcttttttcatcagtttgtgcattgtggcattaatggtgatacatttaggttttatatgaagaaatattttttttttttttnnnnnnnnnnnnnnnnnnnnnnnnnnnnnnnnnnnnnnnnnnnnnnnnnnnnnnnnnnnn

SEQ ID NO: 197296 - DNA, 645 bp, Gossypium hirsutum
cttgaccaacctcgcacgcgccgcttttggtctcggcgctggcgccactgtcctcaacgcttctatgtacacagtcgacggcggccaaagagcggtgatatttgaccgtctaaggggagtattggacaaaacggccgatgaaggaactcactttttgatcccatggctccagaaacctttcatctatgatatccgcatgaagccccataccttctcatctgtctctggaactaaggatctccaaatggttaatcttacccttcgagttctttctaaacctaaggtggagaaacttcctgaaatttatcaacaccttggtctagagtatgatgagaaagtgcttccctccattggcaatgaggtcttgaaagccgtggttgcacagttcaatgctgatcagcttctcaccgagcgtccccaagtgtcggccttggtccggaattcactgacacagcgtgcaagggacttcaacattgagctagccgatgttgcaatcacgcatttgtcatatggttctgagttctcaagggcagtggagcagaaacaggtggcacaacaagaggcggagaggtcgaagtttgttggggcgaaagctgatcaggagaggagggctgctatcatccgcgcagaaagagaaagcgaggc

SEQ ID NO: 197297 - DNA, 597 bp, Gossypium hirsutum
ccaaagaaagggaagatctattcagttaatgaaggaaatgccaagaattgggacggacctacggctaagtatgtcgaaaattgtaagttccctaaggatggttccccttcgaagtctctgagatatattggaagcatggtagcggatgtccatcgcacgttactttacggagggacctttatgtaccctgctgataagaagagccccagtggaaagctgcgtgttctctatgaagtctttccaatgtcctttttgatggaaaatgccggaggtcaagcgttcactggaaagcaacgggcacttgacttggttccaactaagatacatgataggtcaccaatatttcttggcagctatgatgatattgaagaaattaaagcactctatgctgctgaagggaaaaaggaatgagtgtacaattctcattcttctcccactctatctttactggattcaggtttcaatcatcaaagtatttaatccatttcaaagcttattctgtaatgggatactatatttatattgaacaatatttaagtttccccaaaagatatgggatgagaataataaaaagaagttattttaactgttatgctt

SEQ ID NO: 197298 - DNA, 439 bp, Gossypium hirsutum
  unsure (1)..(439): unsure at all n locations
acgggcgccacgcgtncgcccactcgtccccctactcttcccggtgtggttgcttcaaagctttatccacaagtggagggctctcgcatggatgaggacatgaaaatttatgtttaaatcaaactaatgtaagaatcgatgactttcacttcagccaaacaaaataagggatatctaccggaatattgctcacgtcttccctcatataggaattcataactttttccacctcaaatcaaatcaaattcatgactttcatgtatttctttttctttttcttttttttttccttttctgatatactctcatatccattttcttaaaagaaaaacttatttctttatttctttttgctataccataaatttaatatgttggaccttaaaattctttattaaattatttaagacataataataaatttagtccattatgtcaa

SEQ ID NO: 197299 - DNA, 457 bp, Gossypium hirsutum
aaacccggaaaggtaacaattagtggatatgcattatcaggagggggccgaggaatcgagagagttgatatatctattgatggcggtaaaacctggttggaagcatcattgttctctgaaaaccggtgccccttacatagcggagcgtgtaagcagtggcagatgggcatgggtgctttttgaggtcacagttgatatcccatacagtactgagatcgttgccaaagcggtggattcggctgcaaatgtgcaacctgaaaacgtgcaagatttttggaacctaagaggtattctcaacacttcatggcatcgagttcaagttcgcgtcgggcactcaaatatgttaatggaacagttaaataacttgattagcaatgctgaaatatgtggctgaactttctttaccattgtgttttttgagaaaaaaatatcacccgctttaacaatgatgtttttg

SEQ ID NO: 197300 - DNA, 783 bp, Gossypium hirsutum
gggttcgcggacgcgtggggagaaccctcatatggatactactcctcctcttgataacccccatgacatgggtagttcacacatagatattcaacaagatctcaactctcatatggatactccccctcatactgaaaaccctaatgatatgggcagtccacatatagatattcatcaagatctgtttccagattactatggtggaacagcttctgctccggctccggcttctgccctggattctgctccgtctgagccaaaacttgaatttgagggaaatgataaccataatggaaataatgatagtgctcctgtaattaaagataataattcccctccaccagttccacctggtagtagtggggaaggattaccttatgctcctatacattggccaaatgctggtgatatttggacctggaaagtggggaggagagtcaacagtgctggcttctatggtgatagatttctccatcttcccgaaagtcttcgaaaggcaaataggccaaaagtctttgcgagcaagccagcacttgaacgttttatccggttgaatttcccagatgcagatgttaatgcgttctttgcttcatttgtttggaagatccctgccgttgtggaatctcctactaaagtggcagctgcgcctgcatcaccagctgaaggaacagaagatgatcagcatgaatgtgtcacataaggtctccgtagaacccataggaagagggctccccctcctcccccattcaatactccgagttccatctaagcaccatcagcacc

SEQ ID NO: 197301 - DNA, 388 bp, Gossypium hirsutum
gaacacgaaggagacaacgtcgtgtttattgtccaaaagaaattgtggctcacaagtgagagcatgctgaattctgaatagaatatttccggattacaattcccacgtactctcattatatcttcttcagcagctccaaggtattaagaagctctcctattattaatccggcaagcaatttcattttgtggcattaagcaatggttcaaattgttttttcttttttacccctttttccttgtattgaattactttgacaagccatgaaatgatcatcatctatataggctattcttcaaacagatctcactttgatgccgtccaaagctttgcttcggctgatcatggttacccattactatagtattccgactcttcgttttacttg

SEQ ID NO: 197302 - DNA, 450 bp, Gossypium hirsutum
caggaatgactgctcctcaagctgctggagtcattcactctgattttgagaaaggcttcattcgtgccgagacagtatcctatgatgatttcgtcgtatctggttcactagcagcagcaagagaaaaaggacttttgagatccgagggtaaagattacgtagtacaagaaggtgatgggatgctgtttcggttcaacgtttgatgactgtgttcccggagctgaaggcaaattcatcattcttttacttatcaaagcaccaaacaagaaatgtaaacgtcgatggttttatatcatacagcggtctaagaccatgttcaatatcagaaatatagcataggattgcaatttttctttcaccattgctaaaccgagaaatatatatattcagagattttgctcgaggaattgcttgtttgtaatccaaaagtaaaacaaaggttcttacagc

SEQ ID NO: 197303 - DNA, 670 bp, Gossypium hirsutum
caatgctttggcattgttgtttgcaaacttgagtgttgaaggtatggattctttaacttcaaaatatcgtgaagttgctgagcaattcaaaggacagggaattggtttccttttgggtgatcttgaggctagtcaagctgccatccagtattttggagttcaagaaagccaagtacccctaatcatcattcagaataatgataggaagaagtatttgaaaccaaatttgcaggctaatgacattgcaccttttgtgaaggattacaaggaaggaaaagttccaccatatctcaagtctgaacctattcccgaggagaataaggaacctgtaaaagtggtggttgctgacacccttgaagacatggttttcaaatcaggcaaaaatgttctgcttgagttttatgccccttggtgtggacattgcaagaaattggccccaatcttggatgaagttgctgttcattatgaaaaagatgataatgtttcgattgcaaaacttgatgccactgcaaatgatattgtgggtgagaactctgatggtagaggctacccaaccatttactttagatcaacttgtggaaacattactccttatgagggctatttgaccaaggaagacatcgtcaacttcattgaaaagaacaaggataaaacttgccaacaagagtca

SEQ ID NO: 197304 - DNA, 900 bp, Gossypium hirsutum
agaaatgagccttgggaaatgggagtgcacaagcggaatggtgttgtctatcttgacgtgcataaactgcctgagagaccacgaagtgagttggatcgtcgaaaatgttattgggggtattgttttgagagccttgccactgaagatccaagaagagaagatggtgaagggatacatcatgttgatgccaatgttgaatactgttcggtgattaaaaccaaattaggggctcatcgtattctgatgggtgctgaaatggattgctgtgattcaccagatgagggaagaagattttatgtggagttgaaaacaagtcgtgagttggattatcatacagaggaaaggtatgaaagagagaaactgctgaagttttggattcaatcattcctggcaggtgttccttatattgttattggatttagggatgatgcagggcgacttgtacgcactgagagactaagaaccaaagacatcacccatcgagtcaaaatgaagaattactggcagggaggagtctgcctggcatttgctgatgaggtactgtgctggctttacggaacagtcccagagaatgaggactacatactacaattcgcaccaccattcaaccgattggagcttctacaagcacaatcttgccctgatgcgattactaatcacgttgaacaatcatagtcatcgacagacttatttgttagtttgtaattcagatagttcaaatacaggatcaaaacaaagaggatggtttatatttttactaactttgattttgcagatgaacatcacacatgataaagttcccccaagttcagcctttgtttgtaaaggcaaaccccccaacttggtagattcataagttaaaaaattgtcctttggtaattagatttaaatagctcccat

SEQ ID NO: 197305 - DNA, 958 bp, Gossypium hirsutum
ccctcgcgtccgcccacgcgtccgctctgcaaaaatggcaaggaaaattgtgctcattctggtactgagatgcctctgcattgggctagcagctgctgactggaacatcttgaacccaatatggaatatcaatgcaagacaagatagcttgaaaaactactgtgaaagttggaggatcaatgtggagctgaacaacataagggagttcgatgtagtgccccaagaatgcgttgctcacatcaagaagtacatgacttcatcacagtacgatgctgactgccagagagctatcgaggaagtgacactatacttaagccgctgttgctctttgaaaggtgatggcaaagatgcatggattttcgatgttgatgatacactcatctccaccattccttacttcaagaaacatggttttgggggagagaaggtgaactcatcttctttggaggcatggatggaagagagcaaggcaccagctctcgaccacacattcaagctcttccatgacattaaagatagagggatgaaaatctttctggtctcttcaaggaaagaaacccttagatctcctaccgttgataacctcattaatgttggataccatggatggtctaggctcttcttaaggggtttcgaagatgaatacatgcatgtggaacaatacaagtcccaagtgaggaaaacattaatggatcaagggtaccgcatatggggaatcgttggagatcaatggagcagcttaaagggtttgccagaagcaaagagaacattcaagctgccaaattccatttactacatgtcttaacttcatctgaataaatttttatgcactcattttcccacctcatgtgcttttgtatttgcttgcggttgttttcagaaatccaatataaaatatcagtaaaaaattttcttttatttatttttcaaaaataaaaataaaactttcttaattata

SEQ ID NO: 197306 - DNA, 469 bp, Gossypium hirsutum
gtttatgcagatccatgcggttgattgtgcaagaaagactcacgatagccttgaaaagttcacttctaaagcccttgccctcactctcaggaaggtgtttgatggtgtctatggaccggcatggcattgtattgtggggacgagttttgggtcttttgtaacacattcagttggtgggtttctctatttctcaatggatcaaaagttatatgtcctcttgtttaagacaagtgtccaaagagctgattgaagtgtggtgacaaacatagaacaatttggaagttaaaaggcatttgtagtatagcaaaacttttggaagcttaaagccagtgtttatccatttgtagcttgtacattgtttttcagaagaacaaaagagtaggaattgaagtctttggcaagtggtctagcctgtatgacattcttcttctaatgtatcgttttagaaatacagaatccattagcagct

SEQ ID NO: 197307 - DNA, 468 bp, Gossypium hirsutum
cccacgcgtccgatccctttcaagttcctctcttttgtcatttcacatgccctatttttcatagtaccccttcaacaaccactctttcggtgaatattttcttcgattgctccttggtatttcattttttcgtgtccatgcctttcaggcctttcttctctttcaagcgttgccagtttcctcttatcttcctccagtgccagtagcgccttccttgataatcagttctctagatcagtgttccttagactctccattgttactcttgtaagttcatgtgcaactccgttaccagatctagagattttctgaaactgacactctttaaatcttctgcttagtatttgtatatcttgtatgtatgaacacaacactgactgatcctcttttgatgcctgaactcattgtacaatactgagtgcatctccttcgatgactacttgtcggagtcttagatctaatcccacc

SEQ ID NO: 197308 - DNA, 465 bp, Gossypium hirsutum
ctgagaatgctgctggtgagccagaacagaaacatcatgaggagtcatctgaaaagccaaacgtaaaacttaaaggtaaaaaggcaaaatcccatgactcaagttccagttccagctccagctcgagtgccagtgattctgaatgaaaaaacgacaaaaagaaagaaaaatatagtttggcatttccagttttattctaaaaatggttctttttcccctttcctttacaagaaacgaatttttaggtttcctagtttggttatcatcatgttttgttgattgattgattgagttattaaagaatgagttatgggttgatttggtttatctttttttggttgagccaatgctatctgaagtgtaaaattgattttgatacttgaaagatttgtgtaaattattgtattttgtttgtaaaaatgaagaattgttgaattctaatatatatacagttgggcaatggat

SEQ ID NO: 197309 - DNA, 838 bp, Gossypium hirsutum
ggtaaaaccaactatcagcttgtctacaagattgacgaagatattggtggtgctcaaagttcaacaattgatgacattaagagatttgctagtgctgttgtcattagcaaggactctgtgtttccacaaaattcagcattcctcgctcgtgcgacagatgttgtatcaaggctacaagctgctaatctctctgtacttgttcaaaccttcagtaatgagtttacatctcaagcatgggacttcttctctgatgcaactgttgagatcaattccttctatgcgggagccggcattaatggtgtcattacagacttcccaaagacatctgatagataccggagaaaccgatgcttgaagagaggcaacaagacacccatttacatgagtcctgtgcagcctggcagccttttgcaactagtcacaactgattacttgccaccagctgaagctccaaaaccctacctgactgagtcagatgttgtcgagcctcctttgcctcccgtcgccaaaacaacctcgacttctactccatcgggcactgtagcagcggccccaccaccaaacggacagcctaaagttgctgcctctatcattgtaccacttatggctgtgcttcttgccatgtattactgttttgaaatctgataagagtcggccttgctctcaattttttataaatcttattgctttggatatcgagtaggttgaaggttttgctgcaggagtgcagtgcccgcggcaaagaccagtttttcttagttgtcttcccctttttctaaaagcacagttcttgagagctacatatctttaatggatgcattccctatttgatttgggt

SEQ ID NO: 197310 - DNA, 453 bp, Gossypium hirsutum
  unsure (1)..(453): unsure at all n locations
cccacgcgtccgaaatcctcgaggcgatcaaggcgaacttcaatgataagtacgatgagtacaggaagaagtggggaggtggtatcatgggatccaagtcacaggcccgaaccaaggcaaaggagaagcttcttgcaaaggaagctgcacagaggatgacttaaaagatcaccatttttatccttccggttgtactttcagttttgttttcgattttgtttagattaaatggtcctctttttaagtaaaagctgcaatcaactttcaaactttagtttcttttctttttaactgaggaatatttatagatttctgtttgaacttttgaaataactttctagctactggtttgatgaaattttgtgggcttataatgaaaaactatcaattatgcggttgnnaaacaatacatataatgtttgcttccaatatagagatacttactgatcaaaa

SEQ ID NO: 197311 - DNA, 395 bp, Gossypium hirsutum
cacggctaatggaacctgtatattatgtggagatacaaacaccaatcgactgtgtctctgctatctatactgttttgtcccgtagacgtggtcatgttacagctgatgtgccgcagccaggaacccctgcttatattgtcaaggcatttttacctgtgatagagtcatttggattcgagactgatctaaggtaccacacgcaagggcaagccttttgtctctcagtattcgaccactgggccatagttcctggagatcccttagacaagaccataggtttgcggcctcttgaacctgcaccaatacagcaccttgctcgggagttcatggtgaagaccaggcgtataaagggaatgagtgaagatgtgagcattcaacaagtttttttgacgagg

SEQ ID NO: 197312 - DNA, 857 bp, Gossypium hirsutum
  unsure (1)..(857): unsure at all n locations
ttaaacggttggaaaataagtacaaagctgcacaacaggcttctgaagattggtaccgtaaagcacagctggctctgcagaaaggagaagaggatcttgcacgtgaagcccttaagaggcgtaaatcttttgctgataatgctaattcattgaaagctcaacttgatcaacagcaaactgttgttgataatcttgtctctaacacacggcttttggagagcaagatacaagaggcaaagtcgaagaaagagactttgaaagctcgtgctcaatctgcgagggcggcagctaaagtcaatgagatggtgggaaatgtcaacactggcagtgctttagcagcttttgagaagatggaagagaaagttttggcaatggagtctgaagcagaagcccttgggcagttaaccactgatgatcttgaaggaaagtttgcattacttgagagcacatcagttgatgatgatcttgcaaaaatgaaaagggaactctctggtagctcgcagaaaggagagcttccacctggaagaactgtttctgctagcaataatacagcatttccttatcgagattctgagattgagatggagctcaatgaactgaggcgaaaggcaaaggacttctaagttcctgatctggatacctgaatgatggtatttttatttcatgaacaaatcaaaacagttttatcatattgagctagaatccgaacagatcatttgtatagctgcagtccaaactcaatgaactataaccagttttggatggttatgtacatactttttatgtatttatcattgtcatgttgcccttataacctaatgcccaccagcggcaatgacccatgtttttggaccana

SEQ ID NO: 197313 - DNA, 591 bp, Gossypium hirsutum
  unsure (1)..(591): unsure at all n locations
cttcgcgtgggttccgacattccaaaggccctgtgaacaatatcgtcattgttagactcccatacccccttggtcgggcagaatcaaaatcacaaccttcctcaagaaagcatgaactttcactcccacctccgctagaaaaatacgcaaattcaagcgatgaagacatggacaacaaggctattgttatgctcccagatactatcgacctcccttcatacctcagttctcagctaatcaatgatcacattaaacaacttcagcaacaagggtcttcggctgtggccgaaatggaagcgaagagactgaaggttgattgtcaaagatcaaaggagatgtttcaacagctgagaaaagtttatgataacttacaggaattttgtgtcaatgagctcttagatgagcaaacaatggaaggatccaaagggaattaactcagatacccctcaaacccttttctttttacactttttttcttcaaattttcattgttgaatttgtttccattataaacaagaatcccatagctaatttttgtaccttaattgtgaagcatattctagaaagattatatggatttatgacagcnna

SEQ ID NO: 197314 - DNA, 427 bp, Gossypium hirsutum
cttctatctatccaagcccaaacacctcttttttcgcaaaattttctaagttttagccatttagaaaaaaagctttttgttgttgaaggccatgactatgagtaacaatattgggcaatttggtgacacaactttaaccaaagttttcgttggagggttagcttgggaaactcccagagaagccatgagagagcactttgagaagtatggtgagatccttgaagctgtgattatttctgataaagtcactggcagatccaagggttatggattcgttacgtttaaggaagctgaagctgctaagaaagcttgtgaggatgctaaccctatcataaacggacggcgtggttacttaaatcttgactcacttgaagcgtataacccgatgtccactctcactgtttattaacaacaaggaccacacgca

SEQ ID NO: 197315 - DNA, 711 bp, Gossypium hirsutum
caaatagctcttctccattaccagaagaaacaggagccaatcctttaccgactgagatggaaactgatgtttccaattctgcaatggagcccatggagacgatggaggtccagtctgtggaaagaactactcagtttttcccttttggtgatcctacctcatgggagctacctttcttgcaaggatggttaattggtcagacccaagctggtcagcgcaatatgcgtttggctactggtggtggtcatgacaattcactcccagctggtgaaacaggaacttctgcttcagtagcttcttcaggtatggccacgagtgttagccaaacaagagtttctggaagaccaagttcacggcatcgttcttcgcgttctcgcatgatctcctcaagtggaactggtgaatctggttatagcaacatcatacatgagagtagcgatcctcaacctgctgttggcagaattccatctgaacttgccacatcacttgcggctgcggcagcagcagaactaccttgcactgtaaagcttagaatatggccacatgatatgaaagacccttgtgctttccttgatcccgagaaatgtcgcttgatcattccacatgctgtgctttgtagtgaaatgggtgcacatttttcaccttgtgggagatttttagcagcctgtgttgcctgtgtgcttcctcatttggaagccgatcctggagttc

SEQ ID NO: 197316 - DNA, 466 bp, Gossypium hirsutum
gggtcggacccacgcccgtccggacccagcaaagagcctgacgccttactagtccggcctgagcatagaatgattggtgagaatgatacagggagatcatagcaatgtgaggggtgaaggaaatacaagggcaccacattgttttctcccaaacctggaagtatttggaacttaagttgtctgcccaagtctagcccaagcttttcctttggcgcatcactttgttcggagttcccaagtcttgcgaatccgtgaagggtgaaaaagttgccccaaaatgacgaattttctgtcaagggagagttaagcacaccaaggctggaaccagcgcacttaacaggagatgaggacggtgaactgcagtgggaaggcgaccttaacactaccataaaacacatgttcgatgaaatgaatgtgcaaaattctcaagcggtcgaggttactgatcagttggggtccgtgtgag

SEQ ID NO: 197317 - DNA, 548 bp, Gossypium hirsutum
  unsure (1)..(548): unsure at all n locations
ccaacccttccggccaaacccggatatgtttttctaggtaagaaggaatccggaggtattagtattagggaggtccaatatggttttgcttcatcgaaatctatgatgagccaatgcctcccggccaatgcaatatggttggggaaaggcttggtgattatctcattgaacagggtttttgatcttgctgctgtggcctattttgtttcaattcttctctatttctatacaaaactcgtatccaccacctcttatagtgatgggtgggtgcaggtgaataatagtattaccagttactagtgtgaaactcatagagaactcaacgaaaagctcagtgtttgtaatggcgatgttattgatcgcttactttggatttgtgccttgcttgatgtatggtatcatgaagattgttgaggtccatttgcctacctttacaattttggatttttttacttttggtggtctttcttattaattatattatttttaattttcaannnnnnnnnnnnnnnnnnnnnnnnnnnnnnnnnnnnnnnnnnnnnnnnnnn

SEQ ID NO: 197318 - DNA, 771 bp, Gossypium hirsutum
gaggaatttaggtgatgaaaagccagcaggagaagaggatgctagagatgctaacaaggagagtgcttcaaacgagcctgaagaaaaagagcccgaggataaggagatgactcttgaggagtatgagaaggtgctggaagagaagagaaaggctctgcaggctctcaagatcgaggaaagaaaagtagatgccaaggagtttgaatctatgcagcagctttcaaacaagaagagtaatgatgaggtcttcatcaaattgggatctgataaagataagagaaaagaggcttatgagaaagaagagagagcaaaaaagtctgtcagcattaatgaatttctgaagccagctgaaggggagaggtactataatccaagtggacgtgggcgcggtcgtgggcgcggctcaagaggatttggtggaggcagtgccgcaagagatgtggcagcgccatccattgaagaccctgggcacttcccaactcttgggggcaagtgaagaagtgagattcctttagagccccacatatgatatccatgggttttattggaattttaggtacttttaaatttcgggctgggaataagataaaaaaataatctggtttcctgtcgccaaagcatctccgaattttatgttgtaaaatgtatgtttcagggtttttctctctttttgtttttttggggttattgcccccactattgttatgctgtgatcttacttgtattgctcactgctcagttttctttttgaataaatggaactagtttgct

SEQ ID NO: 197319 - DNA, 394 bp, Gossypium hirsutum
cccacgcgtccgctgtgttagattaaagtgtgtataaagagtgtgaaagacccgcacactcgctgtctccgaccgtgcgagagccgaccggcccctcccagaatgctgcgtcgagcattggggctcttgccccgacccatagcagctgcaagggctcgatccttttccaccgatctgcccgccgctcacactgccgatgccaccttcatggaggcctggaacaaagtcatgcccaacacggatcctcctaagacccctctatctttcatgcaccctcgcccgcctaccccttcctccattcctcccaaactcactggcaatttcgttcttccttatgcttctgagttggccaccaaggagggtgccttggttatagtaccagccacaaccgggc

SEQ ID NO: 197320 - DNA, 718 bp, Gossypium hirsutum
  unsure (1)..(718): unsure at all n locations
atttgattgattctcatgatgtaattttcttgttgactgatactagagagagtcgatggctccctactcttctctgtgccaacaggaacaagataaccattactgcagctctaggatttgatagtttcttggttgtgcgccatgggcctggtccttttaactccatccctaacttgaaagctgaaatggaagactctttagctgctggcatggacaaccttgtcctaacaaatacagatggacaacatagactgggttgttacttctgtaatgatgtgggtgccccaacagattcaacttcaaaccgcatgttggatcaccagtgcactgttacacgtccaggacttgcacctattgcttctgcactggcagtggagcttttagtgggcattttgcatcaccctaatgggatatttgctgaagctgagattgccaactccagtagcggtggaaactttgagcttccactgggtattttaccccatcagatacgaagctccctcccccactttcaacaaatgacccttttgggccactcctctaacagttgcacagcatgttgtancactgttgtgtcagaatatcgaaagagaagtatgcaattcatactccaggctattaaccatccaacgtatctggaggatgttactggactaacagagttgatgagatcagcgaactcttttcaactggactgggacgatgatattgaggttgt

SEQ ID NO: 197321 - DNA, 456 bp, Gossypium hirsutum
aagatacccaaatatgagctgacggtggaggatggccgtagattggccaaggagtatagtcgggttttgatgaggaagcatagggcaaggcaggctgctgagactaatttgttgagaatgaaaaaggaggcaattgatgcgttgccggagaaacttaaggaggcggctatgataccagatttgaccccatttccggcaaatcgattgatggcgtctttgactccacctattgaagggtatattgagaaggttaaggaagcggctaagaaaagttcctccaagcagaagcttaggtgaaggcgaggtggaagtaggcaagggacaaacttcactcagtgaaactgatgatcaattacagctgcaatgtactgtgattttctctgatggcaatgagtctcaaaacaagaattattcaacattgaaattgagcaatgccatatttttcggttaacattg

SEQ ID NO: 197322 - DNA, 485 bp, Gossypium hirsutum
gtggttcctttttgtaactgggattcctctgctgttaatgggttctggcgccagtgcaggtgttggaggttatgcacttccaaaggttgctcagctcaccgtcacttcctattatgctgcctctagtgcctcgcattatggaatttcactcctcacgcgacacattgaagatgcatatgctactccttctcaacaagaaaggctaagatgaatccttaatcatgcatttactcaagattctactttcatcagttctgaaatagcaatatgatgcctatgtgtatagaacttttggatgaatctgctttttcctttttaattaatttctttttgatttttacatttgtgttcttctaaaattaatatataatataggaatattcatacattgatgtatttctgaggaatttactagaagtttttgctaatcatatttaaaggtaagatcacaacttactcaccactgaatggtaattggatgtgtt

SEQ ID NO: 197323 - DNA, 432 bp, Gossypium hirsutum
  unsure (1)..(432): unsure at all n locations
cccacgcgttcgggaagagctggtaacatgtgaacctggatttgttttttcttttttacatggttggtttggtggctcacttgtttcttattttatctcatttgccttcgctacgatatttttctcgactcatatttggtgttgaatgtttggtattggaatcatgtacactccctgtagagaaaatagaaagatctcgctttcgggttataggttgagtttatagatttgattctgtctctgtttttctcagacccatagaaatttttatttttatttctattttcattgggatcgagaaaacccttaaataaaaaattttatcagtctgaatcgtttctcttctctatttagctttcaatttatataacaaattttnnnnnnnnnnnnnnnnnnnnnnnnnnnnnnnnnnnnnnnnnnnnnnnnnnnnnn

SEQ ID NO: 197324 - DNA, 511 bp, Gossypium hirsutum
gctttttcactttgtgaagctttcatttctactccactctttttctcatcttcagatctcatctccttccctaaggttaaccaatggcaacagttcgaaatctgaaaatcaagacatccacttgcaaacgaattcttaaagagcttcactcatatgagaaggaagttgaaagagaagctgctaaaacagctgacatgaaagagaaaggagctgacccttatgacctaaagcaacaggaaaatgtgctggctgaatcaaggatgatggtccctgattgtcacaagcggctagaggcttcattagctgaccttaaagcaactttggctgaattggaggaagcgaatgagaaggaaggccctgaattcgaagatgctcgcagcaccatcatcgaagttgaaaagttgtttcaaacaacagaggcttagtgacagcttcttttaagtggctgtagttaccataaaaaaaattgacatagatggttataagttcgtatgtttctatttctagctac

SEQ ID NO: 197325 - DNA, 604 bp, Gossypium hirsutum
atctgtcttgatccccagtgaataattataatttgaaaggtgaagaaacgaaacagggggtggggttttattttcttgtggcccagaccacttttaggtttcagaggaatggcggagaaatcgtgtgttaagcgccttcagaaagaatatagagcactttgtaaggaaccagtttctcatgttgttgctcgtccatccccaaatgacattcttgagtggcattatgtgctggaagggagtgaaggaacgccttttgcaggtgggtattattatggaaagatcaagttccctccagagtatccctacaaacctcctggaatcacgatgatcacccccaatggacggtttatgacacagaagaaaatatgcttgtccatgagtgattttcatccagaaagttggaaccctatgtggtctgtatctagcatacttaccgggcttctctctttcatgatggataacagtcctaccacttgcagtgtgaacactactgttactgagaagctacgcttggcaaagacatcccttgcatttaatttgtaaaaccccacattcagaaaactgtttccggagtatgtggataagcacaacaaacagcagcagc

SEQ ID NO: 197326 - DNA, 432 bp, Gossypium hirsutum
caaagaggaagactacccgtaccttattgtcatggtacctgtgaagaaaagaaggagggaagggttgtggtgacgattagtggttacaaagatgtgccggaaaatgatgagaaaagtctattgaaagcattggctcatcaacccctaagtgtagccattgaggcttctggcagagatttccaattctatagtgggggagtattcaacgggccatgtggaactgatctagaccatggagtagcagcagttgggtatggaacatggaaaggttcagattacatcattgtaaagaattcgtggggaccaaaatggggagaaaaagggtacataatgatgaataggaacactggaaaacctgagggtctcttgggtataaataaaataagctttttaccctaccaaaaacaagtgaagagctctaacctcaacata

SEQ ID NO: 197327 - DNA, 453 bp, Gossypium hirsutum
gccagagtattttcttctagttttcgccttcttctagttttcgcctttcactgtttccggggattgaggtttgattcaatgggattgccaagtaatgaagttgagaatgtcatggaagatgatagcgatgttatggatgatgttagtgaggaagagtttgaatctgagtcggactcagaagaggaagatgtgaagttggccgagccttcgaagaactctatatacaatagagatgggctcattgagaagctggaagatatcagctggccggaaaatgttgaatggatgcacaagctttctcttgatattgatcaagagaaagaggtggatgtgaacgatgacctggctagagagctcgctgtctacacgcaggcattggaggggacaaggttggcatttgagaagtttgagtcgatgaagctacctttccttaggcctgcggattattatgcg

SEQ ID NO: 197328 - DNA, 455 bp, Gossypium hirsutum
ttcactgcatcctctatattaataataatggtgttgtagaagggaagagagaataaaagggcggaaagaaagaaactaagccaaaaagaagaagaaggaaggactgagttgaataatattgaaaggttagtgagttgaaaaataacataaaaatggcaacatttgcagggactcaacaaaaatgcatggcctgtgacaagactgtttacttggttgataagctcactgctgataatagggtctttcacaaagcctgtttcagatgccaccattgtaagggtactctcaagcttagcaattacaattcttttgaaggggtgctttattgcaggcctcactatgatcagctcttcaaaagaactggcagtctagacaagagttttgaaggaacaaccaaagattgccaaaccttgaaaacacatttaaaatgagattgcacagaaagtggtgaattt

SEQ ID NO: 197329 - DNA, 654 bp, Gossypium hirsutum
cggacgcgtgggcggacgcgtggggtttgatttcttctaattagtgaatcatatggccagcactgtggccctcaagcttgcatgtggtgtggtcttgtgcttggttgtgggtgcacccctggctgaaggggccataagttgtggccaagtcatatcagccttggcaccctgcattccttacgtgagaaacaacggtgctggtggcgtgcctgcatcttgctgcaatgggatcagatctctcaacgaggctgcccaatcaactccagagcgccaatcagcttgcaactgcgtcaaagctttagctgccagcatttctggcatcaactatgaccttacgaacaaactcccaggcatgtgtggggtgcacagccctttcaagatcagccccagcactaactgcaaaagtgtcaagtgaagtaggccatggaagctcgtcagcaaatgggaaaggaaataatgatatatagctacataataaaaatggatggcagcgctctttatctttgtcgtagttgtccctagaaatataataaaacctcaagctattgcatgagttttgagttaattgaatgacaacgtataacgaagaactaaaaaataatttaaaaaataaattaaatttaaaataaaaataatatttataaaataaaaatt

SEQ ID NO: 197330 - DNA, 416 bp, Gossypium hirsutum
tccacgcgtccgattttcttcaagcccagggcgaggaattacgacgtactttagcggagaaaaggcataggcattaccgtgcgctactagaggcagcggaggaatcggtagcgaggaggtttagagaaaaagaagcggaagtggagaaagcaaagcgccggaacgtggagttagaggcacgtgcggtgcaacttggcgcggaggtacaggtttggcaggcgaaagccaaggcacaagaggtgacggcggcttcgttacaagcgcagctccaacaggccataatgaacggaggagctggtttgacgcagcgtgatagcaggagaggtggggaagaatggcggaagcgcgccggcggggaatcagaggcgcaggcggaggacgccgagtcagcttacgtggatccgggacgtgtcgta

SEQ ID NO: 197331 - DNA, 1032 bp, Gossypium hirsutum
  unsure (1)..(1032): unsure at all n locations
gagaaagcaatcatagtacaaccaaatcgtgtgacgataggcaatggtccttcttttggctgggttttcatggctgacttcttaagtgcattggcaaagaaacttaagaaaaataccactgccgtggagaactatcggcgaatctttgtccctccaggcatgcctttgaagcatgggaatgacgagcctctgagagtcaatgttctttttaagcacattcaggatatgctaagcaaagactctgcggttattgctgaaactggagactcatggttcaattgtcagaagctccatcttccagagaactgcggttatgaattccagatgcagtatggatccattggttggtcagttggtgccacgcttggatatgctcaggcagctaaaggcaaacgtgtgattgcttgcattggcgatggtagtttccangtgacagctcaagaatattccaacaatgatcccatgtggacaaaaaagcatcatatttcttatcaataatggaggctatacaattgaagttgagattcatgatggcccttacaatgttatcaagaactggaattacactgcctttgttgatgccatccacaatggtgaaggcagatgctggacagccaaggtgaggaccgaggatgaactgatagatgcaattgcggcagcaacaggagaaaagaaagattcactgtgtttcattgaagtttttgcacacaaagatgacaccagcaaagagttgctggaatggggatccagagtttcctctgctaacagccggcctccaaatcctcagtagagctgttgattctgaaatgtttagggaaagacagactggaagcaccataagctggaaataagatagatggggcagatttgcttggcttggatgagatttctgttaatcttgttactgcattaaactttgtaatcatagcaacttgattaaatgtcgaggcttttctctttgatgcaaaaaaaatagagcatataaaaaaattaaagattaaaaaaaaaatgttactctgaacttctattaga

SEQ ID NO: 197332 - DNA, 543 bp, Gossypium hirsutum
ttcacgcgtccgtatagctctgcctctttttgtttatatgttagtactcgtaattttctctttatctttttttattatttaattccagtttcttggtcccttggtaattgatcacatttgataattgtggtttcagttcttctcaggggatatagcgacgccaaaacgatgaagcgagtagtactgaaaagggtggagccaccaaggcccgttacgactgtgagatatgtggagtgccaaaagaatcatgcggcggctgccggaggccatattgtcgatgggtgcagggagttcatccccagtggagctgaaggaaccgatgcagcctttacttgtgctgcttgtggctgccataggaatttccatagaagggttgaaagttaaccttgttggccactgttcttcggctccatcttctaatggagcataaaaataatatatttatatttcaaaccatatgcaataaaataaacaaataaatactaaaaaaaaacatcttgaaaaaaaacaatataaatgactaatttacaactttataagaac

SEQ ID NO: 197333 - DNA, 402 bp, Gossypium hirsutum
gcgcccacttttgcggccacgcgtccgctcggcatttgttggggtcgggttcacaatgtgcttaacctctattatttacgaggtttcgggagcatgggaaaggcggcacatagagtcaaaccaaccgcttagttctcaagaggtaccacggcccaatcaagcaccggtaacggcaccgttacaaacacaaacggatacgaacgcccatggtaatgaacccgaaaggagagctttagaaagtgggaatgccaattaagtttaaaacatctataaggtgtaaaaaatggtgttcaatgaaagttttctgttgtacatataccatctcattgtgtagagatgctttacatgcttgtctattgttgattttattaaacgttacttggggaaaaagcttttttactt

SEQ ID NO: 197334 - DNA, 624 bp, Gossypium hirsutum
accggaacccccatttccaggtacgtctcctccttccttcttaaagtttccgttgttattacatgcgcaaggttgtttgcagatcttattgtacgtttgaaaaagaagcttctcgatctgttaatgttttgttgtatatcgtgtatataagctcctatatgtgaacgatcttgacttttggttgtgcattttttgattatcgtgagggagtcgctttctattatcaccttcggccattgttgtcccactcctactttgaccgcttttctacacgctattgcttcggctgcaaatgcggaagataccccgtggttgatctctgagtaggaaagaaggacaagcctttcctcgtctctgaccacaacccctgaggcagatttatggtgagtcgcatcatactcaccatcaaaatttattttaacgaattcgcgatgtgggtagctccactttcttgtttcctttcccttaattgaccttcttatttcaagcccattaggttcaacaatatagttgttgatgaagtctgctatttgttgccctataaaaaatagatcaaaaatccaggtaatccactataaaaaatccatgttaggaaccagaatcaaattctgaatttttaatagt

SEQ ID NO: 197335 - DNA, 475 bp, Gossypium hirsutum
gaggaaaggaaggaggccgaaaggaacccgaccgaaaaagccaaacctgaggaaaccgcaaggaaaaaggaggaaaagtcccctgaggaaggtgaaaacaaagaagaggggaagaaaggaggatctgcagaagcagaggaaaatagtggcaatcatggtaacgaggaggaaaccatgaagagaatgatttactattaccagcccctttacgttatcgagcaaatgccgcctgctcctcagctttttagcgatgaaaatcccaacgctcgttgcatttcgtgatgatttatcattacgacaaacttctttttctacctgtagattatttcaattttactataagggtgagaagtatacagataactagtatatataattaatgttcaggccttaccactggagatgagagttttagagaaatctggtggaccggtcgcacatgtatcatcaaggaatgtgggaaaatgggatcatt

SEQ ID NO: 197336 - DNA, 450 bp, Gossypium hirsutum
tccacgcgtccggaagcctcttacagatggtgaaatgattccgtgtgtcccgaatacacttattcgttccgtgcacgatttgtatggtgaagagcaacatgacgccatgctgctgtggttggaggaacacggacgccgtttagagaatggtattatcaaagtccgtaaagaaggagatgatcgtagtatcaatttatttcccgaggttcctcccttatgtgtcactactgtaacaaacggtgtgcaggttcgtgcttcggctgtgttcgttccagaatttgctgacctactagatgaagccgagaagttcacgtttgcttattcaatccgcatgtcactcttacccgaagggtgcgtcattaatggaatgaccttcggctcctgccaattgaataggaggcattggatcattcgtgctgatggagaagtcgtatccaagtgttgatgatg

SEQ ID NO: 197337 - DNA, 442 bp, Gossypium hirsutum
cccacgcgtccgagtttggtgacaagtcctctattgttcaagctaatccctgcgttacttcatctcggggtgctcttacgatggttctcccctgagagagaaagtcccattgaggttggaattaaaggagataacctccgttcagacagcggaaagcatcgcattactttgatggtgcaagaaccccatgattcctgattaataccatgtaagtaaactaatcgagaagaaacatctccattacatgtttgatcggccgtgtttttgtgacgctgcaggtgaagttaatgatctcgtgaaacacactttgcttcctgtttttgttttggtttactaaccctactatatttgattaacaaactgcattgttcctcttaaaaagatgccaacagcatgaggtaacctctagcttgtgaagcaatgccttgtaatcattcatttc

SEQ ID NO: 197338 - DNA, 569 bp, Gossypium hirsutum
tttataaaacactctccctcctcaaatactgaattcaacttccaatggcgtttcagcccctaaccttcctattcctactcctcctcaccgcctccgttctcgaatcttcgacttcttttgaacccaatatccgcctcccgacaacggcaacgatcgttcctcgatccgacattgatgacgacctttactgtgccagctggcagttagccgtcgagaccagtaacgcaggaagttgggccgcaatcccctcccgctgcgttcccttcgtcagagattatatgaccggtcaacgctacgcttccgactgcgaggtcgtcgctaattactccctcgcttacgcttccaccgtcaagatcgcatccgacggcaaagacgcctgggtcttcgacgtcgacgagactttgttgaccaatttaccctactatcgagatcacgggttcggatcagaaatttttaacgagagctgttgggatgaatgggtggcagaagccaaggccccaactataccatcgagtttgaattgtataatgggttgaagcagatgaggttcaaaatatttgtgcttaccg

SEQ ID NO: 197339 - DNA, 443 bp, Gossypium hirsutum
gaaaaaaaaaaaagataaggaaaaatgatgcgaagtcggttgctatggttcaccttgggggtttcggtgacagcggcttcaatctctcaattcatatatagagacctttggactgatcgttacgcccttaaatctgatatgaaggagaaattcgatgctttagaagctagggtttcgaatctggaatccctccctacggagaatccaaatccagctcaggttgatggctagatgtttatttggggttcacataacttttgtgctttgaatgtatttgaattttttttgtttcctttttattatatatttgaggtttttggaactaagagttcaaagctctatcaacagaccggatcacccggttgttggcgaatgtatttgatttcgaaacaaaaaggaaaaaagaagatttaagttacttttaaaaaaaaaaaatttttttt

SEQ ID NO: 197340 - DNA, 622 bp, Gossypium hirsutum
  unsure (1)..(622): unsure at all n locations
cacgcttcagtggggagccatcacctgttaaatcaacagtgacaaaagcagttgcagagggtcggcgtactcatgctgatacatggaatgttcaaaaggattcatttaccgaagaacaacttgaggtcctagcagatacatcatcttcgtcatcatattttgcttgatctagatttgctttcctttaccaagagagagaagatttagcagaaatacaatgattgagaatagtagtgacaagttttatgatttacttataagtatcgtcatagttgaactatagcatgatttttatttacattgccaaatataaccttttatctccccccccccccaaaaaaaaagaagtttattgttggccatgtaatagaaattcttgcctacattattattctttggtgttaaaggcttctctataaatagggttgataagatcatcaaatggtatatcccataacacacaatcatgcatgaatatgcttgttgattcttaatttcttttccaccttggaattcnnnnnnnnnnnnnnnnnnnnnnnnnnnnnnnnnnnnnnnnnnnnnnnnnnnnnnnnnnnnnnnnnnnnnnnnnnnnnnnnnnnnnnnnnnnnnnnnnnnnnnnnnn

SEQ ID NO: 197341 - DNA, 965 bp, Gossypium hirsutum
ccaaccgcatgatccgcctttcaccgaagatttaccgcggttgaacgcacccaatttttactaccatcaagaagacatcctctttgaagaaatcgagaagaaagaaggattaacctggtcggtgcaccgacccgcaatcatattcgggttttcgccttacagtttaatgaacctcgttggcagtctttgcgtttacgcggccatttgcaaatacgaaggcaaaccgttacactttcctgggagcaaagccgcttggaactccgccctcgcggccgcggatgcggatttgattgcggagcaacatatatgggcggcggtggatccgtacgccaaaaacgaagcctttaatgtgactaatggggatgttttcaagtggaagcatttgtggagcgttttggcagagcaatttgggatagaagaatttgggttcgtggaaggggagaaccgggggatggaggagatgatgaaagagaaggaaggagtttgggaagaaatagtgaaggagaaccagttgcagaagacgagtttgcaggtggtgggaaactggtggtttacggatacgatatttttggctccgttgcagatgccgctgctcagtatgaataagagcaaggagcatgggtttttggggtttaggaattcccggaattcatttgttacttggattgataagatgaaggcttacaagattgtgccttgatctcattcaatctcttgtttcaaattgtttccttggtttttcagatgaagatgaaatttctgttgttgtacttctaaaataagttagtagggtaagttattaattggcatgctaccgtaagatgtcagaaacaattgcttaccttcaaagagaagcttctgttgtacttgtgaaaatgctgtgtggttttcttttccctttatttgtttatgatgcattgtctaaaaaaaaaaaaaaaaaaaaaaattctgcgtcgacgcggccg

SEQ ID NO: 197342 - DNA, 413 bp, Gossypium hirsutum
cttcctttcccttcatcatcctcctccggcctagtacttcccaaatacatgtctccgagggcaactctttcccaccctctaggcttcaaattcaatcttaattcttcacctaagcttcttaaatcgtttgacccagagtttttcctccatctccgaacccgcaaaacaagttctcttggaggaattttgaccgacaaaactggggtgcgcgactcttcaagaactatgattaaaacttctgtgttaaaggagtctagggacagagacgatgggattcaagcgcttgaacaagaagtagaaggtttcattgacggatcaatacgggttcaaggtttcgagtccactttgaaccgtctgagcaagtggttggtgtcagctttgtttgagggggtgatactttggaggcctgacgc

SEQ ID NO: 197343 - DNA, 628 bp, Gossypium hirsutum
ggctggaaattttttgggaatcttatggatgctggaaagttgtcaatttgtggggaagaaagttttggtacgggttcagatcacattcgtgagaaggatggcatatgggctgttttagcatggctctcgattattgcatatcgaaacaaagacaagaaaccaggggagaaattggtatctatctctgatgttgtcaaagaacactgggcaacttatggaagaaattccttttctagatatgagtacgaagaatgtgaatctgaaggtgccaataaaatgatcgaataccttagaggtctaatctcaaagagtaaggcaggtgaaaagtatggaaattatgtccttcaatttgctgatgacttttcatataccgatcccgtggatggaagtgtggcctcaaagcagggtgttcgatttgttttcacagatggttcaaggattatattccgtttatctggaactggctcagctggtgcaacggttcgaatctacattgagcaatttgaaccagatgcttctaaacatgacatggacgcccaagtggcattaaaaccattaatagacttggcatcgtctgtatcgaagcttgaagacttcacaggcagggagaaacctacagtcatcacat

SEQ ID NO: 197344 - DNA, 541 bp, Gossypium hirsutum
  unsure (1)..(541): unsure at all n locations
ctgaagatacttttaaggtagataagaaagcaaaaagtatatgggaattccaccaacaggaagttgatcctgctgcacagctttcagtgacttacaatgggtcagctgaagtttcccggatcatccagtggatgtcaaacataattgaggatggtgactccaggaaactccccttctatagggtaaaatctccagagcttgttcctgaggatgcagagcctttctggtcaagaggtccacaaggcttactttccaaaagcatgggaacaaagcaaaaaatccaacgcactataattcgaatatatgattatctaggtgatccaaggattggtccagctttgcttttgggagccttgatgtcctttggtagcatctggctgatgaggactcaacaaaatcgttcggttcagtcaagccaaccgagccaagcagataatgatgataaactgaaaccaagagagagacgccgggaaaggaatgcatcgaaacgcaacttacctncttcaataactgattttgagccaaaagattcataccagac

SEQ ID NO: 197345 - DNA, 583 bp, Gossypium hirsutum
tgatatttcgcttcaatggccggatcataaagcgggttcaattataatcgatggaattgaatatggggtcctacaagttcattggcactcaccttctgaacataccattaatggcaaaaggtatgccttggaggcacatatggtgcataaagccgcggaccctaatgtgaagaccactttaactgtttctgcactactttacgaacatggttcacctaatgatttcctaccccagctcataagcaacattacagatatgactgatgtggtccaacaaagatcaatgggggtgactgatccaaaccttatagaaattgatggcgtggagtattatagatacattggttctttgactcgccctccttgcactgaaggtgtcatttggattattaacaagaagatagcaactgtttcgaaggaacaagtacatgcaatccgagaggctgttcatgattatgcagaacaaaatgcaagaccagtgcagacacacaatgaacgagagatggaacttcatagtccccacagctgaaaatctaaaacgctgtatttactacaccattttacgtatcttatatgctatatg

SEQ ID NO: 197346 - DNA, 811 bp, Gossypium hirsutum
agcatcagttatatcactgtattgcatgtacctctgctacagtgggcttgcaagtgaaccaagagattatgaatgcaatggtctccacaagcattctaaagcaatttctactggcactgtgactgttggcctgcttaccactatcctttctgttgtctattctgctgttcgagctgggtcttctacaactctactatccccaccaagttcacctcgtgcaggtggtggaaagccattacttccattggacaaggctgatgaggagaagaagaataaggcagtgacgtactcgtacgccttcttccacatcattttttctctggcaagtatgtactcagcaatgcttttgacgggatggtctacctcagttggggagagcgggaagttggtagatgtagggtggccatctgtgtggatacggattctaacagcctgggtaattgcagctctctatatgtggtctccccttgctcctattctcttcccagacagggacttctaagtctctctaaaacaaagttgtcggatatctttgcaataaatttgctctgtatatgtatgtttgtatgtgtgtgggtgatctgagatggatttgcagtcaacaaattgatgttggatatttattgttgcagtaaagttactgtatgtctgatggtctgtgacagattggattacattccccactgagatactaagaaccttcttgattgtattatctttgtgtaattattgcaagtttaataagaaaaggcatgatattcatttaaaaaaaaaaataataataaattaaatttataattaaaattaataa

SEQ ID NO: 197347 - DNA, 259 bp, Gossypium hirsutum
aatgttttcagctcagaaaccttgaagctgtgtttggatctttgaatatatatagtgctttgatatgggttacaatattatttggttatacaggaatcactaaaaagaaaaccttgaaacagattataatgtggtaaagatggaatgtatagtgcatgctcaatttcttattaatgcaagtgttgcctgatcgaccgatgattgtgtaaatgctttgaaatacttcgttagtgctcaataatattgagtatatgatgaa

SEQ ID NO: 197348 - DNA, 446 bp, Gossypium hirsutum
gccagttgctgttaatactgcatgaatgaaatttatgctacataatcgtgcgactttgtgcaatgttatagaagggtagggagatgtgtgttataagtggtgttggatggccgacaggttttccttctgtggctattagccattagtcgtagttggaaagaaattatatgattggtgagtgggtcgagtgacccattttcctatgattttgtatgtgggtatggaaaatgcaaaaacatatgcatgtcttatgttttttttagctttgattgatgtagtaagtagatgaccaatgccctatatttaatgagtgaataaggaataatatttgtcgttagaataatttgttttgcttttccttccagtatgtaccatgcatgtattttatgaagtgtacatgtttgggttaaaatcaaattaacagatcaggttgagttggtttgatt

SEQ ID NO: 197349 - DNA, 1067 bp, Gossypium hirsutum
tacgcattgaggacgtctccgcaatggctcggtccacaaatcgaagtgatcggattcgcaaccaaatcgatcgaaagagagatcaattctgtcaacgacaaccctttgatcgacgtttcgaggaacaaagcattacatggtggcaatttccaaggtacacctattggtgtttcaatggacaatactcgtttagctatcgcagctattgggaaacttatgtttgctcagttttcggaactcgttaacgatttctacaacaacggtctcccatcaaacctctccgctagtaggaacccgagtcttgattatggtttcaaaggtgctgaaatcgcaatggcctcctattgttccgagctccaatacttagctaatccggtcactaaccatgttcaaagtgccgaacaacacaatcaagatgtgaactcattaggactaatatcatcacgaaaaacagccgtagcagtcgatatcttgaaactcatgtcctctacatacttggtagctctatgtcaagctattgatttaaggcatttagaagaaaacttgaggaacacggtgaagaacactgtgagtcaagtagccaagaaaaccctcacaaccggtaacaatggtgaactccacccatcgagattctgcgaaaaggatttgctcaaagccgtggaccgcgagtacgtgtttgcttacatagatgatccatgcagtgctacttatcccttaatgcaaaagctaagacaagtccttgtcgaacacgcattcgccaatggtgacaatgaaaaggatacacacacttccattttccaaaagatcacagcatttgaagatgaattcaaagctgcattgccaaaagaagttgaaggtacaagggtttcacttgaaaatggaaatgcaacaatccctaacaagatcaagggttgtagatcatatccattgtataaatttgtgagggaagagcttggaactgggttgttgagtggtgaacaaggtaagtcacctggtgaagaatttgataaggtattcatagctatgtgtgaagggaagattatcgatccaatgatggaatgtttaaa

SEQ ID NO: 197350 - DNA, 703 bp, Gossypium hirsutum
gagattcttttctggtgcaatcatccacatgttcctgcatgtgcttcgtttgttgagatattggctcccgtgttttcacgagacacatggcggtgcgtatggcatatgattcagaatgacttggtccatggctggggtcttgattttgccctcagaaaatgtgtagagcccgcccatgagaagataggtgtagtagattctcaatggattgttcatcaatccgttccctctcttgggaaccagggagagtcattagatgggaaggcaccatggaaaggggtgagggagaggtgcaaaaaggaatggagtatatttcaaacgaggttttcaagggcggagaaagcgtacttgaaggaaataaattcaacatctcgttaggaatatatatatatagcaaagcaaaactagaaaagctaaccctttctatactttcattattagttattaccccacccccccgcattgggatttcatcggatcttcaagtattcattcaatcataaaacctcactcccaatacctgcaatggttgcgttactaagcgagtctcagattttattttagaacgattcttcttcttattgttattcacataaagtttgatgaaatgcatcattgtttttgtagccacaactttctggtccccaaatcacattgagactttaattcccattttttttttttactttttgaaaatggaatc

SEQ ID NO: 197351 - DNA, 566 bp, Gossypium hirsutum
caccaccagtgatggtcgaactcttgtctctaacaatgtcgtccctcctaattggtccttgggccaaaccttcaccggctcacagttcccctaaactctccagaatccgtaatataatagtgatgataatcgtaatattgcattgcagtcttattactgtttgaattaagctggggtgtaaaagattaatgtttttaggggtagagtggtcgaaatgaatagattaatcataatatgaggttataactctatatcaagtaaaaaaaaaaaacctttaaattcgtagagtagttgaaatggtgagaaggcttttaattttaagatgggccctcgtcattgaaattaaatttaaaggtggtggtggtggttgctgttttatttctgttctgctctcttttgacgaaggcggagacagagaaattggcagcggtggcggtgggtatttgatttaaaaacctgccggccgcctcttctttttggtttgctacaatttttgcttttaggtgaagcaatctgtaatcagcattcgagggataataaaatttgtactagttttatataaattt

SEQ ID NO: 197352 - DNA, 602 bp, Gossypium hirsutum
gagcaaaccagggtgctacccagcctaaacccgagcaagagagtatactccagcatgcacagcagcagattgctttgcagaggctaattttgcaaccacaaggtgtgccgacaaaggttgtgtgtttgactcaagcacttaatgttgatgatctcagagatgatgatgagtacgaggacattgtggaagatatgagacaagagggtggaaaatatggtgcattggtgaatattgtcatcccacgcccaaatccgaatggagaacctgccccaggtgtcgggaaggtatttctggaatactcggatgttgaaggttccaaaaaggctcaagctgcaatgaatggtcggaaattcggcggaaatcaagttattggccgtttactatccagaaaacaagttcgcacaaggggaatatgacggctaatgtagagataaaatcatcatagcattgtgcttgtactgattctatgtttatgtctgatcattatctggttccttaggaattttgtagtggcaacctgttgtcgaacttcggaatttgacagtggaacatatcatgtcataatacgttagaactagtttagatgaatgtgttgtttaatg

SEQ ID NO: 197353 - DNA, 780 bp, Gossypium hirsutum
  unsure (1)..(780): unsure at all n locations
ccgggcgacccacgcgaccggtccgtaaccttcttcatcatttccaaattttgatgattttcctctttttttattttatttttatttaaaatttgaaactgctaacattattacattttcattagccttaagagaagaaaaaaaaaatgtcatcgatttcaatgtctggttcatggacagccaagcaaaacaaagatttcgaaagggctttagctgtttacgacaaggacacaccagatcgttggtacaatgttgctaaagctgtgggagagaaaactgttgaggaagtgaagaagcactatgagcttcttcttgaagatgttagacgcatcgagtcgggtcgggttcctttccccgactattggaccgttaccgggaatcgtcaagcatgaaaaattccgaaggtcaaatgaagaagaaaaaatggtggacttgcatggatctcacccttatatatgtctgtgtgtgtgtggcagtaattgtagtacttaagaatagccattaatgtatttaggaagaggaagaagagcttaatgtgtgatcattgtttcctcttttgtttttgtttttaattgaggaaggaatgttattgtaatatatatatatataattatgtagcatatgaagtgtttttattttgagaaaatcaatagaacaataatgctaaagttggaggcccccnnnnnnnnnnnnnnnnnnnnnnnnnnnnnnnnnnnnnnnnnnnnnnnnnnnnnnnnnnnnnnnnnnnnnnnnnnnnnnnnnnnnnnnnnnnnnnnnnnn

SEQ ID NO: 197354 - DNA, 453 bp, Gossypium hirsutum
  unsure (1)..(453): unsure at all n locations
cccacgcgtncgcccacgcgtccgcagctgcacaacttccaggtgattgggtgtctataggacacagtgagcaatggctttggtattctgtctacgcaagcaagcaagtcagttggcgcacaagggcattggtggtctcagactggataaggcgttttattttcgggagggataccagtggcatttaaaaggtccctgggcaacttacaaacattaagatgtctacagtttgggattgaatgctgtagaaaaattttggtttttcctttaccatttaccaattcattcatttgataataattgctgccttgctttggcggttttgaaatgaattttgttacaagtttatactggtttttgaactttatatctgagatccgtgaaaaatatacctatttgcatattggtatctcttctccaagttcttataattgtgttttcccaaattgaaat

SEQ ID NO: 197355 - DNA, 441 bp, Gossypium hirsutum
cccacgcgtccgggataggcccagatctcgtggtactgctgatgcatggacaaggcggggtgatgaccgaagaggatttcaagctggcagggatagaggatttgtaggaaacagagatatggacaggccaaggtcaagggagagatggtgaaccgccattgtcgttggtttgttcaactctgacaacatggaccaataatattttgtcacctctcttcttttcctactgttcttttgctctggtaaagtggagcaaaggattcttggaaacagggagctatgcgttaaatcttcataccatatgtaatatggccactcagcccgtcattctttttatttttaatttctaaagcaaggagcctgtatttggtaggactcaaattttgtttaagaaacaatgtgggattcaccagtttatttttaatattccattggaatgtt

SEQ ID NO: 197356 - DNA, 556 bp, Gossypium hirsutum
  unsure (1)..(556): unsure at all n locations
ctcctaacaatgattatgatgctgatcaagtcatgttcaaaatccttggactgattccaaaagctcccagttttactgaggaagaagcagaaaattgtgatgaagctgtttcaacttcaggttgatttaaagcagtgccttcttgatgtagttgtagtattgtggtcagtgacctttttcgttgttatgtttgttaggtattatctgtaaggaattgcctgcgcaataataaatggcaacgagctcttttgttgcccagggtagtgtcgaaggcttagtctaatgcagtgaaagacttgtgacatatatttatttgataattaaaaaaagaagattagagttaacgtcttaaaaaaaaaaaaaaaaaaaaaaaaaaaaaaaaaaaaaaaaaaaaaaaaaaaaaaaaataaaaaaaaaaaaaaaaaaaaaaaaatcccccaattaaaaaaaaaaaattaaaaaaaaaaanggggggggcccttttaaaagaccaaaatttttatcccggtgtgtggaaagataaaattttttttttggggccccaaaaataaattcc

SEQ ID NO: 197357 - DNA, 294 bp, Gossypium hirsutum
gggattcaaaaaccaacccaggtttccaatatatgctagcaacaaggttgtccatgatctttctgctgtggttgcttccattgtccaattattactatgaggacgatgaaatgttttatctgttctgcaagaaacttactgtctaatgccaagtaatgggcaataaaaatgtatgtaaagatgtgttatagatgttatgaaaaatggataaagagtgaaatgattagtggttttgtttaaaagaagaatggatgattggcattgaaacagtatgtcaatcattaattgtcctcc

SEQ ID NO: 197358 - DNA, 737 bp, Gossypium hirsutum
cccacgcgtccgcccacgcgtccggtgaaaatcaagaaggaaaaaaaacccttaaaatcaaaaccctaatcctatttttttttcctttttgattgtagaaaacaaagcaagccctcaactggacaacatggggtctgaacagaatcaaggaaccagctttcccccgtcggagccgaagctttgcgctaacggttgcgggtttttcggaacggcggcgaacatgaacctctgctccaagtgttaccgggacctccgtgctggggaggagcaagcggcgaaggcgaaagctgccatggagaaatcccttagcgtcaaaccgaaagaagatgttgttgtggagacgtttaagcccgttgagaagctgcctcatgcgggttcatcatcagcggcggttgagcaaccggcggtggctctctccggtgatgaacagcccgagccaaaattgtcgagcaggtgctttatctgcagaaagaaggttggattgactgggtttaagtgccgatgcgggagtgcgttctgtggggagcaccggtacccagaaaaacacgagtgctccttcgatttcaagggcactggacgcgatgcgattgccagtgcaaatcccgtcatcaaagctgacaaattggagaggttttgaaaggtggggagcttggagtcagtttgcctgaatcgtgttcttcaatgggtttgccttcttttttgccctctcaactttttgagagttatattaggtttta

SEQ ID NO: 197359 - DNA, 737 bp, Gossypium hirsutum
  unsure (1)..(737): unsure at all n locations
cggacgcgtgggcggacgcgtgggcagcagccaccagaacatgatgatttatctttgaaaaaattggctgcagatgctcctcattgtggatcatcgaatgtgtggggtgggctggttgaaggaaatgctgccaactacagtgtcaatggaagtgcctcaggtagtaaccatggaagcaatgggccaaatggaagtagcaatgcagtcaatactgtagggacaaacatggaaagtgataatggaatagctgggaaaagtggaagtggtgatgcgagcgggagcgggagcgggagtggaagcggcagtggtagtgggagcaaagcagaccagagcaagtctgctcatagggaagctgctttgaccaaatttcgccagaaaaggaaagagagatgcttccaaaaaaaaggttaggtaccaaagcaggaggcgactagcagaacaacgacctcgcatcaaaggtcaatttgtgcggcaaacagtgaacaacaatgacccancatccaatgtcaattcatgcgacaaatagtgaacaagaaaaaaagcagaacaagagatgaagtaaaccttcttgctggtactgcaaagagaccggtctaaactatttgacaatgttagtcttgatgaactgtgttttatagctatagaccttcctcttttccctttttttttttcttttaatttcataatttgttgttatgaacataaattgtgcattaggggaactgganaaggtacag

SEQ ID NO: 197360 - DNA, 541 bp, Gossypium hirsutum
  unsure (1)..(541): unsure at all n locations
cccacgcgtccgttttttttcttaatttcaaagaaatggccaacataactgttagcaactttgctgcagtgttgactaaggcaactttgaagggttcaaacaaagttcaatcatccaaagttcttggattgcctgtgatggcaacaaatggtagggctaggtgcagtctagagcagaagtctgcttcaaacgggctgagctcgaaccccagcatggtggcatcaatgatggcggcagcagcagcagcggtgacaacggctgctgcaccggcaacggcgttggtggatgagagactttccacggaaggaacaggacttccttttggctaaagtaacaaccttctgggatggatcctttttggagtgtttggtttgatttgggcattgtattttatctatgtttctagtcttaaagaggatgaagagtctggattgtcgctttgatgaatgatgtaagaatattgggctcatggtttttactttccgccatttcttactaaattaaccctttcatttntatgaaagtaacanatcttggcttg

SEQ ID NO: 197361 - DNA, 462 bp, Gossypium hirsutum
ctaaaccctagacaaaaagaaaatcaaaatcagagaatttgaatccaagaaaaggaaaattggaggatcatattgttctcttggtcgaaattgcgtcgattttcttcgataaagagatccaagaaaatgtcgaataaaccgcgagagtcggttgtgatccgatccgtttggtcggaaaatttggattccgaattcgagataatcagatccataatcgacgttttcccgatcatttcaatggacacagagtttccaggagttgtcgtccgatcggagggcgccggcggcggccatcgctcccgtcgaattgacgccactgagaattaccaaagcctcaaagcgaatgttgacatactaaagcttatccaaatcggcctaacgttatcagacgctgacgggaatttaccaaatctcggcaccgagaaccggtacatttgggagttcaatttcaaagatttcgat

SEQ ID NO: 197362 - DNA, 447 bp, Gossypium hirsutum
tttggttgaaaaatattgggtctccaccagaatcagagcgtaaacgagctgaacttgatgcattagcccgacggttacaaggtattactaaatcagtgtcgaggtatccaactttcaggcgacactttgaggaatttgttaacaaactatccgaggatctctcaaaggacagtggcagcagcaacagcagcagatctagtaataggtctcatcaatcgaagaacaccgttctgcggttttttagcagcagatctttcaagcggagttcaagccaaaacatgtctgatcaagaatcacaatcagttcttgccagagatgcagaaatcgaatgatgtaggaataggatgtcgatcaagaatcacaatcagttcttgccagagatatagaaatcgaatggtgtaggactaggatgttgatatttgtccatagttgtcagattttggacat

SEQ ID NO: 197363 - DNA, 387 bp, Gossypium hirsutum
cgttcctgggtttggagcctgatgagacaacaactgagttgagtggaagtgctgagcctgactcagtggacctttggatgcttgatgaccttgtgacacatcatcaacaacagcctcagctcttttattagaaattaaaaagttttaattagggtaatgttatgtttgatatgattatgcttaagactttaatgtttgtattaatgaagggtaaatagttgtgacaataaaaagattggccacccagttttaatttatatttatttctaatttgggtgacatgtaaattggtttcgagaaacattgaagtacccataatgttggttcatgtatcagatatagtaaacactttggattaataaaaaaacctcctaatattttattttc

SEQ ID NO: 197364 - DNA, 425 bp, Gossypium hirsutum
catcagctgcttcggatgtgccatcgaaattatctatcttatattatacattgtatacgcacccatgagggataaggtttttacagtgaaatggataatcttattcaacctaggagggtattgtttgataatggtggccaccaatttgtttagagaaaggtctaaacgtgtgacagtgatgggatgggtttgtgctgttaacagtgtggcaggcgtctgcttctcctttaggcataatgagacgtgtgataaggacaaaaagtgtagaatacatgccatttcttctctccttttttcttacattatgttccacaatgtggttcttctatggacttttcttacaagatttatacgtggcttttccaaatgtgttgggatttctgcttggaacagctcaaattatcatctatgtgatatacaagaat

SEQ ID NO: 197365 - DNA, 791 bp, Gossypium hirsutum
caatcattcggttctccctctcattgctgcctcttttatcttccttttagattcttgaattatcccccgatttttatccgattccatcccatcgccgatctctcctctgtacattttcatctacccgacgattttttcctgatctgaaaacctgtgcttcggagaaaactacgccgaggtacagcatagcgaaatcggcggctgtcggttagggaggaaggcaaaaagaatgtcggccgaacagaaagaacaagaacctaaccctaaccctaaccctaatggtaacggcaacggcaatgaaaatttgaacactgaaagtgaacatgaagaaagacaagaagtacaggcatgaacatgaacaggaacaggaacaggaacaggaacgagagcagccgccacgtcagtcttcgacaagaactcctttcactaatctcagtcaggttgatgctgacctggctcttgctcgaaccctacaagaacaggaaagggcgtatatgatgcttaggatgaataatgatggtgggagtgattacgggagttgggaggctgggagctatttgcatgatgatgacgatgatgatgattttggggattcccaggatcatgatattactgacggcgatgatgaggatgaggatgatggtgaacaggaggatgaagatgaagaggaatatgatgggactgatgccgatgatgatgaggatgcgtttgatgtgcatgcacatgctgaggatggtgatgaggataacaaccctagtgctgaactcgacccactgctttttcgagtgatg

SEQ ID NO: 197366 - DNA, 300 bp, Gossypium hirsutum
ggtatggggaagaaagcaggtggaggaatgtgctgataatggtgtgcttcatcttggtttacaggttcgtttcttatgtcattcttagatgtagatgctcacagaggggtctgagggcatcactttcatgacctctaattaattctctctcactcacgtgaatgtcgacaacatggttcacatgattttggaactacataagatagaaacgccaaaaggacaaaaacaaaactgtttgtattgtaatttgtaacagaatattattataaggaaaataaatgtattaatctgcctgcaaat

SEQ ID NO: 197367 - DNA, 725 bp, Gossypium hirsutum
cttatgatggctgtcggccatgacaccgctaaacggaaggggaagaagaaaaaggattctcctaaagatttggctagggaatctcggatcccaccagcagtcttgttccttcaatgctatatatgtcttgctgaaggacttacaatgatgcttgctgctttgaggaatgaaatcccagtcttccacggtccaagcccttttaatactgagcacgagaaatttgttcagcattttgagcttttacaaagagcctgcattcctgatcatgtttcgtacctgtcatacaaagaatcaacaactcatgctcgcttttctacgctagctatgtataattacttcaaggatgctcagaggatcgcaaaggaggtgaagagtagcttctccaacgatccagagaggttagccgaactccgaaaattagagcaggtagcagaacacaacagtgttgctcaaaatgtcatttgtcggttaggagctcttgacccttcacttaaggtgtcatttgagttcagccatcatccattctttgccactgttgttgtcaagagatcttaaaggtgtttgcttcttttgatgatctctaccaattttgaaacacacatacttaggattaagaggcatttgagtcccctggtgtagcaattgtaatattagcatgttttaagtcaatgttcttaatttttactataaagtattatatgaataatacaatgggaaattaaagc

SEQ ID NO: 197368 - DNA, 387 bp, Gossypium hirsutum
  unsure (1)..(387): unsure at all n locations
aaaggtttcatccggccacgatatttcttccaacgattgccgcatttccggttcatgataaacaccatttttactaattgatgaatgtaaatttatccttgactcaaaaaccagtagtggctgagatttcccttctttttgagcgccacggagagtgccaaagccgaaactagagcaagaagattagttttgtacgagagaagcgtgatgaaaaaccaaggcaccattcgagtctgtgactttgtcttcacggtttaccattgtagctgtgtgataaatcatggcaatgcatgttcagtttatagctttgttatactctttgctaaagtactctatatttgctaatcaatagataatcaaacattggtctttagctccnnnnnaaaa

SEQ ID NO: 197369 - DNA, 572 bp, Gossypium hirsutum
gctgtttatcccttcgcgccgctcttcatttttcttcgctctaaggaaagctaaatccggggtcccgatttcagctcaaaaatgtcgggagaggaagttgcagttgccccaactgaggttgctgctgccattggtgagccaatggacatcaacgcagccttgcctcttgtgattaggaagtccaaagctcatggtgggcttgcacgtggtttacacgaagctgccaaggcaattgaaaagcacaatgcacatctttgtgttttagctgatgattgtgaccagccagattatgttaaactggtcaaggcactctgtgccgatcacaatgttaaagtgctacgtgcacctagtgcaaaaactctgggcgagtgggctggtttgtgtaagatcgattctgagggaaaggcaaggaaggtagttggctgttcttgtgtagttgtcaaggattatggtgagcaacatgaggctgtcgaagttgttcagcagcacaaggattaagcaaatcagaggatggttgccttggtatgctgagattttttgttatgtaacgagttcttgatagtgaacaacaa

SEQ ID NO: 197370 - DNA, 666 bp, Gossypium hirsutum
ctccgccacccaacagatcaattcgttgagggctccccgctcttcattttctttactctcagaagccccgatcccatcttcaactccaaaaatgtcgggagaagaggttgccgttgcccaaccagaggcacccgctactcttggtgagccaatggacatcaacacagccttgcctcttgtggtgaggaagtcccaagctcatggtgggcttgctcgtggcttacatgaagctgccaaggcaattgaaaagcacaatgcacatctttgtgttttggctcgatgactgtgaccaacctgattttgttaagctggtcaaggcactctgcgctgaccataatgtgaaggtgctacgtgcacctagtgcaaaagctcttggcgagtgggctggtttgtgtaagatagattctgaagggaaagcacggaaagtagttggttgctcttgcgtagttgtgaaggattacggtgaacaacacgagggtgtcgaagttgttcagcagcacaaggattaagtaaagaggatggtttctttggtagaatcagagtttaattttggccattcatgatatttgcttaagtaattttgttttttcaaaggcagaacttcttggtgtttcttatgtatgctacctttctcattttaaattacttgcaaaccattttggaaat

SEQ ID NO: 197371 - DNA, 428 bp, Gossypium hirsutum
gtcacaatacaccaaagagtgaatccaggttgtttaaggttttgcttggtgccgagaatggtgatcgggttcgagctctggctgcttgtcatatggatacgtctcgatgggacgtcgatcatgtgtcgttccaattgctgaaaatcaagcccggctcttcccctgtgtgccatgttttcccaccggataatcttgtatgggtggctttgcctgcttgaatatatggagaaaaattcagtagatatcatatttcatgtgatgttatttgtaatgttattgtatgatatgaatgttaatatataacaccatgtccgagtcggctcagtgatttagaaccacgccataaatggaataaacgagttcaattagcctccctgtttgtgtaccagcaataaaataataaattcagttttttttgttgcaagggt

SEQ ID NO: 197372 - DNA, 458 bp, Gossypium hirsutum
tccacgcgtccgatttgaccagcgagaaaggttgataacgggaactgcttgagtaacagatttgaagattcaactcggaggaaactttgatgataaagcaatctcgacccacagaaacaaagtgagaggcatagatacactacattttttgtttgttaattcaacataaatgaaagccttcaacttggtaaatttttagccaaatggatgtttaacagctaagcacttgggatggccttaaaagctctcaaagatcttgatgatgttatagccagagcttagttgcggcaattcctgtagcaacttcatattttcaattctcgagttagcagttttttttacccctttttataatcggctggcctgattttcatgtagccttttagccatagcatagattaacttctgcagaaattcaatgttaagttgtagcataatgtatccccctgtcaatttac

SEQ ID NO: 197373 - DNA, 441 bp, Gossypium hirsutum
cccacgcgtccggttcatccgaaccccagatatgtccgttcggaacggcgagtggcaacacattgcaagcacccttacattttgtaccaagaattaaccttcaaggggacctagagtcccaaggtggtagagccagccctctgcaattaggttccatgttattgcaacaacaacatcaaccgtctcaacacctcgggttagggttatcggaatctaatttaggaatgttggccgctcttaacgcctattctagaggcggtccgaacattaattccgaccaaaataatcccatggagcatcatcaacagcaaggttcaaattgtggagatgattacccaaataattctcaatgatgtggttagtaggcaaaaactttaattcccatagttgagatgcttttcaatttttgtttcccttcaagaaaatacatttagttttatt

SEQ ID NO: 197374 - DNA, 581 bp, Gossypium hirsutum
  unsure (1)..(581): unsure at all n locations
nnnnnnnnnnnnnnnnnnnnnnnnnnnnnnnnnnnnnnnnnnnnnnnnnnnnnnnnnnnnnnnnnnnnnnnnngaaaatgttgaaaatataaaagtttcagttcttaccaaagaaatgaaaaaccaggctgtcccggaaaacggacggaaaaggaaaagatcaatgcaagcaaaagaaaacatagattcaatcaagaaaggaaatggcattacgacaaagtcaagcaccgatgatgcaactaaatcggttgggtaccgacaaaacggtagcagacgcaaaaacaagcctcgacgggctgctgaggctgttgtcgagtgcaagtaatgcttgtgagatcatgtatggattgagatgtttcttgttgttacatggtatttgttttttggggttccaaggattccattttgataagtttgcagtacatgcttgtaatattccatggtgtcatcacaaattttaaaaagaaaactagtgattttttttttctctgagaaaatcttgttattcagatgagaaatttgtctctctgcaacatctggtagggaccttgtttttatatctatcttggtaattttcttna

SEQ ID NO: 197375 - DNA, 366 bp, Gossypium hirsutum
caaaacctttattcgagggagctgattggaccaggtgagagacgagatggattttactgcttctggcaggttttgacggtcaaagcgattttggttgaagcttcatcctctttggaactttggcataaaaggttgcgtcatcctttcgacaaactagtaaacttacttccttatgttagtaactctagagatcatttgaataaagcatgtgaaatttgtcatcgtgctaagcagactacaaatagttttccaattagtgaacaaaaagtcacttgtatttttgagttagttcattgcgatttatggggggttttatgacactccttcaacttgtggatttcattattttttggaccaaaacccaat

SEQ ID NO: 197376 - DNA, 553 bp, Gossypium hirsutum
aaacccgcgccgacccacgcgtccgactagatctcacactgccggttcatatgatttacgcgctcgtatctcttcagctcacccgtgaatttggagcaggggtcatggatgccaaacaggcttcaaccattgttactgtcacaatgctagcatttgttctaacaggaggatactacgtgcataaggtgccagcatgcatggcatggatcaagtacgtctctactacatattacagctacaagctgtttgttaacgtccaatacagccaaggcaacaaaatttcctcgttgttgggttgcctgcaccatggaagtaatagagttagctgcaagtttattgatcaagacatcgcagggcaaattagcccgaaactgagtgtgggaatcttgcttctaatgtttgtaggatataggttgctagcttaccttgcattgaggcgcatcaaaggttgagccttatgtattattagtttacacgtacttgtaattcatacatgcccttgtaatcgtaaattttcaaaaggatggcgaaggaaaaagaaaagagagattta

SEQ ID NO: 197377 - DNA, 439 bp, Gossypium hirsutum
  unsure (1)..(439): unsure at all n locations
ccgggtaggaatggccgggaccaacccgtccgcccacgcgtccgtaatggagccatatggtcagataagcaatggaatagaatatctaaatccttcccttgatgtcagtaactaacttgcttgtcattttaaatatgcaagtcaattgctattaataattttctgttggattctttttggactggaaaataatttctggggatagtctaagaatcttaaattttatagaaagccaataaagtgcttgctggacgaaatgtggtgattaattgaattgcaaggtcatacatgctgttaattttttaagagctgataaatgagtatgacatagtgctcataaatgttctnnnnnnnnnnnnnnnnnnnnnnnnnnnnnnnnnnnnnnnnnnnnnnnnnnnnnnnnnnnnnnnnnnnnnnnnnnnnnnnnnnnnnnnnnnnn

SEQ ID NO: 197378 - DNA, 417 bp, Gossypium hirsutum
ggcatttggttgtggacatcactcatgcgtttggttgtgcgaaagacctcgaaacttgcccggggtgtcgatgtccaatgcagaccaaaataaagctctacttttgattcttttattcttcttgaaaaaaaaatatacatttcccatgattcttttgttgatttgttatttttgtgataggtttgaggaagtcaatatgtggtgcctatgaccaaaagatgagatgaaaaaaaatcttccttttggatttctgatatttcatttttgaattaaaatgtggcccaaaaaaaaaaaaaaccgccccactttaaaaaaagtaataatgggaaaaacctttgcttaaccaaactaataggctttgaaaaaaaacccttttttaccaattgggttaaaaaaaaaaggggcccccccttataa

SEQ ID NO: 197379 - DNA, 393 bp, Gossypium hirsutum
accggggcggaccgacgcgtccgcccacgcgtccgcccacgcgtccgcccacgcgtccgaaagaattaatcttgctaccgactctctcttttcttacatgatcaacgggctgaaagtagcctgttcctcctagggtaactaagtgcttgtgtgttttcttatcatgtaatatatgattagtgttggattggcattttattcaacttttatattttatttttactctattgataccaattaatatttctagtttacaaaaaaaaaaaaaaaaaaaaaaagggcgggtcgcccacgcgttcccccacgcgtacggtttattttttaatgttcttgaatgaattccatgttcttttaagggtttttggtggtgttcatttttggagtcacaaaaat

SEQ ID NO: 197380 - DNA, 427 bp, Gossypium hirsutum
acgagcggttccacaatgctcaatcgctctttgctgtcctcagacatgtgggctgtcatcgcccgcgtttttgcttaccatgaaaaggttcattggatgtactttttagcctttgctgcagtagctgttggacttgttatttattccgggggagacaaggaagaggatcggcatcaatgcacagccggtgttggtgacgaagatgctggaagaagcaagcatttttatgaggaggctggttttgataacatcaatcgaggagctatagccgtgtagctcaaaaaccgggaatactagcaagcatgactgtatcactagtggcgaaagaagtgaaactattgaaaacaagaacaccggaaaagatgtgcaatggaagaagtcatgatgtattaaactgtcacccgaactcttcattttcttaaaacta

SEQ ID NO: 197381 - DNA, 493 bp, Gossypium hirsutum
ctaaaaaccactcgttttagcagttaaagatgataaacatgtggatcaagaaccccagtctgaaactccccttcttgctttacaagtaaccaacaacaacagtaagggttgtcaagtgaacaagggtaataagattcacgagtgttcaatctgtgggtcggaattctcgtcgggtcaagcccttggaggtcacatgagacggcacagggcagcagctgccaccaccgcaagcaatcaagttgtggtgagcgttggcaatggcgatggcattaaacccagaaatattctatctttggatcttaatcttcctgcaccagaagatgatctaagggattccaagttccaattcggagcaccccaacaagctattgttttctccacaccagctttggtagattgccattactaaccccccccccccaaaaaaaaaaccagtatatggatcaatcaatgtgaattataattgatattgtttcaacccaatattatttac

SEQ ID NO: 197382 - DNA, 307 bp, Gossypium hirsutum
cgaagttgaatgcaagttaatcagaatcttcatggtgcattggtaatttcctaattgcatgtcaatttattcatgctccatttttatgttatattcatatattgaatctatctttgtgtatcctagttccaattatgctttagagtatatcaggacggctatatatcgatatcgatgcctcgtgtatgtagtttttcaatttttttcatttgtttcagtgactacatatgggaatatatgatccttggaatgttgggcagtatctttagttgattaatgaaaggtctttcatttgtttgtgaattaa

SEQ ID NO: 197383 - DNA, 558 bp, Gossypium hirsutum
attgattcagattgggcaattaataatgggaattggctctggctatcatgctcatcattcttttaccagtacaaccgcatatactcaccaatatcatttggaaggaaatatgatccgaatggtaattatattaggcattttctccccatactaaaagacatgccaaaggaatatatatatgagccgtggacagcgccactaagcgtgcaaactaaagcaaagtgcattattggaagagattatcccaaaccagtggttttgcatgatactgcaagcaatgaatgcagaaagaaaatggggcaagcttatgcacttaaccagagactcaatggacgtgtaagtgaagaatatttaaggaagttgagaagaaaatttgatgaagatgaagataagcaggaacccaaacccagaaggcagagacaaaagctgataaaatgagctgcaaaatctactttttcatccatccatatctttttttcttttttaaactataacttgataacttagaacttgttattgtgttacatgtttggcacgtaatataaattgataacttgg

SEQ ID NO: 197384 - DNA, 216 bp, Gossypium hirsutum
gcccacgcgtcggttaattgcagttgtctttagcttgtagagttggatgttaaatggtggatgttgcatacgacaatgcagtctcttgttccggtatatctaactgataagactgtttcttggctattgcattttcagattccctttatgtaattatgtagtacattttccgattcagtgttaaatatgaaataccagtaagtaataacatcagat

SEQ ID NO: 197385 - DNA, 430 bp, Gossypium hirsutum
ctttttacttgctttctttccgtttcgaagatggatattaagaaacgattactccttccatttgtatgctattttctttcagtttcccagtttttccacgtctgccatggtgatgttgggactgctgcccagtacagccctccatatttacctacggcgtgctttggggaagatcaaacccagttcccatcaagcaatctgttcgcagcagcaggagatgggatatgggacaatggagcatcatgcggaaggcaatacctggtgagatgcataagtgcttcccagccagggacttgtgtccccgaccaaactatccaggtcaagatcgttgattatgctcctaccgctctctccccaccttccgctcaatccaccaccattgtcctttccgaaactgcttttggcggaattaccaatatacccatggact

SEQ ID NO: 197386 - DNA, 966 bp, Gossypium hirsutum
cccacgcgtccgctgctagtgacttgcctcaattggatagcttggttcccattcttgttgttcgacactgactggatggggaaagagatttacggtggggaagccaagggagatgcacataaagttaagctttacggtgatggggttcgagctggtgcattagggttgatgattaactccatcgtcttggggttgacttcattggggttagagcctgcagggcggttgatcggtggggtcaagaacttgtgggctatcgtcaacttcatcttgtgtgcgtgcttggcgtctacggtgtttgatcacaaagatggctgaggcttggagacaacaccatgggtccccactctcccatcctccatttaacattacgggctctgccttggctgtattcggtgtcttgggtattccacttgcggtaacatacagtattccattcgctttggcatccatctactgttctagtactggtgggggtcaaggtctttctctaggagtgctaaacttgtctatagttatcccacagatgttcgtatcagcaattagtggaccgttggatgatgcattccggggtggcaacttgcctgcttttgtgctggggtccatagcggctgctgtcagtgcgttgatggctatattggcattgccgaacccacctaaacaagggtccctttcgccaggaatgggtggtggccattaataaataatcaattccacagcttctgatcagcctctttgcatgccaacaatgtgtttcaagttttatgatttgcttggtgtagtttcatataaatatttgctttgatgcaatgcagtcatggcttagtcccatgcctctccttatgtatttttaaggtttccatatatagggaagtttgcagggaaatccttgttatttctctaagatttgtaatctaagcttataatttccaatatatcacaactttcgaaaatgaaaatttgaaa

SEQ ID NO: 197387 - DNA, 438 bp, Gossypium hirsutum
cccacgcgtccgctgctttccagccaaacaactagttcccaagcctcaacattcccaaaatccgacgacgaacggagagccctccccacggcattagcacgacggtatggtgaacgtggggcgtgggtcgtgctacacgtgagatggccggacgggtgaggtgcgtcgacgtgcgtggtggaggggagcagcagctattctcttttttgctgaaaagttagtctagtttcgggctgcttgggctctagggttaggtttattttgggcttataattgggtttgttgtttttgtaattttggactctttttggatttttttgggttctatttattgggctggaatcaagtagcccgggctaaagttgggtcttacatgtattataatctaatttatcaagaaatccattttcccatgacaagctattctatttagcaatc

SEQ ID NO: 197388 - DNA, 627 bp, Gossypium hirsutum
tgaaaggacccaccaaatggctgttaatattgacaaggatttgaataagggtgagaagcttttaaataatctagggggcatgttttctatgccctggaaaccgaagaaaaccaaagaaattaccgggcctgtgatcacttcagatgataacaagaaaggcaaagccgccacaaaggagcagagagagaagttgggtgtggctcctgtacctaagtctaaggctggaagtaagacacctacgccggagccaaccgacgccatacagaaagttgagcttgagaagcaaaagcaagatgatggactttcagatttaagtgatatcttgggtgatctaaagggcatggctcttgatatgggaagtgaacttgatagacaaaacaaagctcttgatcatctgggtgaagatattgatgaactgaattctcgagtgaaaggtgccaatcaacgtgcacgtcatttgcttaagtaaaaaaagttgcagagcttaccaaatttactttcacatacctgtattttaacaagttttaacaaattttttttgttctctatatttggttttctatcctacccaacatttgtcattactgatatactcgttttacgtggaatataacaaagtttttgccc

SEQ ID NO: 197389 - DNA, 422 bp, Gossypium hirsutum
gggtttcttccatggccgcccctgaaattatatagaagagagagagaatgaaggttgttgctgcttatttgttggctgttttgggaggcaacacttccccttcagctgatgatcttaaggccattcttggctctgttggtgctgaagctgaagatgaaaggattcaacttcttttatctgaggtcaagggcaaagatataacagagcttattgcatccgggagggaaaagcttgcctccgttccatctggtggtggtggtgttgctgttgcagctgctgctcctggtgtcggtgccgctgcagctccagctgcatccgaggctaaaaaagaagagaaagttggagagaaagaagaatccgatgatgatatgggattcagtctctttgattaaagagttggtattttgcagaaattctcttct

SEQ ID NO: 197390 - DNA, 784 bp, Gossypium hirsutum
  unsure (1)..(784): unsure at all n locations
ctaattcctccttcctaatggtcgattcatctccaccagatggtgttcttcaagcctggaggaatttcagcctcgagatatcctcttggcttcgatttcaacaaagcaaaaggaagtctacgacgtatttgcaaggtaagaccctcttttctttttttccttttttattagtataatcaatcaaaaaagaaagtaagtaagaaataaaagagaaaaataatgaataaaccaccttgccctattttctttctatttgattgctttctattgtgtaaaaaaaacacattccttctgtcttgggctttatagccgatgaaagaaaataaaaaaataaaaaaataccagtttttctattttctatttctatttgctgttgttcccttgtctgtttgcaggtacacggtgtgcgtggcgctcgtacagatgctgtgcgctggcgtacagagacgcagtggaggccgtacgtaagggagcagcgcgagagaaacccaagcttctgtttggccgaacctaggtctaggttttgggccattgggccatgtatttttaggtcttgggctgatgtaattggatttgggctgtctaatttgaacttcgggctttgggttttgggtctaggtaattgggacaaggtctgtaaatagactgtttaaaagatttggactttataatttggttntatttattatttttaatctgggccaaatttggcctattacagtgattgtaaagtgaaataagtaaattgatatttgataatgatacatgatacgtgttttttgtc

SEQ ID NO: 197391 - DNA, 749 bp, Gossypium hirsutum
  unsure (1)..(749): unsure at all n locations
gcatccagcgcttgtagcttggggatactttccagaagatgaaacaggtatcaaaggcaaaagctacgagggcggaatcataacttcattccacaggattgtttcaaaaaaatccaataatgtccatgcaatcatccaagctcctgcactaggaccagcatcgttcgcagccatatctccatgggtttcagggagggagctgaangaaagaatggtgaggtatccaagattggctcaccttttcacgctgataagagaccagggttcaggagaagtaatggaagaagggaagatcaagtatcggttgagtgaagtggataaagaaaatctaaagattgggttgagacaggtgttaagggttctgattgcagctggggcagtggaagtgggaacctatcgaagcgatggccagagaattaaatgcaaaggtcttacagaagaaagtttgcaggagtttttggataacgttcccgtggtaggagggcttagttccaaggatgagtattggaccctctatattacagctcatcagataggaagttgtagaatgggcgcaaccgaagaagagggtgctgtggatgagaatggtcagagttgggaagctgaaggtttgtttgtttgcgatgctagtgtcctgccaactgcaattggagtcaatcccatgatcaccatacaatccacctcctactgcatttccaacaagattgcacaattgttgaagaaggaataaattaacacctttcatcact

SEQ ID NO: 197392 - DNA, 399 bp, Gossypium hirsutum
gcaccagggaaatagaaaagctgcgtctgaaacaagaagaagaggacaggcttaatagactgttaattgagaataagataaaggattttgaagctgggtggataaggaaattcgatgcacacaaggatgcagtttctcttctgagtgacaaattgactaacgcagagaatgaagttaaacttctcaaagagctttgcaaccgaaaggtttcagcaggtactccagaatgtgttccaaatgaatctggaatgtctagtcagtaaggtatgtctagtaagtttttatgtagtgcagaactactcttatttatatgtcaaacaatatgcatcatgcgcggcatctacgaatggaagcttttgttctagttggctcactatatggcagatttgatatgcaaag

SEQ ID NO: 197393 - DNA, 678 bp, Gossypium hirsutum
cccacgcgtccggcaacaaatgctagaagcaaggtcttaagcaggctacaaaacatgactggtttagccacattgtatgacttcacaaagaaaatcccttaccagacagaatttgctgtcaggtttcttaacatagctgaggtaaagagagcattaggagtgaatgaatccatggttttcgaggagtgcagcgatgttgttggggatgtattgcatgaagatgtgatgaagagcgtgaagtacatggtggagttcttggtgaagaatagcaaggtactgttgtatcaagggctatatgatttaagggatggtgtggtatcaacagaggcatgggtgaagaccatgaaatgggaagggattgagaagttcaagatggctgatagagtgatttggaaagtaaacggagagcttgcagggtacctgcaaaaatgggggagcttgaccaatgttgtagtttcaggagcacgccatcttttgcctgctgaccaagctttgaattctcaggctatgactgaagattgggttttggagaaaggccaatttggtggaaagcaaagaagatcatccacaaaattcagggcaacactctaaaatgttattgctcttaaacttgttctttatctgtaagttctaagctatgtaatctatgctattcaataaaaagatatccacgctccc

SEQ ID NO: 197394 - DNA, 348 bp, Gossypium hirsutum
gagccaagaagataattattggaacatggaggatatatggtccatgcagatacttaatgggaattaaataaatatcaatgttagtccaaattaattgagattaatttggttgattaatgttagggttttgtgaacttatataatattttggattaagtatggcttgtaataggaaacgttgtagtactataatatatatatatatatatatatagccttctacattatatatatgagagttttcaatgctaattagctattgtacataccctttgagatgtggataaataagcaatatcttttttataacacgagtttaattaataaagctaaaattgtactttgctc

SEQ ID NO: 197395 - DNA, 862 bp, Gossypium hirsutum
  unsure (1)..(862): unsure at all n locations
gttgcttcgtcatatttatgataacattaggcaaagttaaatagaaacaatggggcacttgggatttcttgcagctgcattactctcactcctcaactttgttcatggctcccttggaccctggaccaatgctcatgccactttttatggaggtggtgatgcttctggaacaatgggtggagcttgtggctatggaaacctaaatagccaaggttatggtattaacacagcagccttgagcaccgcattgtttgacaatggcttgagctgtggtgcatgctatgagctgaagtgtgtgaatgatccacaatggtgcctgcctggttccattgtggtcactgccaccaacttctgccctccaggaggctggtgtgaccctcccaatcaccactttgatctctctcagcctatttttcaacacattgcgcaatacagagctggtattgttcctgtaatgtacagaagggtaaagtgcaggagaagggnggtatcaggttcacaatcaatggacattcctacttcattttagtactgatcaccaatgtttgaggtgctggggatgtacattcagtatccattaaagggtcaaagaccagatggcaagcaatgtcaaggaactggggccagaactggcaaagcaattcttaccttaatggccaaagcctctctttcatcggcacgaccagtaacggacacagtgttgtttctttcgacgttgctccatccggttggtcctttggacagacttacactggaggccagtttggggctaccaaaatataacagccccttgctatatactatatgatattatagtaaaaatatgtctgaagaaaaacttaagcgagttttttttttttaa

SEQ ID NO: 197396 - DNA, 721 bp, Gossypium hirsutum
cccacagtagcgtttagcctgccttgacccacagagatggcaactaagcagagggtaacaattgttgttgccaccgtctttgtgctaacattctgcagggtggcgacgggacaggaaccggcagcggtggggttggggttgggaccatcagcagaggcaccgacggcggattgttttacgaacttgttgaacttatcggattgcttgacgttcgtggaggcagggagcaatctaacgaagccggtgaaggcatgctgtccggagctggcggggttagtggaaagcagtccacaatgtttgtgcaatctattgggtaaaaacgcaaccgcagtggttgggatggacattgatatgaagagagctctgaatcttcccacggtttgtaatgtttccactcctcctgtgactctctgttcagtcatcaatcgtgccccagttgcaggtccaccacaaagcgaagaatctgtgtcaccaggtggcagcccttcaaatggaaacagaaatggagcagtcattggcttggcattcgctactgccattttgcacgcactttttgggatctattaatttcttttccccattactaatcatgtactacattattttaacattcaaatattctgtgtgtcctatgtatgcctttgtttctctggtaatggggggtaaaatacaatacaatacaacagatgaaacaaagaaaaacagcaaatccataagggac

SEQ ID NO: 197397 - DNA, 687 bp, Gossypium hirsutum
gaattgcgctcctttctcccaactctagacgctaggctgagtttaggcagaccaaagaacagttctgttcacttttcaggtaaaagaaaaaagaaaatgaagaagccaaatcgtcgttctaagcaaaagagcggctccgccgattcttctacttcgcctttgatcgtatcgggtgagaagggaaatccggctaataggatcagagatttggagctagaaaatgagactcttaagagggcgattgaggagctaaggagcaaagtgtttgacgtttcaccaaactcctgtgttggtgttcaaaaactggatcaagggcattctcgaaattcagagacctctccgaagattgtggagttgaggaaactaggcatacagtctcaactcttcggcaaaaaagcctaaatcagatgaaatgtcagaacagttccaggatgagattcaaagattaaaggtgcaaaaggttcagctccaatgcaagatgaagcttgaatcgatgcagttcaggttatgcaaggcttcgcttgaaaaggaaattcttcagcttaagaaagagcaaaggaggaacaagtatgagaagcatgtgctctcaactctcattcagaggcaaaagcatgtattgcagcagaaaacaaaagaagcttttgtggcagcaaaacgtctaaaacagctaactgaatctagaaaggc

SEQ ID NO: 197398 - DNA, 477 bp, Gossypium hirsutum
  unsure (1)..(477): unsure at all n locations
aaaaaaaatggggagaggaagagtggagctgaagaggatagaaaacaagatcaacagacaagtgaccttctctaagagaagaaatggtttgcttaagaaagcttatgagctttctgttctttgtgatgctgaggttgctcttatcatcttctctagtcgtggcaagctctacgagtttggcagttcaggtatgagcaagacccttgagcgataccagcgttgctgctttactcctcaagacaacagccttgaacgcgaaacacagaattggtaccaagaggtaaccaagttaaaggcaaaatatgaagcactgcaacgcactcaaaggcatttgcttggagaagatctcggaccattgaatgttaaggagctgcaaaaccttgagaaacagcttgaaggagctcttgcactggctagacaaaggaagacacagatcattatagaacaaatggaagacctncgcaaaaaggagcgtga

SEQ ID NO: 197399 - DNA, 450 bp, Gossypium hirsutum
  unsure (1)..(450): unsure at all n locations
cttagaagggtttggttgtaaactattgttgctttttccgatgagcaaattagcatttatgaaaaatagaagaaggggatagctggaggtttatgatgaatatgaagccatcggaggacatagatggagatgatgaagataactaattaagaagaaataattttaaaaagaaagtggaaattcatactgtagatatctacacatacggtttttaactggttgcaggcaagtgatggatccatatgatgtttgatgttagatttccttacttcctgaagaagtaaaaaccattagaatttgtgttggaagtttatgtaagaacagacttctttttcttaatggaaatcttatttttctgcgttaaaaaaaaaaatatattttatattataaattttttaaatannnnnnnnnnnnnnnnnnnnnnnnnnnnnnnnnnnnnnnnnnnnnnnn

SEQ ID NO: 197400 - DNA, 256 bp, Gossypium hirsutum
gatttgtaatattagctgactttcatttctttctttgttcctctgcccattggatgtggggggcaatggaaagccactccatttgagcattgaggaaagtatagatttgttcagagaaaaagaaaaaagaaaaaagaactacaccatgaatttagataccgatgtattttctgatgtcggaaattgtagagttaagatgatagggcgaaaagcctattgaattgaaaatgaaattcttttactattcgttttcttc

SEQ ID NO: 197401 - DNA, 364 bp, Gossypium hirsutum
ggcaactgatggtgttgtgagacgtagtattcccctctgctgctggacaagctgttcagcttcttctatctcgtcttttttgggcatgatagatgcttgtttttcttactttcgccatgaaaataaactcgcttatgcgaacattttacgtgagaaagtgacagttcagttgtatagtgattttccttagttttcaattggctcgtggactgtaccccttgagaattgatacaaatagggttgttcattttgttagttctgttaaatttttaaccgatattattgagcttgtagtgcgcaaaggttcggtaataccggtcattttcagttcaaaatatagtcgatattccggaaagttttattt

SEQ ID NO: 197402 - DNA, 387 bp, Gossypium hirsutum
cacattcccgctacagaaacccccccccccccttatttaaaaacatggcaaacacccttttaggagctttcaacgtacgagttgtcggctccggcgacagaatccttgtcttggctcacggtttcggtacggaccaatcggtttggcaacggattctcccatttttcacacctaattatcgtataatcctatacgacctcgtttgtgccggcagcgtcaaccccgattacttcgattccactaggtacgacactctcgatgctttcgtcgacgatttgcttaatattcttaaagctctcggcgtttcaccgttgcgcttacgtcggccactccgtctccgccatgatcggtatcttggctttcattcgctgccctcaactctttttc

SEQ ID NO: 197403 - DNA, 567 bp, Gossypium hirsutum
gttgctaatgcctaatggatcagaccggatcacattgcaaatgcgacacctgaacagcagaggacgatgcttggtgaaagcttgtacccccttgtggaacggcttgagcgtgatgcagctgccaaggttacaggcatgcttctggagatggaccaaacagaggttttgcatctcctggaatcaccagaagctttgaaggccaaagtagctgaagccatggaggtgttgaggagtgttgctgctcagcaacaggccaacaatcaagccgaccaattggcttcattgtccctgaatgataacctcgtttcctgagtgactgaaattcgggtccagtttcttggcagagaagttgctaaatcctttatcaaaactgggctatctttgtttattaggctttaagtttggaacctttatatatttgctttgtttttgtcggttaatagggtttttaatacttgctagacattgtttggtttggtttgccttcgtttttctttaatttactgcctcgtgctggacaaccgtaagtttgttttatgttaaaacctacttttagaacaaaaaaaa

SEQ ID NO: 197404 - DNA, 654 bp, Gossypium hirsutum
  unsure (1)..(654): unsure at all n locations
caaactcatcggtagagaagacttacgagttaccagatggtcagattattaccatcggggccgagcgttttagatgccctgaagtgcttttccaaccatcgatgatcggtatggaagctgcaggcatccacgagacaccttataactcgataatgaaatgtgacgtcgatattaggaaagacttgtacggtaacattgtactcagtggtggtacaactatgttccccggtatcgctgatagaatgaccaaggagatctcggctttagctcctagcagcatgaagattaaggttgctgctccacctgagaggaagtatagtgcctggattggcggatcgatcttggcttcccttagcacattccaacaaatgtggatcgccaaggcagagtacgatgaatcgggtccatcaattgtacacaggaaatgcttgtaaatgtttatcgacatgagctttgatctatcaacatatgtgtattctcttggtcggatagaacgagcaaacattagagaaagagaattggaatttgtgtggaccaattctttcaattctttttaatgagaagttggtgcctttaccatnnnnnnnnnnnnnnnnnnnnnnnnnnnnnnnnnnnnnnnnnnnnnnnnnnnnnnnnnnnnnnnnnnnnnnnnnn

SEQ ID NO: 197405 - DNA, 415 bp, Gossypium hirsutum
atttggaagtgcatacaacatgggggcttaagatggcgtttgttgtggacaatggaaaaggcccaaatgagtctcttctaccacctccaagtgatttccccaagtgctgaattaaccaaaccaaaatgctgaggaatggagaagtagctaaaaggaaacaaaaggaggtggtagaaaaggcccaaatgagtctcttctaccacctccaagtgatttccccaagtgctgaattaaccaaaccaaaatgctgaggaatggagaagtagctaaaaggaaacaaaaggaaatggaatttttatacaacggcttaaagctataataacaaataagaagagtttattttgagcatgccaaggaaagttcgctccatatggaataaaagagagcctggatttgtttttctttttttctctta

SEQ ID NO: 197406 - DNA, 413 bp, Gossypium hirsutum
gcagaaggcaagcattgcgggaactgctatcatgagcaacagctacgtatctacaggagcttcatggctttcaaacgcattcactgcagttgcgagggcagctgaggacgtaggtatgttgacaaaggagaaagttggaaaagcagaggaagaaaaaaagggttctgtctacaaggagagagcaaggatcatcgaagactttgcagagctccatcttgatgaatctaccaaggcagaaccttcagtaggtctagttgattcaacaactgataagcaagcttagaatgatatgaaatgattgcttttgaactttgattttccttcaatgccttgattctttcattggtgtacaatacactggtacatgggattggaattcaaaggaatttctgaaatatattattataatgtct

SEQ ID NO: 197407 - DNA, 595 bp, Gossypium hirsutum
attatttccatttctgctcctccttccctcgtcttcgagctagggttttctcccgtagcggtcagctcacgattgcaaccagcttccattctgatattttcccccttttttactcacagtcatgcctcggtattactgtgattattgcgacacttatttgacccacgactctccatcagttagaaaacaacacaatgcagggtacaaacacaaggcaaatgttaggacgtactaccagcaatttgaggagcaacaaacccagagcttaatcgaccaaagaatcaaggaacatcttggccaagctgcagctttccatcaggttggagctgctttcaatcaacatctaatggctcagagacctcgacttcctgttcttccgactcctgttatgcctattccgagggttgcacctttacgtataaatcaaccaatggtccctgggattaggccacctgtactgccaagaccagttccaggttatgctcctgttccaggcatgccaccaacggtagcaccacctggtgcaccttccttccctggtcaaataaatggccttccacaacctcctacattggttcccccatcaaccgttact

SEQ ID NO: 197408 - DNA, 1070 bp, Gossypium hirsutum
cccacgcgtccgcccacgcgtccgcgcacagttagtttgatgccgacatcactgaagctgcatggccgatggatgaaaaacgggctactgcgtttggtttaatgaagattgacgaagaaggacgaatcatcgaattcgctgagaaaccaaaaggcgaccagctaaaagctatgcaggttgatactacaattttagggcttgatgatgagagagcaaaagaaatgcctttcattgctagcatgggcatatatgttgtgagtaaaaatgtgatgttgaatcttcttcgagaccagtttccgggagccaatgattttggaagtgaaataattccaggtgctacttccattgggatgagggtgcaagcttacctgtatgatggctactgggaggacattggtacgattgaggcattttataacgcaaatctgggaatcaccaaaaagccagtgccggatttcagcttctatgaccgttcgtctccaatctacacacagcctcgatatttgccaccatccaaaatgcttgatgctgatgttacagatagtgttatcggtgagggttgcgttattaagaactgtaaaattcaccattctgtggttggtcttcgatcttgcatctccgagggtgcaatcatagaagataccttactaatgggagcagattattatgagactgatgcagacaggaggtttttgtctgcaaagggcagtgttccaattggtataggaaagaattcacatatcaagagagccattattgacaagaatgctcgaattggagacaatgtgaagatcataaacagtgaaaacgtgcaagaagcggcaagggaaaccgatggatatttcataaagagtgggattgtgacagtagtcaaggatgccttgattcctagtggaactgtaatctgagaagattgcattatgatacagcaaacccaccattagtgtttctagatagagaaagtaatgcattaccaaatcacttccactttatcccttatcatggatattttgagcctccggcggtattattatttttattaaatggaatggaacccattattgcccgcc

SEQ ID NO: 197409 - DNA, 410 bp, Gossypium hirsutum
tggacgcgtgggcggacgcgtgggcggacgcgtgggtttcatcttgtttttactcacgagagatgtttctatcactggttatgtcgttccttgctttgatctacattttattggctgttttggagtttcagtggaacaataatggagttcgttcttcgctgtttcttcaagattgttgcttccctatgtcgcatctcgtttcgaaaaagatgggtaattttgtgagtgattctaagtttttgaatgtattggaaaatgaagcgtttttcccttagcgatttgcttcaccaaaaaagaaagaaaaaagtttggattaatgtttttttttggggtttaatttgtagggtattaaccaaaggtttaatttagggtttcaatgtaaaaagaaatgttaaaattctgatgaagaa

SEQ ID NO: 197410 - DNA, 546 bp, Gossypium hirsutum
cgctgttccagttggaagacctcacatggctgctgtcgctgacttgtcagatgccccgcaccagtgggaattcagctgggatttggaggtcgattttgagtctgaagagaatgcttcaatagtctatgctgcattgggcgtcgataaagagttgcaaccagataaagtgaagaggcaaatgtcgatctctgatgggaaactttctgtgcactttgaagcagttgaagctaggtttctccgtgcatcattttcagctttcgttgatgtactcacacttgcctcgaaaaccatcgaagaacttggcccaggaatggtattgtgatctttgattattgcaattttacaataaatgctgtgggattctggcattaatgcattctttttcgttattcttgttcttccgcttttgtattcttaatgatacacatgtaattttaattaggatgtaagcttagcttctagctcaccgttatcttccaggtttttttctttatgtatgttgatcagggttaaacatgtggaactatcactaagttatgccgaatt

SEQ ID NO: 197411 - DNA, 431 bp, Gossypium hirsutum
acgctggctcaaacggagttaataatcggaatggagatcggttcccgcattacaatctatgacatggaaaacataaaagtgctgattagccggttggaaattgagatggaatctttattgcataatgctgattttgcagttagagaagaagatgcagtgaagcttgcaatcaatgagatcaagggaaaattagaagcatttatgaaaaccattgaggaattgggtcgacaggccgaaaattgtagccgtgatattaggatggcgaggacggtagttttgcagaagatgatgaaacgttctgggaattcatcaacgggtgacagcccgtgggaagtgtagcaatgaggtaaatttcagtgtgttaatgttgtaataattttatgctgtattcaaggtaatgaagttgctccactggatttgatcttatacgt

SEQ ID NO: 197412 - DNA, 612 bp, Gossypium hirsutum
cttgcaagctgtgtgaggcggcctaaatttattttatgcagtggtggaaacccttcagcttacatccccacttatactgctcaaaattcaccctccagtgcactattttctggaaacatttggagaaacttgtcttcgtggatgccgcagagggggacaacagctcagccggcacaagatgatcccagatttcctgggagaggcagaactcttggttctgttcaaaatactgctgtaaattcagattctaacttacaagctaggcttttggataatagtagacccactagtccatcagatattgcagcagctggtgctggggagaggctttcaaatgaaaggcagttacaagtgagtgatgcacatgtggtcgttaaacagacataaagagcaatgacgttctacttcttggtaatattggggacctaagattaatgaaatttgggtcgaataatttgtgtttgtgtgttttcatgtttaacagtaatgtcatggccttatctatggactttggtttatgaattactatttagcttatatgatattcttggtatagcagcaaatttaaaaggttcccaagagatattccaaaaaaaaaaaaagaagggaggc

SEQ ID NO: 197413 - DNA, 446 bp, Gossypium hirsutum
cccacgcgtccggtggatatgtgcgtgcaatgtataatgcttccctttgttatacatttggggaaggtttatcacatagtcgtagacaagcgaggaagtggatgaagagagcagctgatcgtggccatggcaaagctcaatttgaacatggacttgctctattttccgaaggggaattgctgaaagctattgtgtatcttgaacttgctacacgttctggtgaaactgctgcaactcatgtcaaaaatgcagttcttcagcaactctcggcaacttctcgtgaccgtgccctgcttcttactgataattggcgtgctttgccttcctcccgatgagtatacctacactgtttattgaactttctcatctaatcctgtaattgcctgttactttcggttctcttgttaaatgcttgacgagtgacaagaaaattattaatatattat

SEQ ID NO: 197414 - DNA, 400 bp, Gossypium hirsutum
gttgaatcaattgatagcaatggaaggcccatctctggctatggaactgagggtggaataggcattcctttatatggacctttaaaaattggcaaagccgaacctgttaatcttcaatttggtcactttggaattagtgcctggcctagtgatggtggcacaagtcgtgctgggagtgtggatgagtcgagatatgatgggactgaaaatagcagtagataccaatcttcttgctgtagctcaccgaggatgtccgatggtccagcaaaagagcttaaggaggaaaactcagtctatggcagcgatgaagaagttgatgatcaacctgaggtggacactgatgaggattttagtgatgatggtgataaagaggtccatgaagaggtaggttcagttgatg

SEQ ID NO: 197415 - DNA, 409 bp, Gossypium hirsutum
cccacgcgtccgtgaagaaggaattcagatgcttaaggatgctggtgtggaagttgaccctcttggggaccttaatacagaagcagagagaaaattgggccagcttgttttggagaactatgacactgaattttatttgctgcatcgctatcctttggctgtgaggccattctacaccatgccttgctatgataatgccctttacagtaattcatttgatgtcttcatacgaggtgaggagataatttctggagctcagcgtgtccatgtaccagaatttttggcagaacgtgcacaggcatgtggaattgatgtcaatacaatctcaacctatgttgattctttcagatatggtgcaccaccacacggtggggttggagtgggattggagcgtgtggtgatgctcttc

SEQ ID NO: 197416 - DNA, 615 bp, Gossypium hirsutum
ccgaatcggaggttcgacccacgcgtacgcccacgcgtccgcacagcaggacccgaaggtcatcaagcagtggcctttagggcaactagtaataaagtcatcatgttcaattgccatttcaatgggtaccaagacaccctttaccctcacaaagggcaacaattttatagggattgtgtcatcagtgggacggtggacttcatctttggggattcggcaagcgtgttccagaattgtttgatcatcgtgaggaagccaggtgagaaccaacacaacatgattacagcacctggaaggcaatacatagccactgactcagcccttgtacttcaaaactgtaccatcacgggtgcccctgattaccttcccgtgaaggacaagagcaagacgtaccttggtcgtccctggaaacccttggcgagagccatcataatgcaatctacaatcgaagacatcattacaccagagggttatgcccccatggacggcaccaaaggattggacactgcctactttgctgagtttgaaaacaagggacctggtgccaaaactgaaggtagggtcacatggccagctatcaagaaaattgatacaaatgaagccaagaaatggacc

SEQ ID NO: 197417 - DNA, 640 bp, Gossypium hirsutum
gtgaacttgaacaaagttccatcggatgcttttgtggtgtatcaggggcaccatggggaccaaagtgtctatcgtgccaatgtaattcttccttcagcagcattcagtgagaaggagggtacatatgaaaatactgaaggttgctctcagcaaacattacctgcagtccctacagtgggtgatgctagggatgattggaagattattcgagcactctctgaggttgcaggaattcgtttaccttatgatacattaggagccatacgatccaggatgaggactgtggcaccaaacctactcaacacagatgagatagagccagctgcttttggaccttcattgagtccggactgtagtcagaagataagctcgacaccgttcaaggctgctgttgagaatttctacatgactgattcgattaccagggcatcaaagataatggcacaatgcagcgctatgctactaaagaagtgagtgataggattcaggtattaataaacatttgagattcacttgtttttttggttcatttctgtcatgccttaagcagtgtactggcttaacttcttgaacagtgacagtatgtgaataaaggaaactaaggtccttggcgttttgctttaaaaaaaaaaaaaaaaaa

SEQ ID NO: 197418 - DNA, 722 bp, Gossypium hirsutum
cccagaccttagtttctctcggcatccgcttcgctttcctctcccctctcgacgccctccacggcgacattggcgcgctctccgccaccgacatcctcgtcctcttttcgaaatccggctccactgaagaactcctacgtctcatcccctgtgctagagccaagggggtttatatcatttcggtcacctccgtccccaacaatgccttggcaaacgcttgcgatatgaacgtgcatcttccgttggagagggagttgtgtccgtttgatttggcgccggttacttcgacagcgatccagatggttttcggagatacggtggcaatagcgcttatgggagctaggaacttgactaaggatcaatatgcggccaatcatcctgctggtcggattgggaaaagccttatttttaaggtaaaagatgtaatgaagaagcaagatgagcttccagtttgcaaggaaggagatttgataatggagcagctggtggagcttactaggaaaggatgtgggtgtttgctggttatagatgaggaatatcacttgcttggcacatttacagatggtgatttgcggcgtacgcttaaggctagcggagaagccatattcaagctcacagtcggtgaaatgtgcaacaggaaaccaagaaccattcgtccggatgcgatggcagtggaagccatgcaaaagatggaatcaccaccatctgctgtacaatttctg

SEQ ID NO: 197419 - DNA, 527 bp, Gossypium hirsutum
  unsure (1)..(527): unsure at all n locations
tgaggtactatgactatactcatccaaatggaactgtttatgaaatatggcggcaagtatcgcaaaagctacctctgatcaaacttatgattaatagagacaagcggcttgttaaaagggagttgagtgaacccaattgctcatgtctttgttctaaccagacaggaatcatcgactccttaggataaacataaacttttgctgaccctttgaagttcatttcatatgtcaaatgtctgtccaagttggaagattcgctggtggagcgtgcaggcaggcttttgaggaataatttattatgttattacacccatttcccttcgcctttaggatgtttgtcttcagctggcagagctattgaaatttgcctttgcatgaagactttcttgcatacattgttgtggagtagatttggaattttagttatagttttatttgcaatttgatttgtacatgttagagatacagtacgtctatatatacaacagcgatgctcaattcttttcctacaaantaaaaatttaaat

SEQ ID NO: 197420 - DNA, 507 bp, Gossypium hirsutum
cccacgtgtccgcccacgcgtccgcccacgcgtccgatcattacctgtgaaattctgttctcatttttctttcaagaactaagcgaaaatggcagcagaggaaggccaagtctatggttgccacactattgaatcatggaacgaacagcttcaaaaaggcaacgaatccgaaaaattggtggtggttgatttcactgcttcatggtgtggaccctgccgtttcattgcacctttcctggctgaactagccaagaagttcccttctgttacctttcttaaggtggatgtggatgagttgaaggaagttgctaccgattgggcagtggaggctatgccgactttcatgttcctcaaggaggggaagattgtagacaaagtggtgggagcaaagaaagaagagcttcagcagactctgtcaaagcatatggctgtccccagtactacttcagcttgattttatgataattattagttcaactgtttttaatctttcatgtttggaggaac

SEQ ID NO: 197421 - DNA, 494 bp, Gossypium hirsutum
acgcccacgcgtccgcccacgcgtccgagacgttccctaacatcccaaaaatccaacccaaagtcacttccttccatcgagctacaaccaaaagaaaaagaatgggaaataaagcctccactgccaaaatcattgaaatgcagtcggcgagtcagtggagagcccagctagaggcctccaagcaaagtaacaagttgctggtgatagatttctcggcgacctggtgcggaccctgcaaatggatggaaccggtgattgaagaatatgccaacttatatgatgatgttgagttcatcaagatcgatgttgataccttggaggatgtggctcgtcaattcaaagttgaagcaatgccgaccttcgttcttgttaagaaaggcaaagaaatatgcaggctggtgggtgctaaaaagactgaactccagaagcgcattgagaaacacaggtttgataattagcttgtttttgggggcaaactataaatatgggtgatg

SEQ ID NO: 197422 - DNA, 613 bp, Gossypium hirsutum
ctttcaaggctaagccaccaccaccactaccacgatggccttgaccaccatgctccgccgccgactcttctcccgggctttctcctcccacgacggtccaagccggtggacgacgcccggtcaccaggaacggcccaatggttacctcttcaacaggaccccaccacctccaggccaatcccgtaaatgggaagattgggagttgccttgctacgtcacgagcttcctcaccatcgttatcctcggtgtcggtctcaacgccaagcccgatctcactatcgagacttgggcacatcaaaaagcccttgaaaaactcgccgccgaggagtcgtcatcttcttctgactgagatgttgtgaaacaaacttcaatctggatctgtagggggtacggatctttgtgaacgcttttggttttctgttgataaaatgtgtagttcgaataaaaagatggattccttttttttttttcaacagttgaagggcttgtagctgttgaaattttatgggttttttaaatttgatttaccttttcgatgatgatgatgatgatgatgaagtcgtttggcttatttgggatcgtaatctaatatttacttatcaagtttcaatgg

SEQ ID NO: 197423 - DNA, 396 bp, Gossypium hirsutum
gaagaatgccaagcgaccacatgaagcatcgggggacgattccaacgttgattctgcaatcgatatgtcaagagacgaggctatgaaagagaggacatcagcatccaacgaaattagtgattctgcgtataacatgttcagaaatgatgctttgaaggattctttcgagacaagcctagttttctttattggtcaattgaagagttttgcagaagcatctgtgaagatgtacacagaacttgacagggatattcgacaagccaaacataattatgaaatctctgtcaaaggagtcgaggttgccaatgaagaaaataacgctgagagcaacaaccaaagtggcagcgatcaacaaccgaagccgcaagtgtaaaaccatgtggagaagatgttggt

SEQ ID NO: 197424 - DNA, 414 bp, Gossypium hirsutum
gccttcatccacagaaagaatatcatagattacgtagaataatgggtcaacggctgacataccggacccgccatagctatgccaccaagtccaaccagcaccgggtcgtcaaaactcctggtggaaaacttgtctaccagacaactaagaagagagctagcggacccaaatgtccagttactggcaaacgcatccaagggattcctcacttgagacctgcggaatacaagaggcctaggtcacctaggaacaggtggactgcgaaccgtgcctatggtggtgtgtcatactggcagtgcagtcagggagaggatcattcgggcctttttggttgaagaacagaagatagtgaagaaagttttgaagattcaaaaaaccaaggaaaaagtttcatcaaagaactaaaagatgaga

SEQ ID NO: 197425 - DNA, 530 bp, Gossypium hirsutum
ggaaagctggacaccgagcaagagagtgcactgcacccccaatgccacccggggacgttaggttatgcaataattgctacaagtctggacatatagcagctgactgcacaaatgacaaggcatgcaacaactgtaggagaccaggtcacttggcacgggagtgtacaaatgatccaatttgcaacttgtgcaacgtagccggacatgtggctaggcattgccctaaaggcaacatgataggtgagcgaggcagttttggtggtggtggtggtggtagtggtagtcgtggcggtggctatcgagatcatcatcatagagatgtagtgtgccgtaactgccatcaattcggtcatataagccgggattgcatgggaccgttgatgatctgtcacaactgtggtggaagaggacacatggcatatgagtgtccatcaggaaggtatttggaccgttatcctcctcggaggtactagatgatgatgccagccaggttatggcaggatcaaaaaatattttaattaataacatgc

SEQ ID NO: 197426 - DNA, 860 bp, Gossypium hirsutum
gtggcgccgggagtttcatgtacgagaacgtcgaccgtgtcccgccgtccgttgattggcgacagaaaggtgccgtcactgctgttaaggatcaaggccagtgtggtagttgctgggcattttcaacagttgtagcggttgagggaatcaatcaaattaaaaccaataaattagtatcattatcggagcaagaattgatagattgcgacactgaagaaaaccaaggttgcaatggtggtttaatggacattgcattcgattgcattaagaagaaaggtgggatcactactgagtccaattacccttaccaagctaatgatggaagttgcgatgctgccaaggtgaattctccggctgtggctatcgatgggcacgagaatgtgccagctaacgacgaggatgctctgcttaaagctgttgcaaaccagccggtttcagtggctattgatgctgggagtatggatttccagttctactccgagggggtattcacgggagaatgtgggacagagctgaaccatggtgtagcagcagtggggtatggaacaaccttggatggaaccaagtactggatagtgaagaactcatggggagcggaatggggtgagaaaggttacataaggatggaacgtgggatcagagacaaacaaggactgtgtggtatagcaatggaggcttcatatcccatcaagaactcatcttctaatcctactggaccttcatattctcccaaggatgaactctaaacataaattatagctttcctttcaaatgtgttgttttttctgtgtttccaaaagttgtatcacgcaacatatgatcatgattgaataatcaataatatacttcaatttggtttc

SEQ ID NO: 197427 - DNA, 492 bp, Gossypium hirsutum
aaaatctttaaataaaacaattaaatgtgtggaaattgaagtcatttaaagtgacaatgtctggtgagtctgcaagtataatttacaggtaagttaaagatgatagaagatgctcagaacggaaataagaaccttccttttgtgggtgagaatcgatatactatcttatatgtttgtactaattgtgtcggcaaagctcaaatgaacttgtctaagcccagtttatttatacttgtaagattctctgcactgtatcatctatttatattatacttaaaattgttatttaaaccgataaaaatcattacgttattatatgatccatccgtttcttttggaaaaaatttgatgacacggccatattttgtcttttacttggatcagtggtggaggcacgaccttaacaccaactacaccgggcacgacaacaacttcatcatcatcaacaaccaccacgcccttcatcatgaccccaggcaccaacaccccaac

SEQ ID NO: 197428 - DNA, 468 bp, Gossypium hirsutum
aacatacgtaaacacacacaaacaattaaactactaaagttttcctgcaactaattaaggcaggtctctccaacaccatggacatgaagaagaagatctcttgcgctgtcatattcgccgctgcctcaatgagcgcagtcatggcagcaagcaccgccccagcttcctcaccagatggcgccccacttagctccgcctcagttggcgctgcaccagcttctgcaccaggcccggactccagcgttgcaacctcaaccttgcctgttcttgggtcattggttggagccttcattgtctctttctttgcttaaattatgggttacctgcagtatttgaagagatcatatataacttacataccatttgtattcaagaaggctcacgttccgttccctttattttgacttctactgattgaagatttctttttcttcacttgttctgtaatgtgagaatttgaattccttc

SEQ ID NO: 197429 - DNA, 990 bp, Gossypium hirsutum
ggataaaacccagagtattccaaccattgatctttcagattttccagcacagtatgagaaactaaggcgatcatctgaagaatggggttgtttcagggtagtcaaccacaacatcccttttgaattgatgcaggaaatgaagcaagttgtgagatcattgcttgacctccccatccaaatcaagcaaaacaacgtcgatgtcattgccggcagtggttattgggctcccagtcctaaaaaccctctttatgaagcattgggtctctatgatatggcctcctcccaggctattcataccttctgctctcagttggatgcctctccttcacaaagagacgcagtagagaagtatgctaaagcaatacatgaggtaatcatggatataggtggaaaaatagcagagagtatgggattgaagggtgattactgcaaggaatggccttgccaatttaggataaataagtaccatttcacccctcaatctgtaggctcggctggggtccaattacacactgattctggcttcttaacaatacttcaagacgatgagaatgttggtggacttgaagtgatggacaaatctggtgaatttgtagctgttgatcccttgcctggcagcctccttgtcaatcttggggatatggccacggtatggagcaatggaaggttacacacggtgaagcatagagtgcaatgcaaggaggcgaaaactagagtgtcgatcgccacgttcctcttgggaccgaaagaggaagcggtggatccgccaccggagctggtggattcggaccatccgcggctttacaactcgttcacgtacgaggagtacaggaagctgcggctgtcgacggaattgcaagctggtgaggctcttgcacttgtacatacctgatcttaaagaaagattgtgtaaagcatattgcaatgtaatgaaagtcctccacttctgccctttgtttgatgaataaagcatgaatttaaatttcctag

SEQ ID NO: 197430 - DNA, 581 bp, Gossypium hirsutum
  unsure (1)..(581): unsure at all n locations
cccactcgtgcgggataatatcatacattcatgtggggatatgtattacacaccttgggtgagatgattaattcataaagattcaagctcacccaaaaatattttaagtgccaggtgcaggtggataatttctaggatcagctcagatgattctctatgttatatacaagaacaggcctgtttcaacaaacccaagcgaggcaattgaagaataagatgaagaagaagaaggcggctcatctcacccagcgagaagaggcatagagatgaattcatcactcggaaacgtctaaacaatggcaaaagcctcccgagaccacattttaatcaacaatacaacaaaaaagagagtccctttaactccatttgagttgcgaccaggttggactcgtgacaatgatgtagaggatccaaacaatgatcaccccatcatcttaggacgttaattaagcactgggagcttcaaagctttcaaacttctgccctttttatttttttccttctttcatgtgtcttgcttttctattgtaaacctataaatgaaaaataaagaaatgattctcagggagggtaatntttnt

SEQ ID NO: 197431 - DNA, 421 bp, Gossypium hirsutum
cccacgcgtccgcacggcgtctatgagggtagatggaacgatcgaggttgaagaggtgtgactgatggggtgcttacggcgcgaagcttctagaaaccctagggtttccagattctgtttaggcattgggccttatttaggttgggtcttgtttgggtttgggtgtaacgggttaatagattttgggccaaaagtgtaggctaattgggtcgtaactaggtactgcgttttgggtagtctagctaggttacgggttaatggattttgggctatagtatcgggtttgtaaactggactgtacaaaagctattttatttttatttttttgcttttatttgccaatgtatcggcccgggtaaatttgggttgctacaatcatcatatgattattttggatatatcttacttacattttctcggt

SEQ ID NO: 197432 - DNA, 765 bp, Gossypium hirsutum
ggacactaataaacatgttgatgaaggaattcccatctatgtttgggttctctgtcagccacacaacccgtgcaccaaggggcaacgagaagaatggagttcattatcattttactgaccggagtgtaatggagaaagatataaaagatgggaaatttcttgagtttgcttccgttcatgggaatctttatggaactagtattgaagcagttgaggcagtagcagactctgggaagaggtgcattcttgacattgatgttcaaggagcaaggtcagtgagggcaagttctcttgatgccattttcatttttatctgtccgcccacaatgagagagcttgaagagcggctccgtgcaaggggccctgagacagaggagcaaatcctaaaacgactacggaatgcggaagcagaaattgagcaagggaaatcttctggcatctttggtcatatattatacaatgataatctcgaggagtgctatgagaatcttaaggaactgctagggctgaatggaagtgcaccaactaatcataagccatcacccaaagggattgatctgccttcgaaccattcggtgtcaaaaatcgataacaagatcctcataaattgtgagactccggaactcgagaaagcgtcaaagaacttgattgcattggatgtgtcgtcgctaaaaggtggggcacccggtcggacaagaggactaaatgtctatgcccttgattcattttcagatggcttaaatgagaaactgagctgacgactgc

SEQ ID NO: 197433 - DNA, 476 bp, Gossypium hirsutum
  unsure (1)..(476): unsure at all n locations
tatgaaatgaatatatataatttttcatgttcatatgcgaatacgagaatgctatgttagtaaatgctgataattctttttccttgtaatcattgcttaaagcagtcacaatcgcataggattattgttttcaaaagtttgtttgtagctattgctatctctaaattgctgtattcttagccggattatgtggcttgcattacaattacgaactacattccctagggactgaaactaagctttccttgcaattaaaggacttcttatattttgcaaaaaaaaaataccaaaaaaaaaaaaaaaaaaaataaaaacactttcaacttgataaaaaagaatataaagaaatatataaaaaatctaagaaatgacaaagaatattgctgtgcgacaaagagcattatgcaaaagtggattaaacttcnttggagatttaaactgattgcattttcatgaatagaccaaaaaaaccaagc

SEQ ID NO: 197434 - DNA, 746 bp, Gossypium hirsutum
tcttgatactactttaactaccaaaggtgactctaaagaaactttctatcttggtccactagctgatggcctcaatcaatggcctttagaagaagatctaccatcttggagaagcgcaatggagacttatcatcaaaaagtgctgtctgctgggactaaattactctccttaattgccctgtcccttaaattagatgaagacttcttctggaaagtgggtgcccttaatgaacaagtaggagttattcgtttattacattatccaggctcaggggactcggactcttcaagtgaagaaatatatggtgcttctgctcattcagattatggaatgatcactcttctgatgacggatggtgttccggggcttcagatttgcagggagaaatccaaacaaccacaggtttgggaggatgtgccaagcataagtggggcattcattgttaacattggggacatgatggagaggtggaccaattgtttgttcaggtcaacactgcatagagtgctgccacctagacaagaacgttactccgtaatgattcacccttttgctgtttatgcagaacagttccatttttttggaaagttcaactatgttaggaaataggaacagtttgttgaatgtccttttgatttcgaaatcttcatgttgaatgatattatctgttcataatctgattatttgatgagggtgcaaaagattgaaatgtattcaccagtcattgcacattgtttattctata

SEQ ID NO: 197435 - DNA, 633 bp, Gossypium hirsutum
cccacgcgtccgcattttctctcaactgtctcgcagccgatcttcctaacctcccatctggcccatggctaccaaagaaaacttattctcttgctccgtgaaatgcgtaaaataaaacatgatttcatcctctttgaaagcacttaaaaaaaaacccttcaaaacattatttcatcctctttgaaagcacctaaagaaaagcccttctcttccacgagtccatcgaaaatatgaggttcaaagccctcttcgttgcgaaggttttaatacctgctgaaacaccatatggttaagttctcttctccaactttgtttttcgtatttgaaatgttttggttaaactttaggttttatttggttttaaaaacatcatgccaacataaaaaccgaacctttgaaagtattatttggttaaactgatgaatatcttgtattttccgcgctgttggatacttgggttgttttgtctaatttttgcaggaataagctttgtgacaacacagagtgcattttggtaatttttgtgtgtatattctctgatttcttgtgtgcctttccatatcccgattgtgatctctatttggtgctcttgcttttctggaaaaaataataattaaaattaagattcatttt

SEQ ID NO: 197436 - DNA, 421 bp, Gossypium hirsutum
cccacgcgtccgcccacgcgtccgccccctttcactttctcccaataccacccccctctggcctcatttgacaccaaaatggcgaactcagcatccggaatggcagttaacgatgaatgcaagatgcgattcttggaactaaaggccaaaagaagcttcaggttcatcggtttcaaaattgaagagaaccttccaccaggtcttggtggaaaacctcggtggacctaaagaaaaatacgacgacttcagtgcttgtttgcctcataacgagtgtcgttacgctgtctttgatttcgacttcactaccgacgaaaatgtccagaaaagcaaaatcttcttcattgcatggtctcctgatacatcaagggtgaggagcaaaatgttatatgcgagctctaaagatagattcagaagagagttg

SEQ ID NO: 197437 - DNA, 508 bp, Gossypium hirsutum
cccacgcgtacgcaaaacctgtgaaagaaacaagcggaagcaaagcagagactgagacaaagaatcccataccaacagctgcatcctgagccaatggcgtcaacagttcttaggcgagcaacctcatccgttatcaagtcaagtcttctaacggaagcgtcaaggagaagctatgcctcggttgctgtggggactgacattctgtctgccgcatcccaagttagtctccagaaagctcgaagctgggatgaaggcgttacctccaatttctccactacttctgtcaatgacatcttcaagggcaagaaagttgtcatctttggactacctggagcatacacaggttgttgttcacaacagcatgtgcctagttacaagaagaacatcgatgagttcaaggctaaaagaatcgattcaggcatttgtgtcgccattaacgatccttatgttatgaatgcctgtgcagacaaactgcaagccaaatgatgtgattgaattttatggggac

SEQ ID NO: 197438 - DNA, 589 bp, Gossypium hirsutum
gtgagagggaaggtagggagcgtgataggcgagacagggagcgtggcagacgaaggagccgttcaaggagtaggagtagggagcggaagagacatggtcgcagtagtatgagtccgagaaggcatgaagcagaggatggtaatgctccagaagagtcaaagaagaagggaaagaaagaaaagaaagaaaagaaggaaaagaaggatgatggaacggaccaccctgatccagagattgctgaagccaacaggattcgagcatccctaggtttgaaaccattgaaattgtaagcatggtagatgttatatgcggcaagattaactattatatcatatgaaggtacattggtgttgttttggtatgtattgttaatacaaaagctatgcgggagttggaatcagatgatgatggccatcttactaatatttttctcgttactatttgtctatgttagtatatttgtgcttagagcatcatttgttgttcttctaaaggtcgctgtatacttttgatagggaattagagaaattctcatcacttgaaagagtattcaaattcaaaagatttacttaacaaaaattcatttttc

SEQ ID NO: 197439 - DNA, 560 bp, Gossypium hirsutum
atcgactttcgttctttccgttcatcttgtcaccgtcagcggcggaaccgttgtaatccaagctagcaattagcaatctgtgctcttgcaaagagaatggaattagcggatcgagcagttgggtttctcttatctattaccagtctatcaatattcacgtattatacgttttgggtcatcatcctgccatttgtggacagtgataacttcatccacaattattttctaccccaggaatatgccatactgatccctgtgtgtgccggtgtggtgctcctttgcctcctctgtatttttattgggttcgtgctgctcaaatccaagaagaagaaggcttgaagcttgatgctactttatcatctctgcttaaaacattgccttgggtatagctttgcttggtttcttccatatattttttgcttcgagtttaagttttgagatgagaatttgtgtttaggccatcataattttgttaaagactgttgcatttgaggacaactttctttgatttttctgtctaatatacaactgctacagagaacccagtgtatttttctttc

SEQ ID NO: 197440 - DNA, 469 bp, Gossypium hirsutum
caacaattaggtgagaggggaaatcaaatgtagaatgatgagtacagaagaaaaaagttcgatgaattgcaatcgagacttgctgatacacgttcatccatctatcatattgaacttatcgacaaagtaaaacttcaagttcagcaatttcatgagattgacatgaagcgtacaatagcagacgaatctatgagagtcaatcttgacatcccagaatcagttggcttatcaacaccaatgccagtcccagcatcatcaaggctggctgatttagatactggaagacgtggtaagagaaaactttaactttttttaacatattttcttgtttatttgatttagggaaatggtgttagcacttgtatgtatagagttcctagtaaggttattttcagaaagacagcatcacccttctcattgttattgctgtttaatgtctttttctttaataaaaattatcttctctaaa

SEQ ID NO: 197441 - DNA, 417 bp, Gossypium hirsutum
gagtgttgaacttggtcttaggatacttcaaggaatagtggaaaccaggcgcggggacctaatctatctcagagacagagaagcagatatgagagaagtaagtgaagcaacaaatgctagagtggcatggttcagtatcatgtcccttggtgtctgcatcgcggtttcggttttgcagatatggtatttgaagcgttactttgtaaagaagaagctcatctagattatatacacaagtagtttgtgaagcaaagttaaaaatgtctttgaagaactagaaaaaggaaagatagaagaattcacttaattcttgctggaccaattggcttcctttcatttccctgctgattttgggaatgaagattggtgatggtttattgttcaatggtcatatgaaagtcttcttttttaaatcta

SEQ ID NO: 197442 - DNA, 733 bp, Gossypium hirsutum
cggacgcgtgggcgaggaaccaaaaggaaatgggttccagaagaaaatgctgtgttggttgcctgtatggtcgacttgcacaatgctggaacctttaatgcggatacgggattcaaagccggctatttaaatgagttggcaaaaatgttagaaaaagttctacccaatgccatgttgaaggctaaacctaatcttgaatcgaggattaggacattgaaaagggattggtcaatcgtttatgacatgcttagtggaaaaaacaatagcggctttggttgggatgagcataggcagcttgttgttgctgaagatgcggtgtggtactcatatataaatggtcgtattgtagcagctcaattcagacatcggagtttcccttattatgaccaacttactgccatctacgcaaaagatcgagccactggaaaagatgctcaaacagctgctgatattattgaagaaataaatgctgaggatgtagctgctacaaatactcatgaagaaagaaacgatttccatggatccgaagctgatgtttctttggatgacatggatctttcagctacacaaccgcaaccagaaccacaaccagctagaaaccaaggtgattctgcattttcaaagaagaaaaaaaggatttctgatgcaagtgatttttctacttcatttaatgatgctgccgctttattcgcggaaaatatacggaccgttggccttgaaatcagtaagagta

SEQ ID NO: 197443 - DNA, 307 bp, Gossypium hirsutum
  unsure (1)..(307): unsure at all n locations
gttgtcccatatatcattcgactgattgtacagtaattgagttgtcatcatgtgaacttcacaataaacagtaactgttggagcagacgaatctctggacaatccggatggccattgtaattttgtgcagaatcagtgaaaatgataccctttttgcnnaaaaaaaaaaaaaaaaaaaaaaaaaaaaaaaaaaaaaaaaaanaaaaaaaaataaaaatatttaattttttanatntattnaataaaaatttattaattttattttataattttaataaaatttaaatttttttattttatanttttt

SEQ ID NO: 197444 - DNA, 600 bp, Gossypium hirsutum
  unsure (1)..(600): unsure at all n locations
cccacgcgtccgcccacgcgtccgttcattcgtccggaatcccatttgctgaagtaggtgctaggattgatgctgttgatccaagcactattaaacgagttgcagaccgatttatctatgacaaggatattgcaattgctgcaatgggtccggtccagcgtttgcccgactacaactggttcagacgcaggacctactggaaccgttattagatgattttggtttgactttctcaatgggttatcacccggcccttggcaatcacaaactttccggtactcatacaccaatttccggaagcacacctaagggtggcctttctattcgttgtgtagggttcttagtttcatcaattcagtaataagcattgctgtctttagtatttgttgtgagaatcaggagacttggatgagcctgatgttgagctgggaccgttttaatggcaaaattctgatcaatttctttctttcttttgtcccccacatcatctccgttgcaaaaagatggcatcttctggttttggccaaaaaaaaaaaaanccccnnnaaaaaaaaaaaaaaaaaaaatttttttttntttttttattttttattattaatt

SEQ ID NO: 197445 - DNA, 577 bp, Gossypium hirsutum
acggtgaagggtcgcagtaatatatttgcaattggagatatcactgatgttccggaactcaaactaggtcatgcggctatacatcatgcatatttggttgctaaaaacttgaagctgttgatgggcggaggaaaagaaagcaaaatgtccgtgtacaaacctggtccggaagttgcaatggtttcgctcggaaggaaacacgctgttgcccaatttccttttgcaaccgtcggtgggcgtattcccggcttaatcaaatctggagacatgtttgtaggcagaactagaaagaatttgggtttagaaccttaagctacacacacacacatacacatatatatttgccattgtatttcctcatttccacctttaattcctttttgcttataatgtttcacattttttgcacccctctgttggctgtttcatttgtatgttgttttgctttgcgcttttaaatagattctcaataagatttgatggtaggggcatgtatgtttatttgttagtacagttcaattcttttgcaatgaattatttagacaagttgcaagtaaaaaaaaaaaaataaaagggc

SEQ ID NO: 197446 - DNA, 433 bp, Gossypium hirsutum
cccacgcgtccggttccgtatgccgcggacgccattgttgagatggaatcaacactttcaacattaccctccgctcttactcccttctccttttctaaacccctaaaccctaaatccactttgttctctttctctcagtctccactccttggccctgtcgccgccctttcttattcttttcctctaaggactatctcctccattcccaaacgcctacaccgccgtttggagtgcgtctcttctggtaccggcggcggatttggtggaaatgatgggagtagcgcctgctgtggcggcggcggcggggaaggaacgggtggaggtgattcgaaggcgaaattgggagctggagtcggtgacgatctctctgccttgtctcccgatgttatcattcttaatgttgggggaatgatgtgcggcgggtgtgcttcga

SEQ ID NO: 197447 - DNA, 281 bp, Gossypium hirsutum
cccacgcgtccgcccacgcgtccgaagctatgaaactggtaatatctcagcagattaacctaccttctggtatgataaactaaaatggtgttctataaaactttgcagaagataataatggtaaatgtctgattacaattctgtatttcttaaagattagtaatttataagtaatgaacctcaagctctgcagaaattggttgatctacaccgcattgagaaagggtctgtaaatttttacaagacttcaatatcaattgtttatgctcaagctaagtttg

SEQ ID NO: 197448 - DNA, 608 bp, Gossypium hirsutum
ctcgagtcaatagatctgcgagataattctcttctcctcgaatgtgttcgatggtgaacttgtagtaattaaaccactgttgccatcttaataatcgtccttgtttatagtctcctgtaatattgttccttataaaaggtccaaattgtttattatccgttcggacaacaaactccttaggtagtaaatcctgaattttcctatggctttctttacagcgagccattccttttcattactgtgataatttagttcagctcctgtaaatgtacctgaggtatatctacaaagcatttcctgattatcattttttaatgatttagcttttaaaacaccagaccaatattcttggctagcatctgtttcaagtatcattaaatcctcatcctgtggttggtataacgttggaaaatctttcaatttgttttttattttccttatgtaggcggtatcctcttgggtccattgccatacataatcttttttgagtttcttttggagtggcttcctgatttcagccaacttagctatatagcactctgcgtacgtcaagcaacccaaaaatctttgtaattgttttttatcacatattttctctgggaatttat

SEQ ID NO: 197449 - DNA, 506 bp, Gossypium hirsutum
gaaatcaacatcaagaatggttgaggactcaatggaagaacctgctgtggttggtccggagcatgcaagtccagtttctgtccttgatacctcggtttatagagatgatgaaccatctccagtaaagcagatattgaatgcctctggaggtagtggtgctgaagggttgagcgaagatcacaaggaagagcaatggaaccctgcagacaagtgcttggctaacaatgtggggtctggtcttacatccgagattaatcgcaagaaactacagaacatcgagcatttggtccaaaaactgagaagacttaactccggacatgatgaagccagtacggattacattgcatccctttgtgggaatacaaatcccgatcacagatacgtttctgaggtattattagcctcaggccttctactgaaagatcttggttctggcttgacaaccacttcagctccatccatcaggccatcccatcaacccggagctgttttttggtttggagcaa

SEQ ID NO: 197450 - DNA, 442 bp, Gossypium hirsutum
ttccttctggatgagaagccagagaagagttggtaaatttggtaatcttaccccttagcttgaattaagaaaagggctaaggatgctaacaagttgataattttccttttttaagtgccgaaaagttggacgacaaatgaaagcacaagcgtacgaaaaagcttgtgtcatgtgcagtgtttgcttttcagctctggacactccatggtaagtaactagagacgtcgaaaattaaaacgaggcagaaagtgttatctttgtttgtagagcaagaaaattggtatgaataaggcggagcatgctgctaaggatcggaattttcttcgcaactcgtcaacctgtgcttagatctcctctgggttctttctgtctgaactgttagatgttgtcggtcattcatgtggatatgcagatattgttacttgcttggatgtaaatcttt

SEQ ID NO: 197451 - DNA, 293 bp, Gossypium hirsutum
acgaaacaaaatggtgaaaaacaaattgaaaaatttggcattgtcattcttggcaataacactattgctgattatattcacaccggtaaatggatataggacgattgcgggaggtaaaacgccggtggaagatgtggagaaagacaaagcaatgcaagctttagggacgtttgcggcggaagagcacaacaaaaaatcatgaaaatgatggagacacatcgtatcagatagaatttctaagtgtaggggccagaacaatagttcagatcaatcttctaacatgagggtgaaat

SEQ ID NO: 197452 - DNA, 452 bp, Gossypium hirsutum
cccacgcgttcggaaactttgtatcaagggatgtccgatttcagatatagccatcgaagcactcggttccggttgtcccaatttggtaaaaattaaggtgaggaaatgtagaggagtgagcagtgatgccggcgaatggttgcgtgaacaaaggggagcgatgttgatcaatatggatgcttgtgacacagattgtgggttcgaggctagtgtcagtgacattggagttcatgaaaccggtgtggaggttggccaagtaaccgctgttggtgcttccacgagcagcaatggtaggttagctttgttgacgtcaaagctggggcattttgctggtaggaatttagtagcaggcactttgagaaggtggtctaattgtgatgataatttaaatatcaacttgtgaaatgatctaattgtagatgtttgggaaatttactctttgctttgatctc

SEQ ID NO: 197453 - DNA, 256 bp, Gossypium hirsutum
gtgacgcccctgggagaccatgggtcacacttgattcatctctgaatggtcagattatatcatttgattcagttttctttgttattaggattctatagtctaaacctgttctgtttttgcatgctatatgttgctgaagcctgttaaaaattgtagtctctttctatcttttacttagccctatgagtatattcaactgtttttctcgtatctctatactcgtgctcgaaaattatatcgaataaaggtgttagac

SEQ ID NO: 197454 - DNA, 1224 bp, Gossypium hirsutum
ggtggtggtgtggttggtggaggttggagggagggaaaggcgtggacagtggtataagacgggcgtgtatagggagggggaagagagagacggaaggatagaaagatcgaggggggattggaagggggtacagggggaggggagagggaggggggagtgagcggttgtaggatggtatggggattcgtgaggtggggaggggtgatgttgtcggggaggagctgggttcgtgtggtcgccgttattgtgagctagaggagatggtgaacgagggcgggttagggtcagaggaaattagggtagatttactttccacacgtctggaagcaggagaagctaggggcgaatcggggttcattggagcgggttgtcctcggacagtaagacaggcggaaatattagggggggggacagacattgagttagtgattaacgtgaagcttcggggagaagcattgcttgcaaaatgtcttggaagaaggatctgtagtgagtggggggggaaatataatgtggggggtatcgatatcaaggcagagaatgggaagcctgggatgtatatggatccagttcctccccctcctcaatgtgcatccgagcttattactcgagcagatgatactgaagaagttgttaagcaacggctccgcatataccaggcgatgactctacctgtagaggatttctaccgcagtcgtgggaagctgttagaatttgatcttcctggaggagtccgggaatcatggccaaagttgctccatgctttgaatcttgaagatgaagagcacaaacagtctgcagctgcatgatgtcttgcatggttgtatcatttgaagtacttacaggtaaattcggtcattctttgcatgcacaacccatgtatgcatatttatttcataaaaacccaaaaaggaagagagaaacactgaatatgctaataaagctagatatgtctaaagccataaactactaaacgaggtagttttgtacttgtgttctagacaattttgacattggttaaattattgtttgggagatgggaggacattgagcattatagtcatatgttatttcatttctttgaagaatcatacttgtggtcctgtaggacactgatgttttagagaaaataaaaatttgtgctagaactttgaagttgttgaactataaagactttttaggctgtttaaattttggattaccactgataatggggttctaaaa

SEQ ID NO: 197455 - DNA, 438 bp, Gossypium hirsutum
tcctccccctcctcaatgtgcatccaagcttattactcgagcagatgatactgaagaagttgttaagcaacggctccgcatataccaggcgatgactctacctgtagaggattactaccgcagtcgtgggaagctgttagaatttgatcttcctggaggagtccgagaatcatggccaaagttgctccatgctttgaatcttgaagatgaagagcacaaacagtctgcagctgcatgatgtcttacatggttgtatcatttgaagtacttacaggttgaactcggctttgagtgaatggttcggaggtggttgaaacgtttttatttatttatatttatttaataatttatttaatttaattgatttaaaatttttgaaaaataataatagtaaggatgataattttgagtaaggaagctactctgctttaaaaaaaa

SEQ ID NO: 197456 - DNA, 429 bp, Gossypium hirsutum
ttttcacgcgtccggcttgcgattgggaaggtgttcgtccagatgttgtgatactaggaaaagctttgggtggtggcgtaatacctgttagtgcagtgcttgctgacaaagatgtaatgctttgtattcgacctggagaacatggaagcacttttggagggaatcctttggccagtgtggtggccattgcctcactagatgtatgccaggaggtgaaactcgctgagagatctgcccatttaggagaagaacttttgtgtcatgctggttaagattaaggaggaatttccaaactacgttaaggaagttcggtgaagaggcttattcactgctttagagttcaatagcaggagttcattctcctgtttcaccatatgatatctgtctaaagatgaaagaaaggtgagtctttgcaaaacttacacatga

SEQ ID NO: 197457 - DNA, 714 bp, Gossypium hirsutum
ttcttcgcgtccgcttttggcaagttcctcaatacgcatttataggagcctctgaagttttcatgtatgttggtcagctggagttcttcaatgcacagactccggacggattgaaaagcttcggcagtgccctttgcatgacatcgatctcgctagggaactatgttagcagcttactagtgacaatggttatgaagatctcgacagaagatcacatgccaggatggataccgggcaacctgaacaagggtcacctagactggttttacttcctcttagctggactaacgacaattgacttgattgtctacatagcatgcgcccgatggtacaagagtatcaagctggaaggaaaaactgcagaaaatattgatgaccaagttagctttaagctataatatatacatatcggtgctaaaacatataaataacggtatagattaatagaataatgaggaaactgggttagagggttggtccccaacatgatgatgttgagaaattaaagatttaagtcgaaagaaaagtggggtatcgtgagagagaaatcaattttcctctcaactctcttgaattcccatcacttgaattgtcctgtctgtttgtaaatatgcagaatgttatctgcataaaagagctttctcttggactttaatgaaagcgtaatcctcctccgccctaagattagcaaaatttagaataaaatcccatgaa

SEQ ID NO: 197458 - DNA, 850 bp, Gossypium hirsutum
aagaacagaagcagtcgaagcagcactgagagaatctgaggttgatacaagtgcatttcagtatgtgaagaagatcaagtcattgaatgtttcactggcatcagcaaattccgctagtaaaagtaacattgttgattgggctgagaagctctatggtcagtcaatcagtgctgtcactgcaggtatgaagaacctattgtctggtgataggcagctagcattgacaaggactgtggaagctttgatggaggggaagccaaaccctgaaatcgattcttaccttgtgtttgatcctcgtgccccaaagtcgagccctggcacaagtagcagtcatctgaaaggaccctttaaagaagctattgtcttcatgatcggaggtggaaattacgttgagtacgggagcttgcaagaccttgcccaacatcagcagccagccaaacaagtcatatatggaacaacagaaattttaactggaatggaatttgttgagcatctctcactgttggggcagaagatgggatggggcagttcttctgctgctgcttcagcaacccattaaactgcttttcgaatactttgcagagcctgctattcgccagtcaagtgcatggagtcatcatgatccgaatgggagataccatatatatgaccaagtaaaaatacagatgtgagctggttacatgagcccgtaagcacttagttgggccttgcagtcttttctcttgatattaaatccccatgctggttttaatcgagactcgaaacctttgactatttagtacggtgtccaaaaattttgacaatggataggaagcatttctatttcctaataagtttctgcagttggggt

SEQ ID NO: 197459 - DNA, 429 bp, Gossypium hirsutum
  unsure (1)..(429): unsure at all n locations
cccacgcgtccggcaaaagaaagagacgatgggagtgacgaaggaacaggtggggtcttcgttgacttcaaaattgaagccttctcatctggaagtaatcgatacatctggagggtgcggtgcaggtgtggttattgagattgtatcggagcaatttgaagggacgagactcctggaaaggcaccgaattgtgaatgctgctctcgaggaggagatggagcaaatccatgccctgtctataaagaaagctctgaccccggagcagtggaaacaacagcctgaggctgaaaaagctaaaccagatgcttagagagacactcaaaactataatttagacatttgaataagagttcatgagaactcagctggaatactaagccatcatttcacctttagcatacattntagaaccatacttcgtaattactg

SEQ ID NO: 197460 - DNA, 407 bp, Gossypium hirsutum
tctattcgtccgcccacgcgttcgctccattagcatttctccattagacctttacagagagaaaagaagggaaaataaatttaaagaaaaaaaaaagaaacaaaaagcaaaagcaaagtctctccagagagaaaacaccagagagtagccaagaaagcgaagttccttgataaaaagcttttatttctatcagaaccgtcaaagtctctgtactttgaagtaaaaacccagactcagtaatctaatgggggaggaagagaaaaaaaccagttgaagagaaaaaaatggaagagaaaaaggttgaaaatgatggaaagaaaagtgaagaaaagaatgaaactaaagaagaaaccactccaccaccaccaccaccttcacaagagattgtattgaaagtttacatgcat

SEQ ID NO: 197461 - DNA, 566 bp, Gossypium hirsutum
ctcaaagagattttctctactggcattgtgcttggaggttatttagcactaatgaccgtgttattcttctgggccatgaaagacactgatttcttctctgacaagtttcatgttaggtcactgagggatcgtcctgaacaaatgatggcagctttataccttcaagttagtatagtaagtcaggccctcatttttgtcacacggtctcgcagctggtcctttgtcgaacgtcctggacttctattagtcactgcatttattgctgctcagctggtggccactttgatagctgtctacgcttattggcgttttgcaaagatacaaggcatgggttggggatgggctgctgtattctggctttacagtttggtcacttatattccacttgatcttataaaatttgcaatccgctatgtccttagaggaaatgctagggacaacctttaggagaacaagaccgccttcactacaaataaagattatggaaaagatgaaagagaagcactatgggcagctgctcagagaactctgcatgggcttcaaccacctgaaacctcaaacgtctt

SEQ ID NO: 197462 - DNA, 354 bp, Gossypium hirsutum
gcgtccgcccacgcgtccgcccacgcgtccgcccacgtctcctcttcacgcgtccggttgactttcttggttgcagaatcatgtctaatagcgggtgcaactaggaatgcttatcacaccaagtatcgtggaatgatttatgcccagaatttctcctgtgaaactttgaggaaaggtgtctttattgcaggagcagtgtttgtggttgccacaatgattctcaacgtatactactacatgtatttcgccaaagcaaccaccacaatggccggctcacagggcaaatcgaacgaattcaactgtttgggatgactggtttatgcttaaggttaaattactcaattaatgaagcca

SEQ ID NO: 197463 - DNA, 548 bp, Gossypium hirsutum
ttctctcgtccggaccctggagtttttctcatggcctacgtcgagggaggtgttttgaaatcaaagcgttcaatatggcgactgagaactatcactgattttttctgggcaattatcaatttcattggagtgttcttctcgaccatgttctcgatggaaaagtccgatgcctacagaaaaggctttggttcaagcaagaaatgggatgatggtccaggaggacctggaagtggaccatatggtggaggtggtggcccacgacgaccaccacggggaatggacaatgttcggggaattgaccatagttcccttcctgcctgtggctcctgctgcggtggctaaatgctgcaagcatacatcttgtgcatgtacactgttatatagctaaagtcctcttattataagtaaggatgttccacatgtttttaatgtcaatagattgcctgtgaaacaggcaactttgaacctctataaaaccagagatgcttttatgtactttcaaacttttgctaaatggtgggctgatactgctctgtttctacaacatg

SEQ ID NO: 197464 - DNA, 703 bp, Gossypium hirsutum
cttgatcgttgataagagacggcatggcagaacagcaattctttcccttaagaaatccggccctgaacttcctcagctcttgtcccaattctccgctggcattgctgggaccggtcttgctgttcttttatctgttatttggaaggtagcttgttggagagttccattttgtacacctaaactctttagcgccagcatcggttttgggctagtttggatcgcatgggcagttaaccaattgagagacacggttgtacaaatcagcaaaaatactagcaagtctggtctgaaggaagaggagatggttgagagagtggagaaaagtgttaatcagatatatttcagagccgcgacattgatggctatagcagtgctgagatttgcatgaactctgaagatctagacagtcgaaagttaagactcaattatattgatctgggatgtcaatatctgaagaacagagaggggttctgagggcaacaatggaactctgacttactatgctatatccatggggggtcctatgatgggcttgagagcacatacgcgggggctcttgtactctggtgcttctgtatgtgtaacaatcgtaaacatgtaaatggagagggtcagtgtcaaagagaagggttactactgccttagggccaaaaggaacaaacctttcatatatatatatatataactacaattttggcatggc

SEQ ID NO: 197465 - DNA, 434 bp, Gossypium hirsutum
ggagcagtgcctaggatcaaagagtctaagctctctctcctcacatacggcaaacttaacaatgtgcctgaagctgtttgcatgcaacatttgatggggattgatggagtgatagttgattttgtccaagagatctcgcatgcagtggatgacatgattgtcaggccgttaaatgagggattaagagaaggggaccacgagactgggaccaagtcaaagctgcagttctcacagcaggagctctcttttctcttaaagctaattccagagttgatacaccactaacttgtccctaccactacagtttttttgtttttttaccaactttacctctctttttcttttttttttaaatattttggggctgccttgctggattccttcgaagaagtcaaggtgacatttttatatataaagtacataattaatccatt

SEQ ID NO: 197466 - DNA, 766 bp, Gossypium hirsutum
tgcataagggtgaacttgcttgcgaggacttagatgttggcatcatagttgaagcaatgaagaaaccttcatgtaaaaaaggtttcattctagatggatctgcgaggactgttggccatgcacagaggctcgatgacatgcttggaaagcaaggagtcacaattgttaaggcgcttgattttgcgattgatgatgcagtattggaggagcggatcactggtcgttggatccaccctgctagcggtgggacctatcatacgaaatctgcacctgctaaagatgctggtcttgatgatgtgaccggggaacctttggtgcatcgaaaagatgatactgcagcagttctcaagtcaaggcttgatgcatttcacaagcaaacccaaccggtgattgattattattccgagaagggaatagtcgcatagcttcatgcggaaaagcctcagaaagaggttacggacgaagttaagaaagtactttcatgacgaaaccctcattacggacgagattcgtataaggtgatttacacatgaacattggttcttttgcaaacagggaccccccaaaaaattgagaaatttcatggatttttactcgtgtttcgagtacatattcggattcattgttatgtcattgcttttttggcccaaatatcagctgttgtttgttcaagtattggtgatgattatgatacttgaaataatgatatacttatagattgacaactcattacaaaaaaaaaaaaaacaacaaaacaaataatatt

SEQ ID NO: 197467 - DNA, 952 bp, Gossypium hirsutum
aacacttcaagaaattggctaccatctctaaaaacagataaagatcaatcggccaaagaacgaaaaggctggtcaataacagtccacgacctctcaggctctcccgtagcaatggcatcaatggtaaccccatttgtcccttcccctggctcggacagggtcagccgttcaaaccctggagcatggtcaattcttcgtccggaatgtggaacctggaaaccctggggtcgcctcgaagcctggcgtgagcctggtttcactgacgcccttggataccgatttgacctcttccatgatgatattgtggccacaggaacaaccaccaccgtcgccagttccaccctcagcaccaaacttgggggaaaattcaccatggatatgacaacaaacatatcaactccatcaataagcccgcaaagcagctgcgacctggggtcaggctcacgtcccgggtcaagaccaggatcgggatcagggtcagatttcggatttgggttgcccctttccccgcagagcatgtaccggggtggatttgtgatgtcgtcaacggtggaaggtgtggggaaatgcagtaaaccggaagtggaagtaggagtaaagcacgtgacatgcacggaggatgctgctgcctttgtggcattggcagcggctatggatctaagcatggatgcttgtcagtccttctctcaaaagttaaggaaagagctgagacagcaaagtcagacctttgtagattaagggtttttgtcgatttagttgtttttggattgggatttgggattctttcggcagattagctaacagcagtttttgagctgaatgtaaggattagttttgtacagtgcggaatgacgaggcatgaacctttttttatttattttaaaaaactttgtgattagtgaatttgttgattgtttaattccttgtactttctcctcatagatatatgtgc

SEQ ID NO: 197468 - DNA, 712 bp, Gossypium hirsutum
  unsure (1)..(712): unsure at all n locations
atacaccattgaagcaaattcaccctgttaatacatgggttggagcagttgttggtgctattcctcctcttctaggatgggctgcagcatctggtcagatttctctcaatggattaattcttccagcagctctctacttttggcaaataccccatttcatggccctagcatacttgtgccgtgatgactatgctgcaggagggtacaggatgttttcgcttgcagatgcttcaggtcggagaacagctgctgttgctttcaggaactgcctctatcttatccctttggggttcatancctatgactggggtgtggcttctgggtggttttgtgttgaatcatcagttatcacccttgcaataagtgctgcagcattttcattttatcgtgaccggactactcaaaaagcaagaaggatgttttatgccagccttttgtatcttcctgtatttatgtctggcctccgatttcatcgtctctcagacaatccgcagtgccttgcggaaaatcccaacagtattgttgagcttccatcattccccgaagctgttactgagagtgaagaagatgatcagaagaagaaagggagggatgccactgctggtccacaaagacccccacctgtggcataagcatccattgctgcatttgcctttcatcctgttccctcctaaggtgagcaatgacatatcgaactggcatctattttttg

SEQ ID NO: 197469 - DNA, 533 bp, Gossypium hirsutum
caaatgtgtagttgcattgaaaatgaaagtcaaatcacttcaggttcctatacaagtgaataagtacttggcatatagtgatggaatgcgagttattgaatcagggaagctgtccgtacagtccacagcttcatatgttttaccacatgccgaactggaccagccaagtggtcagccttgtctcggttcagaggagttcaaaattggcggcgacttaaatgaggctatttctcaggaacgctacaaggatgctgctgatttgagagacaaacttgataagttctgggcagcaaggaacttgaggaaattcacgtgacagttgtttatgctagagttttcaagtgtaaacagcagttattggtgaagctgacatctatcgatccggcggcaagcgattgtttctcatccttttttattaattcatatcaatttatatgaaataggaaagtcccgtgaatatatatgtatataaataatttttgtacagatatagttagaatattggtaacaattattattattattattattat

SEQ ID NO: 197470 - DNA, 682 bp, Gossypium hirsutum
  unsure (1)..(682): unsure at all n locations
gttacaccacctgcagaagtaccagctataagtgttcttaaatctgcaattgctgggggtggttcatgtggattatcttcagctctaatgtatccaatcgatactgtgaagactcaggtgcaagcgtcaaccaccctgacattcccggaacttatgtcaaacattccgcaaatcggattacgggggctttataagggttccatccctgcaattcttggacagttttcaagccatggattgcggacaggtatatctgaagtaagcaagcttgtattgatcaatgtcgctccgaacctccctgacatccaggttgaatccatggcatcattcctcggtacggtcctaggaacagtggcgcgtttaccttgtgaggtactgaagcagcgtttgcaggctggcctttatgacaatgtcggagaagctcttatcggtacttggcagcaggatggtctgaagggctttttccgtgggaccggggccacactttgtcgtgagttgccgttctatgttgcagggatgggcctatacactgaatccaaaaagtttgtccaacgacttataatacgggaactggaaccgtgggaaacagttgttgtcggagctatatccggaaggttagcttctgttactactacaccatttgatgtcnttaaaactagaatgatgactacatccggggccc

SEQ ID NO: 197471 - DNA, 658 bp, Gossypium hirsutum
ttggttctagatcgcgggcggccgccctttttttttttttttttagaaatcaaagcagaaactgcttccttcctcttgaatttttagccttatatatctttatcttgctccccagccaacgctttacttcgcaagttttcagacaagaaaagcaacaatttccaatggctccctgactcgttgttgtaaggcgtagtagcattaggcaaagggttgaggaaagtcaaatccccattggtggtctggggagcataggctgattcttgagaaccagggttgtatatcaacccgtttacccgccggtgaatcagacccagttcgccatggcttattacggcattaactattccaagctccgtctttgggagttcgtcgagtacagtaaaatgctatacctggacggcgacatacaattatatgacaacatcgatcacttatttaatttgccaaacgggcatttctacgcagtaatggactgtttttgtgagaacaaacaaggagccacaccccacaatacaacctcgattactgtcaacaatgtcccgacaatatcaaatgacctgacgagatgggtcaacaactccccttcctatacttcaacgccggcatgttcatcttcgaacccacctcacacctataaaaaccagtatagtgaagg

SEQ ID NO: 197472 - DNA, 446 bp, Gossypium hirsutum
atgatgctcgccacttgacggtcattcttgaaccttattttcctctttcaattgaaggtggtagcggattgcgtagcctttcaatcttttctgccttaggaacccgagttgttacagacaagtctctgcatcaattgtttgaaaaatctccgtgcctaagggtgctagatttgggcatgaataattcatgtgatgatttgattcccgagatttcaagcaaaataggtgatttgatacatttaaggcatctcaacttattttgttgcaagatgatacatagattacctgatacaatctgccaattgcatgatttgttatccttggatcttcatggatgcagtcgtcttggaaaactaccggatggtctggggaacttgatcaatttgaggtatctttgtactacagattgttccagtctaacttactaccccaaagggattgggaaa

SEQ ID NO: 197473 - DNA, 346 bp, Gossypium hirsutum
  unsure (1)..(346): unsure at all n locations
cccacgcgtccggattagcccattgtaatagtttataggcgctgtgaactaaaaattccccgaacggttctcctttccagacttgaatatcttcatggtccgtctctgtaagtgggatctgggaaattttcttcggaatttctgctgaaaaggtattgtaaatcaaatccgtcttccactttttgttcggaatgttaatgagatccgaaactaactatagctcctcnnnnnnnnnnnnnnnnnnnnnnnnnnnnnnnnnnnnnnnnnnnnnnnnnnnnnnnnnnnnnnnnnnnnnnnnnnnnnnnnnnnnnnnnnnnnnnnnnnnnnnnnnnnnnnnnnnnnnnnn

SEQ ID NO: 197474 - DNA, 561 bp, Gossypium hirsutum
actctcccttgatttcaaatgggcccttcttttttcattttcaatatcattatctccctagcattaaccttagtgaatggagatgctggtttgatccaaaaaacttgcaaaaccaccaagtactatgacctttgtgtctcctccctcaaatccgatccgactagcgccaattcggacacaaagggcttggctatgatcatggtgggagtcggaatggctaatgccacggccacatcgaccctcttatcatcccaattacttactaccaaaaatgacacaatcatgaggaaagtattgaaagaatgctctgacaagtatgctcacgctgccgatgctcttcaagattccgttcaagatttcgactcggagttatatgattatgtctacatgcatataatggcagctgcggactatccaaatgcttgccataacgcgtttagaaggtacccgagattggtttatccgcaacaaattgcacgtagagaagatggtttgaagcatatttgtgatgtgatattaggcatttgtgatcatcttgcttcttaaacttttgggtttctc

SEQ ID NO: 197475 - DNA, 766 bp, Gossypium hirsutum
  unsure (1)..(766): unsure at all n locations
gcacttcatcaagggcagctgttcttcccaaatgcttacatgcacgctcaagctcaacactcaccaaggtcgacaacacctgcaacagcagcaagtgcatactatgtccaacgacaacagcacactctacctctgggttcatctgcaacttcatcaacttcgatgttatcgttgcgttctccggttactcttgccaacagcggcaccaccgaccctgcaaaagctgtagcagctgctgtggcaagcaacatgaaaggtgggttggcatcccagggacttatcaatcctgcacaatttgcttctccacaatccactggaaagtcacatcagctggtaccaggcttcccatgtgttcatgctgtcccttccgctgttcaggtaaaaccagcagaacagaaacaacctgctggtgagtaaaattctccccttttttgcttcaacattgcttcccccgtatagtgaacaaggagaagaaggtacggaatgaaaaccgaatcaatgatatcgggggccggggcgcgccagataaactggttttttgcccagaaatgacagcagcagccaaaacaggaagatatgattgaagttatatatatataatgtggcttagaactcactcaacccacaattttgcaaagtgatgggggaagtntttctttgtggaatgtgctttctcatgtgtatccaccaaacatgtagacttttgtttataatctttgacatggttgatccctgatatgccctatgtaattaaatctgattgggg

SEQ ID NO: 197476 - DNA, 420 bp, Gossypium hirsutum
caaccgatttagagccccacgtaacattgcagctaaagaggtttgcaagagggaatatgcaactgaacaagagtggaagaactgggattggagatcagagggtgatttgatgttgaacggtgccattttcacacaatcaggagacccgagggccgccaagaaattcggaggcgacaagatgatagcatataagccggctcacatggtgccactcctggtgaggtggtcaggaacactcgagtgccgccaaaacaagccttgttagaccactcgcaattaactctcatcatgtaaccgcttttcaacttcaagatatgagcgagatgcttggggatattgaggaaatgtttctttctttattgttttcattctccttgcaaggagttttaatcatttaatattgatacaacatttcctttg

SEQ ID NO: 197477 - DNA, 491 bp, Gossypium hirsutum
atcaacttttagttcctcacttcaattctatcactcacctatgccattgttaatcttctttgggtgaaatagatgagaagattgaaaggaagccatttcttttgaggggaatgttgtctggctcgaggccatcaactagatctatggatttctttttcatatatcaaagtttgagagatgatgatgatttaatcattaatcataggttaatgacgtcggaccaggcttcattccccccaattatttgcttccaattttgattatgttctctcggtcttttgttggtaaaacaagaagtggtgggtggtggatgataaggatgctggagctgtgtaatctccgccatttatgttttgtttttatgcttgcttttatctctgcttaactttggtacttactaatactatacatgctgttactggtttagatctgtagtatcctttgcaagtttcaaggttaaatacatggaattcactccctggattggaagt

SEQ ID NO: 197478 - DNA, 308 bp, Gossypium hirsutum
ttctttacctcgtccacctacccacccagcaatgcatggaaagtttctgttatttgagagcaggtaggttctaagccacgggacgctacccaagtgaaccaaaatttaatcaaatatgttgtctagcttcttatagtgttgtgactaagtaagaaaatggcagacaccatgctattccaaccttacttgttaatatcacattattctcctttccccttaaaattgttaatcgtagaaatgattttttgtgaaatgctgaactttctttaaaaaaaaaaaagataaaaaaaaaacaaaaataacaatat

SEQ ID NO: 197479 - DNA, 662 bp, Gossypium hirsutum
  unsure (1)..(662): unsure at all n locations
caaaataaaaaatggctctttcaatttctttcttatcatcatccctttcttcgctttcattttcctctcagatttcccggaatccaagcagtatctcaattgcccaacgaccgaaaaacttgcacatttccctgtcctctaaacacactcgttccctttcaatttccgctacggtggctgctccggttgagactgaaccggttgagaacctgaagaagttcgttaagtctaggctccctggtgggtttgctgctcagactattatagggacgggacgaaggaaatgtgccattgctcgtgtggttcttcaggaaggaactgggaagttcattatcaattaccgtgacgctaaggagtatcttcaagggaacccattatggttgcagtacataaaagttccattggtgacattggggtatgaaacgagttacgatgtattcgtgaaagctcatggaggtgggctttcgggacaggcacaggcaatctcactcggcattgctcgtgcattgctgaaggtgagtgccgatcatangagcccgtggaagaaagaaaggcttttgaccagagattcaagggtggtggaaaagaatatagttggtctccaaaaagctcgtanagctccacagttttccaaacgttaagtggatggaaaactggggatt

SEQ ID NO: 197480 - DNA, 317 bp, Gossypium hirsutum
cccacgcgtccgtggacgcgtggggcgtgcccggtatggagctaaggtggcaagctacttatatatgtagggtctttgctgcagccctctctggttcttccaagaatttattggacttaactgttcctaacacgctaccatgggcacaagttttttctgatgtccaaaatactgtgaatgtaaagattagaaatatattttcttgcggaaaatttacagttgtaagagaactggatgctgttgatgcatgcgtcaaggaattgtcaactttgctccaagatggggtgggaacaagtgaaagggagtcattcaagaat

SEQ ID NO: 197481 - DNA, 547 bp, Gossypium hirsutum
tccacgcgtccgcccacgcgtccgcccacgcgtccgctgaagagctaaatgcgttgctttactcggatgatgatagttattatactgatgatgaagttactcccgcagttcattctccttgtacaatgacagctcaccccgagcaattggagggaggaggaactgaaagtgttgctagctctattggaccaactaaaaagcgaaaactgctcgatgacggtaatgattacctgccgttgcttacagacgctgctagttcagtaaatcctagcagatgttctgagtatgtggatgatgcagattctagctgtgccaatatggaatcctcttcaagtaataagagactgagaatcgaaaaaattcatgagaccgtgagtgttctacgaagcttaattccaagtggggaaggcaaagatgcaatcatggttcttgatgaagctattgattacttgaaatcccttaaactcaaagccaaaaccctgggacttaatgctctatgatgttgccaacgccattgccactcttcttatttgtgttagcggtagca

SEQ ID NO: 197482 - DNA, 999 bp, Gossypium hirsutum
tgtttcatggatgcttaacaaccggaggtgtgagtaataatatgttgatgaggcttgttacacatccggaaatacagcataagatatactcagagataatcatggcaaagaaaggtttggaggacaaagctcaacctgttgtagagaagatgcctttattgttggcaactatctatgagtctgctcgtgttatgccagccggacctttgctacagaggtgttctctgaaacacgatttgaggcttaagtctggtgtaattgtgccggctggagcaatacttgtcgtacctatgcagttggtgcagaccgatgattctagttggggaaatgatgctggcaaatttaatccatatcgttttctgtctaagacagaaaagacatccgcttcaccaaacatggatgcgtccattgcaggacatgctgaagaacttaaagatcaaaggaaatgtacttttgttttgaaagatccgaataagaatccggcttttcttcccttcggttctggtgctcgtgcttgcgttggccaaaaatttgtcattcaaggagttgcaacgttgtttgcttccttgctcgaacaatacgaggtgaggcttcgttcaggatcaaagacagactcggaaccgtcgacaaactactcgatgtctcaagattttctgagttccgagctagttttcgcaagaaggaataactgaaaagccataacaaacatacatactgtcatccttaaacccttagtttgctcttgttttccggttttcgttttttcgccatacagctttttgatggagaaagacatcctgattctcaccctctttttcctccgaaaatcatcggagaagctcattcattgcttcttacctatggataatctcacatggggcatatttcaaatctcatgtaatcctccatggttttaaaagtgtcttaaaaagtgcagtatttgatttcaagcattttagtgtttgtttttgaagcactatgagacactatttgcagtgt

SEQ ID NO: 197483 - DNA, 771 bp, Gossypium hirsutum
cggtcgtgtggggtgaacggcacttgcacaaatattcgtttcccccctttcaatgcccacttttctctttcggattttcttgctatacaatctccttctcgactatttggtccccagaaagctcaaatctttcctctctccttcttgtactaccaccaccccctttgtttctgtcggaggtgaaaccgaaaagaacccatctccggcagttgcattggcatcggtctcccctcgctgtcctctaaaaagaatggacgctgctgagttgaagagagtgttccaattgttcgacaagaacggagatgggtccatctccaagaaagagttgaacgattcgttggagaatatgggtatctgcatccctgatcctgaattaacccaaatgatcgaaaagattgatgtcaacggcgataagtgcatcgatatcgacgagttcagtgagctgtaccgatccattatggataataaggatgaagaagaagatatgaaggaagctttcaatgttttcgatcaaaacggtgacggatacatttccgtggaggagttgaggtccgttttggaatcgcttgggcttaagcaacggatagggatcgaagattgttcaacgatgataacgaacgtggatgtacaccgtgaccgtagggttaactttatggaattcaagcaaatgatgaaaggaggtggctttacagccatggcataaaacattccgtctatattggatttgtaaataagcttgtaagatcttcgggctgcattacatttgttggc

SEQ ID NO: 197484 - DNA, 784 bp, Gossypium hirsutum
  unsure (1)..(784): unsure at all n locations
ctttttggtttttttttttaaatttctcgaaaccccttttttctcgattatgtttaaatagatcaatggatttcgccaagctaaagcggaggttgtattactggattcatcaagtacgtgatgtctgatattgtgaatatcctacttcgattaatgtggcatctcttacatgtcactatccacttatgctactttgcgatcaatattgcaaatgcgctcgaaagccatcttatatccaagggattacttaggagatacaaatccctccatatatccaagctccagtatctggctattgtgatagaaagcgaagattgccgaacttcgaatgttattgagcttttgcaatggctggcagatcttggtgtcaaacatgtttgcctttatgatttggaaggaatactgaagaaatcaaaggacttcatcttggagaagttcgatggtgcaacattatttcaggaaaatgatgtgctactagatcaaccacttatgactctggagtttgcatcgctttccgatgggaaagaagcggtggcaaaagcagctaatgtactttttatgaagtacttgaaatcaggttccaccagctcatatcagggagagcaaatcttcaccgaatctcaaatgggggaggcgctcaaaactgttggcggcaacgggccagaacctgatcttttattagtatatggacctgccaggtgccacttangtttccctgcctggagaattcgatacaccgagattcaacatatgggacccttgaagtctatgaaaatatggtcac

SEQ ID NO: 197485 - DNA, 1409 bp, Gossypium hirsutum
cccacgcgtccgcccacgcgtccgcaaatttctgcgaaaaataaagctatatatataaaaagcagctattgaaagaagtggagctgatgggttcgtctttcggtgaagcttttccagcaatgcaggaaactttgctggagtttcgtgctggtaaaatgatgttggaaggaaaaagggttgtccctgatacacgtaaagggctcattcgcatagctaggggtgaggagggactggttcattttcagtggcttgatcggactcaaaatgttattgaagatgatcagattattttccccgatgaggctgtttttgagaaggttaatcaagcatcaggcagggtttacatattaaagttcaataccgacgaccggaagttctttttctggatgcaggagccgaaagctgaagatgactcacaattatgttgcgcggtcaataatttcatcaatcaaccattagaacttggtgtagatgagcctgatgcttctgagcctttgcaagcgtttgaagacatggttgaagatgatatttcatcaagagctggaaacttgactcttacaaacttaggtgctgaagcgattagtgatgtaacctcttcatcagggccagttaaattggaagacttgcaaagaatactgagcagtattggtccagcagaggtagctggtgagccagatggaggcttggggttggatgatattttgaagccagatttgataatgccattaattgagacattgtcgttggaagagcgattagcttcatatttaccagagggtcaatggacacctgaggatttgttagagttgctgcagagtcctcctttccgtcaacaagtagattcatttacctatgtacttcgaaccggacagatagatttgtttcagttcggtattgatccaagtaaatataagttcaccgttttatctttccttgaggcacttgaagattctgtttccaaaacttccggagaaacacaagatgaaaaagatgtaagacctcaatcctgtaatcgtaatgaccccatggatgagagcaagtgacggagataatttcatctggtaccgttcccatcaccctcgtttatcataggagagaatggttcatccctgttttaatttatctttcttgtttgggtgggtgttttggaaaaaaaaaaggcagaaaaaagaaagcaatgaagaatggaaatggtttttattgtggttcaaagttttaagctattgtataatacaacccaaaaaacaaaaacaaaaaaggaagaaaaaattgtgttgaagattaagtggataattttttggtttttttaggaccatttttaataccttttgaacatacacggaaagcattgaattggtgaaaacatataaaggtcaagtgtatgttttgttggaaaaaaaaaaaaaaaa

SEQ ID NO: 197486 - DNA, 722 bp, Gossypium hirsutum
  unsure (1)..(722): unsure at all n locations
aactggtccagtgaaactaaatggtttaagtaatggtagcagtattgatctctcctcacagcaatggacgtatcaggttggacttaaaggggaagattcgggtctaccaagtggaagttcatcggaatgggtttcacaacccgcattgccaaagaatcaacccctaatatggtacaagacaaattttgatgcccctactgggaatgaccctgttgctttagacttcatggggatggggaagggtgaagcatggatcaacggacagagcattggacgatattggcctgcctatatcgcttcaaacagtggctgtactgactcttgtgattatagaggaccttatagtgcaaacaaatgccgcaagaattgtgggaagccatctcagcaattgtaccatgtacctcgttcatggttgaaaccaagtggcaacattcttgtattgttcgaggaaatgggtggggatccgacacagcttgcttttgcaaccagaaagaatgggaagtttgtgctcgcatgtatctgactctcacccattacccatggatatgtggggtttggattcgaaaacaagaagggcttcaaaccctacgctatccctcagttgcccatctccgaatcaggttatttcttcaatcaaatttgccagctttggaactcctcttggcacttgcggcagttttagccatgggaggtgtancagtgctaaagcacattccattgtc

SEQ ID NO: 197487 - DNA, 654 bp, Gossypium hirsutum
  unsure (1)..(654): unsure at all n locations
ggaacctactctctcaatctgcagcacccatatcttcacttcttttgcataaaatgggcttgtggacgttattagaaggatttttgcttcttgcaaatgctttggcaatattaaatgaggatcgttttcttgctcccagaggatggagtttctcggatttctctgcagggcgtacaaagtcatttaaagggcaacttattggtctcatttacgccactcaatacatgagagttcctctcatactacttaatgcaatctgcatttttgttaagctagtttctggttgatgctgcgctagaacgcatgaagtcgaatatggagcataggaatttgccgaaggttgtgtaagacggaagcagtcagttcaaaaattaggtgatgtatctgttttacacttaagtttgtatcccccctccttttaaaattgaatttgaggtttcatgatgggattttatcgaacctggaaatgtgataacttgatagctctagcatttgtataatttggagactttacgctgtcattttgaaatatacagtttattgtgcctggaatttctattaattgctgctgtatgaacatgatatttgaaaatggagttcaaggttgggggtgggggtggtttgatttcaaaaaaaaaaaannnnnnnnaanna

SEQ ID NO: 197488 - DNA, 503 bp, Gossypium hirsutum
tccacgcgtccgccggtattagtcacccggctagctaactttttattcggaaacatgaagaggttttcccttattgttttgtgcgtggtgactctagtggtggtgttgttttcgggtgcagaggcagcgccagcgccgaaatgtgataaccccctggagtatagctcatgcttgaacgcgtataagaagccacctccatcagccggttgttgccagaagatgaaggaacaagcaccatgctattgcgagtacatgaagatagaagatgtcaaacgtgtttttgacagagttgagattgcgaaaatggctaaattgtgtggagtttcatattcttccacctgctagaatcccgtttggtttcatttgactatctctggctgggataacttggcatctcaataaatgaaaattttatttgaaaactatttttttactcataatttcgactataatgtacttgtgttccttttttttttttggaatgatactagtggtttgctatc

SEQ ID NO: 197489 - DNA, 729 bp, Gossypium hirsutum
gtttgctggggaactggtcttaagctcggaaggggatccttaggcatcacatgggccactcacagaaatattggaattgcccttttcgttcttgctactgtgcagatttttgccttgtttataaggcccaagaaagatcacaagtatagattctactggaacgtttaccaccacagctttggatacgccatccttgtccttggcatcttcaatgtattcaagggtatcaatatcttgaaacctgaagacaaatggaaaacagcttatatgattgtgattattgccttgggtggtatttcattgctgtttgaagccattacttgggttgtcgttttgaagagaaaatctagaaagtccaccaaaccttgcgacggatacaacaatggccaaagttgatggcatcagcaagcctccaattgcagattttgtaacacccttgtgctttctcatccttgttgggatgttctatttcctattttcagtgtcttgtataattgcttggttccaaatgttggttttttttagcactcgatccttagtacatgttatatagttgtagtataccactgaatatttcagccatcattttgtgtgtttctagtattcgtacagacaccaatacgcaccatgttcacctaaccaaattacaagtcaccaaaccccattgtaattggaattgaaagattgttgtaacacccttgtgctttctcatccttgttgggatgttct

SEQ ID NO: 197490 - DNA, 446 bp, Gossypium hirsutum
aaaaaaagaggaaagaaaatggggtgtttcgcggggtgcttctcgggcttcgacggaggaaacaaagaacagcgacaggagcaagacagattggcctctgccgaagctcgtgccaaagccgccgaggctgctcagaaaaggcaagagcagtttgaacagtcagccgcgggaagagctgctcgtgcccaggtgcaagcggctgcgaagcagtcagcaaattctaataaaggcgaacctgttttgaagtggcagctgggttgaagatttgcctagtctctcttcagccaaaactgctaatgtagatatcggaaataaattttgatgtacatagtttccaagttgtgaattcctcgccatttagcaagtgatacggtacaagtgcaccagcagtcaattcttttttctccattttcagttgtaatgtgtataataaatccaagatgaag

SEQ ID NO: 197491 - DNA, 264 bp, Gossypium hirsutum
cggacgcgtgggcggacgcgtgggcggacgcgtgggttttttttttgttcttgggggtgtttgatagttaaagaaactgtgaaaatgccggtccaggccgtttatggtggtatcgggtgactggtaaatgaaaaaaattgtcaataaattggaaattatatgatgttgaatgcatagtttctagtttgcctgtaaagatgtaactgttgttatatgtaatacattataccgtcaatgaaagttcttgtttatcttttcttctca

SEQ ID NO: 197492 - DNA, 280 bp, Gossypium hirsutum
  unsure (1)..(280): unsure at all n locations
cccacgcgtccggtggtggctattatccttaaaagtactcgatcaccattgcaattcaccaagagcattaatattgtcactactagtactaaaagaaataagtgtaatttggttacaaaaaccaaaaccttgaaagatatggcaagaaactttggaatcgaaatggatggtcttaaaagttgtatcatatgatattcgaatgaatccatcgtttcctaatgatttacatgtaacactttgttcataagcattttatcaatctaaatttatttataacnna

SEQ ID NO: 197493 - DNA, 411 bp, Gossypium hirsutum
ttagatttcgatttggcccccttatttaaagactcaatgcaaatcggtgtaaattgtaaatacattcatccattccccttgttctctccaccatttgttgtcttttaaacctaccaaataaaaatggccaaaaccatttttgcattatcaatcttgcttggattcaactatcttgctacgaccgtgaatgcctacgcggcttctggctggactaaagctcatgccaccttttacggaggcagtgatgcctcgggaactatggggggagcttgtggatatgggaacttgtatgcgactggctatggaacaatgacagctgctttaagtaccgccttgttcgatgatggagcttcatgtggacaatgctacaacatcaagtgcgattatcaaacagacccaagatggtgcata

SEQ ID NO: 197494 - DNA, 329 bp, Gossypium hirsutum
gaaaggcatgggaggttcttgatcatattatggctaaatatatatgccaaaaaaggaaagatttgaaccaagggatgatggcacaaactgtggatggtggtgtggatatcttaacatcatacattcttgaagagaagtcatgtgatgataaattcttgagagataccattttgaatatgacgcttgcagggagggacaccaccagctctgctcttacttggttcatttggcttgtttcgaggcatccgatagtggaaaacaagatcattgaagagctccaatcgataatacctgcagaggaaaccaaaaagaggcgactgctcaatgct

SEQ ID NO: 197495 - DNA, 725 bp, Gossypium hirsutum
tggagatctgaatccacaaggggagaaatcaaatgcttcatatgatatgagattctttgggtttgatgcaagcgaaaacgaagacttatttggagatgggcctttgcccgagtgggtggggtggggagaatcatcagatttgaaactaggtggttcaagcaaaaacccatttctagatgatgacagctcagatgtcaatcagccaagtcatatcgagacgacggtcacttatgtctttcccctgtcgaatggagaccccatacttccaaatgtttccctggactccatggatctgagtgacggatcagtgagcagtgatacaagtcagaaatctccaccagcagtgccctctttgttcggagaggatgtcgaattcgtaggggtggaattagaaggtacagagaaggcaatggaacaagctttaaaagaaggaatagttggggaagctggaccgttaaagaggaacattattccaaaggtaccacagaaggagaattcggacgacgatggggctggaatgaaggagttcaatgatgcaaactattggaaggttgatcaagaggtcgctgttttagagtaatggtggttgagtcgaaagtaagatcgacatcacagttttgttcgctctgagggctgaagcagcaaaactcacatgtatttggttcttctcgttgccctgatttaaggtaagggcttctcaatattatttatgttagtctttatgg

SEQ ID NO: 197496 - DNA, 680 bp, Gossypium hirsutum
tggaaaaaacagagacaaaaagggtcaaaggcatgccgacccttacaaagctttataccatgcaagaagcctctcagcacaataccaaagatgattgttggatcgttatagacggcaaggtatatgatgttacttcttatttggatgagcatccaggaggtgatgatgtagtcctcgagtcgacagggaaagatgcaaccgatgattttgaagatgctggacacagcaaaagtgcaaaggagctcctgcaaagcttttgcattggtgaacttgacacatcctcccctatcatcccagaacttgaaatttcctctaagagggaagccgttaagtactctgagaagctcatggacttgacaaagcaatattggaccatccccgtggcaattgttggcatctctgtgttggttggtttcttatacctgcataagaagtaaaccagtataatgttttcccctattggctgctgaatggaaattgttaccccaatttttgaataattaaattgataatgattaagaacagttaccaaaagtttttttttttaaatttgaaggcagtgtttgatcattaatcatatatatatatatgtttacagggggaaaaaaaagaaacatttacggaaagctcatgagcacttgagtacacaactcgttcaataaattcattatctattaacc

SEQ ID NO: 197497 - DNA, 637 bp, Gossypium hirsutum
cccacgtgtccgcccacgcgtccgcccacgcgtccgcccacgcgtccgcccacgcgtccgcccacgcgtccgctcaaaatttgcccccaaattctttttccttttcatttcactgcaatgaattcacccacatagctactccttttctctcgatctgttagggatttagagaaacaaatggaagtcgaagagaaggagaacgaggaagaagaagaagaggaagagaagaggggggaggaggaagaaaaagagagtgaagatgaagggactaaaaaggtcaaaggttgtagtagaaaggggagttctaggaaatctggtcgagattcggctgagaagaaagagccagtgacgcctagcagtgataggcctacaagggagaggaaagtcgtagaaaggttttcagatcctcttgttgcaaggtcttcctcgtttaaaactgtcaattggaagggtatgctttcttttctggggttaaggcatgggttcatcacctgcaccacttccgtccaacgatggtactgccattgatcaaggagttgcttacattctccttttgcttgctctagcgattacctatctcatccattgatgatctttttttatattttatttttattggtatatgagctataaatga

SEQ ID NO: 197498 - DNA, 1209 bp, Gossypium hirsutum
  unsure (1)..(1209): unsure at all n locations
cccacgcgtccgtgaaaacattcctaacctctttaagaaaataaagggtggcatatatactcttccaagccatttatctcctggtgctagagacttgatccctcggatgcttgtagttgatccaatgaagagaatgaccattcctgagatccgccagcacccatggtttcaagcgcatcttcctagatatttagctgtccccccaccggattcaatgcaacaagcgagaaagattgatgaggagatccttcaggaagtggtcaggatgggattcgaccggaaccatctggtcgaatctcttcgcaacagaattcagaatgagggaactgttgcttactacttactattggacaatcggttccgcgtctccagtggctatcttggagctgagtttcaagaaactatggctcctgccctcccccgcatacatccaagtgaaccgacatctccagctgttggacaccgccttctaggatttgctgattatcaagcaatgggtttaagaggccttgagaggaaatgggctcttggacttcagtctcgagcccatcctcgtgaaattatgactgaagttctcaaagctctgcaagaactcaatgtctgttggaagaagatagggcattacaacatgaagtgcaggtggctgcctagcattcctggtcttaatgaaggcatgcttaacaataatcactattttggtgatgaatcaaccattgtggaaaatgatggtgttaccaaattgccgaatgttgtcaaattcgaagtgcagctttacaaaactcgcgaggagaagtatctgctggatcttcanagggttcagggacctcagtttctcttcttggatctttgtgccgcattccgggcacagcttcgggtcctctaaaataagcaggctgtatttctaaggacccttactccatgaatctcctatgatgcatgtgaataacaacattctatgtatataactgttcctttttccgtctttttttttttcggtgaccctctattttagatgggttaactgtggagaggccagtcctcaaacactaggattggccaaggcaatattactatattagtcctgcttctgacaaagtttgccttcaattataagtagggtttccacaatgttatggaacctaaagggagtttttatgaattatgatagaattcaccttggtcttttggaaggttatatcttctcattca

SEQ ID NO: 197499 - DNA, 545 bp, Gossypium hirsutum
cccacgcgtccgcttggattggttttatgttttatacgtgatccttcaatttttggtgatattaagttcggcccatcaaaaattggatttttgagtataacttggaatgattggaaagttgggtttttgaaaggagcagtgccacaaattccactgtctgtattgaactcagttattgcagtttgtaagttgtctggtgatttgtttccaaacagagagctgtctgctgccaaggtttcagttagtgtaggggttatgaatttggtggggtgttggtttggggcaatgccagtgtgtcatggtgcgggtgggttagctggtcagtataggtttggggcaaggagtggatggtcggtggtatatttggggatagggaagttgataattggcttggtatttgggaactcctttgttaggattttgaatcaggttcctatagggattcttggagttcttttattatttgccggcattgagttggctatggcctcgagggatatgaactcaaaggaggagtcttttgccatgttggattgtgctgctgt

SEQ ID NO: 197500 - DNA, 543 bp, Gossypium hirsutum
  unsure (1)..(543): unsure at all n locations
ttaaaaaggttccttctatccatgggtatacaatgggtttgaaactagagcagttcgtctttgatgcatttccatatgctacttcaactgctttgtttgaggtattacgagaggaagagtttgcaccagtgaaaaatgccaacggttcaaattatgacactccagacagtgcaaggttgcttgttctgcggctacacacacgatgggtagtagctgctggtggcttcttaacacattcagtgccattatatgcaactggtgtggaggtatcaccgctttgttcgtacactggagaaaacttggagtccatatgccgtggaagaacatttcatgcaccctgtgaaatcgcattttagttcaactttgtgacgtagccacacattctttttgatttgtgcagtgtgtttgggttgatgatgtaagatccattgtacggcatggatgtaattcgatggagtggatggagagtgggtgaaaaatgcaaaatgttggatttaaggatttttgcaataatgttcacccttgtgactgttaaaaaanaaa

SEQ ID NO: 197501 - DNA, 719 bp, Gossypium hirsutum
acacttacgtgcctttttttttcccaaaattcactccaaatttcttcctccccaaatcaagcgtcggttcacccctcatgtgcatctcccgtgaaatccaaaagtaccagcaaagtactgaactcctcatcaagaaactgcctttcgaaaggctcgttcgtgaaattgcccaagactttttaagttagctgatgattatgatctgtgctgatggatgctctatgattgatcgaagaatgggacaaagttctttgtagtttgcgaacctgggacacagcacatggaggctctcttgaaagttgtttatgagctctacacagattacgttttgaagaaccccttctatgagatggtgatgcccatacgattcgaactctttgacatcaacctgccacaggcagtacagaaggatcgtgttgcgcctttggggtgataagttgtcctggaacctttattttaccaaaatgtcaccatctcttatattcatccgtacacttttgatggaagattgctatcaagtttgtataaacctgtgtattgggatatcatcaagctcctttgtttagctcataagtgctgaatgatttacaacatatgatgatttctagagttgcttctcccaattaacatttataaaattaatgaaaaaatccgttgaattaaaaagaaataagtacagaacgctgatatcttaagaatgttagctgatgtactgttag

SEQ ID NO: 197502 - DNA, 559 bp, Gossypium hirsutum
aatgacttcccaattcccagtcccacagaatcagagtaattcatttccaagcgataagttttagggttttgagttctattctcttgacaatggctgcgatttacagtctttacataatcaacaaatcaggaggtttgatattttataaggattatggatccaaggggcgcatggatacgaatgatagcttgagagtggctagtctatggcattcgatgcacgctatctcacagcagctatcgcctaccactggttgttctggaattgagctacttgaagctgatacatttgatctccattgttttcaatctcttaccgggacaaagttctttgtagtttgcgaacctgggacacagcacatggaggctctcttgaaagttgtttatgagctctacacagattatgttttgaagaaccccttctatgagatggagatgcctatacgatgcgaactctttgacatcaacctaacacaggcagtacagaaggatcgtgttgtgcttttggggcgataagctgtcctggaacctttatcttaccaaaatgtcaccatctctta

SEQ ID NO: 197503 - DNA, 582 bp, Gossypium hirsutum
catccacgatatcagatgatggatacaactggagaaagtatggacagaaacatgttaaaggaagtgaatttccacgcagttattacaaatgtacacatcctaattgtgaagtgaaaaagctatttgagcgatctcatgatggacagattactgagataatatacaaaggtacacatgatcatcctaaacctcagcctagccgccgatattcttctggaaatatcatgtctggccaagaagaaagatctgacaaggtctcatctttgaatggtagagatgacaagtcatattgcggttatggccagatggctcatagtattgagccaaatagtactgcagatatatctcctgtcacagctaatgatgataatttagatgaggttgaagatgatgatccattctcgaaacggaggaagatggatggggggattgatatcactcctgtggtgaagcctatccgggaaccacgtgttgttgttcagactgtgagtgaagttgatatccttgatgatgggtatcgatggcgccagtatgggcaaaaagtattgagaggaaatcctaatcctaggagttattattagt

SEQ ID NO: 197504 - DNA, 408 bp, Gossypium hirsutum
cccacgcgtccgaaaaggcttatgaaccctagcctcctctgctagggttcccacattcagccccccaccgccgccgcgtatttttcccaaccgcacgacgccgccgattgaaaggtacaaggcgaggcgaggaaggcgcgcaactcgcgcggagagggaccctgtccccgagtcgtgcggcgactggactgctggaggcggcggccaagaattttctgtttagtgtttcggtagttagggtgtttggaattttgggcttaggttataattttgttgggcctgtattttaaaattttgggctgtgtttttgtttgggtttattctctcacaggccgggcaaagattgggccctacaaatacttaataatacgatataaccttttttgtttttaatttttttttttttta

SEQ ID NO: 197505 - DNA, 444 bp, Gossypium hirsutum
  unsure (1)..(444): unsure at all n locations
caacttttaaagagaaaatccctcagttggtggtggttatcgaactcattcgtgggtggggtccacatttgaagggctgttacaagaacaaaaacgagcgggtggtatgcgtgaagaatatgactcctaaagatatccttctttatgcaaccagccgggcaatcgcattgggaagaaaggtggtgaaattgaggacagggcatgtaactaaacaccctagtgtgcaaggtacatggacaaccgatgtgaaattttgagacacggtagtaccaagttcttcacaattttggctgtatggttctttattgttctatgtagtcatgatggcaactttgctgaaacattcactctttggaggtgaatgaaactatttggtaatgaacaaagacttatgatgtcataatagatgattggacccaggnnaaaaaaaatttttatattttt

SEQ ID NO: 197506 - DNA, 415 bp, Gossypium hirsutum
aaaaaaaagaaatcgttgcataaaccaaccttaggtgggattcaaaagactcgtttcttcgatcgtttaattcttcattcgttcgaagatgtcgtactctaagaggtcaaggtattcaagttctccttccccgaacaagcgatacacccggtctgtgtcgagatccttgtcgagctcaaggagtcggtcccggagtaagagtaggagtgctgaaagtgatgttgaaaatcccgggaacagtttgtatgttactggcttgtcacctcggatcaccaagagggagttggagaagcattttgcaagcgagggaaatgtgatcgatgttcaccttgtggttgatccaaggaccagggactctcggggatttgggtttgttacgatggctaccaacaaagaagctgatcgttgcattaag

SEQ ID NO: 197507 - DNA, 653 bp, Gossypium hirsutum
  unsure (1)..(653): unsure at all n locations
tttttatggaagactaagcagcttgaaaacggggggacactttacaagctggcggtgataccctcaaagatgattatggtaatctcctcatagagaaagataaacttaaacaggaggttcttcagcttactgatatgccggttatgaaagaaaagaacaactcagagttatctgatgtgaacacagtgtgtcaagaaccaccacaaaagcctgttgattcaaacagccctcattcatcttatccattcgaaccagatcagtctgatacatcacaagatgaggaagataacttgagtaagtgctttgtttcaaccatcttcttacatcttcccaaaattggaagacaatgattactccgacccgcctgcaagttcttgtagttatggatttcatgttgaagatcatgctttctggtcttcggcttattaagttacacatctatatgttacatacatacataaataaattatgatgttgtttgtatattattacttcttgtttcactcactttgtaactttgtactaataattatgaattaagtaataaaaaaaaaccaatgattggcattgtagtaccagtgtggtgtaattctaacgagtaaataacatccttctcataagagtttgtggaatctattattttggtaannaaa

SEQ ID NO: 197508 - DNA, 591 bp, Gossypium hirsutum
gtcatgagcaacaagtatgctgccatgagagaacaaagtcgacaaatatcaaatccaaaaccggtggagaataacataacctctgctaaggtctcattgcttgaagtaggcaattcgcatcttgataacctcaagggtgggccatctgctggactggcctcaacatggcgatcaatgaaatctggttttcaaaattttaaagcaaatattgaggccagaaagtttcttcctgtgcgccagaatcaggaagccacactcatttcccatgtcaactcatccgattctgagtcccttgatgagatattccagagattgaaacgaccgtcagtagaccacagtgacgagaatgaaaatgagaacgacacagaaaccaagtctacaagatgatatcaaattcattcggaaaaaaaatgtgcctgttgctgtcgtggaaactgtgatacgaaatgtacagagctcattgaatttttacagtcctgtatgaaagatgtttggggtcagcagcaggaaatttcagactaatacaatatgggaaaaataattattccctggctgtatgattccagctaattgtaatttgaactgaacatt

SEQ ID NO: 197509 - DNA, 565 bp, Gossypium hirsutum
gttgacgacgcaaataacaaagaagctcagagcaaaagtaaaaatcctttagaacccagaaattttttctcaatgttacccaaagttgagttcaaatgcccttcctttgaccaacaatcggaaaaaccagatgcttcggttgaaaaagaggagcaaattgaaattgcgaaaccaccatctgttttcatgggaaaccgccggaaaaatcctccgccgttggaattcgaggcggaggagtgccttgggagaacttctaatcctatagttctctggcaggtatatgccattggtggtttctttttactgaaatggatttgggcaagatggaacgagaggaaagagatgggatccaagaaggaagcgtcggacgatgacgaacagccacctgctgtggatgactcccaatatgtgtgattctctttcgatttttggtttactaaaccaagaccttatcggtttttctggacctatgtttgcctccttgttgcttgttgtagttggaaaaaaaaaatacaatttcatgattttgtgtgaaaaaaaaaaaaaaaaaatgtcgacgcggccg

SEQ ID NO: 197510 - DNA, 776 bp, Gossypium hirsutum
  unsure (1)..(776): unsure at all n locations
cccactcgtccgcgaagttaaggctgctgccggaccttacggtgtaagaaccgaacaacctgttcaacgtacatgggttccaccacagccaccacctgtggcaataccagaagcagctgaagccattagaaggccaaaaccattagcttcaaaagaacaatcggctgatgaacaatcaatggttcaccccgcagagccaattgatgagttacagaggatcacaaaaatatcggagtcaggaggttcagtggagatgaatgtaggttttccgagtggaacctccagtgatgtacaagaacaaccggttagctatgaagggaattgaaactggactccgtatccagggtaagctcgatgtaaagtctatcgatgtgccataatattgagcatccctgtagtatatgcagaactttctcatcatgatacgttctttatgtacacccaataatgataataagggtggaactttgtaaatggggttggtttatgtttatttgaagctagaatgctggcttgcactaaacgaccaatacctctataagataaatcaagaggccaaggcttgtttatctctactaaattgcaccagtttataaatccgacagccttagcacttgaaaaaaaaaaaaaaaaaaaaaaaaaaaaaaaaaaaaaaaaaaaaaaaaaaaaaaaaaaaaaaaaaaaaaaagggagggttgtgttgtggttttaaggtnacgaaccctaccgtgcataacttcacactcttttatattgtcactaaaatccaattaaaa

SEQ ID NO: 197511 - DNA, 321 bp, Gossypium hirsutum
gtagccgtgacaatcaccctcttcgaagttttgggctcctctcgttaaggaaatgatggagaagattatcagttgcaagctgatctttttaataacttacaatctcaattgtagacgttttattctcaccaacatctttcaaaaaatttattcgtgaaattttttgaactgaattattagattaattctcttttttggtttattttggtgttccttttaattcgtctaaaatcgaaatcaacttttgtaattgatggttaaattttactaacaagtaacgtttgaggtttatgcattctgcactcctcaaacatttgtatc

SEQ ID NO: 197512 - DNA, 916 bp, Gossypium hirsutum
  unsure (1)..(916): unsure at all n locations
gccggcaccaaaaagcagaagtatgacaaaattagtgaaaagaagatgctaactcccatagaggtcctgtgcaaatcgtatccatctgagtttacatcttactttcattattgtcgatcgctacggtttgaagacaaaccagattactcatacctgaaaaggctgttccgggacctttttattcgtgaaggttaactcactatttaaagtcccattgttcatatatctgtcacttttctaatatttgaaaatttaaccaatcttttcattagttcttcatcacaagtttgggtgagatcttttattgtaaaatctgcttgattgaactcccgaattaataaccggtgcaggatatcagtttgactatgtatttgattggactatactgagatatccacaggttggctctanctcaagagcacgggcaagcccaaagccaggtttaagtccccccggagtatctgctgaaagaacaaaaggccatctgttggccaagacattcnagaaaggttttctggtgcagttccgccctcgcctccgcggaatgtctctggccatggtttgcatggtgatcagtctagacacagatcttcagatgacgtgccatcatccaaggatgcgcaacctgattctgaaaggacacgctcctcttcgagaaatgatagtgcttcaaagcggcctgttgttgtatcaggcaacagccaacctggctcctctggtgagccaagtgagaatcgttctagcagattattctcaagcagtggtcgcatgtcaacgactcagagagttcaacccggctttgaatctaaatcatcatctttcactcgtactgcagtcacaagagctggccgtgatgacaccctccgaagctttgatcttttgacgatcgggagtgggaaaaggaaataaaccacac

SEQ ID NO: 197513 - DNA, 672 bp, Gossypium hirsutum
tacaaacagtccttttattatctcccagttgttagggtttgtttctttgtctccctcttctctctctcgatgcctgcatttccatcccccaagtctcccttttctttttcaccatttaaaacatcaacgaaaatctcagtcttcctcacattttcattcacaaaccaaccctttcatggccaagaccaaacctggcaagaaggaccttgattcctacgctatcaaaggcaccaacaaagttgttcgtcctggtgattgcgtgctgatgagaccgtcggactccgataagccaccgtacgtggctcgtgtagagaagatcgaggccgaccatcggaacaatgtgaaggttcgagttcgatggtactatcggccggaggagtctattggggggagaagacagttccatggagccaaggagctctttttatcagaccattatgatgtgcaaagtgcccacaccattgaaggaaagtgtatcgtccacactttcaaaaactacactaagcttgaaaatgttggtgctgaagaattattttgtaggttcgaatataaggccgccaccggtggtttcactccggaccgggtggcagtgtattgcaaatgtgaaatgccatataacccggatgaccttatggtgcaatgcgaaggatgcaaggattggtttcatccatg

SEQ ID NO: 197514 - DNA, 535 bp, Gossypium hirsutum
cccacgcgtccgcacttactccctccgttcattccatcttcctctcttctaatttttctgccctcttctttctgctttctttttctttctctcaatagagtttttcttttcctctcttccatttttttttaatctgtaaaattccatcgattgttggaaagagcaagagggttcttagagggggaattgaaatctaaatcgaaaatcgaaaatgttgagtgtaaaccgagtgataaaccaggcatgagcttcgatttcaaattgtcgatacctcctaagtcatgacccaaagatttccccttcacctcttcaacatttcgcttcaaaatcatctattcgcttcttcgatatttacaagcttgcaagcaaggaaaaaatcgagaaagaacgagcaagactggctgctgatgaattgaatagaggatattttgatgatatttctgagctaaaacaacgcggtggtaaggggatgagcgatctgctatcttcaatttgtttgtgatgaaagatgagtcagaatcattttggtgttttg

SEQ ID NO: 197515 - DNA, 737 bp, Gossypium hirsutum
gtcatcaaaaccaaaaagacccaccaaagaagtttcctttttctctcttcttcagctctctgtcttgttgatatataaatatagaatctttcttgaagtatctctgaatttacggcaagcaacgaaaaatgcaggcatcaagagcgaggttgttcaaggaatacaaagaggttcagcgagagaaggcggctgatcccgatattcaactagtttgtgatgattccaacatatttaagtggcctgctcttatcaagggaccatctgagacaccttatgaaggcggagtcttccagcttgcttttgctgtccctgagcagtaccctttgcagccccctcaagtgcggttcttgacgaaaatatttcaccccaatgtgctttttaagacaggagagatctgccttgatatattgaagaatgcttggagccctgcttggacacttcagtctgtttgtagggctataatagccttgatggctcatccggaacccgatagccctcttaattgtgattctggcaatcttttaaggtctggtgatatgaggggattccagtccatggcaagaatgtacaccagacttgcagccatgcctaaaaaagggtgaacttaaatggtgtaatgaacagtcttaaactgtaagcgattcacttgttgtgctttccaaataacattcaagaatgtctccagtttttctgatccaacatatagattatagaacaacattgatgtttatgtatct

SEQ ID NO: 197516 - DNA, 336 bp, Gossypium hirsutum
aagggattgaaaccagtgtgtgtgaattatttggtgaatggagttggtgaagaaggaacagtggtggttcttcctaggaatgaaaaagacggtgggaataatgggaagatggtcaccatcaccttgcctcaacatctattgctaaagcttaacaatggacttcaaattgattggaatattgttatttaatttaaatatttttctcatttcatttcttgtaatgcatgcgtgggtgagttatcgtgtctgtaagagaataatgaatgtatggtggctctgttgttatatatgaataacattctcattatcaaatgaaaagcctaaacaataaacttc

SEQ ID NO: 197517 - DNA, 720 bp, Gossypium hirsutum
  unsure (1)..(720): unsure at all n locations
acccggaaanaccgggccggcccaccccgtccaaccaataaaagtgcttggataaagcttaatgtggatcagactggtttctatagggtgaggtgtgatgaggaacttgccgctagactccgctatgctatagaaaacaaatacttgactccaactgacagatttggcattcttgatgattcatttgcactttgtatggcacgccagctgcctttgacttccttgcttaccttgatgggtgcctacagagaggaacttgactataccgtgctgtccaacttgattagtataacatacaaggttgggaggattgcagctgatgcaagacctgagctaatggataacatcaatcaatttttcattaacattttccaatattctgctgagaagctcggttgggatgctacacaaggtgagagtcatctggattcaatggtgagaagagaaattttgactgcgcttgctatgcttggagacaggagacattggtgagcagcagacgattgatgcttctgaagacaaacacaccactctccccagacacagaagcacttgtagctgcatcagcagcacctctcaataactggttgacttctttgaagttatagagagctgattaagccggagaaaatcgatttaggtcattgcatcttgcccgacaggataattcggaagtctaagtttattgctctgagtcgcagcagaccttgttgcctgctg

SEQ ID NO: 197518 - DNA, 521 bp, Gossypium hirsutum
  unsure (1)..(521): unsure at all n locations
cccacgcgtccgcccacgcgtccgggtgctgtgggtttgtgcaatgctggtaagctgagggttgatggaagagggtgcaaatgcggaagaaattagcaatggagcaatgggaaaaaatcttgaacaaccatgcaaacaagggatgggtaattgtgtgccaaaaccctcctctggttataatagaggatgtgaagaagtcgaaagatgccgacatggtccctaattcaacatccttcatttaccacaatcggaaaatgcacataaaataccacgcacaagattggcttctccctctcatctaatctataataatttacgagcaaaataaaaggaagaattagttgtttcgtatgttgatttgttccttattgttgtgacccacgcatgccagaaacatgtccttgaataaagtattttatttttatttcnnnnnnnnnnnnnnnnnnnnnnnnnnnnnnnnnnnnnnnnnnnnnnnnnnnnnnnnnnnnnnnnnnnnnnnnnnnnnnnnnnnnnnnnnnnnn

SEQ ID NO: 197519 - DNA, 437 bp, Gossypium hirsutum
gcctagattgctacctgatgtcaccgatttgacctcattctggagactcttcactgtagtccctgttttagtcacggcatatatctgccactacaatgttcacagcatggatgatgaactagaagactctacccagataaaaccagttgtgcgtacggcacttgctttatgctcaactgtttacataatgacaagctttttcggcttccttctatttggtgattcgacattggacgatgtgctagccaacttcgatactgaccttggcatcccctatggctccctgcttaatgacgctgtccgtgttagctatgctgctcacctcatgcttgtatttcccatcgtcttctacccgttgcgactcaacatggatggtctcctattcccatctgcaaggccgctagctctgtctaatatgaggtttgctttcactactg

SEQ ID NO: 197520 - DNA, 322 bp, Gossypium hirsutum
cccacgcgtccgagatccctgatccaagcgtcattaaggaatttgcagtgaagaacgtgaaggagatcgatgactatcttcacggtaaggcttagagaggccaggccatgccatgccatgccatgcatgatcctagccctgtttaatggattctctcatgttttcttagtaataaaataacatgcaaggatcccacttcagaatatttgtctaggatccatccttaattagttcatcttgttgagtggtgacttcttgctgcaaagtaatcctgttgctttgtattttcaatattaatttatgtattgccatgggttttctt

SEQ ID NO: 197521 - DNA, 723 bp, Gossypium hirsutum
aacccattaacccatctatcgacatggaccgacccagattcgtaatcgattctgccgaagtcgaacagatggccaaacaatcacggcaaacggtgctccatctcctgccgtcgttggtcaaatccgcccaggccttagcccgtccgccaatctcgaactaccacgtcggcgccgtcggggtcggctcatcgggtcggatctttttcggagtcaatctggaattcccgggtctccctctcaatcattccgtccacgccgagcaattcttaatcaccaacctttccctcaatgcggaaccatgtctcaagttcctcgccgtctccgccgccccttgtggtcattgtcgccagttcctccaggagctacgcgccgcccccgatgtcaacatcctcataaccgccaccgagaaggaaaaagaaaacaaaacgatcaacaatcgtaacgataaagacatgcaatttgctcctttatcttattttttacctcacaggttcggccccgatgatttgctggaaaaagacgtccctcttctcctcgagcctcaccgaaacggcttgtcgttttgctccgatacccgcaacggcgaaatcaacggcgacggtgacgattcaaagtacgcggctctggaagcggcgaatgcatcccacgcgccggacagcgggtgtccatcaggggtggcgttaggggacgtggaagggaagatatacaaagggtcttacatgg

SEQ ID NO: 197522 - DNA, 1072 bp, Gossypium hirsutum
ttcacgcgtccggtttcggcaacacgaaagcttgcgagagagagaaaaaatggatccacagctaactgaagtgtcgcagatgttcgagcgattcaaagctgcattcattagaaaagatttcgattcatgcgccaatctcctttctcaactcaaggttttgctgacaaagtttaggagccttcctccgctatttgaaaacacccctaattcggttaacgaagtgctcttagcaagggaaatttacgaacatgctgttgtcctcagtgttaagattgaggatcaagatgcctttgagagggactttttccagttgaagccctattatacggatgctggtagccgtcttccaccatcccagcaagagtacctgattctaggtcttaatctcttgagacttcttgtccagaacagaattgctgagttccataccgaactggaactgctttcggccactgccctggagaatccttgcatcaagcatgctgtggagctggagcaatccttcatggaaggggcttacaatcgtgtcctgagtgctagacaaaatgctcctcatgaaacttatgtttatttcatggatctcttggcaaaaacagtgagagatgaaatagctggatgcagtgagaaggcatatgattatctttcaattaacgatgcccgacagatgttacttttctcatctgatcaagaacttttggaatacatcaaagaggagcatcctgactgggaggtgaagaatggatccgtgtatttccagaaggctaaagattctgcaccatgtaaggagatcccatccctacaactgattaaccaaactcttagctatgctagggagttggagcggattgtgtaggcaagctgctatccagtggttgctttttctgctcttaaaagaaaattcatataacttgccatcattttgttgttgtggatttttactttttacattcagtatgcaacttaaaaaagttgtttccatttcatatttctagttatatacattagtagcttccaaattgctagaatctatgttagttggatttcgagacgaaaaaaaaaaaaaaagggcggc

SEQ ID NO: 197523 - DNA, 431 bp, Gossypium hirsutum
  unsure (1)..(431): unsure at all n locations
ctaggagccaaaaatgctgcacaagctaaggaatttgtaggtgcccttggctggagactaagcaacgaagaagtggatgagctacggtcactggcatcggagataagtcctgttaccggttttcctgtggagaagttgtaattctttttgctccgattcaagttgacttaattcttgaatgttaaacatagaatgaataactcatattctagtattggttcctttgatcctcatcgtttggcccattggtcaagggtgtttattctcatacccaatttatgggatcaaataatgggaattgtctactagtggtgtgtgggggaatgatttctaccaaaaaaaaaaagagagttatggttcctctctctccccaccctggttgtaatagtaccatgtaatgtatgtatatctttgtggcagtccagtccang

SEQ ID NO: 197524 - DNA, 467 bp, Gossypium hirsutum
tttcgaaccggcaggacttaacgtacagtttcttgccggcgaatgggttgaccgacgaagtgaaagccgtcttcacgagcgccttccagaaatggtcaaccgttacgccgctgactttcacacaagtggattcctactcctcggcggacataacgatcgggttttacactggagaccacggagacggcgagccattcgatggggttttagggacgttggcccacgctttttctccaacgagcggaaggctccatttggacggggatgagaactgggtagtttctggtgatgtgacgaaggcatcggtgtcgacggcggtggacttggagtcggtggccgttcatgagatcgggcatctgttgggtttggggcattcgtcggtagaggatgcgattatgtacccatcgataacttcgcggacgaagaaagtggaactggcggacgatgatatccaagggattcaattg

SEQ ID NO: 197525 - DNA, 186 bp, Gossypium hirsutum
tcccacgcgtccgattgatccaatgctggaaggtctcgaggaatggaatggtgcccctcttccaatctgctagtttgctttattttttatagttgagatgtgtaatccaaatctttcgcatttgttgttggaatttccttgtaaaacaagttacttaactaaatgaatccattttcacatctcaac

SEQ ID NO: 197526 - DNA, 684 bp, Gossypium hirsutum
ttaatattgcagaaactggtctaaatcttctattggagatgctaaaaaactttcaggcttctgaattttgcaaccagttctaccgaacatactttttgtcaattgagcaagaaatatctgccgtcttgacagacacatttcacaaacctggcttcaagttgcatgtcttggttttgcagcacctgttctgcctggttgagagtggtttgttgactgagccattgtgggatgctgctacggttccatatccatatccaaacaatggaatgtttgttcgtgaatacacgataaagcttctgagtacatcattccccaacatgactgctgctgaggtttctcaatttgtgaatggattatttgactcgagaaatgatttgtccacttttaaaaatcacatacgggacttccttgtgcaatcaaaagaattttcagctcaggacaataaagatctctatgcagaagaggctgccctacagagggaaagagagcgacaacggatgctttctatcccagggctcattgccccaaatgagatacaagatgagatgttggactcgtagatgtggctaattttggcatggaggctaatttgtttaattttgacttgggagttaaggttgcgccttgattttatgacctgtatccctgaatgtaatcagatatgatacagcattttcacccatt

SEQ ID NO: 197527 - DNA, 471 bp, Gossypium hirsutum
ggtatagcagcaaaaagaatggcagagattttgggatacatattgacaccattggagtttctcaagattcagcaaccacaaaaagctcaagattcagcaaccataaaaagaaaggtatttgagcagcctaggttcttgagaatccctttcctatgtagtaagtttgcatcatataaccaaatttagagccctatctgaatcatcatagccagccatagttatagctttgagttgctgtaaattctactattactataagaggagttgaaatgctgaaaggcttgtggatgatggccttattttgtgatgcaacgcagctaccagataaagcttcataactgatatgtctgtcaatacttttgatttctattttctttttgctcagttttacatatatatgaacaataggtttaaatgggtcaagttctttcaaaaaaaggaaaaaagttcaagtttgctatttagtccatg

SEQ ID NO: 197528 - DNA, 496 bp, Gossypium hirsutum
  unsure (1)..(496): unsure at all n locations
aaagaatgcaccatacgtgtgggttcacttccctggccgtaactcatgggatgtgttcagcgaaatactcgagaagacccacattgttactacgcctggaagtggtttcggacctggcggtgagggtttcatcagagtcagcgcatttggtcacagggagaatgtcttggaagcttgcagaagattcgagcagctttacaattgaatctaatagcatttgaccggttacctcggtttcagacccgagaccaaaggccgtatgcttctatgatttttgttctcaattccgtaatattgcttgtaatatctcgtcagattctatgcttagaaaagactagtaatgcttcttatttatcctgtaacattcactgaaaactacctttttatttatataaataaccgcttgtattcgccaagcaaataaagcaagaaaaatctcgatttttccnnnnnnnnnnnnnnnnnnnnnnnnnnnnnnnnnnnnnnnnnnnnnnnn

SEQ ID NO: 197529 - DNA, 449 bp, Gossypium hirsutum
  unsure (1)..(449): unsure at all n locations
catgatgtttcacgggaaaatgcatggtgaccacttggtcgagctcctacgtccttttgttcagcaatggagtcaggctgactgttggatgcaattgtatgaccggtggtcttctgttgacgatctcggttccctagctgttgtacaccatatgttggctaatgaccccggaaagagccttctatggttcagacagtctctcctccttttaaggttaaattgccaaaaggctgcaatgcgtagtctacggttggctagaaaccattctacctcggatcatgaaaggctcgtctatgaaggatggatattgtacgacaccggccactgcgaagaagcactagctaaagctgaggaatcaatctccatcncgggatcatttgaagctttcttcctcaaagcatatgctttagcagatacaagtctcgatcaagagtcctcggcatatgtta

SEQ ID NO: 197530 - DNA, 360 bp, Gossypium hirsutum
  unsure (1)..(360): unsure at all n locations
aaggacagaatggcaagccaaccagccatgaacaatgcaaagcctccaacggtacaaatccgaggacagcctgttgcccaaaagggtggctgctgctcttcctaaaaaatggaatgatgaattagcaggaagctctctctatttcttctgcagtgcgctgctgccagttgcagcacggtgtgtaagattaagtgttttcttaacctcatcagtgttccaaacttatttcatatgaacaaaacctcagaagtagaggatataattcatttctacacacttggttaacgtgaaggcttgtacaatgtattattggttgtttgttgattaaataatactagtgttctttctcannnnanaaaa

SEQ ID NO: 197531 - DNA, 374 bp, Gossypium hirsutum
ttttcaaggacacgtatgactcgaaaggcaaaggaggattcaagcaagcgagacttcgatttaaagctgactcgacacgaaccaggataatgttctatagcacgttttacaccatgaaaaatgacaactcgggttctctctgtggaccggtggtggatgatgtgaagttggttagtattcgaaaattgcatcgtttgtaaaattcatgttttaaatttgttttgcattgattatgctacaaattaatgtgtttcatccatttaggggtttactttaggattatttaatctatcaaattaatgagttcaccaccaatgttgacatttatgtatctactttcttcgttaaattaatggtgtgaaccaagttctttt

SEQ ID NO: 197532 - DNA, 550 bp, Gossypium hirsutum
gtacttcgcaatgagccctcaaatgagaaatgtgatgtttatagctttggaatcattctctgggagctcgccactttgagattaccttggagtggaatgaatccgatgcaagttgtaggtgcagtaggtttccagaatcgacgcctcgacattcccaaggagctcgatcctttggttgcaagaataatttggcaatgctggcagactgatccgagtttgcgcccatcctttgcggaccttacggtagctttaaaacccttacagcggcttgttatcccattgcatcaagatcaatcaagctcccctatgccacaagggatttcagtaaattctacaccctgaaatcaaaatactctgctcctcaattgtgaataagaagaaaagttcgctgtatgttcctttcccttcacttcaatgaggtaattactgtatttaaattctaaaagaaaagctgcatttttgaagtgtgcatgttcataattttgtcaaaagaacaactttgtaatgaatacatgagtactctttaaaggaaagggaaaattgttattat

SEQ ID NO: 197533 - DNA, 604 bp, Gossypium hirsutum
cccacgcgtccggtataagagttaccaagagttatccgatgccttggctaagatgtttagctctttcactatgggtaattatggacctcaaggaatgatagatttcatgaatgaaagcaagttgatggatcttctcaacagttctgattatgtgccaagttatgaagataaagatggcgattggatgctagttggtgatgtcccatggcagatgtttgttgactcatgcaagcgcttacgcataatgaaaggatccgaagcaatgggtctcgcaccaagagcaatggagaaatgcaagagcagagcctaaaaacaagatcctggaattgagcaaaaggcttggagagggagccttcttattgggatggggtttatggttttttaatggttatatatatatatatatttggggtatattgatttgccaaaagaagaatcatggggacatttttgttatgttcaagaagcaattaacttaaccttatatattgctggcttggtttgttgctgataatgggggctttgttattaataatttcaccatgtgggtttttttcttttttttgctattggctttgttgtcatagcttattgttatgtgtgt

SEQ ID NO: 197534 - DNA, 446 bp, Gossypium hirsutum
cggtccgacccacgcgttcaaaatgcgtcaatccagcttccatggggttgcatttgaggaacttgtgctatctaggcctggagaacaacaggctcaacgggaaagtacctgaggagtttgggtttctggagtttgtgaatgaaatcaatttggaaaacaacaatctaagtggaaaacttcccttttctgctaacttcactgctaaagttggtgaaaagttaaggttaaaaggcaatccagaactgtgcgttgatgagaaattgagccatcgtgaaagcgttggggaactgaagaaatgcagcatgccagacattcccaatccagtcctcttcattggggtttctcattctgggctgttatcatcttcatcatctttccttgttttattcgctgttttggggtctctggatccctttggcttgattgattatcatcaaagcgcatgg

SEQ ID NO: 197535 - DNA, 551 bp, Gossypium hirsutum
  unsure (1)..(551): unsure at all n locations
cggtaatgtgcagtcagagctacttttccgaaaggacaaagcaactttcacttttgagaagggttgggctttcgctctgaaaatctacttcaatggagataattgtgttatgccaccgccccacgcctatccttggttgcctaacggcagttcccatcaccttatctccacacttagtctgttgacaactctcttggcagcattggcatttttattgggatatgcttaaagttcaaccatttttatactgggaaatctggtatgctccaaaattttgactgaatcagttcgactgtagaatgtacggcgtgagaagttgcagtttgtgtcagttagaggaagtcaatgtgcagtggtgtcgttttaatgtatggtcagtgaattcactcgtgctgttgtatgtatgcatgttcgtttatgtacttaaaccaaaaacaatgttgattgtagaattcccacgatattttattacagtagtaacagacataaatcattgacagagaaactttagctaacttatgcgttgcggttgtttanggttcgtaagcatc

SEQ ID NO: 197536 - DNA, 682 bp, Gossypium hirsutum
cttgctcaaaggtatgaagaactatacaaagagtacggtgtcaaatttttaaagggtgcttctatcaaaaacttagaagctggtcctgatggacaggtagctgctgttaaacttggagatggatctactgtggaagctgacatggtagttattggtattggagcaaaacctgcagttagtccctttgaagtggtaggattaaataatactgttggtggcatacaggttgatggtctgttccggacaagcgtacctggaatatttgcagtgggagatgttgcagcattcccccttaagatgtatgaccgtgtagcacgagttgaacatgttgatcatgctcgtcgatctgcacagcattgtgttaagtcattacttagtgcacaaactcacacgtatgattatctgccctacttttactcgagggtttttgagtatgaagggagccccaggaaagtttggtggcagtttttcggggacaatgttggagagacggttgagattggaaattttgatccaaaaattgctactttctggatagattctggtaaactgaaaggagttcttcttgaaagtggaaatgctgaggaatttaagctacttccggaacttgcaaggaaccagccttccattgacaaagccaagctcgaaaaggcatcttcggttgaggaggcactcgagattt

SEQ ID NO: 197537 - DNA, 514 bp, Gossypium hirsutum
gcatcagagacgccgtatgctgccgatttcacctcttgtctgaagctcaagacggagcagaggttctcatgtctgagatacgtattagcgctgaaaagggtggggaattttttatcgacaccgatagattaatgcggcaagcaccaactcctataccaagtccacaaagcagtggagacttttcagcactaagtccgatctctggtggctttgtaatgagctgcagagtccaaggggaaggtaagaacagcaagccattagtgcaactggccatgcgacacgtgacatgcatagaagatgctgccatcttcatggcccttgcggcagccgttgacttaagcatcgaggcatgcaagcctttccgaagaaagtttaggagaggctcccgaggctctcgccattctttatgaaaaaaaagaacaaagaattaaggtgatttgtttccatgaacaaagtatagctctatatttgctttcatttctgtataatttggcattgtgtataggatattttg

SEQ ID NO: 197538 - DNA, 931 bp, Gossypium hirsutum
  unsure (1)..(931): unsure at all n locations
gcttaagtcaaagaacacacgccttattaacctgcttttagcactgatggttggtgggtgtggcgcgggtgttcctcttatgaagaaggtccccgctgctgttctttggggttattttgctttcatggccattgaaagcttgcccggaaatcaattttgggagagaatattactgctgttcactgctccaagtcgaagatacaacgtgctggaggagtatcatgcaacctttgttgagacagttcccttcaaaactattgccactttcaccttgttccagacaatatacttgcttgtatgctttggcataacatggatccctctagctggagtcctttttccactggtgatcatgcttcttgtgccaccgaggcaatacttgctccccatgtttttcaaagctgtccatcttcaagaccttgatgctgcagaatttgaggaagcaccgcccattccgtacatggcatttgaagacctggaacttgagggaaggaccactactactgtggatggtgcagaaattctggatcaagttgtcacgacaagtcgtggagaaatccgccgtatgcagagtcccaatacatcttcagtcttcgaaaaggagtatagcccccagattaggcaactgagccccagcttaactgaaaaagggcttgaattaagtccaactcctagtcctgctccatctacacttggacatagcagtcgtgattcatcatcaagctaaaatatacatgcatacatacacaactaaggaaaagcatgctctccatttctgattctgatctctagaggtattgtacttagtttatcgcgagactagaggtgccttactctggttctgtgcaatgaatgttgctatcaaggtaaaagcaaagcaaccgtaaacttttnnnnnnnnnnnnnnnnnnnnnnnnnnnnnnnnnnnnnn

SEQ ID NO: 197539 - DNA, 647 bp, Gossypium hirsutum
  unsure (1)..(647): unsure at all n locations
gctgctgaaactgccattaatattttactaacactttcatagcaggtttttcagaagattgtattgtatgtaccgggaccactgatagcatagcggcctttcttgcagcacgagcaacaaaacccgggaaagcggtttgtatacctctttgggttcaacccttgcaattaaactactaagtacaactaggatagaggatgcaagatacggagtgtacagtcatcgccttgacaataagtggcttgttggaggagcttccaatactggcggagcagttttaaaggaaaatttcagtgatgagcaattggaaaaactgagtgaacatattaatcccatggaggcctctcccttagactactatcccctaaaatcagttggagagaggtttcccgtggcaaatctgaagatggagcctangtgaattgtgaaaatgcttgtttggaacatggaagaagggggaaccatgttatttggactccggtgtgtcagtgttggataaggatatatatcttacgcaggttacatccacgaccggaaagtgatgtggagtacttgcatggcattttggaatcaatcgcccgtatagaggcaaaggcatacatgttgtttaaggatctaagtgcgacccaactcgatgaagtgttccc

SEQ ID NO: 197540 - DNA, 341 bp, Gossypium hirsutum
  unsure (1)..(341): unsure at all n locations
ttcattcgtccgagcaaccatcttttactgaagaaaacatcaaggagctaatttatagggaatcggtaaaattcaatccagacccaatgtattaaggcttatatgtatccgatttgtatatgactctgcaagtgtgtgcctagcggcattaccatttgtgacccatcattcccctttgtgattagaaacattaagaatagaatactcttaaactgaatgacagtttattcaccttcttttgcancnnnnnnnnnnnnnnnnnnnnnnnnnnnnnnnnnnnnnnnnnnnnnnnnnnnnnnnnnnnnnnnnnnnnnnnnnnnnnnnnnnnnnnnnnnnnnnnn

SEQ ID NO: 197541 - DNA, 697 bp, Gossypium hirsutum
gcaggttttagagcaggcatggtatatgaagccagtctttgctatactcattggaggcattcttccatttggggccgtttttattgagctcttcttcatcttaacgtcaatttggctgaaccagttctattacatcttcggcttccttttcatagtgttcgttattctaggaatcacttgcgccgagataacaatcgtgctatgctacttccagttgtgcagtgaagactaccattggtggtggagatcttacttgactgctggctcctctgctctctaccttttcctttactcgattttctacttctttaccaagttggagatcacgaagctggtttcaggcatcctttactttgggtacatggtaattgtttcatatgccttctttgtcctaacagggacaatcggattctatgcttgcttctggtttgttcgaaagatctactcttcagtgaaaattgactgagatcaagaatgtagaaaggggatcagacatcaaacctatgcgaattacgggatggacgagacaatgatacagtacagaaaattttatttctgatcgtctctacagtcttcttttattttgctgaatttgcgtgttgtaggcttggcctgttattttatgtacactgttatgtaccgtactgttttaagtagtttctccaatgagtaaaatttgtgatctagtcttgtagat

SEQ ID NO: 197542 - DNA, 555 bp, Gossypium hirsutum
  unsure (1)..(555): unsure at all n locations
tcgccctcgcgtccgcccacgcgtccgaaaatgtcttcattaggcacttcaaagggtgttcttgaaatcgccaaatttggcctttatgttacgatccccatcgttcttatgtacactttcgccaacaacactaagaatctccagaaatttatgggaaatcgatcctacgtagtgtatcctccggagggaccaagacctccatcacctgaggagttgagagagatggcccgggagctcgctcggaagaaaaataatcattgaggctctttagggctgtaagtgatctatgtagcttttccggtcgtacctattagttgacctattactactccgcgaaaactgcattatgtaaaattgctgtaataagtatcgtgtttctgttaaaggaaacactatgtctggcttgtaccccattactgattaaaaaaaattttatagctaaacctgttgctttgcttgcttagcatggaaatttatgttctttcattggtntaaaaaaaaaaaaaaaaataaaaataataaataaaaatataaaaaaattaattatttaatttt

SEQ ID NO: 197543 - DNA, 784 bp, Gossypium hirsutum
gaattccgggtccgccccacccttccgcaggcggcgggttccttttttttttttaccaaagttcatggttttggtcctccttgggctggcctggtccttaaagtctggctttgggggctaataatctgtttccattgttctcatcttcctgctcttataaatgcttaaacatcagaccctcctcctctcaggacatggttttgaaggtttcatgagctctgcaaccttcttaggctggacaacgatcgcgtccattcacagttgcatacatttatagctgaaaatggctgatggaatatcaagcttttggggtccagtcacatctacaagcgagtgttgtgagaagaattatgcctactcttcttatgttgcagagttctacaatactatatcgaatatcctcgccattcttttagccttcatcggtctcgtaaacgccatacgacagaggttcgagaaaagattcactgttcttcacgtatctaatatgatacttgccattggaagcatgttataccatgccaccttgcaacgcttgcaataacaaggtgatgaaactcccatggtatgggacatccttctttatatgtacatcttgtactccccggattggcatcatcgaagcacgatgcccactttccttctcctttacggtgtcatttttgccgcccttcattctgtctttccttttggcatcggctcccaactgcatcacctgatcctctgccttctctgtatcccaccgatctttacctactatcttccctcccatgatgccccctcc

SEQ ID NO: 197544 - DNA, 453 bp, Gossypium hirsutum
tcttccacgcgtccgacggtagagaatatcagagcactacgtgctactgctggaaatgtccatgcggcggttgagagacttctaggtaacccggggcagtgattcctcaagataatgcttttaaatttgaacaagaactgtgatgtaagattagttgattcggcctgctgacttagcaaaaccacagattatgctgattccttttttgggcacacgtttactgtttaatgacgtggtaaacaggatgatgtacccagagaacttgatatataggcttatgcgtattcttggatcattccatcttttgcccacgcacttggctgtgtacatacacacattggattaattttgagaactttaaaaggatggttccagcatcttcaattcatgcactctgttgctgttcgattctacggagtcgatgaactgtgagttgcatgtatgttagtgtgt

SEQ ID NO: 197545 - DNA, 435 bp, Gossypium hirsutum
cggacgcgtgggcggacgcgtgggctaaaacgctcttccaggtagttagcaattatcatcatcatgaactcaatctttagttcctttgatgctctgtggggtgagttgttgggacaggcagtcaggtcttcctttgcttctacaactaataaagatggtgttaggttgtttagtggcagagttaaggtgacaacagaagaagacatgaagaacaagcaacaaggaaacgttgagaagaagcaacagagggctccccgtttcgctcctgagctcgacggccttcactgctttgagacccttgtttcctactagattctttccttcatgaggttgaagttattcaacaagattgattcttttttctttttaatagcagaagctagaaattcttactgcatatgtaaaaatctgcgattaattgaaattctttatttg

SEQ ID NO: 197546 - DNA, 387 bp, Gossypium hirsutum
gcccgacccacgcgtccgcttttctctatcttagagaaactactgctttaattaatttatttaatattaataaattaaatcagggaaataccacacaagaaaagcaaagaaagatggcacgccaagtatttgtcatggcccttgctttcatggctgttgttggggcatttgctgccaattcttcaccttccgcgtcgccatcttcttctcctgctgccagccccgcaggtggcccagctagcgaccttgctttttcccctggtgtcgagagtccaaatgaaagcgaggacccaagtgaggaaccaagcgaggacccaagcgaaggcccagaggcggacgaacccgctgctgactctctagatgccgactattctggtggtgatgccc

SEQ ID NO: 197547 - DNA, 356 bp, Gossypium hirsutum
ctctttgctgctttccattttactccttcatctttccttagctttgcattttccgacgagaaaaaaagcaataaaatgtcactgtggcaacatatccggagccgccatgaggaaaaaggcgttatctatgccgtcttgtttacatgttgttgctgtttctgctgctacgagactctcgagggtatattggagaatgggatacgtttcgtgcctttcctttatgctaatgttttaatttccactctcatcatcacttgctcttgttcacggggaattagatcaccccatcttaattattgccaaataatgcaagtgttatccaccaataacttatgcagtttaggttgctgctaaaa

SEQ ID NO: 197548 - DNA, 238 bp, Gossypium hirsutum
tcctttcgtccggcttttgtacatgaggatacttgtaacaggcggcagttcacttgagaattgtaagaccttgtttttgctgcatgcattgcttgtagcaaatgaaaatgattccccaacataaattttacagaacaaactttaagcagaaccggtccaagcttttcatgaagatttgtcagatagcgaaattcatctggttttcgtattataatcttaaatatgttgtatttatatt

SEQ ID NO: 197549 - DNA, 573 bp, Gossypium hirsutum
gttcccccgtcgcccgcccccgacccccgtgcttcaccgcggcccgtcggcctctccttttaccaggttaatcagtgaaaggaatctgaattcttgagatatggaaatagcaattattgcattgattttggctgtcttgcttggagcttttattttggtaccccgacatggtaaatcagctcataagaacaaggttaaatcgactgttgccaattctaaggcatccaagtcctatagtaaaacagaagttatgctacataataagaggacagattgttggattatcattaaggacaaggtttatgatgttacctcatatgtagaggaacaccctggtggtgatgccatcttggcacatgccggagatgattcaaccgaagggttttatgggccacaacacgcaactcggacgtttgacatgatcgatgacttctacatcggagatcttcagaagtaatctccaagcaactatccactattgggttttgtaaggttagggtgaaaacacttctgagaatatctttctgttagccctactccaacatcggtatgtgctttgcacatttagttcct

SEQ ID NO: 197550 - DNA, 583 bp, Gossypium hirsutum
  unsure (1)..(583): unsure at all n locations
gctatttaaagcccactaccaagagccgaattccccccccccccactagctttcgagacacccccattggatatcacataaaaatcccaacctctcagtttcttggaactgatggggtatatggtattattttggcaaatggggtcttcataaaagcacactggggaggggggaatttgggtgggattcctccattctcaccctcagcccacaattaaaactgtttggcagtgcttattacccaataagctttgcatggaagaggatccatcctacagagcacctacctatctgcggaggcttttttggctaatgcactggcaaatcggcaagtcacgaaaagggcaatcaactcatagtaattagtatgagtctgttatctggctatacatacatatatatatgtatatatcatgttttcttgtatggtattaattgtttttgaattatggttgttggaatgtaatggaaagtcgtgtgtttaaagcagaacctcatccttagatgtgtgagtttgcttgtttccaaatttgcagtcagttgctgcaatatgaatcgaataaaaagttcttttcactcctna

SEQ ID NO: 197551 - DNA, 465 bp, Gossypium hirsutum
ccacaacaaggaaatggtatttaaacatcttggaggctgacaaggtccaaccaccaaagaagacggaagagggaaagctatatactcctgctgcagttgatttattcaggatactcggggagcaagtacaaattgttagggataatagcactgatgccatgctttacaggattgctttggcaataattcaggtaatgattgattttcaagcagctgaaaagcagagacttgaagaacctgcttctgatattggtctggaacctctatgtgcaatgattaacaacaatttgcgctgctatgaccttgcactggagttaagtaacagcatcatagaggctcttccacaaaactatgctgaccaggtaaattttgaagacacatgcaaaggtttcttggaggttgcaaaggaagcagtacgccaaactgttaatgtaatctttgaggatcctggagtgcaagagttgc

SEQ ID NO: 197552 - DNA, 838 bp, Gossypium hirsutum
  unsure (1)..(838): unsure at all n locations
gtcaattcatcagccaagttatcgtattcttggattgcttgaccgattgatatttttgtctcgtggacaaactgtttacagtggttcaccgacgaatttgccactgtatttctcggagttcgggtatccgatacccgagaacgagaacaaaacggattttgccctggacttaatccgagaactcgaagggtcccctggaggaacaaaaagtttggtcgaattcaacgagacatggcaaagcatgaagcataccagagactccgagccggatgaactaggcttgtcattaaaagaagcaattagcgccagtatatttcgaggcaaacttgttccaggtgctacaaatgatatcaattcatcttccatggttccaacatttgcaaatccattttggaaagaaatggtggtattgtcaaatcgatccatcctaaattcaagacggatgccggagttgttcggaattcgtttggcagcagttctagtgacagggttcattttagcgacagtattttggcaacttgataattcaccaaaaggggtgcaagaaagactagggtttttcgcattcgcaatgtcgacaacatattacacttgtgccgatgctcttccagtttttctccaagaaaggtacattttcatgagagaaactgcttacaacgcttacaggagattatcatacgtcatatcaaatgctttagtgacgctaccgggcttgattttgctctcgtttgctttctccatgacaacattttgggcagtagggctagacggtggattatcaggattcttattctatttcctaattatgtntgcttcgttttggtccggaagttcattc

SEQ ID NO: 197553 - DNA, 510 bp, Gossypium hirsutum
gaaaaaaaagaggcagaaataagtatcaaatgcaattgagattcatacctgtgtttttcttccatcttttcacttaaattttgcttttagaagaggaaaaaagagagccaatttaggctctgagatgtatatgaaattcattgttcttcctctgatgcttgttgctgaaaatcaagttaaattccaagaaagggagtgggaaaaagagagataaacaaagttcctcatctaggtggactccaatggcggcatcggttatgaaagaaggtaaaaaaacggagcccgttgttattgtgaagcttgcggagtgcgattgttgcggtttaacggaggagtgtacgcaagcttacattgctagcgtaagagaaaaattcgaagggcggtggctttgcgggctttgctcggaggccgttaacgacgagacggttagatcggaggaagatatcacgactaacgaagcaatggatcggcacatgaagttttgtgagcagtttaaatcgtcgagtccac

SEQ ID NO: 197554 - DNA, 365 bp, Gossypium hirsutum
ccttccaaaaagggtttgcttcattcaaatcaagagatcttcaatggaagttctttaactgatggttgggttaaaaagtatgcagccgatacttcattattgttcaaggaatttgccaagtctatgatcaagatgggaaacattaaacctctcacaggttatgctggggaaatcagaatcaactgccggaaagcaaattgaaacatgtttccatacttgcaagaaattttatttaaaaaaaaaaaaaagttatctgtctgttgtttgaagtgagtgattgagatgttcatataatttaaatttgtactatcctttttttttctctcctttttctaataaaatgtttattcaataaaagatcactt

SEQ ID NO: 197555 - DNA, 280 bp, Gossypium hirsutum
cccacgcgtccgaatgggtaccattgaaaaaaaaaaattgtgatatttgatgcttgttagtgctgattgtgcccgcgtccgctactgtaccttttcttttataagttgttaggatacttaaactttgatgcttgttgtgaatttaatagcatatgtaactacaaatacaaaacttctgccatactttttgttaaattccttgtttcctcattctgggaatatgttgtgaaacattgtcatttatatgtatctaaaagttctattgtgcatgcatttgcag

SEQ ID NO: 197556 - DNA, 426 bp, Gossypium hirsutum
gggaaacaggcactctcggttacatggctccagaggtccttgatgggaagccttataatcggaaatgcgacgtctacagtttcagtatatgcttatgggaaatatactgctgtgacatgccttatgctgatcttagtttcgctgaagtttcatcggcagtagtatgccagaatttacgaccagaaatccctagatgttgcccgagttcattggcaagcatcatgcgaaaatgttgggatgcacaccctgaacgacgccccgacatggacgaggtggtgagattgttagaagcagtggatacaagtaagggaggtggcatgatacctgatgaccaggctcgcggatgtttctgtttcacttgccttggtccgtgacacttaatgttgtcctacatgcttttagtttgagagagacagacagtatttg

SEQ ID NO: 197557 - DNA, 554 bp, Gossypium hirsutum
  unsure (1)..(554): unsure at all n locations
gaagagtttaggttgaaaggaaagttgtatgtataggggatgaagttgcaaaaaaaagaaaaaccatagtcatctaaagcccttacaatggtagcaacaagcaacacttgcttcatgttgctagcttgcttctagtttgtgggctttttttctttttattattgttattattctctcttattttttttttagtatattctcatgaacattttacatgtactttatcatcatttagccattcataatcaattctcccttgcttcattcataccttttacattgtaaatgctgatggagattttgcttcttcaatgtnaaaaaaaaaaaaaaagaaactaaaaaaaaaaaaacactaattgaagcataatataaaacatagaatggattgctatataaagaacttatctttgtcattaaattaaactcaaccactgagattttgcattctggccttaccttaatctaactgatgactccgtatattttcaaaagcatatcgcttgtggtgggtggattggttggttgaagtgtaattacctcttaacgttatacgt

SEQ ID NO: 197558 - DNA, 523 bp, Gossypium hirsutum
  unsure (1)..(523): unsure at all n locations
tggatgcgtgggcaaagttcttggccggagctgtgtgcaataggaagcattgctatgccagctatcttaaaacatgccggagttatcagttggggcgcattggcaatggaactttcatcgtttttcgtttttgtactggccataatgttttatattcgaatgaacaatgatgatgattacagtttcttctgaaaaatcattacagtttcttctgaaaaatcatgttgaaagcactgtaaaagtttgttcataggatgctataccttttccgttttgacaagcttcattcatgtttgttctttgtataatgtgtgccattattgtctttgaacatttattacaccaaaaaaaatgagaaacccactttattattgatcctctatttnnnnnnnnnnnnnnnnnnnnnnnnnnnnnnnnnnnnnnnnnnnnnnnnnnnnnnnnnnnnnnnnnnnnnnnnnnnnnnnnnnnnnnnnnnnnnnnnnnnnnnnnnnnnnnnnnnnnnnnnnnnnnnnnnnnnnnnnnn

SEQ ID NO: 197559 - DNA, 1100 bp, Gossypium hirsutum
  unsure (1)..(1100): unsure at all n locations
atttgggagtcatttcatgtgacaactgatatgatggatacaactgaaagtaattcagtggagctgaatgaagtacaagaactggagacaatgtttaagattcctcctatagatgttattcttgaggatgaactgtcacgatcatttgcattaaaatgggttcatcatttccaaaaggcatatgaggcctgcagtttccgaaatgttttctactgcaatcctgcggttcccttcaagttgatgaccctgcctcatgcttatcaagacctactgcaacggtatgtaaagcagtgttgccctgactgcaaagctgcgcttgttgaacctgcattatgccttttgtgtggtagattgtgctctccaagttggaaatcatgctgcagggagagtggatgcatggttcatgcaatgaactgtggtgctggtattggtgtatttctgttgataaggagaacaacaatcctactgcaaagatgtgcgcgtcaagctccttgggcttctccatatttggatgcatttggtgaagaggatattgaaatgcatagaggaaaaccactgtacttgaacgaggaacgctatgcagctctaacttacatggttgcttctcatggccttgatcggagttcgaaggttctaggccaaacaaccattggtacctttttcatggtttaacttggtttcatgatagtggtggtggttaaatctttggcttctttcatatgtcgccattttctancaacacatcaattgcatagaaactggttctacaaaattgaagcttgccagtatccttaaattattgcaaactaaggatcttggacaatgatgtcggcatgtggcatttttggcttgacatactggtaatcagatctgttcagtggattcaatgctttccccccccccccccttatttttctttggtaatttgtgtcttttacttttctgttaatgaatattgattcttagatcactgtgtttgacgggagaaatggtttggacgtagtatttttcttcattatgggcaaagtggagcaatagtttctgctgcttttatgggtttgtaacatgtctgtgtacataatagcacattttctctcgat

SEQ ID NO: 197560 - DNA, 585 bp, Gossypium hirsutum
  unsure (1)..(585): unsure at all n locations
aatgcgtagaggaaaaccgctctacttgaacgaggaacgctatgctgctctaactaatatggttgcttctcatggccttgatcggagttcaaaggttcttggtcaaactaccattgataccttcttcgtggtttagtttggtttcatgtttaaggtgttagatatggctgattttgctgttctcttgtttcatattctgttgttagactcttaaatcgaagaacccctggcatgtagagtccaatgccttgacggacaagtcttcaattgaacatattcaggctttagatcaccatgttgatcgggaaccggtttcaaagaagacaacactatgagaaaacagtttggtttcttctataactttccatgttttttcttttcatctctgataagtagagccataaattctaatgtaaagcagttgaaatctttctcaagttaaagggcacatatatatataacatattgtaaatagttcaacattttcactggacagcagctctcatattgtgcttataaattcgctttggtctcacttcnnnnnnnnnnnnnnnnnnnnnnnnnnnnnnnnnnnnnnnnnnnnnn

SEQ ID NO: 197561 - DNA, 776 bp, Gossypium hirsutum
agccttccgccaaaacaaaatccaaaaattaagccaattttcagtatttttttaactatggcttcaaatcccaaggttttcttcgacatgacgatcggaggtcaaccggccggccggatcgtgatggagcttttcgcagacgtcactcctcgtactgccgagaacttccgggcactctgtaccggtgagaaaggcgtcggtcgttccggtaaaccactccactacaaaggctctaagttccaccgcgtgatccctgatttcatgtgccaaggaggtgatttcacagccggaaacggaaccggaggtgaatcgatatacggatctaagttcgccgacgagaacttcatcaagaagcacaccggacccggcatactatccatggcgaacgccggtcccggaacgaatggatctcagttctttatttgtaccgctaagaccgagtggcttgatgggatgcatgtggtgtttggtcaagttgttgaaggtatggatgtggttaaagccattgaaaaagttgggtctagcagtggaaggactgctaagcctgtcgttattgcagattgtggacagctttgttaagaacaagaacaagaacaagaaatggaataatgttgactctggtctatgaatggtgattcatgtctgaaatttatcatttttatgtgttttcttttgctggttactggatttggcttaggttgttctctaagaacatgactgccataaataatgtacgctatttatcatcatatttgaccatataattgagttattac

SEQ ID NO: 197562 - DNA, 438 bp, Gossypium hirsutum
  unsure (1)..(438): unsure at all n locations
gaaattttctaaccgataccatgagagctgtaagggggggatgaatggttgttgagagcaagaggccaataaccataacagtgagtattaagataaataggtaagttagctgtgtggttgctgcttggttactgggaaaatgtagaaacaaacatggagttatcgacagtgtgtgtattctgttttaaaatgtagattctgaatctacaatatgtgcaagatgacccttgcacggtcagatggccagggtagtgcagggtctaggtgacacaattattcttgtattatcatcatttgtaaatgagtgacatcatcatcttcatcattatcataataatttataatgnaaaaaaataaaaattagaaattttaatatactttggggcaaaattcttaagctataaatcttttttttttgggtttcgttagaatatcttt

SEQ ID NO: 197563 - DNA, 629 bp, Gossypium hirsutum
aaaaaaaatccgtagtttctttaaggcacctctgctatcttcgttgattttgactttctcgggcgattgctttatcgattggaacctgggttttggaagtctttaagtaatggcaagtgagtttggggaatcagcgagccattcgccccaaaatccatcttgctctagtaacaatggtaatggtgatgctggtaactttgagtgcaatatctgctttgaattagctcaagatcccatcgttactttatgcgggcatcttttctgctggcccttgcttgtacaaatggcttcatattcattcccgttctcgtgaatgtccaatttgtaaggcccttatcgaggaagaacaattggttcctttgtatggaagggggaaatcatctactgatcctaggtctaagtctatcccgggtgttaatattccaaatcgtccagctggacagagacctgagacggctcctccaccggaaccaaatcaatttccccaaaatggttttggattcatgggagggttgggaggttttgcgccaatggctacggctaggttcgggaatttcacactgtctgcagcctttggtggtcttattccatctttgtttaaccttcaagtgcatggatttcctgatgcc

SEQ ID NO: 197564 - DNA, 450 bp, Gossypium hirsutum
atcagcgatccgggtatctacttgagacaagaggaagcataatataccaagttgagaccagagcaagagtaattatatttgatatttcaacacttgaaggcaatagggttttgcggaataattcatcttcatttaacctttcacatagatctttaactagagaacatggaggtcttatgagttggcccgaacatttctttagggggagacaacatacacaaaatcatgacgcatctgatcaacaagtaaacagattgtcagcgagagccatgcagttaagcatatttggcagtaaggtaaatttgccacagcgtagctggagtttatcaaggatgaatcagtctcagccaataaacaacccgtcatataatagatttctttcattccctggccatctactggtctctgccggatcagaaggagcttctactatgacgaagaatcacaaag

SEQ ID NO: 197565 - DNA, 560 bp, Gossypium hirsutum
gacccattttgcgaggcccaaatttatgaacgttctgtctaaactaagttccagagcattgcaacgcaaggataggggtcttttattgcggggcaccggttttggctaaagagctcagcaaactctgctacgagttaaaccaaaaaggttccactaaatttgaattccacaaagagcatttctaattctgaggagtatacaaggggaggaaatagcattcttaccatccagggccctaactcctttctttacctagagaaataagaattttgcaataataggcccagaagacaggagccaccgtacagccttagaatagaaaaagcagatatgaaaggaaaaaaggcatttaggtctctatccctatcgttgaatacccacaaaagtgacggaagaggccatcatggtttttgggaaattaaaatcaatggtccggcgagcaagagaaatgagagttgagaggtagggcaggcctagcccattcaagaccaactttgaaaagcacaaactggatgggtttttttgcctctctcttttttccctatatttccaaattttca

SEQ ID NO: 197566 - DNA, 521 bp, Gossypium hirsutum
cccacgcgtccgcgacgatgtcaaggaattgttttctgaggtcggtgatctaaaacgatttacaatccattacgataggagtggaagatcgaagggaacagcagaagttgtcttctctcgccgaacagatgctctggctgcagtcaagagatacaacaatgttcagctcgatgggaagccgagtgaaaatcgagattgtgggagcagacgttgccactcctgctgcaccttcagctgctaatggcacctttggaagttcaaatggagcccctagaggtggccaaggcaggggtggtgggttcggcaggcaacgtggtggtgctggagagccgtggctctggaagaggccgtggacggggaaagggccgcggagaaaaggtttctgctgaagatcttgacgctgatctagagaagtatcattctgaagcaatgcagacaaactgaagcattttccatgttctattggttggttttaagtattttctactatggacatattgtgcttggtcctcgactatttt

SEQ ID NO: 197567 - DNA, 522 bp, Gossypium hirsutum
cgggccgacgacgcgtccgacaaacaaaggaagacgagggattattaatgtgaaaacatcaagacgtacgctcctttgtgggcgtcttccctttcatctaaccttggttttctctactgtcatatcggctaaggactattagtatctaaattctaagttatggttcttgatggcattgtatcttctccccatcggagatcaggatcaatgaggaaacaattcccaaaagatgagttggggagctggtcaacacttgttcagaggcatagattcctcttaacagctttgggactcttagcattcttatgtactatctacctttactttgctgttactctaggagctacagacacatgttctggcttggaaggaacagagagagcaacgtgtaaactgcagcacgcatggtcgactctatcccacgggaaactcaaattattttagcatgtttttatggaaaaatcactggttgcttttgacattctagtaatcatttttttaggcaatttgagggtttttaaa

SEQ ID NO: 197568 - DNA, 783 bp, Gossypium hirsutum
caatattactttttctttgctaccttttattgcgaacagagagacttttcagttgttcaatccggtggtctttgccaaagtctctcctctccaaggtttctcttctccagcgcattccggaccatttctgggattcccctctccaggtaaaagctttctccactatcgagagcctccgttgcaatagtataagcgtagatgttattaacttttggaataaaagaaaactcaaccttctggtatctgcgtttcttgctctgaatatctctgattattgctcctatgaccgatctatcaataatagaattttggcacttcttgataaccgtttttgaatctcccataacttcaagtatgttgactcccagactaatacctagttttactgcttgtaatcctgcatatgcctctgctgtaaatgggtcttctatgttggagtgatgaactgcctatgacgctaggatttctccttccccattccatgctattagtcccgatgccgatctgaacgtctgacggtcaaaagctgcgtcgagatgaactgttgcccttccccttttgaacacctggtgacacttatccgaagagtgtaaattgatttctattgaaccaaataagccagagaccacaacagaatattcaaagttgctcaatatttccttgtccaaagattccaggcactgttgaaagatatggtaactgttttcttcttcacaatcacacctgggacattgagtattcattactactcacttggttttgaggttgcaaaaggatgggata

SEQ ID NO: 197569 - DNA, 432 bp, Gossypium hirsutum
tctcttacgcgtccgctgatcgataccctcccattaatggggctttgtattagtttttttactgacaggcattgtccgttgatggacgaacaacctttttcgagaaatttagtaaattattttaatcggccttggtggggtttattgcatgtttagctctctcacaactgtgtaattattcaatgtcttttactcggagattacaaccacaatattaaattatgattgttattttgcgatttcatcccaaaaaacaaaaaacgatcaagaatcactaagagtggaagataaagaataatcttgtaataaaagacaggggaattctgaataataaaaggacaaacccctcttcatataaatgcaacaaccccttatactttttaaagcaaaaacaattaaaatttttggggggccccctttaaaaaaaccaaa

SEQ ID NO: 197570 - DNA, 768 bp, Gossypium hirsutum
gctagtagtttttccggcagcggtaccatctccgagaggccgcctaaggtgttagcagcacccgaatccgaggcaattctaaccgtatggaaaaaatccttgctcttcaactgcaatggcttcacagtgtttggtagtaaaggtgatttggtgttcagggtagataattacatggacggtaacaagggtgagatccttctcatggatgccactggcaaccctatccttaccatccgccgcaagaaaatgagcctgggagatagctggttggtatacaaaggcgaaagtacctcaacgaatcccctactttgtgtgaggaaatcgatgaacatcttaaacaacaagtgcttggcttacgttatccccggcgacaacactagcaaccgaagcaacaacgtcgtatacgagatcgaagggtcgtattcgcaaagatcgtgttccgtatacgatgacaggaggagattagccgcagagatcaagaaaaaagaggccgttcatggaggagttgcctacggaaacgacatctttcgccttgttgttcagcctggtcatatccggacggattttgccatggctctcgtgatccttcttgatcaaatgttcggatcttcaagacgataaccatctttaatttcttgcttttctttaccaaaacattgtctgactgtttgtctatctatatatcgatatgaaaatcatagcaacaatttccaaacttgcagcatctggttatatatatatatgtctggttttgatcatcttcaagct

SEQ ID NO: 197571 - DNA, 609 bp, Gossypium hirsutum
  unsure (1)..(609): unsure at all n locations
catggatctgggagatattccgagcatatgatgcctgaagttgaaaaggaccatggccgaaaaggctcacacgtgggtcttcatgacgcggcagcatgctataatagttatggctgacagcctatattacactaagtttaggtgttactgcaagccaaatatgggagggcgcaattgctatgcagatgagcattacttgccacacttttttcaatatgattgatcctggtggaatagcaaaccggtcagtaacatatgtggattggtctgaacggaagtggcatcctaaatcatttaaggccgaagatattacattgaagttcctcgagaaccttacaaccattgacgacatagtccatttcacaagtgatgaaaagaggatgcttacaggaccatgcctgtggaatggaataaagagaccttgttatttattcgcaagaaagtttatccagaaacattgagaggtgatgtctattctctaatatacncactatctgtgtagcttccctttcccttgctttcctaggctggataatgtattatcttgatttgtggatcagatcacaagcggactagatcaatgcattcaacaggattaaaattttgatt

SEQ ID NO: 197572 - DNA, 454 bp, Gossypium hirsutum
  unsure (1)..(454): unsure at all n locations
tcgtccacgcgtccgcaagcacacaactctttcttttcctgctctcaaagatgacaacttttcatcattaaagctcaaggccttactttgataaatgagtttcggtcccatctcttgagctgtgaagcagattttcaaatctgggtacttctcattttttctacaaaacccgacaaacatttgtttttgtatgtattaacttgtaggtttttaccccagatcttgcaatggtctgaaactcttgagtaaagctgttttttcttttgttggggggggggtctttataaagggtagaaaatggcttatagcttagagcaaaggttttggtgtcagcgagttttaaggtttgggtttgcatttgtatgtgtgtgtttgggtgggtacattgttggtccgacatcactgttgtggcgtttgaaggacangtcaagacctaaggtctcatgtcttcctt

SEQ ID NO: 197573 - DNA, 647 bp, Gossypium hirsutum
ctcaggtcatagatccagagtttgcattttatggaccaatgggatttgatattggtgcttttattggaaacttgattctggctttctttgcacaagatggacatgctggtcaagggaatgacagaaaatcatacaaagagtggatattgaagacaattgaggatacttggaatcttttccaccaaaagtttaccgcactatgggatgaacacaaaaatggctctggggaggcttatcttcctgcaatttataacaatcctgagcttcagaaacttatacaggaaaagtatatgaaggaattgttccacgatactcttgggtttggtgctgctaagatgataaggagaattgtaggtgttgctcatgtcgaggattttgaatcaattaaagaagctaacataagagcagatttcgagccaacgggctcttgaattaggcaagacacttctgaagaggaggcgagagtttgtgtcgattagtgaagttatttcagccatgaagcacgtccaatcatgatggaaatgctggaaactgctgtgcacgtatccataaaagcttttgcgcttaaatagatggaaggttttacaggatccataatttaataaagttttcatggtccttgaggcataggcctttgattgtgtgtg

SEQ ID NO: 197574 - DNA, 401 bp, Gossypium hirsutum
ttggcacacacataaagagaaacatgttttgagaatggccaccactaagacaacccttttgcttgctgttctgtgtcttttcctagtttgcgagattgggatgctaatggttgaagcccaagtccaaaggccagaatgcgaggggaagtgtgcatcaaggtgcagcaagtcatggaagccggagatgtgccttaaaacatgcaacgcttgctgcaacacctgcgatgggtgtgtgccccctggccctactgctaacaaggaagtatgcccttgctatgccaagtacaagaatggcaagtgcccttgaatcacttctttctattttctaaacacgcatccgctcatggattcattctaaattatcacttgtatttatgagagggtctcttgtgtacttcaat

SEQ ID NO: 197575 - DNA, 398 bp, Gossypium hirsutum
tttccacgcgtccggccgcctcctaacaacatgggtgggatgccaccaggtccaccgaatcaaggatggtctggtaacatgggtggaaatgctcagaatttccaaaatccttaccaaggtaatacacagaacgtgcaatatccgaataactatccaccaaatatgggcgggcatggtgggaattaccagtcttagatatttgttttatatgaattgaaggaagacatttttaggaatattgtagataaagagaatatctgttgagcttgtggctattaaaatgaattgctgtactgctgtgcatgtttgctaagttcatcagtatatcttcataagtacgaaattttgtcgtgttggatggactgctggggatgttttctaaatatattattatgatg

SEQ ID NO: 197576 - DNA, 988 bp, Gossypium hirsutum
  unsure (1)..(988): unsure at all n locations
tgaatatctcctgaagggaataaaaacggtatatgctaatgttagaggtttagcaaatagaggaaaaattaccaaggataaggcggaaaaagctctctcaatgcttaaaggagttctggattactctgaatttaaagacgtagacatggtcatagaggctgttattgaaaatgtcgctttaaagcaaaaaatattcagtgagatagagaaggcttgccctcctcactgcattttggcaacaaacacatccactattgacctcaatttaataggagaaaaaatgaactcgcaagatcgtcttataggagctcactttttcagtcctgcccatctgatgcctcttttggagattgtacgaacacagaaaacttccccacaaataattcttgatcttatgacggttggcaaagtaataaagaaagttcctgttgtggttggtaactgcactggctttgcagtcaatcgaacattcttcccctatacacaaggttcgcatttattggtcaatttaggtgtggatgcgtacagaattgaccgggtgatctgcaattttggctttcctctgggtcctttccagcttcaagacttggctggctatggtgtggcctttgctgtcgggcaagaatatgctaaggcattctctgatcgaatattcgagtctccattgcttgaacttttggctaaagacggaagaaatgggaaaaacaacgggaaaggatactatatttatgagaagggaagcaaaccaaagcctgatccttctgtattgtctattatcgaggaatctagacggcttaccaatgttatgcccggtggaaagcctatttccgttactgatagagaagttctggagatgatactcttcccagtagttaacgaggcatgccgggttcttgaatgaagggttgtggttcgagcatcaaaccttgatgttgcatctgttcttgggatgagcttcncatcttatcgtggtggtatantattttgc

SEQ ID NO: 197577 - DNA, 1475 bp, Gossypium hirsutum
gtgaaaaggcttttgacaatgaattaatcaaagaggaacttgtcaaagcaatagatgaagaaaatcagtgtgacaaaacaaatgaaatcatagtgaatgaagtttcaaaagaagaggtccagggtgttgctgaaacatcttatctgacttcagaaccggaactgccggtgaaagatggcctaggagaagacgagctaaagggtaaactgattgaagacaaagcattggaaaccactcaaactgaagagcacgttgtggaagctcaaaagatgagtgaaaatgagatagctgaaaagcagattgtttgtgaggataaaactgttggaaatcctgcccaagcttcagttgcaaagatagaaaccgcaacagtggtacaagaggaatcaagtttagaattaccaaagtcagatccagaaggtaccaagggttcagataatcagatttccagggaattagagccgattgaaaacacagagataacaagttcacctggttaaagaatatgttccaatagatttgcaggacaaagttgcagaatcctctgagaaagctgaagttgaagatgtcaaagaggtttacctaaaggaagcagaagttggccatggtggagacaaaataacagacgaatccagtgaagaaataaccaagaagtctacatcggtggaggattcaactgagattaaggagctaaaagatgaacatgcgggagacaagaccaatgaaacctccgaaaccccaatattagaaaatcaaaatgagaagctcactgtggaagctctaaaggacgatggttcaaacaacaattttaagaaagagattgttgaagaagatcgaactgtgaaggatcacgaacaagcgccagttgccgtgaaagaagccataactgttccaggagaagccattgagaagcctgaagcaagagatttgcaacctgaaaaagctgaggttgataatggagaagagaaaacagataattcaggtgttgaaataaaattggaacctgcatccacaggtagtggtaatttatcattttccgatctactccaacaatctacagaaaagaaagtggagatggctgaacgtgtgattgaagagagggaacttacagtaagcaaggaagcagcaacggtggaagctgcaggaactattcaagccaaagaattaaaaactgatgaagtacctgaaggagaggaacagaataagaccgactccggctcggatgctccagtgatggtggaagcaccgagagaagctgaaactaaaccacccaagaaatctcaaaacatactatcaggtgttgggtccaaagtcaagaactcaatttccaaggtgaagaaagcaattactggtaaatcttctcatccaaaagaaccaaaagcaatatcaccaaagtgaagcgagaaatgaagatcatcctcaattcttagtacataatcacatattttatgatttgttttataagggtttgttttctg

SEQ ID NO: 197578 - DNA, 721 bp, Gossypium hirsutum
tcgcccaactccacaacgccaaattcaagtttaccaaccttattgtttatttgttcgagacttggcgagtttttttgaatccccatggcttcgaagcggattaataaggagttgaaagatctgcagaaggaccctcctgcatcttgcagtgctggccctgttggtgacgatatgttccactggcaagcaacaattatgggcccagcagacagtccttttgctggaggactatttcttgtttccattcacttccccccagactatccattcaagcctcccaaggtttctttccgaacaaaggttttccatccaaacatcaacagcaatggaagcatctgtcttgacattctcaaggagcagtggagccctgcccttaccatatccaaggtgctgctttcaatatgctcacttctcacagatccaaatcctgatgaccctctggtgcctgagattgctcacatgtataagactgatagagccaaatatgagagcactgctcgctcatggactcagaaacatgcaatgaattaagggtcggtcaggcttaggatgctatgtttgataccttttactaaataatattagtaataacttttgtcgtttggatcctttgataaagtggtggtgttggtgtaataagctctaaagtctttcagagggtaatttttttttcaatcaagttacttaaaaaatactattataaatatattcgatagttcgt

SEQ ID NO: 197579 - DNA, 768 bp, Gossypium hirsutum
ctcgctacttccgtcctaattttcaggaaaatatcgtcgccgtgatccaaaactcagcccaccgtctccgaccgtgtcaacccgtaacccaatctctcaaatatggatcgacccagattcgtaatcgacgccgtcgaagccgagcaaatggccaaacaatcaggcaagacggtgctccaactccttccttctttggtcaaatcagcccagtccgttgcccgcccgccgatctcgaagtaccaagttggggcagtcgggatcgggtcatccggtcggatctttttcggagccaatttagaattcccgggcttgcccctcaaccattccgtccacgctgagcagttccttatcaccaacctttccctcaatgcagagccgcgtcttaaatacatcgccgtctccgccgctccttgcggccattgccgccagtttttccaagagctccgcggtgctcccgatgtcaagatgctcataacttcctccgatgatgaaaaggaaaacaaaataagcaacacttgttatgataaagaccaagaatttacccctttgtctcattttttacctcacaggttcggccccgatgatttgctaggaaaagatgctcctctcctcctcgagcctcgccggaacggcttgtcgtttacctccgacggctgcgagaacgacgagttaaaacacgcggctctcgatgccgcgaacatgtcgtacgcaccttacagcgggtgtccatccggagtggcgttgatagacgttgaaaggaagatatac

SEQ ID NO: 197580 - DNA, 407 bp, Gossypium hirsutum
  unsure (1)..(407): unsure at all n locations
agctcctcttgcaatcttgtatggttttaatcataatttacttcccggttcaacaaatttatctccccatgctctgacactggtgagtggattcgttgctgtaatttcagtcaatatagttattgcattctacatctatatggcaatgaaggaacctgtggataagcatgagccggatccaaagtttctcgctgacgccaaagctagtgtaagccagccaacgggcgaagctccaacctcttccgagtccataaagaaacgagaatagaatagccaaagcctgagtaactacaatggagagaatggaacaatgagggtctgtgctccatactcatgtcttatgattatgaaatngagttctttctaatgtttttggtggataattagaactatttctttccgtcttt

SEQ ID NO: 197581 - DNA, 422 bp, Gossypium hirsutum
gtccgtctagatcgcgagcggccgctcgcgatctacgcttattcatcttcactagatggtgctcttcgagcctggaggaatttcagccccaaaatctttcctcaactttgatttcaacgaagaaaggagaagaaatccatggcctgttcgcacggttcggttgtacggagaagatgaccctggtgacgtggaggccgcacgcggggatctcacgtgggaagccaaccctctggccattccagtgtattccagaagcttctggcgctctcaggctgctgagcttctttttgggtcctgttgggcctcgggtttgggctatttgtaaactgggttagggatgtgggtttagtatttggattttgaaaattgtaagtggactttgtggactattttagtcatggactttattttaatttatttgg

SEQ ID NO: 197582 - DNA, 991 bp, Gossypium hirsutum
tccccttctgtttcttttttcacgagtctctccattcaaacgtaaaaaacggcgccgtatttacgcttgttggtgaaagtgcgagatggcgataggagctgagcacaagtcacagtccgatgttagagtttgggggtttttcaagctgccatttcggcaaaccgggaacgctaccggtacgacgtcgtcttcttccttgtcgtcgaatctatacgctgaaactcaacctcagaacgaaggatcgaaccgtcatgcctctgccaattcggtttctgccgttgcccggtcgcttttgccgactcggcgtcgcctcagacgtgatcccgccaataagctctattttccatatgaacctggcaaacaggtgaggagcgcggtcaggataaaaaacactagcaggtcatatgcagctttcaagtttcaaacaactgcaccaaagagctgtttcatgcgccctccgggtgccattctagcccccggcgagagcatcatagcaacggtcttcaagttcgtggagcctcctgagaacaatgaaaaacagatggatcaaaagagcagggttaagtttaaaatcatgagtcttaaggtgaaaggtccaatggactacatacctgagctgtttgatgagcagatggatcaagttgcaatagaacaaatactacgggttgttttcctagatcctgagcgtccttgtcctgctctggaaaaattgaagtgtcaattagatgaggctgatgctgcgctggaggcacgcaaaaagcctccagaggattcaggtccaaggatcattggggaaggactcgtcatagatgaatggaaagaacgaagggagagatacctagctcgacagcaggttgaaggagtagactcagcttaaagtggccattctcataatttgctttatatcatgtgattgaaatctgatataatgatcatctcgtgcatatatacccgtcaaatcttttaatgttaaccttaaaagggtgtcatc

SEQ ID NO: 197583 - DNA, 457 bp, Gossypium hirsutum
cttcatcatccctttcctctattattgtttgtaatatggataccagtgctggcccgagcgtgttccctttgcaccgttgcaaaactttttacttggtgaggcatgctcaggggatccacattgtatatggagatatgaactattaatcattcatgtttccataatattttgatgctcacattacccctcttggctgacatcaggtggataatttgcgtaagcatgtccatgaatgtggccttgctaagaggattgatttagtgattacatcccctttgctaaggacattgcaaacagctgttggggtatttggtggtgatggttatacggataggatggatgtagtgccacttatggtggcaaatgcaggaaatagtggtcgtgctgcaatttcaagtttaaactgccaaccgatcgttgcagtaaaactttgtcaaaaccattgggaagtccatcc

SEQ ID NO: 197584 - DNA, 929 bp, Gossypium hirsutum
tttttctaaaccattaatcaacatgatgaaagctgctggttgggaccttgatgctgccgctgactcaattgagcccaatgttgtttatgcgaagagagctcacaagaaatatgcatttgagtcccacatttaccagaggatgttcagtgggtttcaacaggagaacttctccattaaattggataatgttacagtcaataaagagagcttcttccagcaatatctggctctgagggagatggatccattggacatgttgggccagaatcctgattccttattcgggaaattttcccagagcaagtacctgatggttgttcatccaaagatggaagcttcattctttggaaatttagaccagcgtaattatgtaacaggaggtgggcatcctaggactccattttaccaagcctttctaaaattggctaaatctatttggcttttgcatcggctggcttactcattcaaccctaacgtgaaagtctttcaagttaaaaggggaagtgaatactcagaggtttatatggaaagtgtagtgaagaatttgataatggatgaaagcgaggagaagcctaaggttgggctcatggtcatgcctggcttttggattggtggcagtgtcatccagagccgagtttatctttccggaatgaaggttaacgagtaaattaccaccactatgcatatctaagagtttgatgagtaatacacgtatggactaatatagtgtgctgtttgtctttgtgatttgttgttattgctgtagtcatgcaactgtagtaattgtattacgacataggagctcactgtttgttgacaaagttcctttgtctttgtgtgcttcaactgttcttctgggtttgattgcctgcaagaatgcagcagacagtccatgatttgagcatcatctgtctctacgctgcattggg

SEQ ID NO: 197585 - DNA, 779 bp, Gossypium hirsutum
  unsure (1)..(779): unsure at all n locations
ttgagttttgttttctatctcaagaaccttttgagttagagaacaaaactcagtgttgtctttaattgaaaccatttattatttgtaataattgtaagaaaaatggcatccaatgggacaacagagaaaaaggctggcaaatatgcatccttcttctccggcacacaagacaaatgtggagtttgcaagaaaactgcatacccattagagaaggtgacaatggaaggagaaatctaccataaaaactgctttaggtgttcacatggtggttttgtgcttacaacatcttcatttgctgcattagatggtatcctctattgtaagattcactttgctcaattgttcaaagagaaaggtagctatgcacatgttaccaaggcaactgccatgaagaaaacctcatcagaagccaagacagaagatgatccaacaccaggggctgaagctgaagctgaagctgaataagatgattcttacaatagggatttgaattaggtgttttctttttacgggttaagctacattccattacttttttttttctatcaccattcataagtatgacttattgaaaagtaatgaaagggatcttaacttctgtttattttcactctagttcttcccattcttcaactttgcaagcattttttaaacctactttaatgtagtgattgggagatggagggttttgataaatggaaatatattttgatttttttacttcnnnnnnnnnnnnnnnnnnnnnnnnnnnnnnnnnnnnnnnnnnnnnnnnnnnnnnn

SEQ ID NO: 197586 - DNA, 698 bp, Gossypium hirsutum
  unsure (1)..(698): unsure at all n locations
ccgggagagaaattattaaagaaggttgttatctgatgtcaacacttttgaaccaagggatacagattcagtgttatgaagctatcttaggtgggtcgttggcaagattgattttgactcgtatagggggagaattttttgccacggttattcaggcagctctggagttgtatttcatggtagcttggttgatattttactttgtggtgaagtctagggaagctaatacagaaggtaggaggtatgggaggagagaattggaggctttgattgatggacttggaggaaaattcaatcggaaaaaatgggggaaattttcatttgctgctataactttcgattctgacactgaagatgcctgaagatatcggcaacattttcaatgcttcgagtcttcctgtttttgcagagctagtgatgcaatactgccatagtttcggtctaagaacctgccaatgcattgcatgtacttttttatgagggaacacaatatattacttgtgtatacttgctaccacattgcttctgtgtgtatattctgttgcaaccagttgtttcttactgccttgcagtacttgttccttgctggtatcaatgagaatggtaattgtttctcatgctccaaatcttgctgatgctgttatactaaaaccgttgtctttgtgcttnnnnnnnnnnnnnnnnnnnnnnnnnnnnnn

SEQ ID NO: 197587 - DNA, 585 bp, Gossypium hirsutum
gtttattacctttcgaaaaagagggaaaagaaaaaagcggtcgagattttcacagccatggcgagcaccaaagtacagaggattatgacccaacccatcaacctgatcttcaggtttctccaaagtaaagctcgcattcagatttggcttttcgagcagaaagatttgaggattgaaggccgaatcattggttttgacgagtacatgaatttggttctggatgatgctgaagaagttaacgtcaagaagaaaagccgaaagtcattaggaaggattcttcttaaaggagacaacattactcttatgatgaatagtggaaaatgattgtagatccagcagttatttggactcgtgaatgcaaaatcttcttgtcatcgtataggtcaatctactatgactatatcgtactatctttaaaaacatgccttcgtgttaggacattcaccttctaggaggtgcttctagtatttcagacagtttactgatgcttttgcttagattatctaatgatttgacatgtatgattctgctctttgatctgcattataagatttctgattaagtcggcataaaaaacccttattt

SEQ ID NO: 197588 - DNA, 631 bp, Gossypium hirsutum
cccacgcgtccgcaatttcatcctgatggatgtcttgagattatcgataggaaaaaggacattgtcaaacttcaacatggagagtatatatctctcggaaaggttgaggcggcattgatgtcgagcaagtttgtcgacaatttgatggtgcatgctgatcccttccacagctattgtgtggctttgattgttccgtcacgcgacgttcttgagacgtgggcagtagaagctggcataaagtaccaagatttcccagaactgtgtggcaaagctgaaactgttagtgaagtccaaaaatcactttcaaaggtggggaaagatgcaaaactagacaaatttgaaatacctgcaaagattacactgatggcagaaccatggacacctgaatcaggattggtcacagcagcactcaaaataaagagggaacaaataaagtcaaagttcaaagatgatctccaaaagttgtaccagtaatatacccataataaatgcattgatttaaccttggtattttcactgtcatatgctctctttcatcttctttgtaagttttcatgtatgtggagacaaaaaatcaaacagtgttgctccatagatgagttgtattagataattcggaagtttgtctaaa

SEQ ID NO: 197589 - DNA, 422 bp, Gossypium hirsutum
atgggtcctttgaatcttaatgcatttgacttgatcattctctctcaaggcttgaatcttgcaacactttttgaccgcgggaaggacaccatgaagcaccagacaagatttgtttcacggaagccagcaagggtggttctgtctagcatggaagttgttgctcaatcaatgggctataagacacacattcgcaattataagatgagagttgaaggcccttcagctaataagacttctcatttgtcagttatcctcgaagttttcgaggtcgctcccacgtttttgatggtggatatgcaaaaggcagctggtgatgccggggactacctaaagttctaccaggcattttgtagcaacctcgaggacatcatatggaaaccacctaacgaatcaagcaaatcaaggatcacaaagtccaagag

SEQ ID NO: 197590 - DNA, 508 bp, Gossypium hirsutum
caagttgctgccgttggtgattgttgtcaaaagggagtcaaaaaaaattgcttgggtgatggcgggacgtcgacccggtgatgttgaaactgtttatgcttcaacgaagaaggctgagctgggattgaattggaaggcaaaatacggcatcgaggagatgtgcagggatcaatggaactgggccagcaagaacccgtatggatacgcatctccgaacttgaattaactcggtgccaatacttttgtcaggtcacacaatacctatgaggttagattttcttaactttatacagatttaattgggtttgatttatcattttagatgatttataaagaataaggtgggaatttgttttgatcaaagctttgtgtagtcttttaaacaagttgctgccgttggtgattgttgtcaaaagggagtcaaaaatgaaaaaaccttagaactatttttagtaacactatccttgttgtcttgtgtctttattttgttcatcttttgtattgctat

SEQ ID NO: 197591 - DNA, 1139 bp, Gossypium hirsutum
tttataagaagaaatgtcaaggggggattaatacagagataaagcggggtttaatcagcggaacaggattcggagtttccttcttctttctgttttctgtttatgcaaccagtttttatgcaggggctcaacttgttgagcatggttatacaacattcagagatgttttccaagttttctttgctttgaccatggcagctataggaatttctcaatcgagctcctttgctcctgattctggcaaagccaagagcgctgccgcttccatatttgcgattattgatcgcgagtctaagatagaccccagcgatgagtccggaatgaaactagaaaacgtgaagggagacatcgaacttcatcatgtcagctttaagtatccatcgaggccggatattcaaattcttcgagacttgagcttgtctattcgttccggcaagactgttgcattggttggagaaagtgggagcgggaaatccacagtaatctcattactgcagagattttatgatcccgattcgggacgtatcagtctcgatggtgtcgacatccaaaagctccaattgaaatggctgaggcaacaaatgggacttgtgagccaagaacctgttttattcaatgatacaatccgtgccaacattgcatatggaaaaggaggaaatgcaaccgaggcagaaattttagctgcatcagagttggccaatgctcacaagttcattagttcactacaacagggttacgatacggtggcaggggagcgaggagttcagatgtcaggaggacagaagcagcgcatagccatcgcacgtgccatcggtaaaagcccgcagatactgctattagacgaggcgacgagtgcattggatgctgaatcggagagggtggttcaggctgcactagatagagtgagtggtgaaccgaacaacggtggtggtggctcataggctatccacaatcaagaacgcggacgttatagccgtggttaaaaagggggctgctgtagagaaaggaaagcatgattccttgatcaacaatcaaagatggcttctatgcttccttaggtgcacttcatatgagtgcttccactgcataaaacctctttaaatatatatataaattttttttggtttttaagttttggt

SEQ ID NO: 197592 - DNA, 474 bp, Gossypium hirsutum
cccacgcgtccgaatagatcccgtcagggttgtgaatctacgtcggtaaagatcgaagaatatttcaaagcaaatgaaggcaaagaagttggaaatccattttcggaatttctggagaacttgaagagtagtgtggttgaggtggctaataaagcaactgatttcctccagtgtctctttactatacccattgcaggaatggagaaagaaaatggtggattgaactatctggagaagacgatcggagcaagcctaatgggattggcggtgatggctattatggttgtgcttttgaaacgagtctacaataaaagtatgtgagtctgctggatcaaaaaaaacaaaacaaaacattttcatttgacgggggtgataaattgcagtgctatcgtatattggcttgtataaatggatagtgatataataattaggatcgcttttgctgaagaataataatgcaaccttcgttgagac

SEQ ID NO: 197593 - DNA, 435 bp, Gossypium hirsutum
ggaagggccgggccgagcgacccgtaccatgtatgagaaaagcggtgctgatttagattctcgatctgaatttgctgcgaaagcccctgcaatgagcaggactagtattgcttataagttttcttctgattatatacttagggagcagtataagaatccttgggacgagatgaggatggggaaattgcttgaggatcttgatgctcttgctggtaccatctcctataagcactgtcgtaatggtgatggtgctacaaggcctatattattggctactgcttctgttgacacgatggttctgaagaaaccgatccgagttgattttgatttgaaaatatccggggctggtacatgggttgggaggtcatcaatggagtttcagctggaagtaactcaatctacgccagattctccagatccctctgattcagtagc

SEQ ID NO: 197594 - DNA, 610 bp, Gossypium hirsutum
tttggttttcgtttcgttgaaagcttcgttcgtgttcggttcgggtgttactcaaaaaggacatgttattacatccgtggaaactgccctttttgtttgttcaatggtgatgggggttgctcatataattgtggcatatagaacaagttgtagagaaagaaggaaactattggtttacaagattgacattgaagctatttcagcttgtaagagtgggttttcaagatacgagaagattctacaagacgaaagagtgaagcttcatttgaatttacgatgatattaacttcaacaggcttaaaaataacaataaaattaaatcaatggtgaaacatgccgcctagatacaaaagtgagatttatccaaaacaagtaccagctggaaatcatgagtagtatagaagtttaaaacccatatatacaaatacaccaaaattggtgtgtatatatatagatatattgaggcattctttcataattttgagtgtacagttttataatgaaattaatgctcaaaatagaaacggccaaaagcccttctacgaccctttttattgggtgagaatatatattcaatatttggaatttcaatgacatttcatattggtgg

SEQ ID NO: 197595 - DNA, 453 bp, Gossypium hirsutum
tggcagataagtttggccggacaaggacttttcaattagatgccattccgctaatcattggagcagttcttactgctatagcacagaatgtccagactatgataattggccgcttactggctggtataggtattggtataacatctgctattgtgccactttacatatctgagatctcaccaactgatatccgtggtgcacttggatctgtaaaccaactttttatatgtattgggattcttgcagcattggtggctggattacctttatcacggagcccagtatggtggaggggaatgtttggtcttgctgttatcccctcaattttattggctctaggaatgacatattccccagaaagtcctcggtggctgttccagcaagggaaaatttctgaagcagaaaaatctataggaacactatatgggaaagaaagagttcctgaggttatgt

SEQ ID NO: 197596 - DNA, 492 bp, Gossypium hirsutum
atgacgtaaaaaacaagaatgaacttcttgtcttgattcggaaatatattgaaggcattgctgttattgatctcaaggatgcatacccgaatgtgatggaggacttgcagggtctgaaagctgcagggcgggggtggctgctatcaaattttgattctcaggaggacattgccttcccaaatgatcccagggtgcctattaaggttgatgatgaccttaaagagctatttcggtctattgaattgccacgagacatgctcgacatcgaaaaagatctccaaaagaacggcatgaaacctgcgtactaccacagcaaaaaggaggcctgctgcacaaagtccaaggcattacctccaaacccaaacccagacagaaaaacaaagagttctccaagaaggccaagctaaccaatgcacatcttccagaacttttccagagtcttaaaaattcttgaagtcagttgcagatcttataagacctcgatgggctgct

SEQ ID NO: 197597 - DNA, 308 bp, Gossypium hirsutum
  unsure (1)..(308): unsure at all n locations
cccacgcgtccgaaaggatcacaagctacaaaagagcttgcttaacaggaagttcaacctcaccttaagcagactattgttattctgcgtggaaggaaattagcctctactgtactccagtgtagcgtagcatagcatagttatattaattttagaatgcttgcttttagtttgttcatacaggtgttgcaattaaaattattaagctgatattcaactgttaaattattctgtaatcataatgttccaagttgttagtcgtctaaagtacagtatatattgtttcnnnnnnnnnnnnnnnnnnnnnn

SEQ ID NO: 197598 - DNA, 524 bp, Gossypium hirsutum
  unsure (1)..(524): unsure at all n locations
cccacgcgtccgcggacggtgggtcaaaatctgcaaagggcttctccgcttcaccacaatttgttgatcgatcaatcacaaaagacaaatgtacggttcaaatatgtgatcaaatgtctagcaagctcaattatgatgatgaatggcagggaattcaacgcagcacgtttctggtagatggagatgctctaactaactcctctgatcaaaatgcaactgctggggcatctagccgcacctcatcagatacacgaagacgaaggtttgacccctcatcattccagcagcgtgctgaggcattggaaggattgcttgaatttagtgcaagattgctgcagcaagagaggtatgatgagcttggtgtgctactcaagccatttggacccggaaaggtgtcccctagggaaactgctatctggctgactaagagttttaaagagaatactgcaaagcaagaggattaacgctgatgaaccttcaccgnttgtatcatatccatagctgtaatctttaccaatttttta

SEQ ID NO: 197599 - DNA, 1111 bp, Gossypium hirsutum
aagttttttgagatgccaagacatgaggctgtcaatgctcttgatgtatacaagcaagctggtcagcaggctaatagcctttctgatttctacgaagtttgcaaaggattggaacttgctaggaacttccagtttcctgttctccgggagccgccgcaatcttttcttgctaccatggaagagtacattagagaggcgccacgtgtggtttctgttccaacagaaccggtgcttcaattaacatacagacctgaggaaggcccttctgaagatactaaatcacccaatgatgaacctgagccatctgctcctgctgatgacgttgcagcttccactgtcgagactgctccccctccccctcccccgcctcagaccaacttggacactggcgacttactgggattgaatgatgctgctcctaatgcctcggcaattgaggaaagtaacgctttagcactagccattgttccaactgaatctggtactgcctcagcatttaattctagtgccggccagcctgtggattttgatcctactggatgggaacttgcccttgtcactacaccaagcactgatatttctgcaccaactgaaagacaattggctggtggattggactcactcaccctcaacagtttatacgatgaagcagcgtatagagcttctcagcagcctgtatacgggactgcagcaccagaacccgtttgaggtacaagatccatttgcggtatcaaataacattgcaacccctacagtagttcaaatggcagcaatgggtcagcagcagaacaacccttttggttcctaccaacccacctatccgcagccgcatttggtgatgagcccatcaaatccttttggtgatgcagggttgggggcatttccagctaaccaaatggttccatttgctcaaccacatgcgaataatccatttggtggaagcacaggcctattgtagtgttaaatacgaagagttgatgggtgtgtattttggttgggagatgagaagagtgtgtagaaagcacctgtgttttgcacttgtatgggctgtaaaagccagcctgtggatatttaaagatgtaataataatttgttgctgccaccaattcat

SEQ ID NO: 197600 - DNA, 435 bp, Gossypium hirsutum
ccccaagagccatcgccagcctaccagactctaccaagggtagccccatcaaggtcccataccttaaccagccatggaaaaggatattgtccccgttggaatccaggcggatgcaggtgagagctgcacctgatcgcttatcggagaaggtggagcagagcatcaaggaagcacaagaggcgtgctcggatgacccggccagcggagagtgcgtggctgcttgggacgaggtggaagaactgagtgcagcagccagccacgccagggataggctgaaagataacgatcctctcgagaattactgccaagacaaccccgagacagatgaatgcaaaacttatgataattgaaactatgggttttttcttttaagtttatgaagatccttctgttttagatgatgaatatgggtgtaagactactcttatgtgaaac

SEQ ID NO: 197601 - DNA, 628 bp, Gossypium hirsutum
  unsure (1)..(628): unsure at all n locations
gggtttcccagtagcctactcagagcttcttcttccaagattgcttctccacacgctttctctccttgcttaccttcgcaaatttatttccactctcttcctctatttgggtctccccgatttcctcgaacccgacattccttggcgcgaatacgcccctgaaacccaccacgcttccgccgcccccgtctctgctctcctcatccgggaactcctacccgtcgtcaagttctccgacctcgtcgacccgccggagagctgcgccgtgtgcttgtacgacttcgaagggcaggatgagatcaggcggctgactaactgccgccatattttccatcggagctgtttggaccgttggatggggtatgatcagaaaacatgtccgctttgtagaacaagtattgttcctgatgatatgcaacaaacgtttaatgagaggctgtgggctgcctctgggatccctggagtctttggtgattattctcaaattactgctttgtagttatacctgtgcttcccaacaaaaaaaaaaatgcttttttgtttatcatcttataagagttggtttgtatatatacatgaaaatcccggaaattaccgccatgatcctncnncnagaaggagagatcat

SEQ ID NO: 197602 - DNA, 601 bp, Gossypium hirsutum
aaagaatataatcgcattggaggccaaacgagaccgattccttttctctgccagggagagagatttgagacgatgactgaaatttcaagaaatagatcgctccgtttcttactgtttttcgcttccgtttctctacactttatctcaggtttttctgatgactctaaaggttcaaacaacagctcaaagacaaaatctaatgcgattaataatactgggaccaaggtaatcttcatagtgcttggacttgttgcagttgggttgttttcatttttccttttcaagttgtggcaaaagaagaaacgagacgaacaatatgcccgtcttttgaagttgtttgaagaagatgatgagctcgaggtcgagcttggcctgcgggactagcagcacattgagaactgagctcgtcctaattgaggcttaaatggcaacaatggcttgtgtgttgtttaggaatctcatttttgtgaaggacaatgtcaggattttaggcatatgctgtggtgaggtctgataatttttcaaccttaaagttgtactatttgtaatgatatgttggaatttattatgaatttaagttttttgtggatgcttagaaatg

SEQ ID NO: 197603 - DNA, 549 bp, Gossypium hirsutum
  unsure (1)..(549): unsure at all n locations
gcgttatatctgtgaattgaaaatggatgatgatactcttaccaaagcaattatcgggaccattggtgatgttgatgcataccagctgccagatgctaaaggctatagcagtttggtacgatatttattggggattactgaggaagaaaggcaaaggagacgcgaagagatattatcaacgagcttaaaggatgtcaaggaatttgctgacgcctttgatgccgttaaagacaacggagttgccggtgcggtggcatcgccggacgatgtcgaaactgctaacaaggagcgcctgaactttttccaagtgaagaaagccctataaatatacacgtaagaatggcttcgatcctaaatcgatctcaataccatttctcaaattaagtgaacgatactcgaaaaacacattatttcaatctttgtcacactatgaatagttagacaggaagtccattgcatgaactcttattagttttttaaaatatcaaaggtataatacagacttttagccatttcgtataagtcaaggatttgtttggttnanaaaaa

SEQ ID NO: 197604 - DNA, 356 bp, Gossypium hirsutum
cttctccagctgtaggcgtacagccatctcatccgatttttgtggtacttgccccagttgtatcatttctattgcctagataccaagtcagtgtcaccaataagaagaacatgccactttgtagggacccagaggcgctggtggccaagtattcggatccactggtgtatacaggacctctccgagtgagaactggttatgaaattctgagaactacatcctacttgcagcagaatatgaacagattgagggttcctttgcttgttctccatggcaccgatgacactgtaactgatccctaagcttctcagaaactgtatgaagcagcttggctaacagacaaaacgatcaaattg

SEQ ID NO: 197605 - DNA, 1216 bp, Gossypium hirsutum
ccatccccaaaatcgatatcttcagattacttgatccatcaaagccctctccgaaaatccctactttcaagtttcgatccgatcgacgctgctgttgttccttctgccgattactgataaaggagaaatgccatcgcagaagattgaaactggccaccaggacacggtccatgatgtggccatggatttttatggtaagcgtattgctaccgcctcatcagacagcacaattaagatagttggggtgagcaacaacacacatcagcatttagcgactctgacaggtcaccagggaccagtatggcaggtggcttgggctcatccaaagtttggctctttacttgcttcttgttgttatgatggacgtgtgattatttggaaggaaggcaatcagaatgaatgggctcaggctcatgtatttgatgaccataagtcatctgttaattcaattgcttgggctcctcatgaactgggactttgtttggcatgtggttcttctgatggaaatatatcagttttcacagcaagggcagacgggggctgggatgtatcaaggattgatcaggctcacccagtgggggtaacatctgtttcatgggctccatcaacagcacccggtgctcttgttggttcgggtttgctggaccctgttcagaaactttgttctggtgggtgtgataacactgtaaaggtgtggaaactctacaatggaatctggaagatggactgctttccggctctccaaatgcatactgattgggtacgggatgttgcttgggcacccaatttggggctaccaaaatcgaccattgcaagcgcttcccaggatgggaaagtaattatatggacagtggccaaggaaggggatcagtgggaaggtaaagtattgcatgatttcggtacccctgtgtggagggtgtcgtggtcattgactggaaacatattggctgtggctgatgggaacaacaatgtgacgttgtggaaagaagctgtagatggggaatggcaacaggtgactgttgttgagccataatcttctaattttttttttattgtaatatttgcaatgttttatacagctgcatggttgaatcgtttatgcctggaaattctagaaccgaaattttcaacttgaactttttattggatgtagtttgcagacccatcatgttgttgttaaagaaaattatgagctacttgaaagagttaatttttt

SEQ ID NO: 197606 - DNA, 620 bp, Gossypium hirsutum
ctgagattttagggttaaattagtgaggagagaatgaggaagccttgctgtgataagcaagacacaaataaaggggcatggtctaagcaagaagatgagaagctcatcaattacattcgaattcatggcgaaggttgctggcgtactctccctcaggctgcagggctccttcgatgcggtaaaagttgtaggctgagatggataaattatctaaggcctgaccttaaaagaggcaactttactgaagatgaagaggatcttattatcaagcttcatgcactcttaggcaaccggtggtcgttgatagccggaagactacctggaagaaccgacaacgaggtgaagaattattggaactctcatctaagaaggaagcttataaacatggggatcgatcccaataaccatcgtttgatcactcacaatcatcttcctcgcccacatgatcccaatagtggtgcaagtataatatctcctgcttcaaaagttccagtcaccgataatactaatattcatccaccggagaaatccagaggtgacaatgatcaagtttcggatgctgcaagttccctggaggatcataagctccctgatttgaacctcgatctcaccatcagtgg

SEQ ID NO: 197607 - DNA, 508 bp, Gossypium hirsutum
atgtataagaaattgctatatgcaatcaatgaagggcaaggatcttttgatttgtcatgagtccaccgccgcaaggctaacgaacagaagagagttgtgtggtgttgtgttgaggcagtgtgtatatttctgaacagcacaatccgagggtcaatttttctcacctgctgcgagtatttttgatgttccaaagtagcatattgattttgctcaaataatggcatttctcttcactgctgcgtctccgttactagttttaatggggtgactatcttttccaacttcaaacttttctcaaatcctgcgtagacacaaatctgattttttcccctttagtatttctaatattttccccagttgcatgcgacttatatgctaaagcacggaagaatttagtaggatgttttttgttaaagcacttttgcattcagctgctagagctttgtatataaaattagggaggaaaatgaataaaataatgatgaaattgttattcctttttcttttt

SEQ ID NO: 197608 - DNA, 178 bp, Gossypium hirsutum
  unsure (1)..(178): unsure at all n locations
cccaaccctccggactttttctctattcgacttgtatcaaatttgtggctttgactattattattagtacttatgtctaagattcgaacacatctagacatggttatacagatatgaccttcaaatgtatgaaactcttattttcttgaaaaacttgaacaaaccgtgttagattnaa

SEQ ID NO: 197609 - DNA, 255 bp, Gossypium hirsutum
cccacgcgtccgcccacgcgtccggctcttcagagcaatgtcaactattgccgttgcttgttcaaaaatgtatggggagttaagggccatatcaccgttcaagggaatccacaatcatatgcttcattataaacttatatatgtatcgtgttaagacacatatttctatagtataaaagtgtgtccagatgcgctttatatggacacatctcgcacccacagaagggtatagagtgctctctaaagtggtgtgtt

SEQ ID NO: 197610 - DNA, 652 bp, Gossypium hirsutum
cccacgcgtccgagctgtttgcttactctctctcgtttgtttcaaaacccctagccgcttccttaaatctctgtgtctctctcataattttccttgttattcttccccttcaagtgaaagcattataatggcattctctagcaaacttggaagcctttttaggcaaaatgggcaaaccccaatgatatcttcgatgcttaattcacttcgttgcatgtcgacatcaaccaagaagcttttcattggaggtctttcatatggaactgatgaccaaagtctcagggaagcattctctggattcggtgacgttactgaagctcgggttatcgccgatagagacactgggaggtccaggggcttcggttttgttaactttgctgacgatgaatctgccagcaatgccttgtcagccatggatggacaagaactccaagggagaaatattcgagtaagttatgccaatgaaagacctagcggccctcgttcatttggcaacaatggtggtttcggtggcagtagaggctttggtggtggatccagagacgattcaagcttctaggcgcccgtaccatcatctgtccgcggacatgcctccatagctaataggcatttatttttgagaatgtgttcatttggtttcaaggatttgcta

SEQ ID NO: 197611 - DNA, 414 bp, Gossypium hirsutum
ggaaaatcgaatcacgaagctatgggcaatgaatggctgctaaacgggaactgtccgattgcaaagtcgtatagggcggtcagcggtgttttgccactagttgcgaaggttttgcagccgccaccggggatgaaatacaggtgcccacctgcagttgttgcagcccgggcagcactagcacaaaccgcatttgccaagaatctccgcccacaatccttacccacaaaagtactggtgatcggggtgttaggcatggcggcaaatgttccgttagggatatggcgggaacacactgaaaaattctcaccatcttggtttgtggctatccatgcagctgttccattcatagccatgctccggaaatcagtgttgatgccaaagacagctatggcatttaccattgcagcgtctgta

SEQ ID NO: 197612 - DNA, 824 bp, Gossypium hirsutum
tcgttgttgtacggctcatgggacgtgcagcttcacacattactttggagtgtgctttgcagactcatcctaacattactattattggagaagaggttgctgccaagaagctgacccttaaaaacgtaacagactacatggttgatgtcatttgcaaacgtgctgaacttggttataactatggagttattctcattcctgaaggtcttattgacttcattcctgaggtccagcagcttattgctgaacttaatgaaattctggcacatgatgttgttgatgaaaatggcctatggaaaaagaaacttaccgatcaatctctgaagctttttgagttcttacctcaagcaattcaagaacaattgatgcttgaaagggatccccatggaaatgttcaggtcgccaaaatagaaacagagaaaatgctcattcaaatggttgaaaccgaattggaaaagaggaagcaggaaggttcttataaagccaattttaaaggacagtcacacttcttcggatatgaaggtcggtgtggtttgcctactaactttgatgcgtcatactgctatgctttgggctatggtgctggtgctctcctccacagtggaaaaaccggattgatatcatcagtaggaaatttgtgtgccccagttgaagaatggactgttggagggactgcccttacatcaatgatggatgtggagaggaggcatggtaaattcaagcctgttatcaagaaggcaatggtagaattggatggtgcaccattcaaaaaatttgcttccttgcgggaagagtgggccattaaaaactgctacattagtccg

SEQ ID NO: 197613 - DNA, 402 bp, Gossypium hirsutum
  unsure (1)..(402): unsure at all n locations
cccacgcgtccgcccacgcgtccgaaattttctgaggacgtttatatgcataaagagctgataccatcaaatgacagtcttacttttggagagtattcagagatgctccttgacaaatattaccacaggaaaacataaagaactgtaaatattttcctcttttaccaactttaatctttattttatcctataacgctataggtacactctaaaatacaataatcaataatattgctttgtaaacttcatgttattttcnaaaaaaaaaaannataantaataaaatattaaataaaataaaaatttaaaaaaaattttnttaaataaaaattattatttttatttattaaatttttttaaaaattattaaaaattttaatttataaattattttttaataat

SEQ ID NO: 197614 - DNA, 447 bp, Gossypium hirsutum
  unsure (1)..(447): unsure at all n locations
tcccacgcgtccggcaaggcattgaacattacgggcgggtttgtcgatgatttcctctctcatttgatgtgctgttgttgtgccctcgttcaagaatggcgagaggtagagattcgtgggatttacggtcctgagaagactaaaacaagtcctccaccatcacagttcatggaatcatgagtgaaaaaagtactgaagagacattttcttgggaggtttgtataaaagctgaacatagaaggtaactctagttgccacttattaaattgaacctgtactaaaagattgcttttctctttgaacctacatacacatatatattgtatttgtatgtaaattagtgagattattaatggagactgaacatatgttgttgttgtatgagaaactgattttcatttagtatagtggtttttggataaaaaaaaaaaaaaaaaaannnnnnnn

SEQ ID NO: 197615 - DNA, 455 bp, Gossypium hirsutum
  unsure (1)..(455): unsure at all n locations
cttcttttgtctctttttttttaaacacagagaccacattttgaaacaaaaatggcatgccaacttgttgttctttctttggttttgatttttctcgccggtgtcgtttctaccgacgcctcatctgccagtggcagcactgcaagtgcaccagctggagcttctacagttggcagtactgctagttcctcccctacacgcgtccgtaccaatccaggtcttagcgatggtatccctattgatgacccatagaatgattgtcaacgaaatgtcgataaatcattaaacaaattgcaatttaaaagaatagtgaggttttggaaaataaataattagttctataaatagaatgttatgtttttcattaagtttatgaactgattttcnnnnnnnnnnnnnnnnnnnnnnnnnnnnnnnnnnnnnnnnnnnnnnnnnnnnnnnnnnnnnnnnnnnnn

SEQ ID NO: 197616 - DNA, 507 bp, Gossypium hirsutum
ttcacaaatgagaaaaggattcaacagagattagctttgtatcaaggagtatgtcccatatatatggagttctcggatgatgctgaagaaacctttaaaactgctttagctttgttgcagaagcaaggaatggcgaaggaaggagaagaggcagctcttgttcagagcgggagacagccgatctggcgattccagtccacacacaatattctggtacgcaaagtgtagcggctgaagaaagacaaagaggagcccatttgacccagttttatacttcctcccgagagtttctgagaagagtatgcgatactccctcacgtcatgttagtcataggatctatggctgtatgtctcctattagtttggtttgcttgagatatattggtatatgcaactattagttattgttttcttttctttttaaaagtttccccccaaacaagatattttagaggatcctaattttgtatccaaagattggcggagcatgaaatatgatatattgag

SEQ ID NO: 197617 - DNA, 357 bp, Gossypium hirsutum
accgggaaggaattgccgggaccgacgcagtcgtgccacccaaagaggaaaaaaagaagcagttgatgcagaagaaacagaagaagagagattcaacaaccccaaagccgaaacatgagaaattagaaaagctagaagcccttagtaagcggctacgcctttgcatcctaaaacgggtaagtcaccggaggccgcgttccacgtgagtgaccccaggaaacattaagctgttctttttcttgtttctagtattttcagtatgaagtgttccaagtcattttaaactcgaagcataattatgcggatttccgagctttactttgataatgtaaatgcagcatccacgtatttaaattg

SEQ ID NO: 197618 - DNA, 469 bp, Gossypium hirsutum
  unsure (1)..(469): unsure at all n locations
ccatcttgttaatcagttcaagggttgaaaccgatacttttgattctgctttgttcctccaggagcgtgaaaagaaagcaaagaagaaggcagcagcagcatctgcaagcagcgcaaatgttgaggaaccaaccgaaactgttgcagaggttccagaaccagagaaagatgttaatgctgaggaacctgttcctgcccccgttccggtgaagaataaagttcagaaggagaatacagtaaggtacaagaatcgaagtagagcacgggagtcacttcctagacctgtcctgaaacgtaagaagtcgaccaactactggatatgggcggctcctgctgcggttgtggtgctgatacttatagctttggcttactattatcttgtttgaagaagttaaactgagagttatagacaaagtttatgggttgatagtgggaaaaagtagttaaatttggttggatgcatnccatg

SEQ ID NO: 197619 - DNA, 756 bp, Gossypium hirsutum
gaaagaaactgagaaaattacacaacaattggaataatcctcaccaagtgcatctaaatatggtgaggattattccaattgttgccaaggtactgcattctttcctttgcaaagctgcatgaaccattcttgttgtcctaatgcaaaagcattcaaaagagaagaggatagagatggccaagcgacaattattgccctccggcctatttgcaatggagaggaggtgaccatttcatacatagacgaggaccttccatttgaagagagacaagcattgcttgcggattacggttttagatgcaggtgccctaggtgtttagatgaagaaccctagaccctaaattgccaatgaagtggttgtttcatagcattcggaaacataaaccagaaacatctctatgagaaatattaaatgttagtacaagaagctatggaaggagctgttccccctttggatctctatgccattagattgcagattcattagcctgctcagaggccaactcgaggtgtgatcagattttctctggttccgttaatttatttaatttaagacgaaagtactattatgggtataattaggcacttaatttttcttctaccatcttcttgtgtgcaatatgttacttttcgttatggtgtcagaaacagttttgtattctctttccactgaaaccataatttgtctctggatcaagtgtgttttcgcgtctgatatgttatatttatttgaaatcatataaattttgattttga

SEQ ID NO: 197620 - DNA, 606 bp, Gossypium hirsutum
cccacgcgtccgtgtctttgcagtggagttttttttgacgagggatggtcaggtgtagatcggccatctttatgagttgggtattccactcctagatggccagcaataattcagcaattctgcctttgactgaccttctttgtttctattagattctactaaatgaagtagctccaagacctcataatagtggtcatcacactattgagtcctgctatacatcacagtttgaacagcatttgcgggctgttgttggtcttcctctcggtgatccatccatgaaaactccagctgctatcatgtacaatctactgggtgaggatgaaggggagccaggtttcagagtggctcatcaacttatagcaagggcactggagattccaggagctactgctcattggtatgataagccagaaatgcgaaggcaaaggaagatgggtcatataactctttgtggcccttcttgtggtattttagaagtacggctgaaatcaatgctgagggaagaagggtatgaaaatccaaatgaagttgcaccacgtgttgggattgtaatgggttcggattcagatcttccggttttgaaggatgcagctagaatcttaa

SEQ ID NO: 197621 - DNA, 431 bp, Gossypium hirsutum
  unsure (1)..(431): unsure at all n locations
gaaaaggcgaccttgacaaggggtgagctgttctaacacccaggtaagccactgtacgaagtccatgctctggttcattataatattctgaagtgatagttgtaataggcccatttgcccggcccgtaaaccaaatcaaaatataaacaaaataaaaattaataacagtccagaaatagtccatatacctaggcccaaattgtttttaacccactagcctatcccaatttcctcaatccagttagcctaacacttaacccggacccaaggcataacgcagcccaaaacaaaaatcagaagcaggaaacactagaaaaccctgngcgctgcatgactgcacagccagcacactctcctctcgtgcgtgtgcgaccacaccttcgagccgctcctcacacgtgcctctgtacgatcatgtacctacaaatgac

SEQ ID NO: 197622 - DNA, 515 bp, Gossypium hirsutum
gaaaattcttttccaaagctactttaaggtccctgtgtaaccagactccgcggcgatgaatagcgtgtgatatttgagcccgatagccagattggttgatcataaaaataatcatgtggtttattcacagatttattttttctttttcctcccccaccccctttttttggcttgtatttttgctctaggaggcatggatatggtggtataagagcgcagccttgatgtcaaacactggatattgctgagttagcatgcagcactatatttacttggattcatgtgtgcgtgattgatactaatatttttctaacatgactgtgttcaatttttcattttcatgatttggagagtttagagggtatttgtttgtggtttagatatatcaagaaaaatgaagagtcgaagcaatattttagttatttttttaaacgtgtttggagggcctctaaaggatatctaggaccatgttcggaatgtgacgaatcagacatttttaacctaattctctaaac

SEQ ID NO: 197623 - DNA, 620 bp, Gossypium hirsutum
cccactcgtccgaaattttccattcatataaccaacccttagagaacaacatcaccccatttctttttaattactgcttcttgttctcttccttctcacgtaccccaccaatatcaataatggcacgccaaagctttgttcttgctttggtctttatagctcttgtcgggttggtttccgccgccaatacagcttctaaagcaccatctgcagtcccagtacccgatgatgataccatcggcaacactgatgatggagcaggtgcatcctcccccggtgcttctaatgacgctgttgctgcccctcttggcagtgagcaggaagctaaaagcatggctcctgctccttctagtgatgcaaccaccacaggtgtctctgccgttggggcggctgctctcactggggcagctgccattgctacctacttcgtcttctaaattagcttcgtctcaatccaagtagtaaacctcgaaaaagggtcttattatccataatttgtacgtctactttaatttcatagtctggtaaaattgaggtctgcaaaagcagctgcttgtatttgtttatgaataaaactaatgaatatatatacctaaataggaaaaaaaaaaaaaaaaaaa

SEQ ID NO: 197624 - DNA, 409 bp, Gossypium hirsutum
ggtggtaattaaatcgaaagggtccaaaatgattccgtaacttgtgcatcaagtaactataagcaagagaaagaatagaaaataaagagagtgcaaagaataggcagttagttaggttaggttagtgccacagcttctcaaatggagggctttggctaaagctgttgtccattgttgtagttgtttaagtggggttattgacccctgtaaattagtgacactataagatggttaaaggtttcgaaattcttggggtcgggttcggatcggtagggtgaaatttctagcctgtgccgccgggcttttaaccggatatgggcaccggagaaaatgatctttgttggtgtgattgattgattgatttctgtttgaatgagtgggggaaaattgaacttcctatacaaggttc

SEQ ID NO: 197625 - DNA, 546 bp, Gossypium hirsutum
cccacgcgtccgggaagataacccttgtgcagggtctggccttggtcatggtaactttgctatggactggaaccatggctcaatcagactgcaccagtgtgataatcacgatggctccatgcgttgattatgtgactggaacctcctcaaccccatctgttccatgctgctcacagcttgctaacgttgttcaattacagccacattgcctttgcatggccctcagtggtggaggttcatcactgggtgtggaagtaaaccagacacttgcccttgcactccctcaactttgccatgtcaaaaccccacctgagagcaactgcaaagctgctgatggacctgctgtaatttcaatatctccatctggttcacctcaaggtttaccaccccattcaaatgataccccaggcagcaactcatcaacatcaggtggatctagaacaattgcagctactgccagtgatgttatcttcaacatgtcccttcagttcatcctgttcttgcagcccattgctttgttttcttcaacttggaccaccatctcct

SEQ ID NO: 197626 - DNA, 687 bp, Gossypium hirsutum
tccacgcgtccggagattttaacgatgcttaatgtcctgtgtcgccaaccaactgcttcaaaatattaaaagctatcatcacaaatatcatacatacggctcccagatctgctcttacctctcaattccagtataaaaggtaagggtttctaaaatatcaacgagaaaaaaaaccgtgaatactgtgatggcctctgagagggaagtttttggtctttcgggtccattacacctaaccaatatagattggaataatgcacatcatcgaaggtcagtagcagccagtttggttgagggtgtgtatatcttggagcgagaccgtcaggaaaaacgtgaaggttctcaagcattggctcctccctggtgggagttctttcattttaagttggttcgtaagctgattgatgatgttgatttttgcatctttggtgctatttacgagtataagcctccatcgtctcattgtaatgactcaatagtctcaattgatggaaatccccgctatgtgattgcgttccgaggtaccataactaaaccagactccttcacaagagactttgagttggatatccacataatgcgaaatggactccaccagacatctcgctttgagattggcatgcaagctgttcgaaacatggttgctactgtaagtgcttcgaatgtctggttagctggccattccct

SEQ ID NO: 197627 - DNA, 492 bp, Gossypium hirsutum
gctattcgtaaggcatgtccctaattggagccaaattatcagcctcctgttacatttgttgtggtgcaaaaaaggcatcatacaaggttgtttgctaacaatcataatgatcgccgttctgtagacaggagtgggaatattttgcctggcactgtggtggactccaaaatttgtcacccaacggagtttgacttctacttatgcagccatgctgggattcagggtacaagccgtccagctcattaccatgtgctatgggatgagaacaagtttacagctgatgcattacagtcccttacaaataacctttgctatacatatgcaaggtgcacacgatcagtgtcgattgttccccctgcgtactacgcacatcttgctgcattccgagctcgcttttatatggaaccagaaacatcagacagtggatcaatgacaagtggcacagctgcagggcgtggaggtggagctgcagctgctggtgggcgtagcaca

SEQ ID NO: 197628 - DNA, 595 bp, Gossypium hirsutum
gctagggctaagaaagaggcagaacacaaggcaaatgctgagaaatcaactggagcagagtcttctgctgctgctaatactggaaaagggaaatcatctactgagaaggatggagaagccatgcaggttgatagccctccagagaagaaatccgagcctgagccatcatttgagattttgaccaacccagcacgagcggttcctgctcaggagaaggtcatcaagtttttagaagacagtcgatatgtgcctgtgaagttggcaccatccggattcgttcttctcagagacctgtgccctaatgaaccggaggtgctctctctaacagatgcacccacatccacggcatccccggctggtggatcaacagcagctgcaggacaacagagttcatcagccatggccgttgatgatgaacctcagccgcctcagccattcgagtactcatcctgattttacccaatcctgaaactgaaacagggccaagaatacttttatacttgagcagtgccttttgacattacagctgttcaacctagagtgaaactagaactgatgctcgattcctatcctcaacttagggagattctgagtt

SEQ ID NO: 197629 - DNA, 758 bp, Gossypium hirsutum
tttctttcgcgtgggtaaattctgtttgtgtgggcagggcaattgtttgtataattagaggagaaaaatgggtgttttcacaaaagaagcagaggtgagtaccccactcccaccagccaaggctttcaaggcctttgctgtagatatcgaaaacctaatgcccaaagttgccccacaaacagtcaagagcatcgaggtccttgaaggaaatggtggccctggtactatcaggaagatcacctttgctgaagggcatggattaagtcatgcgaaacacaaggttgatgtattagacaaagacaacttggtgtacgcttacactgtgatggaaagcgatttttttaacaagaagatcgagaaaatcagttacgacatcaagtttgttgcagcagctgatggagggtcaactgttaaggtagctgccacgttttacaccgccggtgacactgaggtcactcccgacttaatggcccagatcaaggaagcttccgagaagcgagcccttgttatgaaggctattgaaagttacatcttggcaaatcccgatgcctaaaactgtgctttcatggcgttaatggtgtgtggtttggttatttcatatgttgtgttactcaaaagcagtgtttgattgggtaataagtgatttgtctctctagatttgatcatctctatttctattggaataaaagtctttggagttgttattatgtttgatatatgagagtgaagaatatacttgcaggtttaaaaaaaaaaaa

SEQ ID NO: 197630 - DNA, 422 bp, Gossypium hirsutum
atcacaggatcagcctacttgtgcagatgccaccaccaatggaccagatgaagttgctgggactgagcagaccgaggaggatgcatctgccgttgatgtgaaagagcggctaaagaaggtggcgtctatgaagaagaagaaatctagtaaagagatggatgctgccgcaaaagctgccgcacaagaagcagctgcaaggagtgcaaggctagctgcagcaaagaagaaagagaagaaccattacaaccaacagccagtgcggtaaaaacaaatcccgttcttatatatatatatatttgagatatgaacatgtattttattgttgttcatatgacaatatgaaataaacagtgggctttggttcagtgaaaatggtgacattttagttggatttgaatgaactaaaacgaaaattttaaatt

SEQ ID NO: 197631 - DNA, 593 bp, Gossypium hirsutum
tttctttgtacgggtgaatctcaatactcatctccagaaaggaagtacggttcaacactgaagagcaacgaggcaagtctcgccaacattttaatttcatctgttcctcagtgtggcgagggctgcatttggaaagccgatttaataataagctttggagtatggtgcattcatcggatccttgatctttcgctgatggaaagccgacccgagctgtggggaaaatacacttatgatcttaatcgtctccagggtatcatagatccggcattttcgaaaccccgttccccaatgttatcctgcttctgccttcaaatcccggcagattaccagcaaaggtcgagtcctccagtttcaaacggaatgttgcccccaaccgcgaaacctggccggggcaagtgtacgaatgcagccacactcttggatataatcaaggacgtggagatcgctatttcttgccggaaaggtcgatcgggcactgctgccggcgacgtagctttcccgaggggaaaagagaacttggcttctgttcttaaacgctacaaacgcagattgtccaatctagttggcacacatgaaggcctcggttcaca

SEQ ID NO: 197632 - DNA, 285 bp, Gossypium hirsutum
cccacgcgtccgcccactcgtccgcccacgcgtccgcccacgcgtccggtaaacttgctttggaaccaaggtttattatgatatagctatgctaatggcattgaatccaaaaagtatcaaccaatatcagtttaagattatttattttgtcgcatttagtttgtgcactatgatctttgtccaaggggaagcttttatgtttccactctatccaaaatagcttgctggtgtaagttgatatgcttaggctttcatagcctttatataataaaaatttctttctgc

SEQ ID NO: 197633 - DNA, 333 bp, Gossypium hirsutum
cccacgcgtccggtgctagtataataagtaatgatatttttggagtgcattttaaagaaatgggcaaacttttgtgcttattagataagttccccccccgcgtccggccaatcatggggggtatctgtagctcaaaatattggtaactttgggataatatttatctcttgcatagagagtaacttatggagctgcttctttgtttgttggtcgcttatatgcgttataggtcgctattaagcatattttgttatgtttggaattgcttaatccttttattttattttctttggctctaatttgtttcattttattgtattttatggttttatt

SEQ ID NO: 197634 - DNA, 471 bp, Gossypium hirsutum
cccacgcgtccgcccacgcgtccggccgcacatgtgaaggcaaagttcataatagaggcagcaaaccatcctacagatccagaagcagatgagattctatcaaagaaaggagtaataatactacccgatatatatgcaaatgcaggaggggtgactgtcagctactttgagtgggttcagaacatccaaggtttcatgtgggatgaggagaaagtgaaccaggagctgaagaaatacatgactaaagcttttcataacatcaagaacatgtgccagtcgcacgactgcaatctccggatgggtgcatttacacttggggtgaaccgtgttgcccgtgcaactatcctgagaggatgggaagcataaacgcctcccttccggcttttatttctcttagtttatagtctccattgaaaagcacaagcaataactttcaagaattcttagcttacccctccaaagcttttttta

SEQ ID NO: 197635 - DNA, 563 bp, Gossypium hirsutum
aattcggcacgagatggtaagatgtctccaccatccaaggatgaagatgagagtggggaagaagaggaggaagatgatgaacaggtgccacttgtggcttgtggagatagcaatggaacagatgaattctggatttgcgatatctgtgagagatggtccatgcaatgtgtgaagattacacctgcaaaggctgagcacatcaagcagtgcaagtgcccaagctgcagtagcaagagggctagagtttgaaagtagtaggttcagaaattgggctttaaatctatttaaaacgaaacagacaaggttggttttatagcctttttcgttacagtttagaagtaaaacagagcttggtccgtttagttgatgaatgaattttatgactgcatatgggatttaatgttttgctactctttgttcctgctttgtttaatttttattgacaatcgtgttctaaactgatgctggtttctatatttactttattatgcatacatatacacgaacacaagggaactacttatttattatatcaattggaactattatctgtattaatggtc

SEQ ID NO: 197636 - DNA, 426 bp, Gossypium hirsutum
gtcgattaggtttttttcatgtcgtcaacaatgactacactcattggttcatgtatgccattggcggtagtagccaccctacaattatcagccagggcaataggtatattgcgtcaagcatctatgtaactaagcaagcgaccagtaggggctacttatcaccggaacagtggaagaattggaactgggtatcacagggtgaccacttcatgaacggtgcctattttactacatccggtgatcctaatgccagcaagctattcgatgctgacaaaataatgtctttccaacccggtcgattggtccccagactcacaaggtatgccggaacactccactgcagaattggtcgcccttgttaaaaacattattttgatatgcatacatcctctctttttggtatgtacaacattagatacccgtgca

SEQ ID NO: 197637 - DNA, 492 bp, Gossypium hirsutum
cgccatttctccaaaatagtagacggtcgccgccctgcccctcagggcttccttgcagagtgttatttgtatcgagcctatgcttacaaggcctcaggtcgcatagctgagtcaatctcggattgcaacaaaacgcttgctcttgatccaactagcatccaggcccttgacaccagggcatcgcttttggaaaccatccgctgtttacccgactgtttgcacgactttgaacacttgaaactgctttacaattccatcttgcgagacaggaagctcccaggtccagcctggaagcgtcacaatgtgagatacagggagattccagggaaactctgtgcattaaccactaaaattcgacaattgaaacaaaggattgcttctggggagaccggaaacgttgattaccatgccttgattggtttaaggcgtggatgctcaatgtctgaattagagagggctcatttgctactctggttaagacacaaaccagat

SEQ ID NO: 197638 - DNA, 288 bp, Gossypium hirsutum
cgtatcgcgtgggtcaacaatgcctgttcttgggtccttggttggagccacccttgtttctttctttgcctactatttgcagtaagccagcatgaatatacgaaagcatgaagtgttgaagaataaaaaatggtggattaataaatgtaaaatattactcggggttcaatccattttacttgcttttcttccttctttttttgttcatcacttcatttgtacgttcatcaaaaaagttgaattccatgtgatactttgcagttgaaaaaaaaaaaagttatatatttt

SEQ ID NO: 197639 - DNA, 619 bp, Gossypium hirsutum
tcttatggaatttggagattttaagcttaccatatggggaatgctcggaacttatggctttgaaagaagaattctggatactgcaaaatctttgattgaggatgacacattttacacaatggagcttactgaagaatgggagccttctcattggattatgcaccatcgaagttcattatgttgtatatgcaacagccttcttaccaagacctcttctagctttcgtgttcgggttttcagttgtggtcacgcaactcatattcaatgtgagcttctggaaaacgagtcatcaactagaggcttgtcatctggatgccctgtttgtttgcccaagaaaaacactcacaaatctagaagtaaaaccgctcttacagagaatggtttagttagttcgttgccctcaagatcccaaccagcacatggatcaacattacaccctcacgaaaacgacgcactagataactcttacggccttcaacaaatatcacggtttgaaattttaagtaaccttcaaaaagaccagagattagcccagatagaaaatttaccacagttgaggcttgcaccgtcggcgatttatcacgaaaaagtgaagaaaggaagtggagtattagcagca

SEQ ID NO: 197640 - DNA, 405 bp, Gossypium hirsutum
ggaagagcacaaaaagttggtggagaagatcataaaacgagacacaaaacgtacaaagaggatcgaggctgctggcatcgattatgaatgcccagaaattgtgggtagcggtcagtctgctccaaagaagataaagttcgacgaagattaggcaccattaagttctactaccaaatgctgactatgaaggtaatggcttacacaatatagtcctcctgagatgctaaaaaattgcaagtttaatgtgtagctgagctggtgacaagctgtattgcctttggctctgcaacaagtaggaaggtttatatttataatgtcggatcctgttaagaccagacctcctgttggaatcaaattttgttatatgtaatttcaatcaatgttgttttttatatgctctgagtg

SEQ ID NO: 197641 - DNA, 412 bp, Gossypium hirsutum
catagttgcagttaagattaaaggctcaagaacagggtggttaccgatggggcggaattggggacaaaattggcatataaattctgatctaaggaatcaaccactttcatttgaggtcactaatagtgatggtcttacacttacatcttacaatgttgctcctaaaaattggaactttggccaaacttttgaaggaaagcaattcgaggtctaagatgaaagaaaagcatcatcatcaacacaatgtaatgttgggtattatttattttatatatatagaccagactgtcctattcttttctttctttttgtttatctgttgttttgtactgattggggatggaaatggaagggtagaattggcgacttttttattgtgtgtaaggacttaaaatagcaggatatatcaatt

SEQ ID NO: 197642 - DNA, 979 bp, Gossypium hirsutum
attcaacatctatttgtcaattcccattcaacattctctttcggccgcgctctcatttatgttaatataaaactgttgctgttgaaaatatagctgaaaatccccattaaactatgtcccagaaggccaggagatgctacagctgtttatgtttccactgaaaaagctcaaaaagaacttggttggaaagcaaaatatggtatagcagagatgtgcagagatcagtggaagtgggcaagcaacaatccatggggataccagtcaaagccttaggctgcaactaaatactaattttcttccctagtcttttaaaaatgtctcatagggagaattaagtgtacaaatacttgtttaatttaaacaaaactgatctttgatgatcaaaagttaggatttatcaaatgttcaaagatcttataaaattcctttgtgttacatttataagtctttgtaagagtgatgtttttatcatttctggagtttaaaaaacgaatggctttaaattgaccgtgaggagttgacctaaacaagatccctttcagctttgatcttcaatcttatccattgatttgtctcaccaaccatgctcagctcactgataggaggtacttcaatgctcattctaaagaacaaacgtcagctctgaaattttctagtaaattcagtattggccaaatgccaaccatgacttagaggaaattttccttgtaagtcccatgaattatcactatttttatttattgaaagatctctatatttataaattcccatcttaataaatatgtttaattactatttataatgtacattcatttgctttataggaagatagttgtactaaaaatggatccatatatctaactgtgtatttaatgaaattagtttggttatattatatgtctattctgtggattcctgtgcatattatttgtatttcattaacatgtcatcattttcttatatttttgaggtatataag

SEQ ID NO: 197643 - DNA, 444 bp, Gossypium hirsutum
aaaaaccagaactgccaagtactgattctggtcacatggagccaggggtgcctaaaccagttttgaatggtgataaggcagaagagaccgacaccgagactgatcagataaatccaatggatgtagttgaagattcattgcggtctcttgatgatgcagcagaggcagttggtttgcctgctgacgaggaaaactcaaatgatataaacaaaaccgaaggtaatagttctgtgtactgtgccgaggaaagacatgcttttggcgatgcaattagtggttccttaaatggttctcctaaggtatcaggggctttgattcccgggtcaaatgagtctgggtcggagtccgtaattttaactcggatacatcattctcctgaaaatacacattgagacaatttctatatccatgttctttttataatgcgcccaaaaaaaaaaataa

SEQ ID NO: 197644 - DNA, 947 bp, Gossypium hirsutum
  unsure (1)..(947): unsure at all n locations
ggaaaaccctccaactccaatcgtcatcaatgaatcatatcccaaaccatttcatcaatttcccctcccaaagctcatccttccaccctcctatataacccacataactaagttaatctgagggagacgagaaagttgtaagatataagagcaaaatggaagctgctgtagcatcgaaaccagtaattaaagttgctgccatttgtgggtctttaaggaaagcctctaacaacagaggcttaattcgaaccgctttggagcttaccaaggagtccattgctgggattcaaatggaatacatagacatttcaccacttccaatgctagatacagatctggaagttgatggcaagtttccccctgcggttgaggctttcaggcagaagattttggagtctgatagcatcctttttgcttcccctgaatacaacttttctcttactgcgcctctgaagaatgcacttgactgggcttcaagaccaccaaatgtatgggcagataaagcggctgccatcgtaagcgccggaggaggctttggtggtgcgcgatcacattatcatcttcgccaagttggggttttccttgatctacatttcatcaataaacccgagttttacttgaatgcgtttcagcctccggctaagttcgatagcgatggcaaccttattgacgaggattccaaggagagaatgaagcaagttcttctttccttgcaagcatttaccctccgactccaacctaaaaactgagtaaactaatcaagtgtttcagtcttttcccaattcttccattgttattgtgatggattnnnnnnnnnnnnnnnnnnnnnnnnnnnnnnnnnnnnnnnnnnnnnnnnnnnnnnnnnnnnnnnnnnnnnnnnnnnnnnnnnnnnnnnnnnnnnnnnnnnnnnnnnnnnnnnnnnnnnnnnnnnnnnnnnnnnnnnnnnn

SEQ ID NO: 197645 - DNA, 433 bp, Gossypium hirsutum
cccacgcgtccgcactaaccagcaggctcaatctatggggttgtttcagccattggaatgcaatccaactttgcagatagggtactgcaatcctgttgcttcagaccagatggctgcaacaactcatgctccgcaagtcaatgggtttatccctggatggatgcgtctaaattttttggtttcagcaatgtggtcaatggccacaaactagtagccaaaaatgcttcttgatgttggaaaatgtgtaaaaatagtttcaagagcatatgcataatatactgcattgacataaacactactgcagtgactgaatttgctggtaagactattgagaccttgagccacagacaaaaggcatgtgattgattaagtttatatatatgacaatggaatacttgacaaaaagctttatatattaaaattatggtcaaaa

SEQ ID NO: 197646 - DNA, 410 bp, Gossypium hirsutum
tcgtcacactttgtagggcccaatctgcaattaaaccctttagtatatggtactatctatgccttcccttttctgtcttccctttatggctccaattttctcttcgtttcttgctttaactctcatttttccattaagcaatgctcaaggtccaccttcccctggattctccccaagctccagagtgagcactgtggcttttgataaagggtttcgaaacctctggggtcctcagcaccaaaaactagaccagggctcattaacagtctggctcgataaaagctcagggagtggtttcaagtcacttcgttcgtaccagtcaggttactttggtgctgcaatgaaactccaacctggttatacagcaggagtgattacatctttctatctttcaaacaatgaagaacacc

SEQ ID NO: 197647 - DNA, 481 bp, Gossypium hirsutum
gaataagaacatagaaaaaaatgcgaatcaccttcggtaaactgtttttttaattgattgtttttcaatccgtccccctatttacaatccgtttccccctttttgaattaggaaaacccccccttacaatcggttctcccctaaagctttagagccgatagtcctctttacatttcgttattgtttctctgctatatcctttgttgtttgcacatggtttttgtctttttgtgtcttcttttcttgcttgtttgcaggctttgaggggtgtcagacgcgtggaggagaggggcatgcgtggggaggccagtggtggaagcgcgtgctcgtgggaggagcggcagctgaagaggaggctagggtttgggtggctactgaaaaagttaagatagtgggctgatttgggctttagggtttcaggttattgggcttattctgtatttatttatttggcttattgggcttgcaactcggtaatggg

SEQ ID NO: 197648 - DNA, 1032 bp, Gossypium hirsutum
  unsure (1)..(1032): unsure at all n locations
cggacgcgtcgcgtcatgggttatcttcaacaatttatcttctttattctggttgctctgccattcatgtttatttctccaactcattcctctttagctaatggtaatgttaatatattgcctcctaccaatacaagcgataaggtcactttggctctgtactatgaaactttatgcccatattgtgccgactttatcacaaatgaccttgtaaaggtcttcctcagcgatctgtataccattgtcaatctaaaattagtcccttggggcaatgctgacattcttggcgatgaaccccattgccagcatggagaagatgaatgctacttaaatactatacatagctgtgtcatctactactggcctgatgtgaaaaagcactttgattttattcgctgcacggagcaacaaagctcaaagaaaccgctggtcaagaacagagcagcaatgtggaaacaatgcagtgaaaagctgggaatgagtgctcacagaatcaacaaatgctatacttctggatatggacttaagcttctgctacaatatgctaatgagactgcaaagctaaagccaccccatgagtatgtgccatgggtggtggtggataatcagccactcaaagatgactttgaaaattttgtgaaatatgtctgtgaagcttataaaggtgccgataaaccagaagcatgcaaaacacaagcaaccagtgtcagctcaacccatgataagatggcaaacagaatacatccaggatgctatgctagtgaaattgcaaatttgggatagaaccttgaaagaggccagaacttgtgctttgtccattacagctgcttcacaattcaccaacggcatgtaataaaaccagcctctagttatcattatcgttgatatcttttacatatatgacatgttacaggtgatatgtttacggtgtcttctattctatgaatgaaagatcaacatccttttgtttgggnnnnnnnnnnnnnnnnnnnnnnnnnnnnnnnnnnnnnnnnnnnnnnnnnnnnnnnnnnn

SEQ ID NO: 197649 - DNA, 408 bp, Gossypium hirsutum
  unsure (1)..(408): unsure at all n locations
tccacgcgtccgggttgcttgagttgcagccacgacattgtggactatatgtagcattgtctaccatgaatgccgacaaggagagatgggatcgtgcagctgacttgaggaaagccatggtggaagcaggcttcagaaaagttccagcttatagcttcattgatcccatgtaaaaatcgtgtgaaaacagaagatgtctctattctttaactaatcacatgcattctgcagcagcaatatcgatggtaaatgctaatcaaaatattagagaattcattcttagattgaacaatcaaatatgatgcaaacaaatcagcatgatgatatttatatatgaaagacaaatgaaattcatgcttgctttgcttannnaaaaaaataaactaaaataaatttttaattataaat

SEQ ID NO: 197650 - DNA, 745 bp, Gossypium hirsutum
acccgtccggaagcaatcagtctggatttgtttattgacttataagttggcgctaatggtctcttcttctgtcattttatggattctcgaagatgattgagtactgagagagaaaagggactccccccccctttctttgtgtagaattaaggaaagctattgacgttattgacttcttgctgatagaagtatggtgttagttttagcaataggagaccttcatattcctcacagggcacctgatctgcctccaaagttcaaggccatgcctggtcctggcaagattcagcacatcatttgcactggcaatctctgtatcaaagaagttcatgattactccaagactctgtgtcctgatctgcatattactcgaggtgaatatgatgaagattcccgttatccagagaacaaaacactgacaactggtcaattcaagcttgggatatgccatgggcatcaggtcattccatggggggatttggattcactagcaatggtacaaaggcaattggacgtggatatccttgtaactggtcacactcatcagttcaaagcatacaagcatgagggtggtgtcgtcataaatccaggctcggccactggtgcatatagtagtttcacctacgatgttaacccgagctttgtgctcatggacatcgatggcttgcgtgttgtggtatatgtgtatgaactcatcgatggtgaagttaaggtcgacaaaattgattttaagaagacagccact

SEQ ID NO: 197651 - DNA, 499 bp, Gossypium hirsutum
  unsure (1)..(499): unsure at all n locations
cgcaaacatggaagactgtatgagaattttgggaggtttgaatttagcaatcctgatggtgatgctgctattgagcaccgaccgacactgtgcggccnacncggttaagaagaacaagaacatcggcagccggtggtgcggtggttctttaaatagggaggagtgcctgcagctttcagacgacatggagacgatggagttgttgatggattcagaagcgagcaggatggtatttgaagcaagtgcggcaatcaacttcgccggcagtaaacgtccaactaccagagcccttgtcccttctccaagctgcctgcgaccgtaagactggcaaacgttgcgttcctgatagtaattcaggcagaaagaaacctccaaattgttcactatacaccagaggttgccactgatttaactactttttcttgctatgctggtatattgtgtttgtgtgtcattttcgattattatgaataatggaaaaataatttggttgaatcat

SEQ ID NO: 197652 - DNA, 382 bp, Gossypium hirsutum
ggctttaccatgtcggtattccggggaatctgcttcttgaaggagataacaccatatttgtaactcaaccgaaaagcaccagccctttccaaggaattatgtatgactatattcgattagaaggccctgcatcttctaatggaaacaagaaagcttaaattttttccagatatccacaaaattgaagctagaaacaggtttgaacaagtgtctgtcaaagaagcatatcctgtttcatattgattaaaccgtatctctgtagttgatttatgtacaacatcaaaatcccatggattcaacacataaaataaaattgaaaatatttaaataaataaaaaaaggtaactagatcactgtctttaggtagttgctttctatgttt

SEQ ID NO: 197653 - DNA, 506 bp, Gossypium hirsutum
tgacactacaaggatgaactactacaaggcttacctgactcaactgaaaaaggcagtcgacaacggagcaaacgttattggctactttgcatggtcattgctggacaattttgaatggagattaggctacacttcaaggtttggcattgtgtatgttgattactctaccctcaagaggtacccaaagatgtcagcttactggttcaaacagcttcttactcggaaaaaacattaagcgggcagagtttatgtctcagtcatgtagagtaagtgctcatggaagaaaccaagtatggtgaggccattcctatgctttagtcctcccatagtatgttctttccttcctggcttaatcaataaaagcatgctaatgcttcttagttcaaaaaaaaaaaaaaaaaaaaaaaaaaaaaaaaggaaaaaataaaaaaaaaatatatgtaaaaaatttataggaattttactaaaacaaaaaaagataattatttgatatgtaatttttaaaa

SEQ ID NO: 197654 - DNA, 450 bp, Gossypium hirsutum
gctatctatgtttccaagctttttcatgaggctgtactttctcctggtgttctaaatgtggtctctggatttggtcctacagctggtgcagcactttcaagtcacatggatgtcaacaagttatcatttacaggttccactgctacaggcaagattgtactcgcactcgctgcaaaaagcaaccttaaaccggtaacattggaactcggaggaaaatctccgttcattgggtgcaaagatgctgacgttgacaaggctgttgagcttgcacattcagccttgttctttaaccagggtcagtgttgttgtgccggttctcgcactttggtacacgaaagcgtgtatgatgagttcgtaaagatagccaaagctcgagcactgaaaccaggtttcggggttcccttcatgacggggttcttactttgcccttttttttgttattggcaattt

SEQ ID NO: 197655 - DNA, 991 bp, Gossypium hirsutum
gtagatcacaagtgctgggagcggcctgaggacatggacactgttcgaactgtgtactctgtctcatcaagcaaccctggctctgatgttgctggtgaaacggctgcggcattggcagctgcctccttagttttccgaagggtggatccaaaatactcgaggttgttgctgcaaacagcaagaaaagttatggcgtttgccatccaatatcgtggtgcttacagtgactcacttggatcagcggtctgcccgttttactgctcatattctggatataaggaatgagttactatggggtgcagcatggttgtttagagcaacaaatgatgcttattactataatttcttgaaaacattgggagcttgatgatcaacctgacatcttcagctgggataacaaatatgcctggtgcttcatgttcttctatccaggatggcattgttgggcaaagataaaaatttcgagcaattcaaacaagaagctgaaagctttatgtgtaggaatcttgcccaattctccttattcaactacccaatacacacaaggtggccttatgtacaagttacctgaaagcaaccttcaatatgtaacatccatatcatttctacttaccacatatggcaagtacatgaaagctaaaaagcagacatttaactgtggcagcctcttcgtcactccaaattcactaatcggacttgcaaaaagacaggtggattacatactaggagagaatccaataaaaatgtcgtacatggcttgggtttggtcggaatttccccaagagaattcaccacaggggttcttcattgccgtcgttggcaaaacaccctcaaagcattggatgcgacggtggtttccagccatacttctactcatcgaaccccaatcccaacgttttggttggagctattgttggaggtccaaatcagaatgatggattcccagatgatcgatctgattattcacattctgagctctctacttacatca

SEQ ID NO: 197656 - DNA, 469 bp, Gossypium hirsutum
  unsure (1)..(469): unsure at all n locations
cccacgcgtccggtagcttcaaattaatttcattctttgcgctgctatgactcatattatgtcaggcctgaagcagttgctgcattttggttgcccctgtttgacattgatgatatgatatatgatatatacatatatatatctataggtttggactttcgtgccttaaggcttcttgcgcaacagttttgattttgaaagcggtttagattagatgtataatatgaaattatttttactgattttggagtaaaaataatatcttagatttnnnnnnnnnnnnnnnnnnnnnnnnnnnnnnnnnnnnnnnnnnnnnnnnnnnnnnnnnnnnnnnnnnnnnnnnnnnnnnnnnnnnnnnnnnnnnnnnnnnnnnnnnnnnnnnnnnnnnnnnnnnnnnnnnnnnnnnnnnnnnnnnnnnnnnnnnnnnnnnnnnnnnnnnnnnnnnnnnnnnnnnnnnnnnnnnnnnnnn

SEQ ID NO: 197657 - DNA, 425 bp, Gossypium hirsutum
  unsure (1)..(425): unsure at all n locations
gttcagttttggaactgaagtgttcagaggggtttcttactctattgtggaaaaaaaagaggattttggaggttataattagacaagaagatgaattctggttctaaacaaggtttgttttgtctaaaatggccttgggatgttaacaaacagtctaaaagttccaatctttgtacctttgaaggtccttggttattcaaatctatgcaaaatcttggttcctttgttctaaattcattcaattcagtttcgggtttaaggtttagtaatttaaaccctacccaaatagcttttggggttagtcaaaatgagaacttgaagtttaaaaggaaaccattgagtcctgatgaacaaggggaagctgaacagagggcttttgcatcggcattggctagtgggaaatctgctacngtgatcgagtttac

SEQ ID NO: 197658 - DNA, 568 bp, Gossypium hirsutum
cccacgcgtccgaggaactgtaccatattaaccagcgcactaaacagagtaaagaaggtttcgtctacggagttcggccatccttgttggtctgcaacttctgtagttactagcgggaaacaaatggcaaccaacacaagttttcaactgttttcatcatctaaggataaacccagtttgggtttagggttcttggagtcctcggagccgcagctgccacctccgtcctccctctgtcgaagtcctctcctcagaggtttcttcttctgtgaaatacactgtggagcctgtctacttggatggccttactttactcaagggaagggtgagtactaaagaggttcttgggttgcctaactcggatttagtccctggaatatatgaagggggacttaagctatgggaaggttcattagaccttgttaaagctctgcgctctgagattcaaaatggttgtctatcatttgagggaaaacgagtgttagagcttggatgtggtcacggacttcctgggatatttgcatgtctcgagagtgcagctgaggtgcattttcaggacttcaatgct

SEQ ID NO: 197659 - DNA, 425 bp, Gossypium hirsutum
cccacgcgtccgcggacgcgtgggaacgaagggttcatcgaccaacgccggttatatccgatgggcgatttgcatgaccccgaagtgaatccccagagacccagcgaggtgtagcatgagttgctcggtggaatcgcttagtggacccagaccggtccaaccaccgcaaaaatcggcggacttcgcggtggtttcgactaggaagtactatccgaggccgccgccagttgagccagaggattgtcatagtgactgtgattcatcatcgtcggtggttgatgatggggatatcgcgttgtcttcgtgtcggaaaactttgcctttcgatctcaattttccacccttggatgaagatgaagatcttcaatgtacccgctttatgtcttttgatcacgatgtcccgtgatgaaatgatgattgatcga

SEQ ID NO: 197660 - DNA, 377 bp, Gossypium hirsutum
gaggaaaataaaaaaaaaagatctacacttcttctttcaatattaggccgaccgatggttacccaggattgttcatctgcctctcactgcgactccctggagcggtcgatcaaggttttgttgaaccaaggagattcatgggtctcgcttaccagccccaaatcgccactgtgtttcgatggtggcgaaacaagcggaaactcgaaggcttcggaacgcaggtaagcttcatcacttttcttttttcttgttgatgatgaagtaacagaggactcgagttgataataaaaaacaggaagagctgagtggttaaattaagtgaggggtaaatcaccttcttttcggctaattgcttttccttgctttgcttttgcata

SEQ ID NO: 197661 - DNA, 363 bp, Gossypium hirsutum
  unsure (1)..(363): unsure at all n locations
gtgaaagctggaaatcatagaacaaaggtggcagataagttaacagtttcatccgcatggggtcggttctatttcagtcggttgccgctcgcattccctggttgaatccttaaggaattggggttgtttttataagcattacttgtagatactgtggtatatttctggttgtgatagagttgcttaaatcttttcctcttaggttttgtagtcttgggtaaaaccgcagagaatgatattgttgtactggtttgtactgttaaatggttgtattgaattatttgatcatgttggtaagcaaattttctatattcnnnannaaaaaananttattaaaaataaattttttttttttatattttt

SEQ ID NO: 197662 - DNA, 309 bp, Gossypium hirsutum
tatgtttgttggccatggcagtggcttgggctgtactttgtagggtttcataaaccagagacacagcaacagagttcgaatgaaatggagctttctgaaccactttctgaacctcttctctgattatacttctctctttttctgtgtaaaatcagttcatagtaatttcattcttcaaagctccttcatttgcaatgattttgtcacttctataattctgacatggcaatgatttccgagagttgaatcttccttgttcatacttccatggcaacgaatctttataatcaaactcatctattttccatt

SEQ ID NO: 197663 - DNA, 527 bp, Gossypium hirsutum
ttcacgcgtccgcgacgatttcccgatggaagtcctccgtgccacacaattaactttcctcgatataaggttcaaccgaatcaaaggcgtcgttccggcgacaggtttcaaattagacctcgacgttctcttcatcaacaacaacaatttcaggcaacgtctaccggaaaatttaggtgatacaccggcgttatacataacatttgcaaacaacaagttcaccggtcggatcccgccaagtattggcaaagctaaaaacctcctcgaagtactattcctcaacaacgaactcactggttgtttaccgtacgagatcggctacttacaaaacgccaccgtttttgacgtcggaatgaataaactaaccgggccgataccacattcgttcggttgtttgaaaaagatggagcaactcaatttagccggcaatgaattttacggcgaagtaccggaaatcgtttgccggttatcgaatcttcaaaacttgtctttgtcgagtaattatttcacccaagtcggaccggcat

SEQ ID NO: 197664 - DNA, 549 bp, Gossypium hirsutum
  unsure (1)..(549): unsure at all n locations
gtatagaaaaatggctactccatcaacactttgctgtgctatacttctcttcctatttccattacaattcatggcaacaacaaccccttcttgccccggtgattgcgagcctaatgatgccgatgacaatgatcgatttcattttgctcaaaacttagagttccttgaagctgagttcttcttgtatggtgcacttggcaaaggcctcgacgcctttgaacccgaatttgctaaaggcggaccacctccgattggtggcagacgggccaatctcgactaccttacccgtcggatcatcgaggaattcggttatcaagaaatcggtcataatagggaaattgtgagaagaaccggtgggattccaaggcctttgattgatattagctctgaaaactttgcaaaattatttgataaagcagcagggtacaatttggatcctncatttgatccttatgaagatcccatcaagtatatgttagcagtatatgctatcccctatgtgggactcaatggctatgttggtacaacccctttgcctcaaaaattcgc

SEQ ID NO: 197665 - DNA, 338 bp, Gossypium hirsutum
tcttcgccatccaatggttagattgacttgactgggaccgatggattgaccaacattaaatctaccccacttcaagcactggtctcacctcgtcttgctcctgagctttataactaaaatccagttgaagattccagtaatcaagcatgaagaataagaaagtttaaacattttgattgttacgttgtattattatttaatcaaggtctctctctttgcggaattaataatggtaaaatagtgaaacaagcaaatacttgttgggtaaaacatctagatttgagtgttgcttatatggtgaacatggaaattcttaagtcaaatttaagttcaatatt

SEQ ID NO: 197666 - DNA, 444 bp, Gossypium hirsutum
cacgcatacgtctaacctgaagaaagaagagagtttatgagaattccccaaatggatgcttttcagtggcacaagattgctgctgtttctggaatagcagcccttggattgggcacttatggcttccatatctttaaacctgaaaatcccgtttacaaggaggtatggcaaatcgcttctacttaccacttgtttcacacagctgctcttctttctgctcctattaccaaacgcccccacatttttggaggccttttgactgctggcattctttctttctctgggtcgtgttacacggcagcatatctggaggacagaaaatattcggcccttgctccatttggtggccttgcttttgttgccggttgggcaagtctgttattctaaggttggattttccttagaagaacttatgctatcacttgaaacaagttagagaacatc

SEQ ID NO: 197667 - DNA, 680 bp, Gossypium hirsutum
  unsure (1)..(680): unsure at all n locations
ccggggcggaccaagccgnccgaccaatgtacacaaatggagtccccagctgttgtttaggtttctcaccagctattgaacgcattttccgtcgggctgctgaagggctaagtgaaattataccagaagagccagagctttttgaagacccctgttatgttcctgatccggtatccttgcttgggcctgtttctgagtcgcttgataattttcagttggacttgggtgctgggtttgggatggacgtgggaacggaaaggccttgtggtttgaagaatatatctgcttcttctgaaattaacaagccctcacctattgaatccccattgtcaaggtcacgttgtgctaccccaaaggccccaagatcttcaaacttctcctgtggatgatactaattgcaaatgagaaaaggacgtggcagatgtggagcagttctccccttggtcaggatggtctgggcttgatgggtgatccagcaagctggctcctaccactggaacataatagatcaaacaaggatgaccttttgcacctttcttctcagaaaactatggcgtcattgtttgcgaaagaggaccctatactagctggtaaacgatcttctcagaaggtttttcttggtaatggccagaatggtggtacattcagtcctgtccccggcctgagtgatcaccacccat

SEQ ID NO: 197668 - DNA, 495 bp, Gossypium hirsutum
tttctcttcaaaagtatatctatgaaacaagtgcttattccaaagagctctagcaattgaaggaattgagagaagcaactgttcaaaagtataatgatttgagcgttatgaatgtacctgtggacgaagcccagttcttaaccatgcttttaaagcttatgaatgccaaaaaaacactggaaattggggttttcacaggctattcccttcttactactgcccttacattgcctgaggatggcaaggttatagcaattgaccctgataaagaagcatatgagggtgaagaagggagcttcgatttcgtatttgtagatgcatacaaaagcgactacctaaaatttcacgagctgacgctaaaattagtaaaggtcggaggaattgtagcttacgacaacacgttatggtatggatcagttgcgcaatcggagaaagaagtggtggaggatctcattaagaggtaccgaaattttgtgatcgaattcaatagcttta

SEQ ID NO: 197669 - DNA, 510 bp, Gossypium hirsutum
ttgaaagactgcaatatcaagatagcttttggccggttctcaccaaattccaaaggctaccgtgatttggacctctttattcagcaaaaggatggcaaaaagtttgtggatcctgaggagcaaaatgggctatgctctcctttgaaggtggaaatgcttcacccattgcgtgtcatcatcgcaaaccgggggcctgatacagaacttctggttgctaatccagttgagttatctggaaaggggagaccaagagttttctatgatgttacactagctctaaaggctcttggaatttgcatattctcggctgaaatcggaagatattcgagttcagatcgagaatgggaagtctacagattccttttggacgagaactgcggattccaattatcgagtacgttagctagaaatcagattgtagatagagttagaagaatgctgatgggttggtgagtccagtcaatcttctttgtacatgtcttatgagtccctccataaaaaatgatattt

SEQ ID NO: 197670 - DNA, 304 bp, Gossypium hirsutum
tgaattcagatagaattttcttatgaatggatttcttgaatgtaaggaaaaaaaaagttaggagacaaagaatgacaagaatgccattccaaaactatactcttcaatgtacgttttatacccatgttagacctgtttgggacttctcaaatgcacttgcatatcctgggatgatactctatatggtgttagacatgtatactgtctgaaattgcccaaatccaaaatggtgtttatgctttgtgcaacagtcacctatttccgtaggcaatcccagtatatacattagtagcctttctagcaa

SEQ ID NO: 197671 - DNA, 491 bp, Gossypium hirsutum
gattctacagtgctttccagtgaaatgtctgatgaatttatagagatggtttcaaatatctcccagctgcatcacacaaatgtaacagagctggttggctattgttccgtgcatggacagcacctgcttgtctacgagttccacaaagatggctctctccatgacttcctgcatctatcagatgagttcagcaagccattgatttggaactcccgtgtcaaaattgctctggggactgcacgtgcactagagtacctgcatgaaggttgctcgccgtctgtcgttcataagaatatcaagtcagccaacatcttacttgacgctgagctcaatcctcacctttcagactcgggcttggcaaccttttttcccaaatgcagatcaggtactgaatcgtgatgatgttaccatgtctggatacggtgcacccgaagttaccatgtctggtcagtattctcttaagagtgatgtttacagttttggagtggtta

SEQ ID NO: 197672 - DNA, 225 bp, Gossypium hirsutum
tcgcctcacgcgtccgcccacgcgtccggggagattaacgttgagccaaacagtgatgtttggaaacataagttaaggccaagactttccgatatcatatacgaaacggtatagcggtgcatgtttcagaataactttagtgcaaagccgagaaccgccggtcggaaaagattgatctcggtggctgtaatatatatatttttacttaataatggtttttgtctt

SEQ ID NO: 197673 - DNA, 299 bp, Gossypium hirsutum
cggggcggcccacgcgtccgaaattaatcagttgcagtggtctgctagactcagcctgattggattgccattgccttctccaacaagaatgcagcttctcaaagtgttgaggctccctgcttgaaacgtatgcagctctcattgttggcgcatatactgctcacgcttgtaattaggtgggagttaaaaactgtagaatcagtgctattggctgataagtttgttagtactttgtaagaccagctttaatctacaattatttgttaggtccttacaacaaatctgagactcgaatgcat

SEQ ID NO: 197674 - DNA, 694 bp, Gossypium hirsutum
  unsure (1)..(694): unsure at all n locations
gtgtatcttaatcggcgttcgttagtatcagtccggtgatgcttggtgtattgtgcacacgacctcccaagccttggatcctcaactccctatctctgatcgcccacggtggttcagcggctcaccatcacgaaaatcgtttattgcactggccttcacatttcgccgatttatctgccgataatcggcgctgccggcaccattcaacggcttgtcggcttggtggcggctcagagggtggtgcagcttctatatggcatgcgattttgccatgcggaggagacagaggagtgaagaatagaggagatgtgtggaagaatgtggagaggaaaggggaaggttctgaatgtgtcggggatgccagaccgctcgtggcttcaccggatctgttgcttctgttgnagtctggcttgtctgcgccgatgccatgatgaattgaggacgttacctcgtgctgatataaaccgatgctttttaatcagatgaaagatagtatcattggctcagtnctgcgttgatattaaggtacaggttttacgaatgacagttgtcaagcatactcatgactggtgagctgaagaactctgtgaaacgcaagaaactgtgatatgaaaactagtggatgactaaaagcgaaaacgatgttttggggattggctgtagatcacnctttntgggggctattgggtttttt

SEQ ID NO: 197675 - DNA, 480 bp, Gossypium hirsutum
ccatgcgccgcccacgcgtccgatagttttggccatcgctatttatcggaaactgaaaaatacgacttgtcatcggtgaggatgctgaagtccggtgccgctccgttgggtcaagagcttgaggatgctgtgaaagtcaagtttcctggtgccaagtttggacagggtgatggaatgacagaagctggaccagttctagcaatgtgtttgggatttgccaaggaaccctttgaaatgaaatccggagcttgtgggactgttgtaaggaacgcggagatgaaaatcgtcgaccccgacaccggtttgtccttgccgcggaaccaggccggcgagatctgcattcgaggagatcagatcatgaaaggataccttaatgaccctgaggccactgctaggaccattgacacaagatggctggttacataccggagacattggttacattgacgacgatgatgaactcttcatcgtcgatcgatt

SEQ ID NO: 197676 - DNA, 349 bp, Gossypium hirsutum
gttttgaaaaactcctttatgagttttaattattatgtcactgcttatgcatagagcacgggtgtgttgaaaatggcgacggtgctgctgttatgttattgttaataaagtgcatgcggctatgatgattttgttgagttcatacagcttggatgcatgctgcagcaattgtgcatgttgtagcaacatattttctgttttagttgcaatgtaatttagtttggttgaaaacgaagtgtttaggtgatgattaagctaataagtcagcttattcatatgtacaagcaatgttttactagtcccaaatgctgattagtgggattagttgaatattttggtgatgaatttt

SEQ ID NO: 197677 - DNA, 864 bp, Gossypium hirsutum
  unsure (1)..(864): unsure at all n locations
gtgcaaaagtgcttgtcaaaggtgaagccaacatttcctacatatgttcacgtttctatcgggctccagaacttatctttggtgcaacagaatacacaacctcaattgatatctggtcagctggttgtgttctanctgaacttttgctgggccagccattgtttccaggagagaacgcagtgggccagcttgtagagattattaaggttttaggtaccccctctagggaagaaattcgctgcatgaatcccaattacatggattttaggtttccacagatgaaagcgcatccgtggcacaaggtttttcacaaaaggatgcctcccgaagcaattgatcttacttcacgactcctgcaatactcacctagtcttcgctgtacagctcatgaagcatgtgctcatcctttctttgatgagcttcgagaacctaatgctcgcctaccaaatggtcgacctttaccaccacttttcaacttcaaacaggaattatctgaggcttcaccggagctgattaagaagttgattccggatcatgtgaaacgacagatagggctccaacatttcatgcatccagccagaacataaaacttcaaaattgatacaagactcggtatctcctactcgacatgggacacaaaggaaagtactatcgttggacaaccaccatcgatctgagcctgtctcaacggcacgtaagtctcaagcagcctcttttgctcctttattctatatgagtattagctggttgtgaaaatgccttatttgttatatgtacatgtaaacatggtttgatagtaaaagataaaagacttttaaggtgaaaaagacagtaaaaaggtgcttgtgaggaaaaaagtaccat

SEQ ID NO: 197678 - DNA, 444 bp, Gossypium hirsutum
ctctctttccccctaaagccaaaaaacccccaaatctctccttgtctctcttttcatatccatttttttctctcttctatttcttcccttttgcagggcaaaggaaaaaaaaaagcaacaaaaaatggctcaaagaaccgaaaaagaagaaaccgagttcaaggtaccggaaaccttaacgctttgcgtcaatgattgtggtgttataggaaatccggccaccaataacatgtgtcaaaattgtttcaacgctacaacgcctaaatcaaccgctgccgtcgtctcctcttcaaccggtggtgctagttcagctggtgtttcgatcctgaaccaaagatctaccacgtcgcgttctataaacaagcgatccgatctttctccgcctaaaacgacgacgtttggtaggagttctggttcgaggaacgatccggagcctggtacgga

SEQ ID NO: 197679 - DNA, 474 bp, Gossypium hirsutum
cggacgcgtgggctattatttaatttaatattattaaatattgtattagattgaaaaataggaacttcgaatctttttctgatatacataaagtaaatagaaaaagattcgaagtggatttctcgacccgtgaaatgaaaaaatagcctctggagtttttttgttttatattcatctgaaggaaatatgagaaagaaaacaataaataaaagaaataaaatgaaggaaatatatcagactatagtaatttaatacacatagaaattagaaaaatacataaaaaggttgggttttatcaatttcacgaacaagatccaagaataagattagttgatggagggggaggggtagatctggggatcaaccagtagcgagagaagggatcgcttcttccttgaattgaagagttcgttcaaaaaattcatctctctgattgatgagccataagacaattcatggttcagacgactcgtc

SEQ ID NO: 197680 - DNA, 941 bp, Gossypium hirsutum
aaagctttgagggccaaattgaatctccccaaaccctaaccatgacctgatccgaaatccccaaaatctctcatcttcatcctccaccgtccgatcaaagctccatcatagaataaaagcaaaagaaatcaccagaaaaacctgaactgcttgacgatgccgtcccacggggatctggatcgtcagatcgagcacttaatgcagtgcaagccgctatcggaaacggaggtgaagactctgtgcgagcaggcgcgtgcgatccttgtggaggagtggaatgttcagccggtgaagtgtccggtcaccgtctgcggcgatatccacggccaatttcacgatctcgtcgaactgtttcgcatcggtggccacgctcccgacactaattatctctttatgggcgattacgtagatcgaggatattactctgtggagactgtcactcttttagttgcactgaaagttcgttatagagatagaataactattttaagaggaaatcatgagagccggcagataactcaagtgtatggcttttatgatgaatgcttgacaaaatatggaaatgctaatgtctggaagtatttcactgacctctttgattatttacctctcactgccctgattgaaagtcagattttctgcttgcatggtggactatccccatctttggaaactctaataacctcccttgccctgaaccccataccggaggtcctcctcgagggtcccaggtgtgatccctcgaggtctgaatccgatgacccatgtggatggggatatcccctcggggggccgggtataccttccgacacgatatttctggggcattcaccacacaaatgggctccctccgatttctatagccaccaacttgttagggaaggatatattggtcccccgaccacaatgtggtaacagtgttcagtgccccaattactgcc

SEQ ID NO: 197681 - DNA, 604 bp, Gossypium hirsutum
cagatgaatactggaaaaagtcgaagttgccaaatgcaaccttatttaagcctctgcagccatataaaagacgcataaaagagacatttaaagattttccaccatcatcactgccccttatcgacactctacttgcaattgatccagcggaacttctaactgcgactgctgcattaagaagtgaatgcttcatgaccgagccttatgcttgtgaaccttctagcctcccaaaatatccccccagtgaagagatggatgcaaaacggcgagatgatgaagcacggagactcatagcagctagtaaagccccaggtgacggtgcaaggaagacacgaacacgtgatcgtgcaagggcagggcctgccccagaagccaatgccgagcttcagtctaatcttgatagaaggcggttaataacccatgcaaacgcatagagcaaaagcgaaaagttccccccaccacaccaagatggagcacttggctttcctttaggagcatcacaacacattgatccttcatgtgttcctcctgatgtccccttcagcactacattcacatattcgaaagaaccaattcaaacttggtctggtccgctggtcgagtc

SEQ ID NO: 197682 - DNA, 579 bp, Gossypium hirsutum
  unsure (1)..(579): unsure at all n locations
cacaaagcgcacaccgttaatttcacttcttttgagatgaaagctaattgcagttgccaaatgtttgaacattccgggatcatatgcaggcacatattancagttttcagagtgaaaaatgttctcacactaccttcacaatatgtactaaagcgatggacgagaaatgccaaaattggagacatgcaggatgaacatgctaccgaattgccaaataattcccgggaatccttaacagatcggtacaatactctacgccaagaagctattaagtacgttgaagaaggggcgaaatctattcatgtttacaatgtggcaatggatgctttacaagaggcactgaaaaaggttagctctgcaaaaaaccaaagccctatatctgctgaagatggagcactgagcaatggacgtaatcaagagttgcatgcagctggagatatcgagacagtggcatgtcaatctgcggacgagaaggaaaagaaaatccgggaattgacaacagagttggagaccataaaccgccgatgcgaagtgtacagagccaatctgctggctgtgttgagggacatggaagaacag

SEQ ID NO: 197683 - DNA, 436 bp, Gossypium hirsutum
gccctagaatttttgttagaatctcttggatttgctaactgtaccgatgtctttcccgtgggtatcggagatgatcggaccgatgaagatgcattcaagatattgagggacagaggccaagagttttggtattcttgtatccaagttccccaaggacactaatgcatcctattcattacaagaaccagatgaggtcatggactttttacgacgtctggttgaatggaaagaattatctctaagaactcagtcgagaatgtagacgaaaataagatagtggaagtatatatctgtgcaccctagcaaagaaattgtgcaggggggtgtgggattaaagtagcaaaattattgttttaagatgagagaaatgattattaaagctttgttcatctttgaaactagttggggtacaaagggtaaaggctttgtggcttta

SEQ ID NO: 197684 - DNA, 684 bp, Gossypium hirsutum
ccaaggcctaacccacaggggtcgtatcactatggtctcattaatacgaccagaaccatcaggcttgccaattctgccggccaagtcaatggcaagcaaagatatgcagttaacagtgtttcctttgttccagcagacactcctttgaaacttgcagactttttcaaaatcgatggagtttatcgtattggaagcatatcagataaccctactggtggagggatataccttgacacttcggttatgaattcggactataggtctttcattgagattgtgtttcagaatgatgaggatattgtccagagctggcatctcgacggctactctttcttcgttgttggtatggacggagggcaatggacggctgctagtcggaacggatacaacctccgtgatgccgtttcacggtgtaccactcaggtgtaccccaagtcatggactgccatttatgtggcgcttgacaatgttggaatgtggaacttaaggtccgagtattgggcgagacagtacctgggacaacagttttatttgcgtgtcttcacaacgtcaacttcactaagggatgaatacccgatccccaagaacgcactactctgcggcagagcaagcggcagaagaacccgtcccctttaaagccacccatacaataaatgatccgttattggatagtcaaagctggtc

SEQ ID NO: 197685 - DNA, 546 bp, Gossypium hirsutum
ttttactaatgccataaaatataagccattgaaacgagaacatttcgttagggtttagccgtggctagagagagatgggaaggaggatactgaacgatgcgttaaggtcaatagtgaatgctgagaggaggggcaaggccacggtggaactgaaaccaatctccaacgtcatatcttcctttctcaatatcatgaaatatcgaggatacataaagaacttcgaagttcatgatccacatagagtgggcaggataacagttgacctgcaaggaagggtaaacgattgccgggcactcacttacaggcaggacatcaaagcaaaggaaatcgaaaaatacaaaacacttaaacttccaactcatcagtggggttatgttgtgatttcaactccggatggtgttttggatcatgaagaagccattcgaaggaatgtaggtgggcaggttctgggttattttcattagacttggttatctttctgataagtggttgagctctgctttatctgtgaactttcaatcaaatatctatctgaaatttgtatcg

SEQ ID NO: 197686 - DNA, 426 bp, Gossypium hirsutum
  unsure (1)..(426): unsure at all n locations
tctagaactcttgatcaagtggatgatgagaagatagacctagtatttcggccatttgcagaggatttggagctcaaagttccagaacaggaagactgcaggtgggatggaaaatacgagaactcagcatacgcaaagtgaaaggactgagagatgatacggatgaagcacaagaaaaagttcatggttaggagctgctgctttcccggaaacactactttcaccatggaggaaatctcatatctttagataacagctttttgtatccactaccgggttcattttctgtgtttaactttccactctttcctctttgaataaaggtattaatttacttaanaaaaaaaatattttaattattaattataattttataaaatttaattaattttattatttttatatttatatttattttattttttt

SEQ ID NO: 197687 - DNA, 464 bp, Gossypium hirsutum
  unsure (1)..(464): unsure at all n locations
cccacgcgtccgatatttcttggaagaaaatgggagtggagaagaggatcatggtgttgtggatttgtgcaatggtgataagctcaatggtgatggaagagggtgcaaatgcgacaccaattagctacccaggactgggaaaaaatcgtcaagttccatgcaaaattggaggcggtaattgcctcccaccaccatccaacgattatgacagaggatgttcacccctaaaaagatgtcgaagtcatcatacaatgcccatccttcattgaccacaactagaaaatgcacttcattaacttctcctttttttctatcaaattatatgaaaaaaaggagcaattaatcatttcatatgtttattcattccttattattgtaacccatgaattccagaaatatatacttcaactatttttttgaaggaaaaaacctattctaccttaatnnnnnnnnnnnnnnnnnnn

SEQ ID NO: 197688 - DNA, 706 bp, Gossypium hirsutum
caaaaggcacaagtatttcactttgtgtctttctcaagtcggtatcggtgcggtgaagagcaatgctggattgttcatatggatggatcttcgtaagctcctaaaagagaagacgttcgatgctgaaatggacttgtggcgagtgattatcaatgaagttaagctcaatgtttcccctggttcttctttccattgtgacgagccgggttggttcagggtttgctttgctaacatggatgacaataccattggaagttgctttgttgagaataacgacctttatgcataagcacaacgaggccatccgtcctcgtaaactatgcagacgagccagccttaaactcagcttatctcgaaggagggacgatttcatgtccccaaacatgatgtctcctcactctcccatacctcaatcaccccttgtccgtgccaggacttaagctgatcaactaagacttttgaccacattatacagtcttcaaacctttgtctgcctacattctatatgaaacccctatttgttcaacaattgtaagttttttgggtctgtcctcacatgtaaaagtgcaatactgcgaggaaagctcaacattggtgagcacagctcgtgcacatatatactattgttggttgattttctttttttcttttttatttacaacaatgtacgaaggaacaaaaaaagatgtttgtgaatttgtaagac

SEQ ID NO: 197689 - DNA, 496 bp, Gossypium hirsutum
gggtcattgaagactttttgagatgaatctagatgagttgagaagcaagtccaaaggtgagaaaagtatagctttcaagtgacaacaccattccaattgaaggtaccactgctatcaaagacgtacaagagcaaatggtgctacttactcggaacttcaataaagtcttcaagaagttgtcaagaaagaacaaaaagtttgatgtagccaaaaacaagataaaaggagtggtaattagtgaagaatctaacaaggagaaaaagaaaagaattcaatgccattaatggcatggatttagccgcataaaagttaaatgtgccaataccctaaaaaatctgtgtaacctggagtgatagagattcttcaagtagctcagatccagatgaggagctcgtgagcaattacgtgacgtttacttctaaagtcagtaatcttgatgctactgattctgagattgatattgatttagatggtgaatcaaatgccgattttctat

SEQ ID NO: 197690 - DNA, 430 bp, Gossypium hirsutum
ttgtctcgtgggttggggtttcctaacccttcggccgccgttcagcccacgccccaatttcgtcagaagggacaccagctcgacgactccggcgaaaggtaagtctcccttcttctttctttttcgtattttaagcgaaaaaataaataacagaaatgaatcactaagaatgatgaaccgaaaaaaaaaacttttttattccaaaaattatcggatctgctctttcaaatccttcttttttcctctgtattctcttttgtccaaaaaccccccattacagaataaaagttggccttatatagcccgaaaaatcaaataccagtgccgcctttccctgtttcttttcttttggactcttttgagtccgtgtttgcaggtgtatgtgcgcatatagggaggatcggccccgagacgtgcggcgcttgggacg

SEQ ID NO: 197691 - DNA, 523 bp, Gossypium hirsutum
gatctgctaaggcctctgcgtgacctcaatgatggacctaacctttgcatatatcttgagagtgcgttttacaccttgcgcaagcctgtggcatccaccatcaatacattggctggcgccctgtacaaggtgttcagtgcttcacctgatcaagcaaggaaggaaatgcgccaagcttgcttcgattatctaagccttggtggtgtgttctcaacaggaccaatctccttgctctctggtttgaatcctcgccctttgagtttggtgatgcatttctttgccgcggcaacatatggtattggtcgtttactggttccattcccttcacccaaaagaatctggattggagctagattgatcacgggggcatcaggaatcatcttccctattatcaagtcagaaggagttaggcaaatgtttttcccagcgactgttcctgcatattacagagctccccctcttaagtgagaaacccatacttcctaatctcattagtgttcccccttttctagagtgtgggaaa

SEQ ID NO: 197692 - DNA, 588 bp, Gossypium hirsutum
cctcaatccagagcccatccaattccaacccaattttccaacacgaaactccgctcccggggaaggcacgatccaagcgttcaagggtggccccatgcgattggtccacccgactcctccacctcaatccgaaatcggtggcccagaagaaaagggagaacccgaacgccaattcggagttgccagtccggaaatgtttacattgtgcggcggaaaagacgccgcaatggaggactgggccgttgggtccgaaaacattgtgtaatgcatgtggggtgaggtacaagtcgggccgattggtgccggaataccgtcccgcagcgagtccgacatttgtttcggcgaagcattcgaattctcataggaaagttttggagcttaggagacaaaaggaggtccaaagagcacagcatcaacagctgatgagtcaaacttcggttttcggcatatccaacggtggttgtcctgatgatttcttgatccaccatcatggtgggcccaattttagccacatgatttagcaatatataatctttttttttttaaaggtagttcttttcctaaaatttgatcttaaaagaaaagaaa

SEQ ID NO: 197693 - DNA, 415 bp, Gossypium hirsutum
gaaaatcagaagcctcaatcccatcaaaacctcccttcttctcctaataaatcaatcccagaaatcgaaagcaacgccgcctctgatttctcgggccatcaaagggtccgtttccccaacccacccgacctcactaaccctgacccttctaccctccgagatcaatggaggtacgccatccggcagtacagtcgttggtactctcacgcctggggcaccgctattcttgctggggtttcctttttcgccctcggttgggtcatcaaaggctctaatcccctcccctctttcaactccgacacgaacaaaaatgactccgacactaacaaaaatgacaatagcaagtgatcttccaaccatcctcaatcttctgtggatatgtttggtcaccacaactgttgaagaggccattttg

SEQ ID NO: 197694 - DNA, 644 bp, Gossypium hirsutum
atgaccacgagagaagtatattgacaaagctgaaacagcagtgtggtggccagttcacttcaaagatggaaggaatggtcacagatttgacattggcaagggaaaaccagacaaattttgaggagtacttgagcaataatccaaatgtaaatccagggatcgacttgacagtaactgttttgacaactggcttctggccaagttacaagtcttttgatctcaaccttcctgctgagatgattaagtgtgttgaagttttcagggacttctatcagacgaaaacgaaacacaggaaacttacttggatatattctttgggtacttgtaaccttattgggaagtttgaaccaaaaacagtggagttgattgtcacgacatatcaggcttctgccttactgctattcaattcctccgatagactgagctattcggagatcatgatacagttgaacttaactgatgatgacgttgttagacttttgcactcgttgtcatgtgctaaatataaaattctgaacaaggaaccaagcacaaaaaccatctcctccactgatcagttcgagttcaactccaagtttaccgataaaatgaggaggattaaatttggagaatattgatcaatggcatgatgatgaagggctttg

SEQ ID NO: 197695 - DNA, 628 bp, Gossypium hirsutum
catctttctggtaacgaagagagtcagaagccatataaacacaagggaaaaaaaacttggagcttgacaatagaagtgttcaatatgatgaggaatatatcttgaattctcgaggtttaaagctatttacatgcaaatggattccagtgaatgaagaacccaaaggtttaatcttcatctgccatggttatgccctggagtgcagcatcaccatgagctctacagcaaatcggttggtgaaagcaggatttgcagtttatggaataaattatgaagggcatgggaagtcatctggtttgcaaggctatatctcaagttttaacaatgttgttgatgattgctccaattttttcactcaaatatgtgagaaaaaagagaacaaaaggaagatgagaattttgctaggggaatcactgggaggagcagtgttgttgctgatacataggaaaatgctagactattgggatggggcaatccttgctgcccccatgtgtaagattgcagatgaaatgaagccacatcctttagtgataaatgttttgaaaaagctttgcaattttattccaacttggagaataattccaagtccagatgtcattgatactggctgcaaattgcctcagataac

SEQ ID NO: 197696 - DNA, 772 bp, Gossypium hirsutum
  unsure (1)..(772): unsure at all n locations
ttcttcgcgtccgcttggctcaacctactcgaaaacaagactgcattcaccacaaagaaagattatggcaaagaagaaagggaagcacaatgggcacttgcccaaagaacattgcacggacttcaaccaccggaaacttctaatctcttcaatgacaagaacagttaccgggagttatcggagatcgccgagcaggccaagagacgagcggaagttgcaaggcttcgagagcttcatacactcaaagggcacgtcgagtccgtggtgaaactcaaggggctggatatcgatacgatccagcagcattatactgtttagaacactggaaaccgacgccggaaaaacgaaaggatggcagttcattgacatttacagatgatgaagagaaaaaaagtaatttagttttcaaaaaagaacattttaacatgtctatggtttaatttgccaatcatgtaatgttctgtgttttacagtttcttgcttttcaatcgagcactcaagcttggtgtcttttcccattttcaaattgggttaaatttagggactggattggatatttgcctatatatatatttatatattcgaatttatatatttttatatgctctaatctttgcaaaaggaaaaacccaataccaaagggtgaannnnnnnnnnnnnnnnnnnnnnnnnnnnnnnnnnnnnnnnnnnnnnnnnnnnnnnnnnnnnnnnnnnnnnnnnnnnnnnnnnnnnnnnnnnnnnnnnnnnnnnnnnnnnnnnnnnnnnnnnnnnn

SEQ ID NO: 197697 - DNA, 419 bp, Gossypium hirsutum
gtctataacagaccaataatggcacgtcaacatcgggatgatgataggaaaataaagcttctcggacttgatagggaagcatttcttttcaccaaatgcaaaatttttgttgtatcgcttgtactggtgagtggttttggaactttatatatccgctggttttttctgattggagtttgcacaagtggtgttggtgaatagcagttttggtattggtttttgggttactatgtaggaagaaatggggtgtagttggggggttcagttgggcctttgctagaagactatgcagtggtttttgtgtgaaggagctggatgaaccccgtcactcttttatgttccactttgttatggtgcgtaaatgtctttgggatttgatcatttattatgaaggatccagctgatatattttttttatc

SEQ ID NO: 197698 - DNA, 395 bp, Gossypium hirsutum
  unsure (1)..(395): unsure at all n locations
gcaggcagtaaccaaggaacttacgaacttaagccagagtataaaaaatctgtggacgacacagcagctgaatacctgtaatttacatttcttttgtttctaattatttttctcaattaaagggatagtctaaaggaacccctcaggaagaggatagagagtaatatttagcttaagaaccagtgatttaaggggataataggcaatttgtttggggaaaggataacttggctgcaggacctctgaagtccaatggtgcaattcaaacattcttcaatgatctcaaagttggggactaggggggcaagtatatccagaacaaaaatcctgatcaataaaaaagaatcatattctattcgtggaaaaaaaaannnaaccaaaacnaaancnnaacc

SEQ ID NO: 197699 - DNA, 420 bp, Gossypium hirsutum
atcgaacgtcgcaagtaagagcaggcgatccattagaggaagttcaaaaaacttaattaatggcgaacagagttcaaacccccacgagcaactcagctcttattgcaatgattgccgacgaggacacggtggttggttttctaatggctggtgtgggtaatgttgacttgcgaaggaagacaaattatcttattgtagattcaaaaaccactgttaaacaaattgaagatacgtttaaggagttcactacacgggaggatattgctgtcgttctgattagccaatatgttgcaaatatgataaggtttctggtggatagctacaacaagcctgttccagcgatcttggagattccatctaaggatcatccatatgatccggcacatgattcagttctttcacgggataaatacctctttt

SEQ ID NO: 197700 - DNA, 420 bp, Gossypium hirsutum
ggagctttttcctttccaagactgttgggtggttcctgcaaaagtagctttcgaccaaactgcgtgggctgcagtttggaacagcatttacttcgtgattttgggatttctgcgtcttgaatctccgatcagtatttttaacgaatggaaggcaacattcttgcctatgttgacagccggatggaaactttggccatttgctcatcttatcacttacggttttattccggtagaacaaaggcttctttgggtggactgcgtagaacttatttgggtgacgattctctcaacttattcgaatgaaaaatcggaagcaagaatctccgaggcagcaccagcagaagcaagttcaattttgccacccgttggtccacccgaggagtaaataatgagatttaggatatctgggatttgagacat

SEQ ID NO: 197701 - DNA, 616 bp, Gossypium hirsutum
cccacgcgtccgcccacgcgtccgcagaaaataagatttctttggaaattaaaagcagtagctcttaattaattattttattttttatttttacaaggctcaacggcaggagtaagcagaatcctgcaatcaaattccatccatagaatctggagtcgggactgtaaattatgagaacagttgacattcaattgtattggtgaagaccggaaggaacgtgtaattaattagagagtaaacaagacagagatgttctcactcttttatggactttataagtacctatttagcaagacagagtttcatgtactcattcttggaatcgacaaggctgggaaaacaactttgttggagaaattgaaatccgtatactcaaacttggaaggtctaccacctgatcgaattgttccaactgttgggcttaatattggtcgcgtcgaagttctaaatacaaaacttgtgttctgggacttgggaggccagcctggtcttcgctcaatttgggagaaatactatgaagaggcacatgctgtggtattcgtaattgatgctgcttgcccttcacgttttgaagattcaaaatctgcacttgagaaagttcttagacatgaggatc

SEQ ID NO: 197702 - DNA, 429 bp, Gossypium hirsutum
cccacgcttctcgaaaaaaaaaaattcacagatccaaaatcaattctctagggttcattccagcagcctccatttgctaaggcctgttcatcaccagtgcaccattaaaattggtgagtgatgtagaagcagcctttacctccaccgaaatcaacactcaagaccattttcacttgataatctgcattgcaaaccccgatttagacggagaagccaagggatctcatcgatgcatttaacgaagtattggatttgcctagtgtgcgtagagtgtgcgtaatgtctccgtccctttgcaggatcatccgtaccgaggagcagggagaggcacgcatgaaagaaaccgtgcgaggaaaccgctcgtgagatccaaccccctgacactgttcttgcatgttccagaagcttctggtgcttggctgctgggat

SEQ ID NO: 197703 - DNA, 424 bp, Gossypium hirsutum
acggccacgcgttcggatggatcctcgtggttatcatctgtctattcgccttcgcttatggaaggtcttggggtcctctggggtggctagttcctagtgagctgctcccgttcgacactaggtcagctggccaaagcatggtggtctgtgtcaaccttctcttcacagctctgatagcacaatgcttcttgggctcactttgtcatctcaagtatggacttttctcgctttttgctggctcgatattcataatgagcagctttattttcttcctcttgccggaaacaaagagagttccgatcgaggaagtctatcttctctggaaggatcattggttctggaagaaatatgttgaagatgatgacgagaaggatatcaaaaagccaaccacgtcatattatctaaaatacgaaaaacctttggt

SEQ ID NO: 197704 - DNA, 599 bp, Gossypium hirsutum
tcggatcatcaatggctgaatccttgggtccacgattgtatagctgctctaattgtctaaatcgcgtttctctccacgatgatataatttccacgtgttttcagggaagaaatggccgtgcatttttgttctcccacgcaatgaacattacattaggaccaaaagaagacaggcatctcttatccggtctccataccgtggctgatatttactgtgctgactgccaccaggttttaggctggaaatacgagcgagcttacgaggtgtcacagaagtacaaggaagggaaatttatactcgagaaggcgaagattgttaaggaggattggtaacaagcaagcctcatcgtttttttaaggttttcttattccatttattccccgtgtttgatgtaattgttatcggtgcccgatgttcgtcttgttcagaaaaagacgtcgcccccatttcggaaaaaaattgtcattgtttcgaaccttgcattcttaacgatgatgcgcgacggtttggcaattctctgtgttaataaattatggtattcttaaccatcgttcatgagaaaaaaaaaaatatatataaaaaaggtggtccttttttaa

SEQ ID NO: 197705 - DNA, 604 bp, Gossypium hirsutum
cccacgcgtccgggaaaagaaggtggtgaaccggtgttctggatgtagaaaacgtgtcggtgtgaccgggtttaggtgtcgatgcggtgaactgttttgtgccgatcatcggtactcggatcgtcacgattgtagttatgattacaagacggtcggtcgtgaggccatcgctagggaaaatccggttgttaaagcggccaagataattaaagtctgatatatatattttttatgaaaccctattaaaatcatattattcggaaacatttttcgacccggaattcggaacagctatggaaattcaacctcgttctcatcagcaatccatggaggaagatgacgacatatctcacaagatcgtttcaagttgaagaagattatagtatttttaattttacttaattttctttttttccaaaaaaaaaagaaaaaggaaaattattgtggctttaattttacacttcgtattaggattctgacaatttttattttcgagatttccatttcagcagatgtacctttttagatttgtttcgttctaaagtttctaaatttgatgaaatttgattatttgcaaaaaaaaaaaaaaaaacggacgcgtggg

SEQ ID NO: 197706 - DNA, 742 bp, Gossypium hirsutum
  unsure (1)..(742): unsure at all n locations
attctgtaagacattttcaggaaaatgaagcttcccctccccctccccctcccccttcctcttggtttgcaaatcagtgccattgacaatagtttggtcaaggagcttttccggttcctcctccatccaggatttggcatttgatctgtccatttctgcttttttgcgagataacatctacaactttggagaactccttgctcatccaattgcttctttagcgtttacaagtctggtcattgcagctgttggataattggatgggcaaagtacataacgcttggttatcaactgaggctaaaaacacctgatctcgttgcatcatgaatttttttctccagttcctttctgccattgtaacaatttcgttatttgaaaagggaagaagaagggaaagtgaaatgattagcaatgaggatatgagataagcgttagtcatttgcgggtagagccatctttgtatgattcctttagtaggtattgcttgatccttaaatctttgttctgaaaggagcggctcatgtactaaacttttcactttttggcatttgttggatctacaatggcactggaatgcctgaggatacggttaaaaaccgcaaacatcatccttatcttttcattttgaattgggattattcattagatacaatcagatatgatccacttttaatgtggatgaaaggggctttttattttcnaaaaaattaaanccaggnaatggaaaagtataatttttttt

SEQ ID NO: 197707 - DNA, 758 bp, Gossypium hirsutum
  unsure (1)..(758): unsure at all n locations
ctcgatgggctgctgctgcccagtttgcacttgcggttagccttacttcatcgcagaatgaccttactcgcttggaaatcgaagatgagaatagtatcctcaagaaaacgagagatgctgtgataactcttcagggagttctggaggggaagcatgataaaacaatcgaagagtccctagatcagcgtcagatgtctaaagatggatggtggtcagcactttacagaatggttgaaggtcttgctataatgagcaaattgggaaggagcaggcttcatcaatctgattatggtttcgaagacagatcaatcgactgggatcaaactgaaatgtagagttcaatctctcccgtctggattttggattcataactgaatgcgttttggagtgtagcatctgaaaattgtccaaagtttacatcaaggattgttagccatgaatctgtctgataaccttctcttttttttttttgcaattttgaaccccaaaattgccggacaatttagttgaattgttaaaagagctgcattataattatcttcttttgcacttttcttttnnnnnnnnnnnnnnnnnnnnnnnnnnnnnnnnnnnnnnnnnnnnnnnnnnnnnnnnnnnnnnnnnnnnnnnnnnnnnnnnnnnnnnnnnnnnnnnnnnnnnnnnnnnnnnnnnnnnnnnnnnnnnnnnnnnnnnnnnnnnnnnnnnnnnnnnnnnnnnnnnnnnnnnnnnnnnnnnnnnnnnnnnnnnnnnnnnnnnnn

SEQ ID NO: 197708 - DNA, 623 bp, Gossypium hirsutum
  unsure (1)..(623): unsure at all n locations
attcttttttctttctcccaactaaacttggcagccctaaatacttttcaaattcattggagctacgaattcccaattggatgaccaccatctgcctgacttcctcagctaaattactactaaaaaaagactgtcgattagtcaaaatttacgcacctgagctatttctatactctcacaagatctgtttaagtgtgcttacacctttgcttgatgcttcttcaaacagtaagcagtcatcagcaagcaatagatgagacaccctagggccacttctgctggctttgacaccttttataaccccttccccagtagccgttcgcattagacccgataggccctccccacatatcaagaataaaaaagggcttaatgggtctccctgcctaagtccccttgttggatagaaatcgtctcctttaatgccattaaacactattgaataggagacactagagatgcatttcataattgaatcaatccatttttgactgaaacccattttatgcatgatttcttggagaaagttccattatactctgtcatatgccttacttatgtcttacttgactgccataaattctttcttcctccctctttctgtntcatcgaatgtataattg

SEQ ID NO: 197709 - DNA, 535 bp, Gossypium hirsutum
cccacgcgtccgcccacgcgtccgtgctgtgagacagtcactgttccaagaagcagacaagtattgtaagcacatatcgggaaagctatcacgtggccatggatgcttaaaagctttggccttcttggtcgttgcatttgctgtaggtgctgctgttgtaactcccaacatcgacccctcggactggagcaaactatccgaagctattggcaccgccgactgggacaaactatccgaagctctcagcaccgctgactggaacaaactgtccaaagttttcagctcttaacgatcttccccatctcataaacttcaaatctaggtactttcttttttcgatctagaattttaactggcaacggagaaaaaggtcgtttgatatggcattttaggagaatactattagaatagcggcttaaagaaggggataaaatggtgcaatgagtttggtttttactacaattacttgtatttcaaagtaatttattctcatgaacttagggtttcaaataatttgaggataattttcatgttg

SEQ ID NO: 197710 - DNA, 357 bp, Gossypium hirsutum
cttttcaaaaattaatatcggctttcgtccccgcccgcttcggatgcttgactgctattgtttccacagacttgtcggttttacctgaatgcctgtatgcctgtatattactgcagaatcactagacggcccctattattattattgttgttattattattattcattgcagtacgccatttttaatgcagcatattgctgtattgctggccatcattgcagccattttagcaagcctactctgtaacttatgatccatatgtagcatgggattgttttgtactgatattgcacttatctttattattgtattctagcatacagcacaacattatctgtaataaaatgattttatgc

SEQ ID NO: 197711 - DNA, 460 bp, Gossypium hirsutum
caaatctgataaaaatcgtttgtgcttgccatggaacccacatgtcccccgaagagtttgttcgtcatgccagtgaagagtgcaccaatcctgataataacaacggtttggcaacatttccaggtaccaatcctgctgcctctagtcagagctgaaatgacatacatttacttccaatcaagtatgacattggtatggccttgagaatacactgatgaggggccttgcttttctcgcggagtttagctctctgtacccttttccggttgtattagctccctgagttgaatacttcatttctatggaagtatttctagcatccgtttcttgtcaaatagtaatgttaagcattttatttctgtagtaacagttccttaagagaatcgttttccttttgttgtattttatttcctgccttttaagcttcagattctgacatgttagtatctgcagttttttg

SEQ ID NO: 197712 - DNA, 636 bp, Gossypium hirsutum
gctaatttagttccgaattgttttgttgccgaacgaagaattcttgtagtatgctctgcgagacaattgtattatactttcaacggcatcgttgtaacggcatctcgatgtcggatcttcggctcattctttgtgttatagaacccacataaattcggtggttagtatacttagaagtagatggcagtctctatagatcatttagcttagtgtgccattacgtcttacatttttacactctgtgaacattgctggaggaagctgctgaagaagaaagtcggcccgaaaatgagtacaatttgcagctaccgatgaaggaaaaaaatttcttacaaggggaaaattctggaaaacacaatagatgtgagaatattggaatttggagaatatatgaaactccaaacattgtttttctaggtcgaatgatgttgtctttgcattatattcaatttaaggattgctatataatttaatttgatataattttgggttattgctgtcggtcaattagatatgctgcatttacattatataattcaattcttatttaaattttataataaatgttaattcaggggtgtcctataccaattatactaagtgattgtttccattcattgctgagttgatttttcg

SEQ ID NO: 197713 - DNA, 464 bp, Gossypium hirsutum
tcgcccattcgtccgcggacgcgtgggttagaatttaggaaccgggttgtatctgtggggaacactaacaatggccctctgcaggctccagtgtcagatgcagcaggagctgcaccgataatttcaagcaatggagctggtccttccatcagtttacatgctagtgggagtatagaggagttagagcctgcggaacttactgcaatgacatcaatccctgttgcacctgtggtccagaagaagccgctaataagattgaacttcacgtccttgggtaaggcttcggagaaaagtgggtaaaaggggggtttttagagaagtggttttcacagtagtttgggaaggtggggttatgcatcataactgaagttaattgatccctttccatcctttcttaaacagttaagacttgtagttaataaaaaagaattctgagtttgcaagaattccagctttcagttgtg

SEQ ID NO: 197714 - DNA, 1411 bp, Gossypium hirsutum
  unsure (1)..(1411): unsure at all n locations
aactgtatgataagttgcagatcttgggttcagacgctgctgaagcacaggcatcaaagattcttgcagggttgggtttcaccaaacaaatgcaaggtcgtcctactcagtcttttagcggtggctggaggatgagaatatctctagctagggcactctttgtgcaaccaacacttctgttactggatgaaccaactaaccaccttgaccttagagctgttctttggttataggaatatttatttcgctggaaaaggacattggtggttgtttctcatgatcgagattttcttaatactgtttgcactgatattattcatctccatgatttcaagctccagttctaccgtggaaattttgatgattttgaatcagggtatgaacagcgtcgtaaagagatgaataagaagtttgaaatttatgagaagcaggtaaaagctgctaaaaggtcagggaatcgagttcagcaggagaaggtaaaagatcgagcgaagtttgcggcagcaaaagaagcagcgaagagcaagggaaagggcaagatcgatgaggatgatcgtccagctgaggccccgaagaagtggagggattacagtgtggagttccacttccctgagcctacggaactgacgccgcctcttttgccgatattgatggtaaccttcagttatcctaatcgggaggatttcaggctctcagacgttgatttgggtattgatatgggaactcgggttgccattgttgggcctaatggagctggtaaatctactctcttgaatcttattgctggtgatttagttccaacagagggtgaagtgcgaaggagtcagaagttgaggattgggaggtattctcaacactttgttgatctgctaacaatggaggagacacctgtgcagtatcttcttcgtcttcatccagatcaagagggactcancaagcaggaggctgttcgggccaaactggggaaatttggacttcccagccataatcacctcactccaattgcaaaattatctggagggcacaaagctcgagttgtctttacatcaatttccatgtcaaaacctcacatattgctggtggatgagcccacaaaccatttggacatgcaaagcatagatgcactagctgatgcgcttgatgagtttactggtggagtagtcctggtaagtcatgactcaaggctcatatcacgtgtctgcgaggatgaagagaagagtcaaatttgggtagtagataatgggactgtgaacactttccctggtagttttgaagactacaaagaagagctgcaaagagagattagagcagaggttgatgattgatgtggtattgagttttcccaacaaaaaatgaaaaattatatgtttaaccatataaatgcattaagacctgcatatggtatgatggg

SEQ ID NO: 197715 - DNA, 394 bp, Gossypium hirsutum
taacagagtacggagaatttgtgcgtagttttaatgctccttctgttgatgagaaatttgaactccttggaatcttggcgaatgtttttatcgttgctcctgaaagtctgtctagtttgtttgagggcacacctagtatccggaaagatgcacaaaggtttattcagcttagagaagactacaagagtgcgaagcttgcatcgaggctcagctctttatggtcgggtgtctggttgatgtagaggtggggttgttgctggttttcaaatatatagctctctttgtttgtcaccgtccttggtcaatgtattatattaaccaagaattgtttttcatgcctacttcaatcatcatttttaatttattatatctggattcaacccctccctttttt

SEQ ID NO: 197716 - DNA, 437 bp, Gossypium hirsutum
aaattttgctaaaacaaagaagatgatgacagatcaacaccactatcttaaaaggccaagtttacatcggccaattcttcttctgatgttgatggtgatgatcccatggagcacatgccattttgctttagacccaccggagaagagaaacagcctcggcttctttcactgcaacggctcgtccgctgaatgctccggcggtaaggttgaggacgacatgttattggagttcttggtggagtcggaaacaagaagaatgctgcagcaaggaggcaatcggccttcgactaacacccttaagcctaatattgcagcttgtggtcgtgacaagtacggctacttatgcactccgccgagcaacaaagatgttaaaagatctgaaaactgtggaggggataacttcaatcgtgcctgccaccaattatccaaatgagcag

SEQ ID NO: 197717 - DNA, 586 bp, Gossypium hirsutum
acaggtccctggtatcttgttcacaccaatctgtcctcattcattatcctttcgacccctgatattgcctgagcatgtaacagtccggattatggtgccgttcaatagcagaagtccggcttgggcatcattcgatggaaaggacaggaaactgttggctgctggggatgctcttctgtgcagcatggcaccttggcctgtgcctacagcttgtcaagttgattctactaatgactttttacgcagtatccatgacggcctccattggaatctgagaaagacgcagtcatttgatggccctcgggatcgggatctataaggtcattttccgaacttatatctagctggaatctaacttatacattccatatgtttcagtcattgtaggaaggggaaatcaaattcacaaaaactgaaatagctgtaagttcttgttatatcacagtattatggtttacccttaaaaatgttttccccttaaaggttgtaggaaggagcactatatttgcccttctgatgctgcagatataacctaagttgtagtcaacactagattatatttagatctttattatgagatcaaaag

SEQ ID NO: 197718 - DNA, 686 bp, Gossypium hirsutum
atagaccaataattattagacaaatgaaagtttttgataggtttaaaattgtagtcatttttaatgattgagctttgagattatatcactcttttttttttttgtatgatgatgcaggagtgaaaattgttgtgtatcagttgaataaagaaaatttggacactgttctctcatggaggcgagtttacaattacagagattttccagttatggttgcttcaaaatcgaaccattattggattcctttccttctgttaaaactacacagtttaccccatggcgtagcaagtgctctgtcatttgtctttcacatagagttactgctagtgctgctgatttttccaagaggagacaaagaaggttgtctaaaggtgtcaactccaaagggtttcacttcgaaaacacgaatgagtactcagaagagaaaaccacaaaagaataatgaacagaaagaggattctagcattcccaagttgagtgagtttgtagagccaaataatagggaaattgaattgaaagtagatgaagttgaaaataaagaaggaaaagaggatttatcatcaattggaaaagagttagatattcgcttaagcaaccataatgttgtaaatggaaatggaaatggaatgattcttggatatgttgtcgggttggagaagaaagagataaattcggaaaatggcact

SEQ ID NO: 197719 - DNA, 407 bp, Gossypium hirsutum
cgaagtgtaccttctttagatcaaacagcaataaccttcaatgcacgtggggatgtaatttatgctatcctgaggagaaatcttgaagatgtgatgtcagcagttaatacccgtcgcgtgaaacatcctttatttgctgctttccgcacattagatgccattaactactctgatattgcaactattccagtggatcgatgtgttcttgactttgcaactgaaccaactgattcctttgttgggttgattacaatggatgaccaagaagagatgttttcatcaagccagggtttatgaaattggtcgccgaaggccgactgatgatgattctgatcctgatgatgcagaaagtgacgaggacgaggatgatgatgacgatgatgctgatgtagacccaatacttgggc

SEQ ID NO: 197720 - DNA, 1181 bp, Gossypium hirsutum
caaagttcagcatcacgaaacaattataagaatgatttccgtgactctggcggacttgagaaccaatcggtgcaagaattggagaagtatgccgtctacaagtctgaggagactactaagaccgtcaacaattgtgtgaagattgcggaagaaatgagagaaggtgccaccaatactttgatcgccttacatcaacagggtgaacagattacccggactcataatacggctgctggcattgatcatgaccttagtcggggcgagaagctcttgggaagtctcggaggccggttctctagaacctggaaaccgaagaagactcggcaaatagttggccctgttataacaagagatgatttgcctaagagtagaggtggccacttggagcaaaaggagaaactgggattgaatcctgttccaaggagacattcaaaatcacaaacgccaccccctgagccggtggatgcgtatcaaaaagtggagtttgaaaaggcaaagcaagatgatgccctctctggtttaagcgatctactgggagagttgaagggtatggctgtcgatatgggatccgaaatcgagaggcaaaataagagtctgaatggtctccaagatgatgtggatgagctaaatttccgtgtgagaggagcaaatcaacgagctcgccgattgcttgggaagtaacactgcaggtttgagattcaggctgacatgtccggttcactcttctggcattgtgatctcacacagccatattgggggattttattagtatattcggcttcttaccttaccatgtttctcttacgtttcaggcatatcatatgcttaactatggactttcacaatccgagtatgcgccttgccttttgtatttatttttctgtttttcaattaaatatattactaaatatgttgaataaaaaaaaaaaaaaaaaaaaaaaaaaaaaaaaaatgaaaaaaaaaaaaaaaaaaaaaaaaaaaaaaaaaaaaaaaaaaaacaaaaaaaaaaaaaagagggggggcccgttttaaaggatccaattttacttccccttgcttccaacttaataccttttttttggggcccccaaaattcaattcacgggccgtgtttttacaacgtggtaatgggaaaaaccctggctttaccaaattaaatggctttgcaaaaaatccccttt

SEQ ID NO: 197721 - DNA, 417 bp, Gossypium hirsutum
tcctgatgatgatggccggtgcggttcaaaacttcagagtgcaggtcttccgtgctaaaattggagcatcaaatgggtcatctcttagtttgtttcggaaattgggcttcaaggagacttcttatagcgaaatcttcaaggaggtaacattggaattggcggtgacggagcaaaagcaagaggagcttctgcagttgttgggcagtgtggttacacatgcatagcctccgggaggccgtaatttattttcccctaaaacttattaactgtcatcatacatgtatctgtgagttgtagaaactagaattgtagatgattccctgttttcggaaaagggttttgatgtttatgatgatgatcaatgctggaaacttacatttgcaataatgataaacaatgatgaatggctttagcatt

SEQ ID NO: 197722 - DNA, 620 bp, Gossypium hirsutum
cttagggtgtggttaagcggtgccttaactaccttacaaacatgtgtagactcatacgcggaggtaaataaagaacaagcggaaaagatgaattcaattttgaagacttcaatggagcttacccaaaattctttaaccatggtgactaagttatccaccatcttgaatgaccttaacattccaggcatcaatatcgacacaactgggtttgaacgtaagctcctgtctaacgatggacctgagtggatgggccacgctgagaggagactacttcaagcaaaaccaacagatgtgaagcctaacgttgtggttgctaaggatggtagtgggaaatatgataccatcaccaaggccttggctgaagtccctctgaaaagccccaatcgatttattattcacattaaggctggtacttacaaggaacatgtccttttacccaaggagatgactaatgttatgttcatcggtgatggcccaactaagaccatcatcaccaatgaccttaactgcattagggatcatccgcttaaaacattcggcactgcaacagttggtgtggatggggctggtttcatggccagggacattggattcgagaacacagcaggaccccctggtca

SEQ ID NO: 197723 - DNA, 388 bp, Gossypium hirsutum
cataagccctgtactaatagtcagattggattttgttccctttactaaaaaatgggctaatgggtccctgtacatgagatcggagaacatattggtcttttttgttaagaatttcatccattcctactgttaaaagccgttgtgattgatggagtaattagacagctatacgtggcatgccatgtatatcttatgttgacatacatgggctagtttttaagagtcataatggatgaaatttttaatagaatgaccaacttattttttgatccaacgactctttcgtacatttttggaatagatgaagtagagtgccatcagcttactagtagtacaacagtctttatgatattttcactgatcatattctacactgttcgcaacatga

SEQ ID NO: 197724 - DNA, 652 bp, Gossypium hirsutum
ctaggctggaaattaatttcctggataaaggtcttggctaagatgatctgacccgagtaattggtgatagtagtatgtcctctaaaagcttttgtagacattggaatatggggatatatagctaccaaaggattaacttgaattttgtgtaattctttttagagcctgttgtatgaaataatcactggcattgaaactgaatcaaccaatgttccaagttcatcttctgctgcacctagagttttgatgactaagccagttagtgaactcgtctcagaagttgcaccttttgctagattggtagtattccatttcactttgtttttggtatttgtttgcttgttaatctccgactaagtatatttttaaattttgttatttcttataattgcaggatcccatgcttagtagaaatattagacctgacggtgatgagcaatcaaatttacaggataagcctaatggccaaagtgatgaatgttgctcatatacaagctcaaacagggaaagttggggaagatgctcttcactggggggcagtgatgaagaatcttcagcagactgtacggctgctaataacggaaatcaggtgactcttgatgtgcttgcaacacctctgaaaagcacgcagcaaaaatcaagtgatccaccc

SEQ ID NO: 197725 - DNA, 418 bp, Gossypium hirsutum
acgacgtacgagcacaagcattaaagctgaaaagatttatttgtatctaggttttgatcctgcttccctaggctttggctcctaatgaattaagccatgacacgcaaatggaagctattaaccaaagagatgcagatattctctttttatggcatatgtacaaaaattcggaagatggatcgaagaagaaagaaatactgaaacagatttctgagactatgaggcatagaatccacttggatggcagcattgacttgattgggacagtgttgtatggaccagcaaaaggctctgtcatcctcaataccatcagggaacctggtttgccccttgttgatgactggcagtgcttgaaatccatggttcgcttggtcgaaacacactgcgggtcactaactcattacggaatgaaacacat

SEQ ID NO: 197726 - DNA, 487 bp, Gossypium hirsutum
ctggaatggtcagatggaaaacacattgttggtggtccaatagctttcagttggacataaccatgacaacaattaggttcatgatactaatactgggactttcaagtgccctcaaagcaccagagacctctcttatagtatatgaatccatctcgtactatctcatattacagcaacgcacaaagctgctccaactgtattcataaatgctctccaaggacaattaggggacagtaaattgggtttaaaaaaaaaggtcagggccagctcggggaataattgtatagtggcctacctgtataaggaactagcatgttaatttaaactggattcctagttataagtcatgttttacaaatattgcatcttgcattcttccaatatccttgtctatcatagttcacactggtgagaaagataaaagagggttattgttattatgtttgaaaaaaatacacacaacgagaccggtatactttccaaaaca

SEQ ID NO: 197727 - DNA, 665 bp, Gossypium hirsutum
  unsure (1)..(665): unsure at all n locations
cccacgcgtccgcgaatcatgggtgttttaagtggattaattgctgtcggaaaatggttcgagcaaatctgtaactggagaaacccgcttacgacgattttaatccatatcctttttatcatcttagtcctttatcccgagctgatacttccaacaatctttctttaccttttcttaattggaatatggaactatcggtggagaccacgacaccctcctcatatggatactcggctttcacatgctgatgcagctcatcctgatgaactagacgaagagttcgatactttcccaacttctcgaccttccgatatcggacggatgaggggcgatcgttttagaagtatagctgggagagttcaaactgtgatcggggacctcgcaactcaaggggaacgatttcagtccttgctaagctggagagacccgagagcaaccacattatttgtgacattctgtttgatcgctgccttggttctttacgttacgccattccaagtcgntgctcttcttgcaggaatttacattttacgacacccgaggttccgtcacaagcttccatcgacacctcttaacttctttaggaagttgcctgcaagatcagacagcatgttatgagcaccccaagcagccattatatgttttccgatgttcgcggcaatcgg

SEQ ID NO: 197728 - DNA, 559 bp, Gossypium hirsutum
gaaatttatttccgtttttaactataatccaacaaattttccccctccaaacatacaagacatcactatttccaaatccttcactctcatccaaatctcctcttttgtttcctgcgattaatttcctctccccccatggcttccgtaacggttgctttctctccgattaccaccgctgcttctgccccttattcttcggtttccgatcggagaatatccgttagattaccgggatttcgtggtctcaagagtaaatcgacgtcggcgtcggtggttccgttgttccgatcggtgatccgggagccgcttatacgcggtcgaggtggccgtgtagtatgtgaagcccaggagaccgctgttgatgtgtcagcagtgaatgaagatgcatggcaatcacttgttcttgattgtgaattgcctgtgctggttgagttttgggctccatggtgtggaccttgccgtatgatacaccccgtagttgacgagctgtcgaaggattacgccgggaagctcaagtgttacaaagttaacaccgacgagtgccccaacattgcaactc

SEQ ID NO: 197729 - DNA, 216 bp, Gossypium hirsutum
ggtcgaccacgcgtccggaacattcttcgataatgaatattcatcatgaaaagaatatagacgaacaaatgtatctggagcgttatatatgccagatggatcagcatcctgaacaatccatggatgctcaagaagcttatgtagcgggaggcgctgggaggaatcttcgacaagcatctgtaaatgacgtggaaatgtgaacagcatatgccagat

SEQ ID NO: 197730 - DNA, 338 bp, Gossypium hirsutum
tcttgtctctaacaaataaccaaagcaccgtggcattttgaaccatatattaagggcattaatgaataaagtgaagagatatctaccacctcaaaggtcaggtatcgctgctctagacttctagtatctccaatctcttggatgatggcattagttatttacttaaaaatcgtggtgtgataaatttaaggatatacttttagtaagctgatttatttattttgtattcttgggatttaaaaagcaaacttcaatttaatttataaacatttttttggaaataaagtgctacgaaaaaacgagggcttacttcttttataatgcacaacaaaatcaat

SEQ ID NO: 197731 - DNA, 1157 bp, Gossypium hirsutum
gccatttttagatccatcacttctctttgtaactgaaaaaacaaaacccaatttgaaaccctaacaaagaaccagggaacaccgaaggaagaatctcgagaaccatggacagagactggggctccaaacccggttctggaggtgctgcctccgcccaaactgaagccatggaccgccgcgagcggctccgtcggcttgctcttgaaaccatcgatctcgccaaagatccctatttcatgcgcaaccacctcggcagttatgagtgtaagctttgtctgacgctacacaacaatgaagggaactatttggcacatacgcaagggaagcggcaccagaccaacttagctaagagagcggcgcgtgaggctaaggaggctccggctcagcctcagcctcacaagcgtaaagtttctgttcgtaaaacagtcaaaattggtaggccaggatatcgtgtgacaaagcaatatgatccggagaacaagcagagatctcttctcttccagattgaatatcctgaaatagaagacaatacaaagcccaggcaccgtgttatgtcgtcttatgagcagagagtgccaccatttgataggagatatcagtatctcctttttgctgcagaaccctatgagatcatagctttcaaggttcccaagcaccgagatcgataaatccactcctaaatgcttctcgcattgggattctgactcgaaaatgttcacattgcaggtatattttaaaaccaagccactagaggtgaacaaacctccacctcctcctgcagtcaatggtactgcggccccaggtgctcctccaaggcctttgcctccaccacctcatgctccagcaccgcctcctcctcctccacctcaagggctgccaaaccctcctaggggcgctccacctccagctcctggttcattaccgccgcctccgccccctatgggaaatggtcctaggcctatgcctcctggtggcaaccctatagccccaccaccacctcttgggggtagcgggacaattggaaatttcactcctaggcctccaactaaccctcctccacaaggtgtccctggtcatcaaatgcagggaagggtttgcttccgccgtctctcactcctaggatgggagagtatttcacctggcttccagtgtcctat

SEQ ID NO: 197732 - DNA, 425 bp, Gossypium hirsutum
agcctaatttgtatgaagctgacgaacattggccactccatttagcttttgtcgtgccgcatttttgcgcatctttactgctttcttaggcagatgatgatttctaattgacatgtcttactttgagcaatgtcaaactttagtgactcaaaattttgctgtgtgctgaaaaggtaccacattacagtttagtatgtcttattctttcatgtatttttcattttttccaggaagagatggaagagcttgagagaactgacaatgtatcaacattgtctgaggagttgctgcttatcatggagacaatacctgatccactactcccattaacaaatggtcctataaacccatcttgggatagatggtttgaagggccccaagacgccaaaggttgcagatgccagattctctgatttgaggcaatc

SEQ ID NO: 197733 - DNA, 762 bp, Gossypium hirsutum
ctttgataaggatatttgggaattagggtttttaattggagttcaatttgtgtaattatgttgaccaaaggaagtagcctttgataaggataactgggaattagggtttttgattggtgttcaatttgtgtaattttattgaccaaaggaatagcctttgataaggatagactttaaaggcttcaacttgatataaccttttttttttcttatactcaatgttttgttgattattattggcttttttttttttgacaattttttgtttttttacataaaaatcccctaatttttttaaaattcttttttgattatttgattggtttttcatgttgtttttgagctgtcatacatggaaacattcaaaggaaatatgaaattgagccatgttttacccaaaagtgtttttggttcatttttttcttattacaggtagcaaaagcacttggtggtctaattcccttacccgaacccggtccgagtgacccgagaagaaaagaattaatcgagttggagcaacaaaaagccgtgatcgatacgaaagctgattccttggtccgtcgtgaactctggctcggtttagcttacttggtggttcaaaccgccgggttcatgagactaaccttttgggaactctcatgggatgtgatggaacctatttgcttctacgtcacttccatgtacttcatggccggatatgcatttttccttagaacgtccaaagaaccttctttcgaaggattctatcaaagcaggttcaac

SEQ ID NO: 197734 - DNA, 499 bp, Gossypium hirsutum
aaaacatgattttcaaaccagttaactaaaggatcttggagcttactcaaggcagcagcaaaatctgggacaaaagatatgtcaacgtcttgcatgttttcgacaccatgagggattgaagagtgggaagggaaaggaaggaccaaggtttgaagattggaagaagaatgtaaagagaggagcgagttgagataatgaaggtttttgggtgtgaccatgatcgtcactgttaagccacgaaggaggatttggtgggctaaatccatgaggggaaaaatatgtcccgatgctgggaatgggatcattagaacgtggactccattgctgaagtttgtcattgcttcttttctttttctttcacttcctttcttgcttttcttgctctcgtagtcgtagtctgatttgtgccataatttatatgcaaacttttctttttattaatatataataggtttgtatttgatataaaagttatacatactgatttaaatttgttttt

SEQ ID NO: 197735 - DNA, 880 bp, Gossypium hirsutum
ccgaatgaagggtcgaccgacgcatgcgtaccgtcaatatcgaatctcgctttgcaaaagtctgtggagtcagcgtcgataaaagaaccaacgggtgcatcaacaacagaagtagtaaaggctaatgtcgatgtgaaacctgtacaagagaatggatcagtttcagcaactgaagatggccccaactcagtttgtgttgcgagtgcttgctaattgccttcttagattcggaaatagtgttgtccttttggttggttattgacaagttagctgattcagatcagagcctctgattggctgggactggtctatagctttttccatggaggtaggaatgagcaacacctttcagcattgttggcaaaatagctattagcagcatggttagactgaatgtgactgctcaatagcgtgaggttttcttttttgtctttcatttctcatctgttttcctggttattttctttttcttaaggataaggaattgagaatgaaaaatattactcctatttgcatcttgcatttgatgaagtgggtttttgttaacatttctagtatagggaagtaaaagagttgtattgcagacttgttatgttcttgttcacaatctataatttatggggtgtaataaatttcttttgtgtgagaaatgcataaatctgtggccactgtttcaaggaatagcatattacatgtaattcaatatgtcctaacagtatttatccatttgaaaatagaaaatatgcattagttaaactgctaatgcctcatttacttatattttttatgtactgttctttgggtatgaataagatgggtattaatcatttagataagcactttgtcgccattgatgctgccattgtagtcaacgaacttt

SEQ ID NO: 197736 - DNA, 568 bp, Gossypium hirsutum
ccggggaggaccaccctcttgcttttggtggtccaagaaatcataggaactgagggtgctcgtctgtccgatgctgaccaaactcaaagctccactgtaaacgaagatgctcggtgtaggaagctcggtttacaagttgtttctagtctcagttcagagctcaccaatgtgaagaaagctgcagcaatggattccgaggtacttaacagcgatgtcttgaagctttctagaggcattgaaaacatcagcgacgttctaagattaaatgaaaaaatggcattggatgagagcctggagaagttttccgaatcaatgaacaagttcatgaaaatggccgaggaagagattataaggattcaagcccatgaaagtgtggccttatctctggtaaaggagattactgaatacttccatgggaactcaacaaaagaagaggcccacccatttagaatctttatggtggtgagggatttccttacggttctcgaacgggtctgcaaggaagttgggatgataaatgaacgaactgttgttagttctgcccataaattcccagtcccagtgaatc

SEQ ID NO: 197737 - DNA, 384 bp, Gossypium hirsutum
gccacgcgtacttcaaatggatgcagctgttgtcataaagaccttttctcatgaagacgaattacttatccgtgtccatcgtggttgtatataacactctaccagatgagcgccttctcttacaatctgtaatcagcttattgttcgcttgccgcggcctatttttggaatataaatgcttttttacaaaaggcaataacaaatagtaataaaaaaaaaaaacaaattcttaatttaattaatttaactatcatcccccttaaaaaaaaaaaaaaaatttttttattaaatacctacctatttaccatttttgggggggccctttttagaggtccaaattttattccccggtgtttggaagtaataattttttttttggggccc

SEQ ID NO: 197738 - DNA, 524 bp, Gossypium hirsutum
  unsure (1)..(524): unsure at all n locations
cccacgcgtccggctaaagcagtggctttatcacttggcacgcattggatctccaactttgtcattggcctttatttcttgagtgttgtgaacaagtttggcatcagctcagtgtacttgggattcgctggtgtgtgcgctcttgctgtcttgtacatagctggtaacgttgtggaaacaaaggggcgatcattggaagaaatagagcttgctctgaatccgacgacttaatttgtacaatatccaaaggtatgcagaaataatctctgaagctggttaatgctcatctcatgagcattccattattttgcatcttttggttaaggccagagagaggcaactagttctagtgacgtgtacgtatacctatgttgcttgaaatatggaaagaagagatttttggtagtttgaactctgttggtttatgaaatgcaagatgttgcgtaagactattagtccccatgtacaacgctttaagcgtgaaataantttattaaaaaaaggaaggaagataatgagatgat

SEQ ID NO: 197739 - DNA, 709 bp, Gossypium hirsutum
gcattttacgcattgtcggaaagtactttcctgctccagttgttagtggggagcgactaaagagatatatataccacaagatatgcagtgagttgcctgaaggtccattctgcatagtttatatgcacagtacagtgcagaaggaggataactcccctggtgttactatcttgaggtggatttacgaagaacttccccctgagatcaaggataggctgcaagtcatctacttcatacaccctgggcttcgttcaaggcttgtctttgccactcttggccgattcttcttaagtgggggtttatactggaagatcaagtacataagccgcctacaatacctatgggaggacataaagaagggagaggttgagatccctgaatttgtgcaaaaccatgacgatgttcttgagcaccggcccttaacagattatggtattgagccagatcctctccacttaacagaggtacctaacactgcttactcattagggaggtatgaagagagattaacctcaagggaattcatgtcatagtttcgatattaaacacacagctgaacccagttaaagggtttgcaggctctggccagtaggaattatcaggtaaaacaagaaataagattgtctatagtagtctttatattgcgtgccttgaattgtgagaaatcgctacgctgtacttgtagttaattaaatttggtgtgttatgg

SEQ ID NO: 197740 - DNA, 599 bp, Gossypium hirsutum
ctgttctctcgttcgacacaaagactgggaattgcacgaaatgctatgccggtttgtgcttctccaatgtggatctcattgcatcgttgactctgaacgaaaagggtgactctcttaacgcgtcatactatcatatagtgaatcccatgactaacactgctgttggcgccgaggtgacccatagcttctctaccaatgaaaacaccatcaccatcggtacacaacatgcattggatccattgacgatggttaaggcacgggtgaacaacgctgggaaggcaagcgcactaatccagcacgagtggcgccccagatccctctttaccatttctggggaggtggataccaagtccattgacaagagtgccaaggttggacttgctttggcactcaagccttgagcgctttaaaagatctgctccatcttggaagagtacggcaaggtaagcttagaattttgaaatgtaatctggtgacactttttcatggcgttgccatagacacttatgtcagtggtccttttttttctttttggcttaaaataagaagaaaacggaacaaaaagaaaaagaaatggcatgttggcttctttttgaaca

SEQ ID NO: 197741 - DNA, 428 bp, Gossypium hirsutum
cccacgcgtccgggtgattcagttaacgcatcttactaccatattgtgaatccatcaaccaacactgctgttggtgctgaggtgactcatagcttctctaccaatgtgaacaccatcaccgtgggtacacaacatgcattggatccatcaaccacaatcaaggcacgggtgaacaatgccggcaaggcaagcgcactcatccagcacgagtggcgcccgaaatcgctctttaccatttctggagaggtggataccaagtccatcgataagagccccaaggtcggacttgctttggcactcaagccttgagagcctaaaaaaaaaagaggggcgcattttggtaagggtatggtagacttgaaaagagttttgaagttttagtctgttattgacattcatggggttgccatcttacctttcatgtcaat

SEQ ID NO: 197742 - DNA, 459 bp, Gossypium hirsutum
aaattacttggtcacctttttattaattcagggggctaaataatagaagagacaatttcttgctttcgtttctttaatgaagtggataaatcactatactaaagggttctatattctatctgtttccccctattttggctacgtttctttttggcccgaacctaacaatccatcccttctatcgcagaaaaccttgcatctggctcagggttttgaatgcctgattaaataatttgaagatgagtccattttcaatcacgcgtaagaaaacgcctttccagaagcacagagaagaggaagaagccaagaagaagagggcagaggacgaaactgctcgattatacgaggagtttgtggcatcgtttcaaggagataatacccctggatcgaaggcatttgttcgaggtggaacaatcaatcccaacgagaggttgaaatccgattcttgaggtgaaaagt

SEQ ID NO: 197743 - DNA, 355 bp, Gossypium hirsutum
ctcacccttcgcactcctctaaactagttcatccccccagtctcattaattctcgaagagacaatttcttggctatcgtttctttaaatgaagtggataaatcactatacttaagggttctatattctatctgtttccccctattttggctacgcttctttttggcccgaacctaacaatccatcccttctatcgcagaaaaccttgcatctggctcatggttttgaatgcctgattaaataatttgaatatgagtccattttcaatcactcttaataaaacgccttttcagaatcacatagaatatgaagataccaataataaaaagtcatatgactaaaactgctccattata

SEQ ID NO: 197744 - DNA, 419 bp, Gossypium hirsutum
atttcttgccgctataatgatactagctgcaggtcgcatgtgcatgagtttccggcgcgtgatacttgcatccaggagctcgaagtaccgaaggctcgacatggagctgcctgtatccgttgcggcaaaagcagaaccagaacgagatgttaacgacgggtgggataacagctggggtgatgactgggatgacgaggaagcgcctatgactccgtcgaagcctgtcacacctggcctctcctccaaaggccttgcctcccgacggttgagtaaagagggatggaaggactaataccatttttgattcaaacaagcaaccaaaacttcatcaaagaatactgtagtatgtaatatgctggtttattttagtcgtatcagtttttccacttagaaagctgtttgtttctttttgttttatt

SEQ ID NO: 197745 - DNA, 693 bp, Gossypium hirsutum
  unsure (1)..(693): unsure at all n locations
cccacgcgtccgaaattctttgctcttctgctcttcttccactgaaaccgtaaggagaagatcggagagaaaatatggcggccggcgatcgcaccgttttgcagtttaactcaccgtcatcggcgatcctgtcagcgaaagttcaccctctcgtcatatttaacatctgcgattgctacgtcaggcgtcccgaccaagccgagcgcgtcatcggcacgctcctcggctccgtcctccctgatggcaccgttgatatccgtaactcctatgcagttcctcacacggagtccgctgaacaggttgctttggatattgaataccatcataatatgttagtctcccaccaaaaagtgaatcctaaagaagtgattgttggatggtattctaccgggctaggagtcacaggtggtagtgcattgatccatgatttttattctagggaagtacctaccctattattggacggtgaaacggggttaggatggggaggtaccgtaaggttttgtttctgtcaattanctctggagacgacaactgcgctcatttcggaattctttgactatgatggtgaagctagcgagtggattgacatctcagaaacacagtcgcaaattccaatgatnngagggatgaataccatgggaagtatcgcttgnatnacatgttccaatccttnacatttggaaggcgtcc

SEQ ID NO: 197746 - DNA, 664 bp, Gossypium hirsutum
  unsure (1)..(664): unsure at all n locations
gcgattgctacgtcagacgccccgaccaagccgagcgcgtaatcggcacgctcctcggctccgtccttcctgatggcaccgttgatatccgtaactcctatgccgttcctcacaccgaatccgccgaacaggttgctttggatattgaataccatcataatatggtagtctcccaccaaaaagtgaatccaaaggaagtaattgttggatggtattctactggccttggagtcactggcggcagtgcattgatccatgatttttattctagggaagtccctaaccctgttcatttgacggtggatacggggtttaggaatggagagggcaccgtaaaggcctacttttgtttctgtcaatttagctcttggagaccgacagcttgctgctcaattccaagaaattcctcttgatctacgtatggttgaagctgagcgagttggatttgacatcctcaagaaaacagcagtcgacaaatttccaaatgatttggaaggaatggaagtcacaatgggaaggctatcggctttgatagacgatgtctacaaatacgttgacgatgttgtggaaagccgtgttccagccgataacaacataggtagatttatagcagaaacagtagcttccttacctaaactatctnccccagctttcgataaactca

SEQ ID NO: 197747 - DNA, 845 bp, Gossypium hirsutum
gtcctttcctttccttttcccctcttacatgctccttggtacccaaggtttcagccatggcgacaatgctgagatctctgctaactttcacactcttcacgcttcttttctcctacgtttctgcaacaacaattacactctacaacaagtgccctcacccagtgtggccaggtatccaacccagcgctgggaagccacttttagctcgcggtggctttaaacttcgacccaacaaggcctactccatgcgtctccctcccctctggtccggtcgtttctggggccgtcacggctgctccttcgacgcatccggacgcggccgttgcgctactggtgactgcggcggatccctcttctgtaacggcctcggcggtgccccgcctgctacgctagccgaaatcaccctcggccaggaccaggatttctacgatgtgagcttggtggatggctacaacatagcaatgtcaataaccccattcaaaggctcaggcaaatgtagctacgctgggtgtgtgagtgacttgaacttaatgtgcccccttggtttacaagtgagatcgaaggataacaagcaagtggtagcttggtaaaagtgcctgctttgctttcaactccccgaggtattgctgcactgggaccttcgggaacccccagtcatgcaagccaacagcgtattcgaagattttcaaggcagcttgtcccaaagcatattcctatgcatacgatgatccaaccagcattgctacttgcacccgcggcaattatttggtcactttttgcccccatcgtcgctagaattgttattttatatatatttagggttagtttggatgggcgtgctaatt

SEQ ID NO: 197748 - DNA, 499 bp, Gossypium hirsutum
ggaattgacaccgctcttagcctcgttttcttcacgcagccctactactgctccgatggcatccaccaccaccaccaccactggcgcctattcgtcggcagaagaaaaccctaagaagaccctggacgctgcctcaccttctatggataagtcagatcctcctagcgcttcaacactttccgatgctgaggtttctgtaaaggagggcgagggtttgaagaccactgggactgctgtgggcttggccgctggggaaagcagcggtcccgccgacgatatccagaagaagattcgacgagctgagcgaatcggcctgcccattccagttatctgagcaagaaaagcgtaattctagggccgaaaggtttggcactgcacccagctcaaagggatcggaggaatctaagcaattggaggagctgaagaggaaggctagagcagagaggtttggaattgctgcacccactacagctactgatgaggatgcaaagaagaaagc

SEQ ID NO: 197749 - DNA, 347 bp, Gossypium hirsutum
gatccacgcgtccgcgtgatagatcagctcgttaacaagcttcagattgctaaaattactgaacatggtgtaacaatttcccagccatattcattgaagacgtactgggaattctctgcttttgagaaccctgcacagggtgctataggatcatggtagctgtagcaaacttttcatcccttctggaatcttctatgcaatcatatgaaaagaacattaaacatagatggaagacaacttgtttcatgttttatgtctggttgaaacttattgagtttgaggctgattgtcatttgatttaatgcgacagcgtatgctttacttaaaaaatcttaatatacctatct

SEQ ID NO: 197750 - DNA, 554 bp, Gossypium hirsutum
gcatcttcatcttgttctatggcgatgatgagtagctgtgggaacataaccgtccaatcggctgaccaactgaagcaattgaaggacatattcatgcgtttcgacatggattccgacggcagcctcacccagcttgagctggccgctctcttgcgctccttgggtctcaagcctagtggtgaccagatccaccttttgctaggcgacattgatgctaacgggaatggccttgtggagttcgaggaattggtgagcgccattctgcccgacatcacccaccaaattttgataaacgaggcccacttgttggaggttttccaattatttgatcgggatggcaatgggtttattacgcccgcggagcttgctggctctatggctaaaatgggccatcccttgaccttccgtgaactttccgatatgatgaaagaggctgattccaatggagacggcgtcgtaagtgtctttgattttactagtatcatggccaattcagctgccgattttcttggtattaaacttaaccattctgttaagtaatgactatcctcctc

SEQ ID NO: 197751 - DNA, 860 bp, Gossypium hirsutum
  unsure (1)..(860): unsure at all n locations
cccacgcgtncgtttcaagtctctgtttttctgattttctttttgtagaaaatacaatgaggtaaagttatgatcttgtttcgattccagaaagtaaaagcttggtgttgttactaatggaaactgatacgatcaaaccctgcgataacgtcgttcattctcgattcttccgttctggattttattgctggggttgggaattcttgactgctctgcttctctttagttgttctgcctaaaaacgaccaggtttttcaatttgttcttcctttttacttttggaatcataattctttggtagaatcttttttttggggggttttccgtgtactttgggagggatttgatcaatcggaaagtcggaaaatatggcgcaaaggtcagttccggcgccgttcttgatcaaaacgtaccagctggtggatgatccgatcaccgacgacgtgatttcttggaacgaaagcggcacctcttttgtcgtttggaaaactgctgattttgctaaggatttgctccccacctatttcaagcacaacaacttttccagcttcgtccgtcagctcaacacttacggatttcgaaaggttgttccggacaaatgggaattcgcgaacgacaacttcaagcgagggcaaaaacagctcttgtccgaaatccgtcgccggaagacggtgacatcaccgncggctgatgctccggcgaacggcaaaacgtctggtgccgcagctccctcctcgactgacttcggtgaggacctaggatccacttccacgtcgactcaccgggaatcaagaatccggatcggtggaaacgacgcggcagtgacacgattaatagccgatctatcgacgagacgagat

SEQ ID NO: 197752 - DNA, 350 bp, Gossypium hirsutum
tcgagccacgactcacgcatagcgtgaagatatcgagttggctaagagggagaatgcactgggcgatgctggttatatggatgcggatcaacagccttaattgactgtgccatccaaaattttcttctttgatgatatagttggtgtttaagaagagggtatttatttaaatgtttaatttaatttaagttttatgtatccatttatttcctagaagttccttcataatgatgttactctgaaatattttcattttgatcaaggatagcctgaaatttgctgttaagtttgattatgccatgagaattctggaaatgaatctagatcccatcacaaaaaacaatcacgct

SEQ ID NO: 197753 - DNA, 516 bp, Gossypium hirsutum
ggaaaaacaggctcatctccaaataggcatgtgcttaccaaaggtctgggggagactgctgtggccagatggaatgatatggacaaagtatctcctgctcagaccatagaagcaaatgattcggaaagtaaaggaattggttatgttccagatgaatgggatgaagaatatgacaggggtaagaggaagaagataaggcaaaataagcacaagttcggcggtgcaaatcttttccaacaaatcgccaccaagaaaacacggtttaagaaggctaagttagaccattctaaatcagaaaacctaccattcaggatatgaagtaaatccattatcaatttggatcaattttgacctctctgtctgctgttatagtttatgcagcaattcttgctgtcttgttgacatgagcgaaattgtattttgtaaccaggagaatgtctaaagtggagaaaaaaaaatcagataattgtagtttttcccattccttttccttttctggagtttcttcattatata

SEQ ID NO: 197754 - DNA, 499 bp, Gossypium hirsutum
cgggccgaccgcacgcgtccggctactttaactcttcattttgatttgctatttttgctccatccgtcggttaccggggttcgcaaacataaaatggagagatagactaaccttgtatcacctgaattctagagacacttcgtccttaggtgtttaattttagctggtagttgtatttttcctctggaacacaggttttacttgttacatcctttattaatggcgagtgaagggaaatgatgcaattagtaaagtttttctctagacttaatcagttgcactcagagaagtagaggttaatagatttttcgtaaatcctttgcaggtttaaagacaggcttaactattacttagatcatttacatgatgacaagctttctcagtacaagaagcaccatctatgctaaattttcgatatgttttctcttttcccttttttgttttttaacattgaaaaatttataattcctatcacttacctttttgtatcaaatctatt

SEQ ID NO: 197755 - DNA, 695 bp, Gossypium hirsutum
cccacgcgtccgcaaaaaaaaaaaaaaaaaaagagagaaaaataaaaaaaaagggggggggagaaccatggcctccatcggacttaacatagagacctgcctccacgtctgaggcatggactatgtttactgctagggtttgccttactcatttcactagtgacccatctttgggtgatgaaaagcctgcctttttcagcattaaagcctttgtcagcttgatcaggcctgagcaagcaatgtggtaccgtgcttgcataacatgcaacaagaaagttactgaagctgctggatctggctattggtgtgagggatgccagaataatgatgaagagtgtaatttaagatacataatggtctcaaagatctctgatacaagaggtgaagcctgggtttcagcctttaatgaacaagcagagaaaattgttggatgctcagctgatgaacttgataaactcaagtcggagcaaggggatattgatggataccaaaaaaagttgaaggaagcaacttgggttcctcatcttttcaaagtcagtgttactcaaaatgagtataacaatgagaagcggcaaaggataacagtaagggctgttgctccaatcaactttgctgaagaatccaggtttctgcttgaagagatcaagaagatgagaaatcctcagtagattgtttagttttgggttgtaatgatg

SEQ ID NO: 197756 - DNA, 620 bp, Gossypium hirsutum
cccacgcgtccggaaaaccagactcctttaactggtgtgcggggtcccttgttggatgaagtacatcaagagctgaattcatggatatcacaggttaccagggtatacaagggaaaagagcatgctgagctcgagttcagtattggacctattcctgtgaatgatgggataggtaaagaaatcatcactcaaattacaacaactatgaggaccaacaaaacgttctatacagattctaatggacgtgacttcattaaacggattcgagattttaggaaagactgggaccttcaagttaaccaaccaattgctggaaattactacccggttaaccttggaatctatgtccaagatgatagcacagagctctcagtgttggtggatcgttcagtgggggcatccagcttagctgatggccaaattgagctgatgcttcacaggaggttgattcacgatgatatcagaggtgttggtgaagtattaaatgaaacagtttgtgtctctgaaggatgtgatggtttaactatccttgggaaattgtatctccgaattgatcatataggagaaggggcaaagtggcgttccacggttggccaagaaatatattccccacttctttt

SEQ ID NO: 197757 - DNA, 398 bp, Gossypium hirsutum
  unsure (1)..(398): unsure at all n locations
ggttaatagactactgtaaattagtgatcgtatagataagtgagtttctaaattcttagggggcttcgatttaggccctaagggtgaaatgtcttccatgtgtccccggacttttaaccggatatacgggcaacatagaaacagagatttgtatttggtgtgatttcagtttgtatcagtggggggaaatcgaacccctatcaggttcatgttgggagcggttcctagtatggccattgttttatgtgcagttcctgaatccaaaagtcttctttttcagttgttgacaaaaaccaataaaggtgcaaaaaatctaatggacannnnnnnnnnnnnnnnnnnnnnnnnnnnnnnnnnnnnnnnnnnnnnnnnnnnnnnnnnnnnnnnnnnnnnnnnnn

SEQ ID NO: 197758 - DNA, 356 bp, Gossypium hirsutum
cccacgcgtccgcccacgcgtccggtaacgttgtagatgaagccaagctgagggcagtcgggtttatcgtctactccattggcaagccattggatcaatggctcaaggacatgccagctgtggcagaagagcatcattttgagaggcgtataatccgattacacagttttcattgcattacattttatttcttctagttttaagatcctgcttccgacttgtattgagttattacatgacacagtagtgtctgaatctgtcatcaacgggtaggatatatttgattttgttattggcttattgtaataaaacctttaccagtggtatttatttccagttatcttattccatgaatc

SEQ ID NO: 197759 - DNA, 601 bp, Gossypium hirsutum
ggcaactaagttgttcttgttgcttgctatctgtgtcctccctgtgcttgttaatgcaaacaataaagctttccaaatccgttggctgggtttactgtgatgcctgccgtgctggttttgaaacatctaaaagcacttacatccaaggtgcaagggtcgaaatcaagtgctttgataggtctacattgaagctgaaatacagcatcggggcagagacggacgaaactggaacatataacattgtggttgaagatgaccacgaagaccaaatttgctacgcaacacttgttagcagccccattcccagctgcagcattgtggaccctagacgtaataaggccacagctattctgacccgtagcaatggtgccatatccaaccttcactatacaaatgcaatgggattcctccaggatacggtagcggatggttgccaagaactgctcctcaagttgctgcaggatgatgaataaataatttacatgatcttcacgatttagcttcttttaatttttccttgactttaggacgcaattcataatgatgatgttgttgatcgatctatgttcacctgccatttttttgatgatcggttttatat

SEQ ID NO: 197760 - DNA, 589 bp, Gossypium hirsutum
tttgagagaagtgagactgatggaggaagcaaaaggagtagtgaagcacatattgttggcaaagttcaaagatgaaatccaacctgagaagattgaggaactcatcaaaggctatgccaatcttgttaatctcattcaccccatgaaagctttccactgggggaaggatgttagtattgagaacctgcatcaagggttcactcatgtgtttgaatccacatttgaaagcacagaggggattgctgagtatatagctcatcctgctcacgtggagtttgcaaatctgtttctccccagcttggacaaggtcattgtatttgactacaaacccaccgttgtacgttgctaagttacaagcatagttctgtctcaatgtagcttttgtcctgttcatgtctgttgttattttgaataaagtttgacgtcttgtactatgaaatgcatccatccctagtgatcaaggcaaaagttggttggttttatcttctttaggttttacatacaataattccttgctgagattgtgctttgatgtattcttgagctgagttgagactaagcaataagaagcttgagtttgagataaacc

SEQ ID NO: 197761 - DNA, 884 bp, Gossypium hirsutum
catcactgtcactgtgtcactgtttagtgcttatttagggtttaaaggcttttaaagcttagatctcttgttttctccgcttcccaaattccttctgagtcaaaccacaacgaaggaagaaaacaaagatgacaaccgtcaggagcctcacttccccatctattgttaaagctccaaccccaaaccgatttacaagtcccatcgtcagggccccaacatctcttggatctgttaaaaccatctctagatctttcggcttgaaatgttcctcaaatcaacgaacatcaatggcaatgtacaagattaagctcgtaggaccaaacggtgaagagaatgagtttgaagtccccgataaccagtacatcttagaggcagctgaggcagcaggagtagagctgccttattgttgcagagctggagcttgctctatatgtaccgcgaaggtcgtttcgggtacggtacatcaaccagaagccatctacctcgaggacgatcaaattaaggatgggtatatgttgacttgtgtttcaaagccaacctcagattgtgagattcacactcacaaagaacttgatctttactctccatcaaaataaaaagttaaatattgttattagtattttggggtaccaaaaaaactgaaattagggtctggggagttgtctgaaacttctttttttgtccgagtttagggtttgggaagttgagggtattgtaggggctctcatgggcaataagtttggctagtgtccgtttgtaattttctgtttatgaatgccattttccttgttgattgactgattggttcgaaaaaggacattcagttaaattgagaatcgtttgttgagttagattttttttatttttcatgaattttttaattg

SEQ ID NO: 197762 - DNA, 390 bp, Gossypium hirsutum
ttttatataatgcaagcagtgtggaatctttgaacctcgaaatggaagaagtgagtcaaaccacaacgaagaagaaaacaaagatgacaaccgtcaggagcctcacttccccatctattgttaaagctgcaaccccaaaccgatttacaagtcccatcgccaaggccccaacatctcttggatctgttaaaaccatctctagatcttttggcttgaaatgttcctcaaatcaccgaacatcgatggcaatgtacaagattaagcttgtagggccgaagggtgaagtgaatgagttcgaagtccccgataaccagtacatcttagaggcagccgaggcagcaggagtagagctgccttattgttgcagagctggagcttgctctatatgta

SEQ ID NO: 197763 - DNA, 387 bp, Gossypium hirsutum
ggcaaacagctcaatctctctcccgcttcctttcacagttcaacaactgctgcctctctttctctcacatttttgcttcaaccattacctctcctcaacatgaagctcgtcaggtttttgatgaagttgaacaatgaaacagtgtcgattgagctcaagaatggaaccgttgttcacggcaccatcacaggtgtggatatcagtatgaacacccatctcaaaactgtgaaacttacattgaagggaaaaaatccagtgactatgcatcacctcagtgttaggcgtaacaatattcgctactatatcctgcctgacagcttaaatcttgagacattgctggttgaagagacaccgaaggtgaaaccaaaggagccaacagctgggaag

SEQ ID NO: 197764 - DNA, 384 bp, Gossypium hirsutum
gttcgtgctctcagatacacagatccaaattattccttcgtcaaacaccctttctccggtcttctcacggccaaaattttaaacagcgatgtcgggaaatgctaaattgcggcggtcggtgatgttccaggcggtgctattagtggtattgatgttagcttcgagtaatgctccggtcggtgacgccatatggttgaacgttcctccgactggcactaagtgtgtttcggaggaaatccagagcaacgtcgtcgttttgtctgactacgtcgttgtttccgacgatcacggtcacgtccctaccatttcggccaaggtgacattcccttatgggaacaatcttcatcacaaggagaatgtgacacatggtcaattcgcattcac

SEQ ID NO: 197765 - DNA, 668 bp, Gossypium hirsutum
gcagcaccatgtaagaagaactaaaagcgttgtgaggtttttttccccttaattttctagggaaacaaacaaaaccatggatgattacacgagagagatgatggatttgaaaaccctggttactcgaaccctagagaagaaaggggttctagctaagatccgggctgaactaagggctggtgtctttgaggcaatagaagaggaagatcgagtaattgaaaaagaggagagtttacctcctgcattattgggaagttgcaatgatcgcgctaaacgacttcatgcttctccttctggaagattgttaactgcactagtgtgtgagtacttagactgggcgcaactaaaccacactctaaaagtgtaccagccagaatgcaatttgcaaaaagactcctggaaagctgagttgaaagactttagcgtcaaaaatggttatgaccttaacagaaatggagataatcctgtccttatggatgttcttgattgcttcttgaagtttgagaacttaacccaagcaagaggaagtggaaggagatcacaagaaattgagtcctcgtctagttcagagtctcgtaacacaagaagaccctcatcatctactgttgctgggggcttgcctccattgggaaggccggtccctgctcgcagtcgtctgataggagagc

SEQ ID NO: 197766 - DNA, 672 bp, Gossypium hirsutum
  unsure (1)..(672): unsure at all n locations
cataaatcagaatttttcacagcaggttttggttagggatgggaataaggttagttttgatgagccgaacccatttgccaatgaaggtgatgaggtggcttctgtggcatataggtataggaggtggaaacttgataatgatatgtatttgattgcacggtgtgaggttcanagtgttgttgaagttaataatcaaaagtctttcctcactttgaatgcgctgaacgagtttggtcccaagtgttccggtgttgattggaggcagaagttggagacccaaaggggggcagtcttggctaccgagttgaagaacaatgcaaataagttggctaaatggactgctcaagcgattttagccagtgctgatttgatgaaattgggatatgtgacaagagtgcatcctagggatcattttaaccatgtgatattaggtgttgttgggtataaaccaagagattttgcttcccaaattaatctgaatacttcgaatatgtgggggatcgtcaagtctattgtagacttgtgtatgaagttgaatgaagggaaatatgtgcttgtgaaggatccatctaagcctcaagttaggatttatgaggttccagctgatgcttttgagaatgattatgtggaagaaccattgccagaagaggagcaggttcanccacctgcggt

SEQ ID NO: 197767 - DNA, 361 bp, Gossypium hirsutum
gatatatatgatctcaaatgagatgtctctttcttccattctcgccgcgtactctctagaagatacccaatcctgagactgctaaaggaaacgaatttcgaaccctgttcaccatgagagctaagtggaagaagaagcgtatgaggcgcttgaagaggaagagaagaaagatgaggcaaagatctatgtagcctaatgttgcttgatgggtacttttttttttgttaaaggatttgagatttatctttataatttgtatgggttacctctgtatttctgttgaacccttttttcatctacatgaacaatgtcatggaattttctttttagaactaaatgcttatctgtttcgatgttagct

SEQ ID NO: 197768 - DNA, 954 bp, Gossypium hirsutum
  unsure (1)..(954): unsure at all n locations
cagaaacagataatccctggacgtatgatgatgagactgataattccgagatgacttatgtgaatcttcagctgaacccagagcgctatactggctacaatggtacatcggctagaaggatatgggatgctgtctactcagagaactgtccaaaatgtgagttctcgttaatcttctttgatgcgtgtgggaatgaaagatgcctgtgcattttcttggtatgagtagaggcnatcggtccattaccttttaacaatttgattntggaagtagtaactaaatgttgaatgcctagtgatgaaccttcaatgacataaatcaatnattttctggttttgtgaacttattaatactgggganggcgtgtttntctgttctattgagtacatactaagtaacaagtatccttattggaagataggaatagtctaatgaacctcctttatttaaaaacaaaatctttatttgtttgtattctgtacacagatccagcttaagagttatgccaagaagaaaaaatctatacaaattggattcttgtcttcactcatctatttccgtccatatagcttctgattatctgattgacgaagctacatacttgtggggccacattcttgaaataatgtattatcgggttttacaatatccaaatcgtgttgaaaacctgtacttcacattcctctttgttctccgagctgtgacaaagacagctgactacttggaacaagctgaatatgatacaggtaatccaactgaggacataaaaacgcagtccctaatgaagcagctactttatgatccaaaactgcaagctgcatgcccacttccatttgatgaagccaaattgtggaaaggacgaacaggaccagaactgaaacagaaaatacaagcacaattcaaaaatatcagtgcggtgatggactgtgttgggtgtgaaaaatgtcgactttg

SEQ ID NO: 197769 - DNA, 461 bp, Gossypium hirsutum
tttcacgcgtccgcgattccggttattatacgatgcatgagttgcggtcgtgttaagttaccacacttcttctgttgcagtggagatcgtgggcacaacaatgaacgagatgattcatccggttaagttgtaggtgacccaatactaagaagcttgttcgcattatatgtatgagaaaaacattattgggatggcatgacaatgttggggggcaagcgtagacggattcagtcataaaaataggttagaaagttttgtttacaaatgaagccatctagaatgatggcaaataactgcaaaaatgatgatctgatctagctagtacatttttatggagttacataagtttgcacttgtatggaaaatcttggttggttaagattgctttcgtggtctgtgtttcttgtatttcttagctgcaactgggttctatgctaaaatgacaagttaatttgcccgtc

SEQ ID NO: 197770 - DNA, 396 bp, Gossypium hirsutum
agcaaagcggcgaagcgatttgcaatctcaactcaccgtttctcacgattggattctccttaaaatcatggctgctcagattagcaagaagcgcaagtttgttgcggatggagtgttctacgcggagctaaatgaggttttgacaagggagcttgctgaggatggatactccggagttgaagtcagagttactcctatgcgtactgagatcatcatcagagctactcgtactcaaaatgttcttggtgagaagggtagaaggattagagagttgacttctgttgttcagaaacgattcaagtttccggagaacagtgtggagctctatgctgagaaagttaacaacaggggtctttgcgccattgcacaggccgagtccctgcgatacaagcttct

SEQ ID NO: 197771 - DNA, 465 bp, Gossypium hirsutum
cgcgtccgggcattcttctgataaacaaaaactgagtgaagagtttggttgtgcttactatagcaagagaaacctatcttaatttgggcatcggtcctttggcgttttccaaaatccctagcccgatctcctgtggaggcagccatgaggaccctattttcaaccaccaaacgcctcatttcttgcactagcgccaccgccgtggccacccattcccgttccttcagcttgatacccatggtgatcgagcactcttcccgcggcgagagggcttacgacattttctctcgtctcctcaaggaaaggatcgtctgcatcaacggacccatcaacgacgacacctcccacgtcgttgtggcccagctcctcttccttgaatccgaaaacccatccaagcctatcaacatgtaccttaacttccctggcggtcaagtcactgcaagtcttgcaatttatgatacgatg

SEQ ID NO: 197772 - DNA, 629 bp, Gossypium hirsutum
ccctcatcttctaggacagatttttgtctaatattattattaataataaacgggcttggaaagagatatgtcggaaatggagaagaatgttgattggatgattcataatgatgataatagttctaatgattcgtcccctgatggtggtgcttcccacgatattctgggatctaaaagttttgcatttagagctccccaggagaatttctgtatccaggattttgatttgggtaaaatatatggtgttggttcttattcaaaggttgtgaaggcaaagaagaaggatacaggaatagtgtatgctttgaagatcatggacaaaaagttcatcaccaaggaaaataaaacagcttacgtaaaattggaacgtatcgtgcttgaccaactggaccatcctggtattatgcgactctattttacatttcaagataatttctcactatacatggcacttgaaccctgtgaaggtggagaactttttgaccaaataaacagaaaaggtcggttaccggaggatgaagctcggttctatgctgcaaaagttgtagatgctcttgaatatatacacagcatgggattgatacatagagatattaagccggagaacttgcttcttactaaagatgggc

SEQ ID NO: 197773 - DNA, 768 bp, Gossypium hirsutum
ctatctagcgctcgcgtgggctccccgggaaagcgatcgtggttcctcgctggctcgctcaaccctgtaaaaaacttgggggggagaggattgatttgaatgctaaaagcgtaacccgaaagcgactccttcgttaagaatcctcacttcctctgccaatcattttcacaaacacctttgccgcaatataatttcaaaatccctgaagtagtgaaaatccgacagtatgcttggaaggtcaattttggaattaccacgttgccgaggggctccttggagaatacccaggcagattatgccccagtgttcatcaccttttatttattcaagaaagcaattttcgacttcttctggagaaaatggtactccgaaacctgaatcgaagagtgggctttcaaaatttgtccttggaacttctcttattggtggtgctattttggttgcttaccaaactggatatttagagcaatatggcgcacgccccaaggtttctattgattcaacgaaaactggttttgatgagaaagatgaaaaggatatccaagttgtttcttctcgtgatgaagaaataaacaaattgactcctcatgtggacttgcctgagcaaaaagctgcaactaatatcgatcttcctcctgagcctgaaatttcaagtgaaacccaaggtgagaaccagtcgtatgttgaagataagttgaacgagataattgaagatagcacaacatctgtaccagataaagcattacctgaatattctcagaacaactt

SEQ ID NO: 197774 - DNA, 669 bp, Gossypium hirsutum
aaggggggagtttcaaatgttggatttgcacaggcgtggtggtggcaggcatggcatctggtgcaaaagtttggggttagcgggaacccaggtgaccttcccaaatggaacgccattactgtggtgcttatcatctgcatttacgttgccggattcgcctggtcttgaggacccctcggatggttggtgcctagtgaaattttcccattggaaatccgatcagccgcacaaagtgtgaacgtgtcggtgaacatgatcttcacattcgcggtggcacaagtgttcttatccatgctttgccacttgaaattcgggctattcctgttcttcgccttctttgtggtggtgaatgtcgatctttgtgtactacttcttgcctgagaccaagggtattccaatcgaagagatgaaccaagtctggagatctcactggtattggtcccgattcgtcgaagaagctgattactctaatggaggtatggaaatgagcaagggaaaccatgttccaaagaatgtgtagacttcactccaccaaactatggattagttatttacttttctcctcgttttcatttttaggttttgacattagtatatactattggtttttaatgttattggatcaaatatatatatatataaatttcaatcaaaaaaaaaaaaaaaaaa

SEQ ID NO: 197775 - DNA, 467 bp, Gossypium hirsutum
cctttttggaacacgttcctcgccttataaaaaaagggagctctacgatataatttttagtatctttttgtttttttttttcctttttcctttcggctcttgaagaagatgaagatcgtggtttatggttcaataatgatgacaagaaaaagctcgcagttttaattgaataaacagcagttcctggaagtttaattttactaccaaacaaaaagccagcagaaagctggcaggatttgttgctttcacctaaagggtcatcgtatccttttctctcactgaatgcagctcttgatcacacaaacaacaatccagatagtatacgatcatgtcttatttaccagcaagaaaagggagacacacacaacggtacgaggataatctgaggcttgttgccgggggtattccatacagagtggagaaggatgttgaggacagcaggatcagagttcttatgatatccacac

SEQ ID NO: 197776 - DNA, 643 bp, Gossypium hirsutum
  unsure (1)..(643): unsure at all n locations
caaattgaaaacttcagtttgagatttggcaaatcaagcgaaaatgctaacagcggatatacctcccaatcaaactatttacatcaagaacctcaacgagaagatcaaaaaagaagaattaaagagatccctttatgctttattttctcaatatggaaggattttggatgtcgttgccttgaagacgcctaagcttcgtggacaagcatgggttgtgtttgatgaattgacttccgctagtaacgccttccgtcagatgcaaaatttcccgttttatgataaacctatgcggatacaatatgcaaagacaaagtcagattgtatcgccaaaaatgatggaagctttgttcccagagaaaagaagaagaagcaagaagaaaaagctgaaaggaagcgtcgtgcagaggaagcacagcaatctgcaatgccgaatggcacaggttctcaaaataatggtgggccaaaggctcctctccatcatggaaacctgaatgctgagcaggccgcaccaaacaatattctgttcatacagaatttgcctcacgagacaacaagcatgatgctgcagctgctttttgaacagttacctgggttcanggnaattaanancggttgangcaaaagcaggttatgcatttgtaag

SEQ ID NO: 197777 - DNA, 436 bp, Gossypium hirsutum
gaagttggatagatttaataagcagcaggagaagtgtcagtcgatgctctccaacatcgccgggaaatcattatcatctagggcagccgcagctccaaaaccggcacctgctccgcctttttctggtgcaaggccttctgctcctgtcaaattctcaaatgataccgagaggcttcaacatattaatagcatcaggaaatctcctgttggagctcagatgaaacgtgttatcgacattctttttcagacaaggcaagctttcacaccggaacagatcaatgaagcatgttatgtcgatgtgaatggcaatagagatgtttttgagggcctgaggaaaaatccaaaagtgtactatgacggaaagcgcttctcgtacaaggctaagcatgatgtaaaaaacaagaatgaacttcttgttttgaattcgaaatttata

SEQ ID NO: 197778 - DNA, 826 bp, Gossypium hirsutum
cctacttcgaaaattgtatatgacgagtattatcacgagcggtttccacctggtgatcccagcaagcgtgcttttgcttatttcgtcttgtctggtggcaggtttgtttatgcctctttaatccgccttctgatcttcaagtttgttctaagcatgtctgccagcaaagacgttcttgcactcgcttcccttgaggttgacctttctagcatagagccagggagcactgttactgtcaagtggagagggaagcctgtttttatcagacgtagaactgaagaggacatcaagacggctaacagcgttgaccttgcatcacttcgcgacccccaggaagatgcagtcagggttaagaatccagaatggctcattgttgtcggtgtttgcacccatttgggttgcatccccctgccaaatgccggtgactatggtggctggttctgtccgtgccatggctcacattatgatgtgtctggtaggatccgcaagggaccagcaccgtacaatttagaggtacccacatacagcttcttggaggagaacaagctgctaatcgggtgagaatttatgcggaaattattattatctttttttttttgtgttgcgttagtcttgctgcaaattgtcataatagaattttctctgcacaagagggctgcattcaatttaatattcagtttactccggatttttgtatttgctgcctgttttaaggcattgccccaaggttctgaataatgaaaacaagatttgttgagcatgttcagttttaatggtgcttatggattattgatatacttcaaaataaaaaaacaaaaattttgcg

SEQ ID NO: 197779 - DNA, 716 bp, Gossypium hirsutum
cctatgcgtccgaaaaaagggaagcaaggacatgacgggatgatgcaaagtggcggtggggttccgggaaacgcagagatgggaatgggaggacatggtggaggatatggtgggccgggaagttatggtgggttttcaggtgggatgcaagggccgcctggtcccatgggtcatcctcatcccttgaattcatcaggagttggagtgggcgctttgagtggaaatggcggtgttgctgctgggggttattctggacttggtgggccgtatggtgggtacggtggaccaggttcaactggctatggtggaccaggatcagctggttatggcggaccaggttcaactgtttatggtgggttgactggtgctggtgcggggggtgggttgggtgctgcaagtggagggtcttcattgtatagaatgccgccgagttcagctgggatgccaactggtggttatccagagactgctcattatagcttgtcttcctcggctgctttccctagtcagctccaccaaggggctgggacatcccctgcgccaagagttccacccggtgcaatgtatcccaatgggccaccgttctactgaggtttatgacagcttgttgggcgcagacgctttttgtggttctggtgattgcctgaatgcagactatatatactctggctcgatgaatgcattagctgggctcttacagccacttctcttgattt

SEQ ID NO: 197780 - DNA, 604 bp, Gossypium hirsutum
ctagtaccaccaccataagttacatgccaatcggaggaaactcgacagctggggtatcaggttttgcaggagattggtctcggccgaggaccgggcatggatttgaagatttctttgctgaggaaatccgacttaggagttcagaaatgttagagaccgatgacatgcaaagactgctgaaaacattcggtgtaggtgttggtatgggagctggttttggtcatccagatgaatcttcttatgcatacaccatcccatatgatcatcaaagggaccacccttatccttatgcgccagaacgtggcaaaggatcggggaaagcggttgtggggtggcttaagttaaaagctgctttaaggtggggaatatttataagaaagaaagctgctgaaagaagagctcagcttgttgagcttgattaactgttctgatgcttaaaaaaacgtattttaacatcattatctattagctggttgacaaaggattggtgcctcagcaatcattaaccttcatttggcaacattgttgaaaaattccaagttctgttatcttttgccatatttggataaggcataattcatcagaagaatgcttgttatataac

SEQ ID NO: 197781 - DNA, 429 bp, Gossypium hirsutum
ggcatactccgcagtgaacaggggatgggtccgacatcagctccaacgacggccacagcgccgtcggcgggcacggctccggcggcgggaaaggcgccatcaagtgggtcggggaagtggtgcgtggctaaatcaaacgccagcgatgcggcgttgcaagcgaacatagattacgtgtgcagcagcggagtggattgtaagccgatccaatcggctggggcctgctttaaccccaataatgtgagggcacatgcatcgtacgcaatgaatgcgtactatcaagccaatgggcggcatgatttcaactgcgatttcaatcgtacgggtgtcatcacctctaccgagccaagtcatgcagcttggaactattcagggaatcaagggtcagggttaaaattggaaagttcagtggccgcaaatacaatgaga

SEQ ID NO: 197782 - DNA, 414 bp, Gossypium hirsutum
  unsure (1)..(414): unsure at all n locations
acgaccacgcgtncgaggagaccttgcttcagctgagagtcttgacacattcacactaatttaggcaaatattcttgagcatcaacctgactgcccgcctgatgttgttgagaagcttgtttcactgcgggaaggcatcccacgcaaagatgcaaaggaggtggtgcaagaatgcaaagaaatctacgagaactcacttgttggtgggaagcctccaaggacaggatttgtgtttccaagggtcaaatgtttgacggcaactaaaggttatatatggcgtaaactcacttaaacattcccacttacccttctttttagattaggggttccttgccgccttttctaatttcttgcttcttgtttatgcatattgtatgctgctattatttgtagtaataaatttgcttttttttt

SEQ ID NO: 197783 - DNA, 694 bp, Gossypium hirsutum
caaatttctaaagctattgaagaagaatggcaagttcctccattatttttctcttgctttcccttctatgcattgtttgcgaggccagatctccaactgctgcaagatcaggtgcctcaaatttcatcaaggcttcatgtagtgccaccaaatatccatcactttgcatccaatctctcgcagcttttgccccttcaatccagcggagcccacgccaactggctcagactgccctttcggtgagcctagagagggcaaagtccacccaggcattcgtctccaaaatgaagaaattcaggggacttaagaggagggaatatgaagcaatcaaagattgcattgaggagatgagcgagagcgtggacaggctgagcaaatcagtgcaagagctcaagtacatgggtcaagccaagggtcaggatttcttgtggcacgttagcaatgtggagacctgggttagtgctgcactaaccgatgagaacacttgtgtggatgggttcgcaggaagggctttggatggtaagattaaggcctccatcagagctcgtgtcattaatgtcgctcaagtcaccagcaatgctttgtcattggtgaaccagtttgcctccaagcagtgatcaacctagccgctggttgctcttgcagtaaaagtggaaaaaaaaaaaagtggtccagttgtggtcaatggttactt

SEQ ID NO: 197784 - DNA, 381 bp, Gossypium hirsutum
gccgatttcacaaagaaccagatgaacttccgtctttgtattgtatcaaattagggtatatgtgcataagttatcctaatgtctttcgaatcgtaggaatattttattcgccacatggatggctgcacacttgatactgaaggagagaaagaaagggttgttaaatgtctcgaagccgccattcatagaagagcgagtgaggggttaagcctggagctttgcgcaaaggacagaggtgggctgctgtccgaagtaacaaggattctccgagagaacggattgtccgttacaacggcaggggtgtcaacagttggggagaaagcagtgaatgttttctatgttagagatgcttacggtaatcctgtagatgcaaagacaatc

SEQ ID NO: 197785 - DNA, 692 bp, Gossypium hirsutum
  unsure (1)..(692): unsure at all n locations
cccacgcgtccggtaggtatgactctggaggatttcttgacgaaagctggggcggttagggaagaggatgtcaggggagttgttaatctccggggagtaggtgcaggggtttatcctgttgagcccggccgttatcaacggtggtggaaatcatttttcggcgttcggaaacagcggtggcgttgatcatcagaggttggtggcggtggcaggtggaggcgctagaggaaagcgacgcgccgtggaggcaccgcctttggataaagcgactcagcagaaacagaggcggatgataaaaaacagagaatctgcagctagatccagagaacgcaaacatgcttacacggttgaattggaatctctggtgacacaattggaagaagaaaaagcccggttgctgagagaagaggctgagctgaacaaggcgaggtttaagcagctgatggagaacctggtcccggttgtggagaaacgaagaccacctcgagttcttcggcgagttcattctatgcaatggtaaatatagtagttcatcttcttttttctttaatgtagatgacaaggagaaacaaaaagctttgataaaaggaagtggtagaaccaattaaaaggagtggngaagtaggaagtttgttgaagcatttgggactttgttttttggcatagaatcccattacagttgaacttatata

SEQ ID NO: 197786 - DNA, 463 bp, Gossypium hirsutum
  unsure (1)..(463): unsure at all n locations
acatcaagaggctttgcaagtttgcaaaaaaaatgagtgacctcaaatatgcttatccctaccctgctcaaggctattatcaaggtcccccaggggtggcaccaccgcaatatgcagctccaccacctaggagagatcccggtttccttgagggctggtatggtgccaatattttgaatgaatgttannattattctttaatgtgtaannattaattaattatatantttatttttggcagtcttgcagctnntatgtngctgtgtcttattgatgaatgtngctgtgatccatcccatcatcttatcagctgagaataacanaaatatctctgtatctactattatatnggatgctagggttaatctagagataatcttttaccactataatatattataataggatatggttgttggtttgggtgaaactgtgcttagtttgttctcatctgattctacat

SEQ ID NO: 197787 - DNA, 375 bp, Gossypium hirsutum
  unsure (1)..(375): unsure at all n locations
agaggagaacccgttcttccttcgccagctcgtgtctcgggaaattaggaaattcatatgatgaaatacctgtagcaagtgattggtcagggattctttctgagaggcctgtcggttcaaaagatgacaaatggcaagttttagaggattgtcaggatccttttgcttttgatgaagaggaattcgtgccgccaaagggggacttaccctctgggagtaaaaaaccatcccaaactaaaaagcatcggaacctggggccaagaaatagagaaatccaaattgagcatcaatgtcatacaataagccaaaaggaattnactagtgagggaaattgtctgagaaaatctaccaatgaagaatataatcattctaatg

SEQ ID NO: 197788 - DNA, 507 bp, Gossypium hirsutum
  unsure (1)..(507): unsure at all n locations
ttcccggtctancacgcgtccgtgggaccctaactatcttcctccaccgttgcacctcaactcttacaactgctttctgaagcgctccagccctggttgagtttagtttttaagtgaaggaacactctgtgaaatggcagattgggctcctgtacttgttggggtggtgctatttgtgttgctatcaccaggacttgtgttttcatttccagggaacggcaagcagctggagtttgggagcatgaagactaatggcatggccattgctatccacactcttcttttctttgccatctatgctgtcttgatcatggctgttcacctccatatctacactggctgaccacttccctgccggtgagagtcttcgttattggtctctctattggagatctgtcttgggttttacttggtttatcaatctttgtattagcttgtttcaattttggaccaacgaaatttgtggcacagacctttgtttcccaaagtttacttttttacaattag

SEQ ID NO: 197789 - DNA, 1034 bp, Gossypium hirsutum
tacttttgttgtcccccgtagatatcagagggaaaacacaaaaactagggttttagagagaacgggagccaaagtgagagagaagaggcagatatttttaggagtagggttttgttatattgcttctctagggtttagaaaatggtggccgacaaaggaaagaagctgaaagtagcatagaaagtagaggaagagaaccatgaacaaatagatggagacctcgtcatttccattgagaagcttcaagagatccaagatgagcttgaaaagatcaatgaagaggcaagcgagaaagtcttggaagtggagcagaaatacaatgaggttcgcaagccggtctatgataagcggaatgaaatcatcaattcaattcctgatttctggttaacagctttcttgagccatcctgctcttggtgatcttttgactgaagaggaccagaagatattcaaatatattaactcacttgaagtggaggattttaaagatctgaaatctggatacaccatcacatttaacttcaattccaatccgtactttgaaaatacaaagcttacaaagacctttaccttccttgatgatggaaccaaaattactgccaccccaatcaagtggaaagagggcatgggcttgccaaatggagttaatcatgagaagaaaggaaaccaggcgacaacttgccgaagaaagcgtcttttcctgggttgctgatgctcagcagaaagatgacatgggtgaaattcatgatgagggttcacagattatctaagggatttatgggcccatactctcacttatttcacattgaggccctgaaaaagatttttacgcgattaagggattaaaaagggtaaatgatgatgaagatcctatgaagatcccaagatgatgatgatgaccagatgacgccaccacgagactacttctttcaaccgtaatatagtagtgatttttctcaataaaaccagggaaaggtgctcacatactataaggttttaaaaaaaccctttaaacttcttttttatcaacccttt

SEQ ID NO: 197790 - DNA, 417 bp, Gossypium hirsutum
aaattttcttgagtcgtgaggttccaagagaattcctgctttttgtcattcctgcttttggaggtattgttgcttgggaaggagatggagctccattcgccgaatctgatgatagcatcactcatcagattgtggacagaccaacccagggacatgtatatctttcaagagaatatgttcaacctcagtgggtttatgactgtataaatgcacggatcatcttgccaactgagccatatatggttgggagggacccacctccacatctgtcgccttttgttgatgatgaggctgaaggttatgttcctgattatgccaagaccattagacaactacaggctgctgcaaaaagtgatattcaacctttgcctggcaccggaaatgatgagttggataactctcaaaatatgttggcat

SEQ ID NO: 197791 - DNA, 645 bp, Gossypium hirsutum
ttctttaagaatcagattattcggtccttgccccggatattatccagattattgagtccacaatcttggtattccgactttttttaaaaatggacaataaaaaacatggtagttttcgtaacttgttcggaaaccagaacccaatggctacccctcttcaagttcaatcattgttagagaagaaaggcgcaaagctgaaggagctgcgtaagaaacggaaaggatggaaaaagaatatgtggccgatatcgcacgaggatgttccgttgttgtttgggcttattgacattaaaataatatcaagggttcttcggatgggaaggataagtaaagagcagttgttttggtgtgaagagaagatgaaaaagcttcatttttgtgatgggaaattggagagagatccttcacccatacttttccctgttttgattaaaggttaggtgttgtgtaaagctatgttactttttcccttgttttgatgcacagtttgctactgattttcccttggaagcaactcattcgacttttatgttatttggatttggaagtaattatggactactattgaaaaaaaaaggcgcgtctaaataactctcctctcacttattttagataatatatgcgttacgtatgaactgtcatatc

SEQ ID NO: 197792 - DNA, 327 bp, Gossypium hirsutum
caaccagtcaaatccatcactgttaaatgatcttccagcccagggtgtaactgaaatggtgaagcaccacgggaattggttgatgtcgcttcggtttttaacatcaagtctctgacctcctgaatggcaagtggtgggattctctgattatgacgcatgtttctttttttaatttggttcttctgtctgcatatttttatctccctcatttcccccattctctccctctatcccccatctgccttcctcttccatgatggaggtgcaagtttatgtattatgacataagggatttcgtttataaaaacatttctttggatttactaa

SEQ ID NO: 197793 - DNA, 591 bp, Gossypium hirsutum
tgcttagccttttgtctgcaaaatcaatcctgaggatggcattgatgcaatcgctaaaccacacaagaacaattcctatttgaaatccatatggattctcgagattcttctccaagtccagcccttttattgtgaaagttggaattccagaatttctgaatggtgtagggcatggggttgaaactcacgtagcaaagctggaatctgagatcggcgactttcagaaactgctcgtcacccgcactctcaagctcaagaagattggaattccctgcaaacataggaagctgatactgaaatatgcccacaaatataggctgggtttgtggaggccgagagctgaaccagtgaaggtgtgataaataagttttatcctttgggagctatgctaagatggtgatgttattgtaccaaagaatggctttagggctctatttgcaatcattggtcaccttactccttgtttcaatggacatgaatttagtggtttaggttcaaaaaaggggggaaagctctatttgcaatcattggtcaccttactccttggttcaatggacatgaatttagtggtttaggttcaaaaaagggggg

SEQ ID NO: 197794 - DNA, 599 bp, Gossypium hirsutum
tcgagctctttataacctatccatctccccatcaaacatatccttcatctcggaagctgatttgataccttttctgctgaatgccttgggggacatggaagtcagtgaaaggattctttccattttgaacaatgtagtatccactccagaaggtagaaaaggcattagtattgcaccagaagcattcccgattttggtggacgtgttgaattggaccgattcgccagggtgtcaagagaaggcatcgtatattcttatggtaatggcacataaagcatatggagatagacaggccatgatcgaagctggcattgtttcatcattgcttgagctaacacttttgggtagtacattggctcagaagagagcttctaggatcttggaggtcctgagagtcgacatagggaagcgagtttcagaaaacttcggtgggaacatgaatgcagctgtctcggctccaatttgcggctcttcatcatcgtcttcaacaaatctgaacggaaaggagtgcttggtggaagaagcaggcatgatgagcgaagagaaaaaagctgttaaacagttggtccaacagagtttgcaaaacaatatgaggagaa

SEQ ID NO: 197795 - DNA, 860 bp, Gossypium hirsutum
caaatggctgtagtttaatctagctgatccttaaaaataccatcactaccagcatcgccatctcccaccctatccctttgatcaagttcatccatctgccgttgattcttcatccaatggacggcaacaagcaagcccagtcctcctcttaccctcctcagcctcccactacttctattacgccttctcctccttcctcctccgccgccatcgccgccactccgcctgctcctttccaccacctcctccagcagcagcagcaacagctccaaatgttctggtcttaccagcgccaagaaatcgagctagtcaacgacttcaagaaccatcagcttcctcttgctcgcatcaagaagatcatgaaagccgacgaagatgtccgtatgatctccgctgaagcccctattctcttcgccaaagcctgcgagcttttcattctggagcttaccatccgttcctggcttcacgccgaggagaacaagcgacggacgcttcagaaaaacgacatcgcggcggctattactaggaacgacattttcgatttcttggtggatattgtgcccagggacgagatcaaggatgaggctggtctgggtgggatggtgggtaccactgccagtggggtgccatatttttatcctcccatgggtcagcctgctggcgctcctgctggacctggcgggatgatgattggaaggcccgccgtcgatccaaccggtggtatttatgctcagcctccttctcaggcttggcagagtgtttggcagacggcggtggctgacggtgggtcgtatgccagtggaagtagcggctgtcaggggaatcttgacggtcaaggctaagcaattcatttgtccgat

SEQ ID NO: 197796 - DNA, 468 bp, Gossypium hirsutum
cccacgcgtccgggcagaacaaaggaccccctttcaagttcctagtccctttagtctatgcccctgttctccctttaattcgactttctttgaggaagaacccagttttaagggaccgactgtttactattgtgttggctggggcttttattcatggttcttatttggtttcggatctatatgatgctgagagcaagtgagcattgcagagtctggcttgaggaactgattacccctctaataattattcttctattatgccttagaacaagtttgaattgtattcttctcattcctttcgttgtgggatgataatttgtatctcacagttgtaatcaagttaggcgtaagatttaaagcttcatattacggaattagtttcaattttaaagagaaataagattgagtgagctgcttttttgttaaactgtaatttctttatcgaatgtgatagatgtgcaagtcacg

SEQ ID NO: 197797 - DNA, 393 bp, Gossypium hirsutum
caagtcttcaaatatactgttggatgaacattggtatgctaagctttcagactttgggtgggccggattagggccttcagatggattaagccacgtctcaactgcggttgtaggaaccatcggatatgcagcacctgaatacattcaaacaggacgccttacaatcaaaagtgatgtttggagctatggagttttcctctatgaactcataaccggtaggcgtccgttggatcggaaccgtcccaaaggtgaggaaaagctcttggaatgggtgcgaccacacatctccaatataaaaaaggtcaggttgatcattgaccctaggcttgatggcaagtattcgctcaagtcggctcataaacttgcagcagtggccaataaatgcttgtcacg

SEQ ID NO: 197798 - DNA, 636 bp, Gossypium hirsutum
ttctcttgcttagcgcttttgattaatactgtttttgtgtgcgtctttttgcttctctggctcatattttctcgagattttccttcttctttgtttgcttgaactatggcttcaaccttgctactggctctggtttttgtgattgatctgattgctttcgcccttgctgttgctgctgagcaaaggagaagtactgcctctgttggcaataatgggaaagaaagttattgtgtttatgatgaggatattgcaactggtttgggtgtgggttcattcctcttccttctgcttagtcagatactaataatggtgacaagtcggtgcttatgctgtgggaaggccatgagaccaagtggatcgagagcatgggcagttgtcctgttcatcacttgttggttgttctttttcattgcggaggtatgcctgctggcagggtcagtgcggaatgcttatcacaccaagtacaagaatctcttaaatgatcccccatcgtgtgcgacattgagaaagggtgtctttggcgctggggctgcatttgctttcctaacagctgtagtctctgagctttactatgtgagttattcgaaggctaatgatgcaacagttaactacgggcaagacaccggagtgaggatg

SEQ ID NO: 197799 - DNA, 424 bp, Gossypium hirsutum
aaaattcctttttccttttctgtttacttctctgggtcataattttttttgggatttttgtttgggctttgtggggggaggggggttgcccttttaactatggcttcaacgttgtatactggctctgggttttgtgattgatcttattgcttttggacttgctgttgctgctgagcaaaggagaagcacctgccactgttcgcactaatgggaacgaaagtttttgcgtttatgataaggatattgcaactggcttacctgtaggttcattccttttccttctactcggtcagatactaatcatggtggcgagcccatgcttatgctgtggtaacgccatgaaaccgcgtggctctagagcatgggcagctgtactcttcatcacttgctgggtgttctttctcatcgcggaggtatgcttgct

SEQ ID NO: 197800 - DNA, 941 bp, Gossypium hirsutum
  unsure (1)..(941): unsure at all n locations
atagcatcagtcaaatccctacctggcatctttgttgatcctcccatccaanccctaaatttttgaatgatcccaatccctaaatttcacaatgaacaaagaaaaaattgattaatttttcatcgatcccatgcaatttctttgagaaaatatatctaatacccagaacaaaagaagaagaaatgtatagcaatttcaaagaacaagcgatagagtatgtgaagcaagcggtccaagaagaaaatgctgggaactatagcaaagctttccctttatacatgaacgcgctcgagtatttcaagacccatttgaaatacgagaagaaccccaaaattagggaggctattacccaaaaattcaccgagtatttacgccgtgccgaggagatccgtaccgttctcgatgaaggtgggcctggaccggctactaatgggggcgctgctgttgccactcgccccaaaagtaagcccaaggatggtagcggcgggaggggaagaggtgatggggaggatcccgatcaggctaatttgagagctgggcttgattcggctattattagggaaaagcctaatattaagtggaatgatgtggctgggttagaaagtgctaagcaggctttgcaagaagctgttattttgccagtcaaatttcctccattttttactggaaagaaaaggccatggagagcttttctgttgtttggggccacccggaacgggtaagttctccttggcccaggctgttgcacctggaaccaaatccgcgctttttagtgttcctcatcggaacttttctcaaagtggaatggggaaaccaaaaacctgttccaacctttttcaaagggccgtgacgtgcccctcatccttttcttggagagtaaatcctttgtggacccctggtggggcaatanactaaactcnaaactttcaactgactttggc

SEQ ID NO: 197801 - DNA, 674 bp, Gossypium hirsutum
ctaacccctaagctatgagcccaattagacatataggaaattaaggaaaataaaacaactttcatttcacacggttacttttgagctctgtttcgacgatcaaatatccaaaatttctctgtttgtcttcggatccctctttctacatctcaacatctccaataaccagtttgggaaaagagaaaaaaaaaaaaaaccggagagatctttaatctatctcatgagatttcattgaagaaataaaagtatccagaaaaaggaaaaaaacgatatgtatagcaatttcaaagaacaagcgatagagtatgtgaagcaagcggtacaagaagataatgcagggaactacagcaaagcctttcctttatacatgaacgcactcgagtatttcaagacccatttgaaatacgagaagaaccccaaaattagggaggctattacccagaaattcaccgagtatttacgccgtgccgaggagatccgtgccgttctcgatgaaggagggcctgggccggcttctaatggggatgctgctgttgccacccgccccaaaagtaagcccaagagtggtggtggcggaggagaaggcggtgacggggaggatccggaacaggccaagttgagagctgggctcgattcggctattatcaaaaaaaagcctaacgttaagtggaatc

SEQ ID NO: 197802 - DNA, 447 bp, Gossypium hirsutum
ctttggttgccttgccggctgctgttcaggcacagtcctctgctcccgcccctgccccaacgagcgacgggacgtctattgaccaagggattgcatacgtgctgatgctggtggcactggtgctcacatacctcattcacgccgctgatctctgcttcaccttttgagcctgcaaatttcaaagattgaaatggggttgtgacattttatttgttatttatagggagagaaggatggatgatgtgtaaccaattcatggctcgtcgtctgatacatacatacgagagtacaaaagggttataattagagaatgagctggacttcagacgaatcattgttgtggattttgagaatgaaaatgtttatgttttgtggtctttctccctttttttagtagggaatcttcattccactcaaaataaaaatataaataacaatataaattat

SEQ ID NO: 197803 - DNA, 468 bp, Gossypium hirsutum
ctgcatcgcccgctcatgtgttccttggtcgacggcgtatcagcatccgacatggagaaatttctatgcgaccggttgcttgacccgacacaacccatatccgagcgcttccgagctctcttctcccttcgcaacctcaaaggccctgcccctcgcaacgctctcattcaagcgacaagggattcatcaaatttgttggctcatgaagctgcatttgcattgggtcaaatgcaagatgctgaagctattcctgctttggaagtagttctaaatgatctttctttgcatcccatcgttcgtcatgaggcagctgaagcacttggtgccattggtttggagagtaacattcctcttttgaagaatagtttggttctagatcctgctccagaagtccgtgaaacatgtgaactggctctccagcgaattgaggagttaaaatccgatggtagtgatgacaaatcatccatg

SEQ ID NO: 197804 - DNA, 272 bp, Gossypium hirsutum
gcgaaaaaaagaatcttttttattttcaagctgtcattatctgaaggtaaaatatatttcctgaagaaaaaatatttgtaatttatatatttgcattcgttgataatgataccagagaatttacagtgaaagaactctgcttttttgtctacttctctctttgttgaagttctactttacatgaaacatgcctccccacattctctcagtttgtctttaaatcttcagacttcaggaaaaaagtttcgttgatgggtgtcttcagtttattt

SEQ ID NO: 197805 - DNA, 533 bp, Gossypium hirsutum
gtgacactctcccagcatttatacagtcccaaaatcattctaatttagcccatcgagtctctcatcctcatttctgctttctcttcaatcttgatggctctctttctctcacttcttctcattcttttgactccttcaaccaatgcggactggccaccttctcctggttactggccaagctctaaatttaggcctatgagctttcacaaaggctttaaaaatctctggggtccttcccatcaaagtgttcaccacaatgcattaaccatctggcttgacaaaacttcaggaagtggattcaagtcagttcgtccatttcgatccggttacttcagtgcctcgattaaggtccaacccggttacactgcaggggttataacagcattctatctatcaaacaacgaagctcatccggggttccatgatgaagtggacatagagttccttggaacaacatttgggaagccttatactttacaaaccaatgtttatgtcagagggagtggggatgggaaaatcattggagggaaatg

SEQ ID NO: 197806 - DNA, 354 bp, Gossypium hirsutum
gcggagggtcaaaggtattcttggaaatgaatcgccagttgtgattcttttattctggaatcgggagcgtcctgtcatgatttggggaatggagtgtcactgtaattctttttggatttatcttaagcattagctaattgggaaaatgaagcttagcctggagcttatttcctttttattatatacaataatgcaaaggagtgggtaacccgaaagatagtgtaattagtatcattattatgaccagtgatatgtcagagctaggtcttgattcttgaacttgagccttcatttgagttaatctaaaattgaactggtgaatctgagttgatttaaaaaaaacaaatctaatat

SEQ ID NO: 197807 - DNA, 562 bp, Gossypium hirsutum
tccatttttaagccccctcttcttgcttccccctcttcattcttctccctttcttacaactttcgttcttcctctcttacttacccatgtcccaggagactcttaactctgaatcgccacccgctgcccccgcccaggaattgtctgtggttgtcgagaagcctcaagttactgagaaagagccacaaccctccgcacctgctcccctgccggagcctgaggttcccgagaagccggctgttgttgctgttgaagaagaagctgttgaagttgagaagcccaaggttgaagaaaaggaagaaactaagataacccagtctgtttccttcaaagaggaaactaatatcgctggtgaacttcctgagcctcaaaagaaggcccttgatgagcttaagcagcttattcaagaagcccttaacaaccacgagttcactgccaaacccgaagcagaagaaaaacctgtagctgagcctgagccaaagaaagaagatgaagaaaacatggaagagaagaaagaagaaaaagaggaagagacacctgctgctgcaatttcagaagaacc

SEQ ID NO: 197808 - DNA, 586 bp, Gossypium hirsutum
gcggtttttcttctttcttctttttcttcatagaaaggaccccattgattgaggggaaacagcattgagggcctttgttttgattagcacgagagagagagagagagagaaagaaaatgaatgttttggcctctgagtgtagtaatgggtgtgaatctggttggactagatacttagaacaggcttttctttctggtgatctttctcacaaatcaagtggtttttgtgatgaacgtggcaagtataaaggtaaagaagaggttgttgatgaagaagaagaccttgccatggtttctgatgcatcttctgggcctccacacttgaacgtagataatggttatttcaatgatgataatcattatcaatatactttacctaaaggtgctacattgaataaaaatggtggtactaaaagacataggaagaaagagcatcaaagacaaagggaagttcatcaagaattgccttcgttacttgatgatactgccagctctcctctcatcaagaacaattttgctcacaccaataatcatgcttcagtggaggaaagtgtcctccattatcccccagggttctctgcaacaca

SEQ ID NO: 197809 - DNA, 682 bp, Gossypium hirsutum
tttctaaaaaaaaaaagtataacttcgtgaaagtataaatgttgaggtgtaaagggtaaattcatgattgtatcttttattttaattccatagaaggttaagttttgagaggggtcgagatttcattggtgaaagtcgcactagtcattcgaataaatctagaaatcaagggagaagacagagaagagagagctgagagagatcggatcagagatgtcatcacacaataacaattcaacttcggccaacgatcccagacaaccgtcggcggcaaagccatacgtggcgcagcctgtttcgccgcaagatctccctgtcgattattccggttttatcgccgtgattttcgggattgcaggcgtcatgttcaggtacaagctgagctcgtggctagcgatcatattctgcgcccaatcacttgcgaacatgaagaacgttgagaacgatctcaagcagatctctatggctatgatgtttgctatcatgggattagttacaaactatttcggaccagctcgaccaggaaaacagagttaaagataactccaatgatgcggttaagtttctaatttcattttgcacgatgatatcagatcatgaagtttagataaattgtgaccttattcaagaacaattttgtcggataattattttctatatgactaattggtttatatttata

SEQ ID NO: 197810 - DNA, 637 bp, Gossypium hirsutum
tcgtggatggatcagaagctgaaaatgactgtgtcttacgagatttagcagatgcatacggtcttgttaatgagatgcaatcttgttccagtggaaacgctgtagtaattggtggtgggtacattggaatggaatgcgcggcatttttggcaatcaataaaataaatgtaaccttggtttttcccgcagtacattgtatggctcgtttgtttacaccgaagattgcaagctactatgaggaatattatcaatctaaaggagttaagttcgtcaaaggaactgtcttgacgtcgtttgaatttgattctagtggaaaggttatggctgttaatcttagagatggaagtcagctacctgcagacttggtcgtggttggaatcggaatacgcccaaacacgagcctttttgaaggccaactaacacttgaaaaaggtgggatcaaggtgaatgggaagatgcaaacaagcaacgactcagtttatgcggttggagatgttgcagcatttccagtcaaactatttggtgaaactcgcagactggagcatgttgattcagccagaaaatctgctaaacatgctgttgctgcaataatggaacccaagaaatcaggcgagtttgactaccttccattcttcta

SEQ ID NO: 197811 - DNA, 173 bp, Gossypium hirsutum
tttggtagacatatgtggttttgagtatatttgcccaatgtgttgggaaaatttttgggcttcattgcgccgattttgagaaaaccggatcgaatgttgaaatgatttgcactatgaggtctttttatgattgttcgaaatttttaatgcccaaagcttggattattttcgtc

SEQ ID NO: 197812 - DNA, 534 bp, Gossypium hirsutum
gtgcagtgaagcaacaggatgaagtatttgcgggtatgtcgatgccgccaccgatgcctgccggcatcgctgcttctggtggtggggtgggcttgaatccgggagtggttcctggggagtatttgaatcggggtctttccgatgatgagagatcggatcatggggttcctgtgggatataggaaaacacaaactccagtgattcagcctcagggtttacctcttcagaatcaacagaagtatagcagtggtcaagatttggcttctccagattccatctcaagtgacggtagttttacaaatccattatcacgccaaaagcctgtgatttatcaagacccagttgttcaaatcccatctggggttaacaggattcctgcaaacactgtcgatccaaagcttaatatctctgatccgaactcaattggccgagttcagatacaacaacaagttcaggattctggttatgtattgcagcaaccacaattcgatcaacagcaacaaccacaacagcagcagcagcagcagcagcagc

SEQ ID NO: 197813 - DNA, 437 bp, Gossypium hirsutum
gatggaagtggaatgaaagaaccagtacaaacgcaggcgatggatggtagagcaggactcggaagtcagacgaagaagttggaccctagccttgaggtgcaagccggcgatagttacaaaactgtgattcataagaaagcacttgctaggtttcgtgaaatgtcttagcagcccctaggtagaaaagatgtggaaatcattattgtttctgtttatatatatgtatcatttagagaatgttggcgtggtttgaaacttccagtccacaccattttggaaagttaatatttatggccattttaatttcggtgtgaatcgagttttttggagcctgcctaggatatcttttacttcattattatttgagtggctaaatggcttgcaggtagtgtttactgattcaactagacgggctattgatgcataaatatttgata

SEQ ID NO: 197814 - DNA, 407 bp, Gossypium hirsutum
gcggaaggaaagggagaaaaaagggacatcaagggaaacacgaatcacaagcgctgatgaacaatctggaagagtgcaaagcctacaacccacaacatctacaacaagaagagatggcagcttccgcgggggctatggacggattggctgcatccgctctccgctccgttctccagagagtccaccagaccgccgagcggtgtggtcgtgaatcgcagcggatccatgtggtcgccgtcagtaaaaccaaacccgtctccgtcattcgccaagtgtacgacgctggtcatcgctgtttcggtgaaaactatgtccaggaaattgtcgaaaaagctcctcagcttccggatgacatagagtggcattttattgggaatttgcagagcaataaagtgaagcctttgatt

SEQ ID NO: 197815 - DNA, 506 bp, Gossypium hirsutum
tttgttcgttcataaaaattaaaagcctcttttttctctctgttcttcgccatttttttcaatcctaaaccaatcccagattttctgctgaaaaacaaaaacaccctctaagtaactttccgggaaaatgtcggggaaaggagcaaaaggattgattacggctggaaaatccaccaaggacaaagataaggacaagaagaaacccgtctctcgctcttctcgtgctggtctccagttccctgtgggtcgagtccaccgactgctgaagacaagggttagtgctaatggaagggttggagctacagctgcagtctacacagctgccatactggaatacctgaccgcagaagtcctagaactggcaggtaatgcaagcaaggatttgaaggttaagcgtattacacctaggcatttgcagctcgccatccgtggtgatgaagaacttgacaccttgatcaaaggaaccatcgcaggcggaggtgtcattccacacattcacaaatcac

SEQ ID NO: 197816 - DNA, 509 bp, Gossypium hirsutum
tataatttaggaacaagcctaaaaaaatatatttaatttaatttttacatattttcttaagtactaaattaagtgacaccagataaatatttatagcagacgcagtataggttacacggtaaccatccccgattctcttgtgttgagcccctcccctggggaaaaaaaagaagaagaaggaaccaccttgatggctactttggcggcggttgcagctcgtaggatagcgactgtacctcgaacaccacctccctgtcaagccgcttctctcattacccgccggggtcttgccggcgctgcagatcaccatggacccccaaaagttaattgttggcaagaaccaatgaacccagctaattggaaggaagagcattttgttatcgtctctttaactggttggggtctggttttctatggcggatacaagttcttaactaaaggcaaaggcaagaaagaagagaacacagtggaaacggcaaaaaaaatgaggttggagcttttaattttta

SEQ ID NO: 197817 - DNA, 759 bp, Gossypium hirsutum
cttcccattgctcctttcaattctcttcatcatctcccctgttttctgtgacaatgatgaggaagatgatcttcttaaaggcatcaacagttaccgagcttcgttaaacttgacaagcctaacaacaaatgagaacgccgagtgccttgctgatgaactagccgaagaattcaagaaccaaccttgcacaaactccacaggcgccaacactgtcccaggcaccgaaccacagtttgccaactatccaaaccttctagccaaatgccatttgaacgtttccgtcacaagggacggagcagtaatgcctgcttgtgttccgaacctggctccgagtcttgtgctcactaattttacgcagtctcaatactccggaaacctcaatgaaaccaagtatacaggaatcgggatcggttctgaaggagactggattgttgttgtcctaacaaccagtacaactgaaggaaactacgctacggctactactgctgctactactagtgcggccaattcagtttccaagataaccataattcatcaccttctattgctcctcatggctgctttctacatgttatgagcagctaaccctttaaagactacacaaaaatcatatgttttcatgtactaataagcttggattatttttttccctttttgggaaaattttcatatgattccgggttagataggtaatttcttattgttctcggtgtgggttttgtccggataacaataatgtgatattttagaccttggatt

SEQ ID NO: 197818 - DNA, 375 bp, Gossypium hirsutum
cgtaggtattgtcatgcaatgcaagtatgcctccgtgatttgaagttggaaaacacttcgtgggatggtagtccagctcctcggcttaagatatgcgattttgggtattcaaagtcttcagttcttcattcgcaaccgaagtccactgttggaactcctgcatacattgcccccgaggtactccaaaggcaagaatacgatggcaagattgcagatgtatggtcatgcggggttaccttgtatgtaatgctggtcggggcatatcctttcgaggatcccgatgagccaaaagactttccgaagacgatacaaagaattctcaggatccagtactccattccagattttgttcaaatatcttccgaatgtcgacat

SEQ ID NO: 197819 - DNA, 629 bp, Gossypium hirsutum
gtcggagctggtgcggggactggtatatctgcaaaatttgaggaggctggtggggttgatttgatagttttgtacaattcacgacgctttcgtatggctggaaggggttctttggcaggactattgccatttgctgatgcaaatgcgatagtgcttgagatggcgaatgaagtactgccagtaagttgtggtaaaggcagtgcctgatctagctggagtatgtggaactgatccttttcggcgaatggattacttcctaaagcaattggaatcaattggattctctggagtacaaaattttccaactgttggattatttgatggtaactttagacaaaatctgggagagactggaatgggatatgggctggaggttcaaatgattgcaaaagcacataaaatgggattcttgacaactccgtatgctttcaacactaatgaagctgcggaaatggcaaaagctggtgccaatataatattagcccatatgggactcactacatcatggttctataggtgccaaaacagctgtctcattggaagaaagtgttcttcgtgttcaagctattgccgatgctgctcatgccatcaatcctaatgtcatcgtgttatgtcatggaggtccaata

SEQ ID NO: 197820 - DNA, 677 bp, Gossypium hirsutum
gtttgttacccagatagatgctagtttttctcctcttcacagaaaatagcgacttcgaagatgatgagagcagtgatctatttgctccccttgactttcatcttcttcaccatagctgatggtaagcgcatccttccactgcttcagcctcagcctcttgaatccttcaaggtcaatgcaacccagaatgtggggagctgcacttacacagtatcaataaggacaagctgttcttcaactacctacacaagagatcagatcagtcttgcatttggcgatgcttatgggaatcaggtgtatgcaccaaggctggatgagccatgctcgagaacatttgaaagctgttcaactgatacatttcaaataaagggtccttgcacataccagatttgctatctttacctctacaggagtggatatgatggttggaagccacagagcgcgactgtgtacggatattataccacagctgccacatgtaattacattgtctttattcctaatggggtttggtatggctttgatttctgttatggaaggggttccgcatctgcatgaacaatgtagcaaattgttgggggggggttcagtttgtgaatctttattcagggatttggagaaataagcttcttgttttaacattttgggtaataatgagtaatgacttgttttgtctg

SEQ ID NO: 197821 - DNA, 771 bp, Gossypium hirsutum
aaagacccggggggaccaacgcgtccgcccacgcgtccgcccacgcgtccttcttctcgtccgcccacgcgtccgcggacgccggggtttccgatctccgcagagtgcttagcattcagctgctattagttgggtggctgcaaggaactgatctcaggcatggagaatgacaaggagctagaacaaatagatgtacaggagtctgaaaaatccatgccgtcatctgaagaggaggatgcagctataaggaaaaaatatggtgggattaagcctaagaaaccaccactcatttctaaggaccacgaacgtgcatacttggactctgctgattgggcacttggaaagcaaggtgttgagaagcccaaaggaccacttgaagccctccggcccaaattgcagcccacacaacaacaaacacgatacaggaagtctccttgtgccccatctgatggtgaagttggagggagtgctcaaccggaggatgaaaccaccaacgaatgagaaactgctgccaatcttctaaacttgtgaggactattgatagttattctaatacctcgacaggtaatgagtaattttcaattgttcccatgaataaagcttgttaaagatgctttgatcttagtcaagatttacaagttacaacattaatgcagtcgactatattatgggaactgaaatgtatgttgtgccaatgtttttcctgatgtggaacatacaagtaaatcacttataaaatgatttttcgctctactagattcccatttggct

SEQ ID NO: 197822 - DNA, 1364 bp, Gossypium hirsutum
attcatttcctttttactttcccttctccacacgttttaacgcttagcgctagcaaatcttgaagatcccttgaaatttccttccgtttccttaacgtccactgttcttcgcatttgtctacactttagattaagaaaggaagtacgctacgaaaccagatctctgctgattcattttccagttgggcccaacaatggcagaatctaagtcggacactgactttttgaaggaattctacattcctgcgtatatatttaatgatgaaacaaaattttctgatgttcgtgatgcacctgagtttccagtgcttgtgtttatcaactccaaaagtggtggtcaattgggtggcgatcttcttaatacatatagaagtgtcctcaatgagcatcagattttcgatgtgggggaagaggcccctgataaggtgcttcgcagagtttacaccagactagaaaagctgaaacaagaaaaagatgaatttgccacgaatattcatgagagattaagaataattgttgctggtggtgatgggacagctggctggcttctgggggttgtttgtgatcttaaattgccacatccacctgccattgctacagttcctctgggtaccggaaacaacctgcctttttcatttggctggggaaagaagaatcctgggactgatcggaattctgtgctgtcattcttggaacaagtaatgaaagcaaaggaaatgaaaatagacaattggcatattctcatgaggatgagagctccaaaggaaggtccatgtgatcctattccacctctggaactaccacattctttacatgcatttggtcgagtctcttcaacagatgaactgaacatggaaggttaccatacatttcgtgggggattctggaattacttcagcatgggaatggatgctcaagtatcttatgcttttcactcagagcggaagttgcatcctgaaaaatttaaaaaccagttggttaatcagagcacttatgcaaagcttggctgtacccaggggtggtttgctgcttctgtttttcatccctcttcaaagaatgttgcccagcttgcaaaagtgaaaatcatgaagaaacatggtcaatggcaggacctccacataccacagagcataaggtcgatcatatgcctcaacttgcccagcttttctggtggtctaaatccttggggaacaccaagtggcagaaaaaagaatgaaagagacttgactgcaccttatgtagatgatggccttctggaagttgctggctctagagatgcatggcatgggctcgcgttgctggctccaaagggacatggaactcgcctggcacaggcacaccgaatccgctttgagtttcacaaa

SEQ ID NO: 197823 - DNA, 567 bp, Gossypium hirsutum
atccgctgcgtccaaaccgcatccgaggtcgtcgccgccctgtgtgccgtcgatgtcgaggccaatgccaagtcatctgccgacgtcataaaattcgacccatcaaaagtcaaggtttctattgagtatggtttgtgtgagatgttaaacaaagaagcgattagggttgatgtagcgccgaaagatggaaacttcggtttcgatgttccactgcttgagactatgttcccgagtgggacgttggatcctagtcttggacgagtttacggaaagatgccacaatgggaagaaacggtggatgaatctagaagtagatataaacaaattattaaggcattggctgataaatacccctctgagaacttgctattagtcacacatggggaaggagttggagtttcgatatctgggttcttggagcacacgacagtggttgaagtagaatattgtggttatgcagagttaaaaagattaatgacatgcaaaaatgggtcaaccactgctggaaactttttggtgcttacaaaaagtggtcagagtgggattacttattttgattaaagaatg

SEQ ID NO: 197824 - DNA, 250 bp, Gossypium hirsutum
gtgggacaaggtccatgcttaattggagcttcttcacattgattctatggctggtttatcttatctgctgtctgctaccatatgagtctgcttttcttacaatttcctttaatttctttttttgggtttgaaatttgattaaatttatatatatgcatatgcatatgatatgagaggtaatgaatgaaatagcaatgagaaaggatgtactgccatgttattattattacaatttgaaatataataacag

SEQ ID NO: 197825 - DNA, 423 bp, Gossypium hirsutum
  unsure (1)..(423): unsure at all n locations
gaaatggagaatggtgaggcatttagagtctgcagtgcacgtattggaagttcaagcatttggaggaacaacgccatggaagctttctccatgtctgctcgtgaagaagatgatgaagaagacctgaaatgggctgccatcgagaaactgcctacatatttgcgtgtaaggagagggatattcacagaaggtgaaggtcaatcaagggaaaaaaaaaaaaattacacaacaaatttgaaacttatgttattcatnnnnnnnnnnnnnnnnnnnnnnnnnnnnnnnnnnnnnnnnnnnnnnnnnnnnnnnnnnnnnnnnnnnnnnnnnnnnnnnnnnnnnnnnnnnnnnnnnnnnnnnnnnnnnnnnnnnnnnnnnnnnnnnnnnnnnnnnnnnnnnnnnnnnnnnnnnnnnnnnnnnnnnnnn

SEQ ID NO: 197826 - DNA, 892 bp, Gossypium hirsutum
  unsure (1)..(892): unsure at all n locations
ccgacatcttgtttccttgataggttattgtgatgagaagaacgagatgatcttgatttacgaatatatggagaatgggacactcaagagtcatctctacggttcaggccatccaagtttaagttggaaacaaaggcttgaaatatgcattggagcagccagaggactccattaccttcacacgggctatgcaaaagcagttattcatcgtgatgtgaagtcggcaaatatcttacttgacgagaatctcatggccaaggttgcggatttcgggctgtcaaagacaggtcctgaactcgatcagacccatgtcagcacggcagttaaaggaagttttgggtaccttgaccctgagtatttcagaagacaacaactgacagagaaatctgatgtgtattcatttggtgtggtcttgtttgaagttctttgtgcaagaccagtgatcgatcccactcttccaagggaaatggtaaatctagctgaatgggcaatgaaatggcagaagagaggacagctggtgcaaataattgatcctagtctcaaaggaaacatcaggcctgattctcttaggaagtttggggaaactgccgataaatgcttagctgatttcggtgtcgacaggccctccatgggggatgttttatggaacctggagtatgctcttcaacttcaggaggctgttcaaggcgatcccnaaaaaaacagtacgaacatgatcggtgaactttctccacaaaatgacaatttcagtcagcttgatccaacagtttcttctgcacagtttgtgttgtcgagtgtgngatgactctcaggtgcttcaatgagtaaagtgttctcacagctggtgaagtctgaaggcaggtgaattatatgttatggagcanagattact

SEQ ID NO: 197827 - DNA, 431 bp, Gossypium hirsutum
aggcgaacggttaggtaagggaattaacaatttccccgatgaattgctatatttccttgggactgtagtagagcgtgtttatcacatgaatctcataaccccactctatgccttttctactatactttgggttttgcaggcggagtcgaagagcggctcaaatgaatcggctttaaaggttgctttacatcatggaaaggcctcaggtgttataaagccacatgaccgtgtggtggtttgccagatgctgggtgatgcatcagtggtaaagatccttgaacttgaagattacaagcttatatgtggatgagaagttttgcataacctaaaaccctaagcatagcatggatgaaataaaccgtatctgtacacgtattcttaaactatccatgctatttttgtgtaaacggattttgcgtcttgtaagaaaa

SEQ ID NO: 197828 - DNA, 413 bp, Gossypium hirsutum
gaggaacaccaaaaccttcttttgttttcttcttctaatcaatggcatcttccatagctacaactctcacttcctcttcaaagctttgcaggaacacttctctcttcgagtcttccttccatggggttccaattaaaccactttcttttcatttcaaaacaaagtcttccccgtgcaacgcatccatttccatgtctgcagcatcacctccaccctatgatctgaataatttcaggtttgaccccatcaaggagtccatcgtctcacgtgagatgacacgcaggtacatgatggacatgatcacctatgctgataccgatgtggtggtcgtcggtgccggctccgccgggctctcttgtgcctatgagcttagcaagaacccctccgtacagatagctattgtcgagcagtct

SEQ ID NO: 197829 - DNA, 721 bp, Gossypium hirsutum
aagggaagtcggcaaaatggatccgtaacctcgggaaaaggattgtaccgaatttgatatcaaggaagcacacaaatagtgcagctacagttctctatgcattttttgggcttcggttactttacattgcttggagagcagatacaaaggggtctcagaaaaaggaaatggaagaagtagaagagaaacttgagactggccaagggaagacatattaccggcgctttcttaccagattttgtacacctatctttttggagtcatttattttaacatttctagccgaatggggggatcgaagccaaattgccacaattgctctagcaacacataaaaatgcagtgggggtagcggtgggagccataataggacacaccatctgtacgtcactggccgtggtgggagggagcatgttggcggccaagatctcgcagcgaacagtggccgcaatcggcggctttctcttccttggcttttccctttcctcgtatttctatcctcccctatgatgatttgtaggttaaacatgattcttttgaagaacccaactcccgttgctcctttcaattcaatttttctcattgtttttgcctttatagtttatatatgcaacactgaaagtgttttatactaactggttaaaaaccagatcaatgtccttttccttttttttgtacacatgcatacatgtatggtttcttagggtaaggtgttatcaatc

SEQ ID NO: 197830 - DNA, 705 bp, Gossypium hirsutum
  unsure (1)..(705): unsure at all n locations
atttcatacatcaaacgagatggccttacttcagttacctttctggattatgatgtgaatataatgctgtataaaacgccgtagggggttgacatantgaaccaaaagtatggaagagtgttgaagctggactcaatcaggggcggtgattcatggaaaggagtggacgtgctgatctttaacacgtggcattggtggacccacaccggaagaacccaaccatttgattacatagaagacggtgggaaaacgtggaaagacatgaaccgtatggttgctttttacaaaggattaacaacgtgggctagatgggtgaaccgcaatgtggatcctttgaaaaccaaggtttttttccagggcatttctccaacccattatgagggaaaggattggaacaagccaacagagtcctgctcgggacagacacaaccattcttcgggatgagatacccaggaggcacacccatggcttgggttgttgtgaagaaggtcctgagtaggattaagaaaccggtgtttttgctcgacgttaccggactctctcagtaccgaaaagatgcacacccgtcggcatacagaggcatggacggcgggactgactgtagccattggtgccttccatgtgtgccagatacttggaacagtttactttatgcagctgttttttagtgaatttaggcaggaagatggaaaaccatttgtttt

SEQ ID NO: 197831 - DNA, 408 bp, Gossypium hirsutum
aatgccaatggcttgatcatgatttagatgacagaccaaattttgagaggccccaacgaaccccttcctgcgcattgcagtttgctgttaccggctcttcaattcatgtctttggtttggccatctaactaggagagtgtgttcgtcgcagatcatctctgtagcattgggatacagtatagagcctgaaaaccttgcccgggtttctgtacacaagttacacggtaatgtttcgggacagcgataatttgtcttccagttaaataagtttgtcgagttccaaatatggtgcaatggacatgctttgaagcgaagcatgtaagaaatcaaagtaatggagcaataaaggcatgaaaaagcatgcatgtgaaacatccaagtgccactcggataaagttgactgggcac

SEQ ID NO: 197832 - DNA, 593 bp, Gossypium hirsutum
attttgaaggggaagtccataccaatatttgtttcttgctaatcatggtacggtggctagggatgtgtacctacattgatgatattggtaaagggtgtttagcagcactggatactgccgagaagagtaccggtagtggagggaagaagaagggtccggctcaactgagggtatataatttggggaatacttcgcctgtgccagtttcagatcttgtgagtatcttggagaggctgttgaaagttaatgcaaagagggatattatgaagttgccacgaaacggggatgttcagtttactcatgccaatattagcttggctcagagagagcttggatataagccctcaactgatttgcagactggtttgaagaaatttgtcaggtggtatcttggttactataatggtgggaagaaggctgctgggtgattcattctttgaattgcggtaggatcctccaaattcttgttcattatcattcgaatccttggttttaacatttctctgttcgttaggaaattatccgttgttcatacatctttaatgatgccatcgtataaagaaggatatcatgtcctacttgggagaaagttt

SEQ ID NO: 197833 - DNA, 609 bp, Gossypium hirsutum
  unsure (1)..(609): unsure at all n locations
cccacgcgtccgctcaatcgaaacagaggaagttaagttatgcattagcaagaaaaaatgggttccgcaacactctcaactctttctctcagttccccttcttatccttcacccactactactacagcccattttttcaaaaccccttctcttcaattccctctccgttccaccgccactactaccctcacccaccgtaccacattcctccgtcctctcaacgccaccgcggcacccgaaaaaatcgaaaacctcggcactgaaatctccaacttaaccctcgaagaagcccgaacactcgtcgactacctccaggacaaactcggtgtctccgccgctgcatttgcccccgccgccgtcgccgtcgcagcaccagatgccggtggtgccgcagctccagttgttgaggagaagacggagtttgatgtggtgattgaggaagttcctagcaatgcgaggatagcggtgattaaggctgtgaggggtctgactagtttggcattgaaagaagctaaggaattgattgaagggctgcctaagaaaattaaaagaggagtttctaaagaggaagctgacgatgccaagaaacagctngaagaagctggtgct

SEQ ID NO: 197834 - DNA, 884 bp, Gossypium hirsutum
ctggaatctcttgaaaagatcaagtttaaaaaaattgttctgttacatggagaaggctttggagcttggtgttggtataaaacgattgctcagttggaggaagtaggccttcagcctactgcactggatctcacaggctctggtattgatctgacggatacaaacacagtcaccacattggctgaatattcgaaaccattgattaagtatctagagaaccttcccgtagatgagacggttatcttggtaggtcatagcagccgaggtgcttgcctttcatatgcatcggagcatttcccggaaaagatctccaaagcaattttcctttgtgctacaatggtgtccaacggtcaagagaccttttgatgtgtttgccgaagagcttggttctgctgaacgtttcatgaaagagtcgcagtttttgatttatggaaatggcaaagataagccttctacagggctcatgtttgagaaacagctgatgaatgggttatatttcaatcaatcgccaacaaaggatgttgctttggccatggtgtccatgagatccaccccactaggtcctatcatggagaaactgtcattgacccccgagaagtacggaactgggcggcggttctacgttcagacattggaggatcgtgctctttcgccagatgtgcaagaaaagctagtaagagaaaatccacctgaaagagtttttaaggtcaaagggagtgatcactgcccattcttctcaaagccacagtcacttcacaagattttaatagaaattgttcaaattccttagcttaattttcagattaaaaaagaaaagaacatatttctttagtcttttatttctatagtgaaagaagacgataataagttgtcattacacttgt

SEQ ID NO: 197835 - DNA, 589 bp, Gossypium hirsutum
ttgttttgtgttattttcttgtcaatggagtcattaacttcttctccagtgtgcaatctagggattttgatcagtctcgacaacgactccgtccaagaaatcctccaaagctacgacggtttctgcaccgccgctaattctctcctcaaaatctccggcgatctctccctcgaacatgacttcgtttctcatgttcacactctctgcaaacacggcctccatattctctctcgggactacttccttagattactagaggaagcgtttgagaaaaatggggcgtcgagattttggcgctattttgaggattatagcatagatctaagtgatacagtctttgttgctcttcatggatagttatttgatgggtacttttttctgaaggatttaaagctgttgttttcattttcatggcttagggtttttgttcttgtatttttgttgaaccattttcatctacttgataaatgttatttgagtttttaaggattgaaatgatttgaattggtaaaaatatatgttatataatatattatataatataaactataaaattttataaatattttaattatatttaaaataatag

SEQ ID NO: 197836 - DNA, 464 bp, Gossypium hirsutum
ttagttcttcgtatgctataattttttgttttgaagtgccagattcaacctaatggcgaagaagggttcttcaacgacgccttctagaaaagcaaaaaataaaaaagaagaatctgttccagaacagaagaattcagcttctaaagtggctggtaacgaaatcgacgagatatttgcaggtaaaaagaggaagaaacccgacccgaaagggtccgagaaaccgaacggcgatgaaatttcaaaacccaaatcgtcgaaaaagaagagtaaaaagagtagagaaaccaacagggaaggaggattcaatgagtcttcttctgggccttggaaaaggacagcagatggttttgcaatttacactggaagaagaattgggtattagtaaatctgatgctggaagtacgccactttgtccatttgattgtgaatgctgtttttgataaatgggggtttggttctaattt

SEQ ID NO: 197837 - DNA, 721 bp, Gossypium hirsutum
gtgggcaattacaagaggagggtttaaccagaaatttttcaacttgcccaaaaacctctctcgccctctcatggctacctctaaccttattagggtttcttctccttcttactccacttcctcccctaaccacgctccttttaagcgcgtcggcactcacaatggaagcttccactgcgacgaggccctcggctgcttcatgattcgtctcactgacaagttctccaactccgagattatccgtacccgagatcccaaggtattggagggtcttgatgctgtgcttgatgttggaggcgtctatgatcctaatcatgaccggtatgatcatcaccagaagggatttgaggaggtttttggacatggatttaatacaaagcttagcagtgctggacttgtttataagcattttggcaaggagataatagctaaagagcttcagcttggagaagaccacccggatgtgcatagattatttctggccttttacaaaagcttcatggaggcaatggatgcgatggacattggattcaaccagttggatactgccaggccaccaaatttggtgaccattccacacttttcttctagaagtgggaggataaatttaggcctgacaaattccggtccattaacttgaaaaggaaatggaggttttcaaccaggcatgggtttaactggtagtgaggtcttagaaagggtcccatttcatgcaagatca

SEQ ID NO: 197838 - DNA, 544 bp, Gossypium hirsutum
ccatcattgaagaagctggagcatttggaagtgttgtcagtagcagggttggagtctgtaactgatagttttatcaaggaatttcttattgcaagaggtgatggtatcaaggaactgattttgatggattgttggaaattaactgattcttccttgaatatcattgcggaaacctgttcaaatttacgagctcttgacattggtaacatatccaaactgacagacacttctttcggctatctggccagtggttgtcggtcattgcagtcattgaaactctgccacaatgcattcagtgatgatgctatagctgcatttcttgaaatgtctggggaggttttgaaagagctagcactgaacaatgttgggaaggttggtcttaatacagccttatcacttgcgaggcgttcaagaaatttggttagtctggatctatcttggtgccgaaatctgactcatgaagctacgggcttgattgtagatagcttgttatcgctgagggtgcttaatacttttggatgctctcagattacagacgtctttt

SEQ ID NO: 197839 - DNA, 591 bp, Gossypium hirsutum
tgcaaagataactgaaggatcaactccaaatgatttacccggcagcaaggccatagatgcaatagtgtgggcaacagcggtttggatttgatggctgaagttcagagtgtttctatttccagtcaaaacagcgaatccagtgaaagtagagcaccagacaatttgaatttcactactgcttcgaacaagaaagtcccgaaatttgaagcggcagccgctgaagccaaattggatatgcttcttaattctttcaatgagactaaacttctcgatacttccaacttaagttccgaaaaaccctcgagcatcggttcactcaaagcttccaatttagacagtttgctggatgatttattacaagaaacatcgacaacagtaaaccgagggatagattcatcaaagactggcgcaggtaattcaacttcccaaaatttgctcgatgatttattacaaaaaacatcatcgacaattggtaatgccaaacttggttcggataacaatgttcgatcttcttcttcatctttccaatctgtttcgaagtcaaaaatttggatgatttttgattcatggctaagatactatctgatgact

SEQ ID NO: 197840 - DNA, 620 bp, Gossypium hirsutum
gaatattactggtcctgcaacttcagaaactgtaactccaaaaaagttacgcaggatccggcgaaaaagggcttctggatttggggattctgtcctttctccacaagctgtgctaaatgcatatggcccaaagcatggaaaaagaattggtcctgtttggttctcattggtggcctctgaagaccaggaaggaggtgctcccctccctcggattcctgcaatttacctaaggataaaggatggaaatatgcctgtttcttttattcaaaaatacctgatcaagaaattggaccttaccgatgaagctgaggttgaaatcaaatgcatgggacaacctgtgcttcccacactgcagttgtataatttagtggatttgtggctacaaacaacatcgacatcacaacgtgtagctgcatctgtaggttcttgtgcaaaggattttgtaatggtattggcatatgctcgaaaagtgtcagggcaacaataaagcgttgtttcattcttttcccaccacgtcaataatcttaaatgcaaacatagatgatatgtatcagtcattattggaatcttgatggggcaaatagagtaggacattttgatgcggcatgtattctatgatc

SEQ ID NO: 197841 - DNA, 396 bp, Gossypium hirsutum
ctgatgaacagcggggaatgcctgctcctttgactgacgttacttttgttctgaaattgcccgttgatccaacattgttaaaggtttcacctaaagctgtgttgaacagatcagagagagaactggagtggcatgtgccagaggttccactgaagggtactcctggcaaattgagggtaaggatgcctttggattctgctgacattgatgaagaactagaagttgttggttatgtaaaattttcagtgcaaggagctacttcattgtctggggtctgtctaaagcctgctaccgagggtaagacagatttttatgaggtaaatcatcggtatcagagtggggtttatacatgcaattgaattctgatgagattgttttttccatacaaaatttctg

SEQ ID NO: 197842 - DNA, 757 bp, Gossypium hirsutum
attgtgattcctgtgccttacaaagatgcagatactcaagggatctttgatgcctgtgctgccactgtggcaatcctctctgatgctggtattcgggctgaagctgatcttagagagaactactcacctggttggaagtactcaaactgggaaatgaaaggtgttccactaaggattgaaataggacctcgagacttggcaaataatcaggtgcgtgcagttcgccgtgacaatggagaaaagactgatatctctagagtctttttggttgaacaagtaaaaggaatgttggaaaagattcaacagaacctatttgatgtggcaaaacaaaaaagagatgcctgcattgaagttgtaaaaacttgggatgagtttataaaagctctcgggcaaaagaaactgatcttagctccttggtgtaatgaggaggaggtggagaaagatgttaaagctcgaacaaagggtgagatgggagcagctaagtctctatgtaccccatttgaacagcctgaacttccagaaggtactaaatgctttgcttctgggaagcctgcaacaaagtggacctattggggcagaagttactaggtttattcactttttaaaaccatctccttttcatggttctttgcctgatgtcaacggttctggtcattggggccattgtaaacggggaaattttcaatttaaaattgttatatgaaactgatgaaaagattcagtttttaatcatgttaaaacttctgtgatctttcta

SEQ ID NO: 197843 - DNA, 466 bp, Gossypium hirsutum
  unsure (1)..(466): unsure at all n locations
ncatttcagggccattgttgtggttggtgatttgcaagggcaagttggggttggagttgggaaagctaaggaagtcattgctgccgttcagaaatcggctgtgaatgctcggaggaatctcattactatacctatgacaaagtacttgactttcccgctccgatccgggggtgactatggcgcagctaaggtgatgcttagacctgccgcacctggtactggagtgattgcaggtggtgctgtgcgaattgttcttgaaatggcaggcgtggagaacgctttgggcaaacaactcggaagtaaaaatgcccttaacaatgccagagctactgttgttgctgtgcagaaaatgaaacagttccaggtggttgctctactacaaggaatccccatggaagagttgtggacgtgatggcattggaagcgttctttaaattttcttcttgagattctctgggaatgttga

SEQ ID NO: 197844 - DNA, 724 bp, Gossypium hirsutum
  unsure (1)..(724): unsure at all n locations
ggcaaaaagaaatatatgtttggattggacgccactcgactattaaatcaaagcaagaagcccttaacttgggtctgaaattccttcaaacaaacattctggaagaagaactttctttggaggctcctatatatggtattaccgaaagggcatggaccacccttcttcacatggttttttggatgggatccctccaaggccaatatgcctggcaattcatttggaccggaacctacctcccttgaagggaaaaccatcgaggggaactgccccttccaaaattgccctaaaaccgcgctccagggaagctaccccagatggcttaagaagcagatctagcagttcaaatggatgggaaagaagtttttctccagcatcaacagtatcaggttcacatttgaagttttctgacaactatagtgtatccagtccaactccagttgccaggaagctctttacgggatcctctccttatcaagattctcccgtaatagagccaagctccccttccacgaatgagaaatccaccagatcgatgcaaacgagactagtgcagattcattaatatatccttatcaaagattgacagtgtcgtcaactgaaccagtctcaggcatagatgtgaccaaaagagaagcatacttatctgaaggagagtttgcagaanaaattggcatgccaaagggggccttctataaactacctaaatggagacnaaacaacc

SEQ ID NO: 197845 - DNA, 636 bp, Gossypium hirsutum
gatcgctgaggctcaacaacaagagaaggtttcttcggaggttccggcagctgaaaagaaaagatggacccttggcgattttgacattgggaagcctcttggacgggggaagtttggccacgtttatttagccagagaaaaaaggagcaatcatattgtggccctcaaagttctttttaaaagccaactacaacaatctcaaggtgaacatcaactacgtcgagaagtggaaatacagagtcacctgcgccatcccaatatattgaggctttatggatatttctatgatcagaaacgtgtttatctgattctggaatatgcagccaaaggtgaactttacaaagaactgcaaaaatgtaaatactttagcgaaagacgagctgctacctatgttgcctctttagctcgggcactcatttattgtcatggaaagcatgtcatacacagagatatcaaacctgagaacctgttaatcggtgcacaaggtgaactaaaaaattgcaaatttgggatggtctgtgcatacattttacccgaaagcggactaagtgcgggtaacttgattatctccccccctgaaatgggtgaaagttttaaagcattaatccagttgttgatttcttgaacctttggttt

SEQ ID NO: 197846 - DNA, 503 bp, Gossypium hirsutum
cccactcgtccggaaaattaaaaatctccattattttaaatccttctttgcatttcttttaacggcaatggctctctctcgtttcgtttacttaatcacgctggcattgcttttttgctccgttatagcacaatctccgacgccgtctcctgtttcttcgccgaagaaatctccgtcatctactccgacaccgatctcttcacctcctacaatatctgctccgtctccgtcggaggttccgtcagcgactacaccgtctccagcaactgttgagtcacctccatctccttctgctctgtcaccgaatgccagtcccacgtcaatttctgaacctcctgccggagctccgggaccagcggagaatagtgccgttaggtttggtgctgctggatctgttgcggttggagtgttgatggtcgctatggtactgtaggcatatccagatcttccttctctcgatgatagtataaataaaatttagcttatgtattctccttaagttt

SEQ ID NO: 197847 - DNA, 378 bp, Gossypium hirsutum
ccctttcgttctcacaatttggttctacagtcagtgaaaaagttaacccagattcttatccttaattatttggatctcatttcccgatgtgttttcctttttacctttttcttggtcctaaaaacgcctccgatgttgaaaagcctattctggtatgtgatgctatcaatttcttaaagacaagaatgaccaaaagagtgcatagttgtagtttcccttttccaaaaacgaagaatgtgagtttgctgagtagcatagatttaataaaagttgagatacttggttaatcactatgtaaaacatctgcaactcttgggacttaactagttagtggcatcataggttattctttttacaggaaggggggcttttttgcgt

SEQ ID NO: 197848 - DNA, 426 bp, Gossypium hirsutum
aaaaagaaaggcggaaacttatcgaaggagcggaaataaaagatgattcaccggaaatggagtttgctaacaggcccagttgtcatcctcggcggcgttgtgggagccaccgtcgtcgctcactttctctttgttgacgatccatatcttaaaccaaagaagaatactgattcaccaccacaaaccaagtagaaagaagccgacggtcgctgttggcatttggagcaaagaaatgcctaggtcgctgtttaaaacatgagttgtttgttgaataatgtcaaatctgtttgttttgtaatttgggttagcttctgttttctctttcttaaataacaactcaactacaaagttcttgaacacttgcattgaatctcagaacattgcttaaagttgcaccagacagactactttgcaaatagactttga

SEQ ID NO: 197849 - DNA, 373 bp, Gossypium hirsutum
aatcaagccggctgagcatgtcaagaatccgttgtttactgcgtggcattgatttgacaacggatatatttctattcatactggtcccgacctgcatattcgggatatatattcatgggcagaagatttcatacttcctgcgcccgatatgggaatcgccacccaaaccattccatgatatcccacattattttcatgagaatgtatcaatggacgcgctctgcgaacttcatggttggagaattcgtgaatttccaagacgggtgtatgatgctgtgtcgcttagtaacgaagtggatatccttaccatacggatggaaagaggtgtacccttacataacgcattttgttcttcttgagtctaattcaacat

SEQ ID NO: 197850 - DNA, 828 bp, Gossypium hirsutum
gtttgccggcgtctttccagaacacaaatacgaaattgtgaggaaatcccaggagaggaaacatatatgtggaatgactggagatggtgttaatgacgctcctgctttaaagaaagctgatataggtattgctgttgctgatgctacagacgccgcacgaagcgcttcagacattgttcttacagaacctggattgagtgttattatcagtgcagtgttaactagtagagctattttccagaggatgaagaactatactatctacgcagtttccatcacgatccgtattgtgttcggatttttgcttatcgctctcatctggaagttcgacttttcgccgttcatggttttgatcattgccattcttaatgatggaaccattatgacaatctcaaaggatcgagtcaagccatctcccttgcctgatagctggaaactgaaagaaatttttgccactggaatcgtgctcggaggctacttggcattgatgactgtcatattcttctgggccatgcatgataccgacttcttctcggacaaatttggtgttcgatctctacgggaacgagagcatgagatgatgggcgctttatacttacaagtgagcattgtgagccaggctctgatcttcgtgactagatcgcgtagctggtcgtacgctgagcgtcccggactactattggtcactgccttcatcattgcacagcttgttgcaactttgattgctgtatatgcaaactggggatttgcaaggatcaaaggaattggttggggatgggcttggtgtcatatggctctacagtatagttttctacgtaccattggata

SEQ ID NO: 197851 - DNA, 627 bp, Gossypium hirsutum
caacctttctcagcttaacaacaacaacaaaatggcttcttttatcactccaactatcttaaaaatattcctcatcatctctttgtttcaaatctgtttgggtgtacgaaagctgagtgaagtggttgaggagcagcctcagctcttgaaataccacaacggtcctctcctttcaggcccaatcaccgtcaatctcatttggtacggcaagttcaggccttccgagagggctattatctctgattttgtcacctccctctcttctaacccttcttcaccctccctaaaaacccaacccacggtggctcagtggtggcggaccaccgagaaatactaccatctcgcctctaagaaatcgtctctttccttgtctttggggaagcagatccttgatgaacactattcgcttggcaagtctctcaagaagaaacaaattgtcagagttggcctcaaagggtgaccaaaagcatgctattaatggtgttttaacagcatctgatgttgctcgtgaactggttttgcactgaccctatgtgggactcatgggtctgccttgagctccaccatgggtatatggtctgccaaacttgcttacatttgatttgggaatgctcacactcattgccc

SEQ ID NO: 197852 - DNA, 739 bp, Gossypium hirsutum
attaaccacagaaattcctatagaatatctgtttctttggttgaggttttcagaaggtaactggtaatggggagaccaccttgctgtgacaaagtcggtgtgaagaaaggtccatggactcctgaagaagatatcgtcttggtgtcttatattcaagaacatggtcctgggaattggagagctgttcctaccaatacagggttgctcagatgtagcaagagttgcaggcttagatggactaattacttgaggcccgggattcgaaggggtaactttacagaacatgaagagaagatgataatccaccttcaagctcttttaggcaacagatgggctgcaatagcatcttacttgcctcaaagaacagacaatgacattaaaaactactggaacactcatctgaagaagaagctgaagaaactccatggaagtgaagtttattgcagagatgggttcacatcatcagctgcatcagaccagatttcacgaggtcaatgggagagaaagttgcagactgatataaatatggctaaacaggctttatcagatgcattgtcccctgagaaatcaagtgatttaactgagttgaaaccttgtcatgggaacacttatgccaaaccagaagggtatgcatcaagcacggagaatatagctaagctgttgaaagggtggatgagaaagaacccattaaagcctgcttcaacaaactctggtgtcactcaacaatcatatgacaaca

SEQ ID NO: 197853 - DNA, 645 bp, Gossypium hirsutum
  unsure (1)..(645): unsure at all n locations
ttcagaaagagtttgacattcaaggcaagcccgatgccaagcttctaccatgagggaccaccaccaaaagttgaactgaaaaaaatgccaccaactcgtgcaaagtccccaaagctaggtcgaaggaagagctgcagtggtccagtcagttcaagtcagggagacaaggtaaaaggtacttctcatcacaaaaatcgtcacagtttgggtagtcaaagagaagccattattgccaccacattcagttcagcaaacaaaaagaatcaaaacaatgtccagaatggaaactctcctttggaattcaaagatgagtcttcgaaagcacaagagatgtgtgagttggttccacccgacgcaaatggccacattgacttggacattaatttcctatcttgagtttctggtgagttttctaatttaagggaaacacttattcccttattttcttgtgactgcactaaagaatgtttattctgttttcttaaaactgcaaagacttgttgctctttattgttattaagtgtaaattcctgtaagttataacgtggttaatatatatatataatgttcctgatctgttgtaatatttcacaaagtcaagagactccacttcacttatttgaacaattcaataaatnttttctt

SEQ ID NO: 197854 - DNA, 633 bp, Gossypium hirsutum
  unsure (1)..(633): unsure at all n locations
cgctttgcttcactaaagtatacaaaccttgttcttctattttagcttctcttcacattgagaagctagctttttggtgcgtttgcttagcttcaacccacattgtctttgttgcgaagatggttgcacacaaatttaccgttgatttgaataaaccccttgtcttccaggttggtcaccttggagaaagttatcaggagtgggttcatcagcctattgtgagcaaggaaggtcctaggttctttgatagtgatttttgggagttcttgactcgcactgcctggtgggcaattccaaccatatggctgcctgttgtttgctggtgcatttcaatgtccgtacgtatggggcatacactttcccaaaccgctttaatggttgcttttggcatttttctgtggacatttgtggaatatgttttacaccgattccttttccacattgaaactaagagttattggggaaacaccatacactatcttcttcatggctgccaccacaagcaccctatggacggcctgaggcttgtttttccacctgctgcagctgctatattatgcataccgttctggaatctgattaagttttgtgccactccgtccactactcctgctttgtttggaagaggtntat

SEQ ID NO: 197855 - DNA, 428 bp, Gossypium hirsutum
aacccccataccagcaagaatacatctaagtaaatcctctagccgcttcaaaaaacagagaaagaaaaccaatcttttctcttcaatattcgaccgaccgatggtctcccaatcgactgctctcctgcctctccttttgacccatagagtggtcaatcaaggcttcattgaaccaagaagattcgtacgaagtatgggtggcgtgagtacgggggctgtgctggcgtacggaggcgcgggcgtggttgctggagggtacggaggctggggctgctggagcagaggcgttgtccagttcttggctgcggcgcaaaatcctagctagggtttctgctttgatttttttttttgggctgtagggtatttgggtctaagttttgggttgtgttaggtttgggctaagtttgggtattgggtcattgtaataa

SEQ ID NO: 197856 - DNA, 555 bp, Gossypium hirsutum
gtttgaattctttttttgttaaatctgtggaggaacttccttacaatatatctgtgattcagatcagcaaggctttgccttctgttgtagctgaggctcctactccagggccaagtgagctgaatatcactggcattatgtcagcacatgggtgtaaagtgtttgctgatacccttttggctaaccctgaagccatgagaacatatgaggataatgttaatggaggattgactgtgttctgccctatggatgatccattcaaagcctttttaccaaagtacaagaacttgacagcttctaagaaagcatctttcctcgaattctttggtgtgcctgtgtaccagtctttgtccatgttgaagtccaacaatggtctcatgaacacattagctaccgacggtgccagcaagttcgacttcaccgtccaaaacgagggcgaacaggtgacactaaagaccagggtcaacaccgtcaaaataaccgggactttactcgacgaacaacctgtggcgatttatacaatcgacaaggtcttgatgcctagagaattgttca

SEQ ID NO: 197857 - DNA, 489 bp, Gossypium hirsutum
cccacgcgtccggtagggcttcaagttcaacgtacgtgaaggtaaagatggaaggaaatgcaattgccaggaaaattgacattagtcttcaccactcctttgaatcgctcacaaccaccctgatgagaatgtttgatatatctgatgagaatgggcaaaagagctttaaactcacttatctggacagagaaggagactggctgcttgctgaagatgttcgatggaggaccttcattcgatccttgaaatacatcaaattaattcgaagcagatgctaataagttagtgatgggatggatgaaacttgaaagaatggtcacggccttttcatttttgcttcaatgtaaacatatagtaaatgaaacactagttgtttaagacacaggtatgtagatttgagtgcaataatgataccctgcttcaattattccaaaaaccttccctgccaacttcatcagcctttgaatatttcttaaacatgaatctatt

SEQ ID NO: 197858 - DNA, 489 bp, Gossypium hirsutum
ccagactctactgagaatattatgccacagggctgattcagaggcatcccagtttgtcaagaagcagtataagatacccaagtcttctgcataggctgtagttcgacccagaatcggcttgaagtaggagaaagcgttgacttgaaatccagcttgaccgtccggaaaatggcaaatatgcatcagcccgtttgtgtgaaatataagttcatcactcccttgtaagagaaaacaactggatctgctttcatccttctttatggcatctttaaatcactctgttctctttgtatgtttacataatcacatttgagttgcgtatatgagatggaaaccataccatggccaagtacagctgttttgagcctttggagctatgttacctggctttcatttttcctaagatactcgccatacattcaaacttgagtttgagatttttagctttcaaatatatagattttttttaaaaggaataaaaaaaaaaca

SEQ ID NO: 197859 - DNA, 524 bp, Gossypium hirsutum
  unsure (1)..(524): unsure at all n locations
ccttgttctctctcacctaagaaagaaaacctcgaatttcttgtgaagttggtgaaagaaggaaagcttaagccagtaattgattcagtacatcctctaagtaaggctgaagaggcttgggccaagagcattgacggccatgccactggcaagattcttgtggagccataagttatgaaggttacctgataaatagcactagtttttcagtttctcattgagtggtgtagctcaccatttctaagttcacaaagtactcagtatcttgaacaattccatgttggtgtgagagtttcctaatctttcttgtattttgctggtggtataaacaatgttgtgtggtatctgatgttactgagcactgtgttttcttgtgaaacttagattttattttatttttaatgtaattcaaattgcagatgattatacggagaacagaactttccttgtttttgaaccctttcgttttctgcttaatgcttaataagtatacaaaaatactgcnnanaaaaaaaaaaaaaata

SEQ ID NO: 197860 - DNA, 582 bp, Gossypium hirsutum
  unsure (1)..(582): unsure at all n locations
cccacgcgtccgcccacgcgtccgagagttttggagccatgttcgtcgcatagnggcgttaccgaacctagaattgtcgtgcaaacaacaagcgaagttgatctattggatgatggctataggtggcgcaagtatggacagaaagttgtcaaaggcaatccttatccaagtagctactacaaatgtacaaccccgggatgcaatgtccgtaaacacgtcgagagggcttcgactgatcccaaggctgttataacgacatacgagggaaaacataatcatgatgtaccggctgccagaactagcagccacaacaccgccagtagtaacgcaacacaaggtagaacacagaatatagtaaccgataacaaccacggtgtaaataacagtgtcgattctacgaacgataggcaacgaccggtagcacggttacggttaatagaagacaggatacgtaatgtctctgaattgcagcatggaaaatctgtcatatttcaagcanatgtaaagcttaaaaaagtgtacgtaaagtagtttagtgcgtgcgtgtatatatagagtaatttgattctcttattccatgca

SEQ ID NO: 197861 - DNA, 656 bp, Gossypium hirsutum
cccacgcgtccggttaaagctctcttctcgttttccttcttgttcagagaggatcaaggatataatactccagaataaacgaagctttgtgcttgagttgcaacagagatctattgaatttaattgtattcttcagaagcatcagaacattagatctgcactggttgaaaggatgccagttttggatgaggcaactttcagtggaaggagagctggctcgttgccgacatctgtttcaacttccactgggacagcacgtaatcttccaaatggaattgctaaaccagctgcagctcctgttgcagacttacttgacctaagttcagatgatgcccctgcacctaactcttctggtggtgattttcttcaagatcttcttggtgttgatttatcccctgcttctgcaccaccaggcacaagtcagcctccaaaagctggtacggatgttctgctggatcttttgtcaattggaacatctcctcctgcacaaagcagctcatctgcatctaacatattgtcctccattcaagacgacaaaacatcacttgtcaatttaaatggccttgcatcacttacgtcactttctccaaatgccacttctgcaagtcctgctccaatgatggatttattggacgggtttggccccactcctcaaa

SEQ ID NO: 197862 - DNA, 655 bp, Gossypium hirsutum
  unsure (1)..(655): unsure at all n locations
ataacttcaaaaacttgaatatacctatgtcggaaatgtactcataattaacatcgggttacggttattctttgctggttaggtacccgatttatcatattccaatgggaaggactataaaggacttgtccacgtgcttcctcacgtatcatactctatcttcttctttccaaggtaacttttcactccatatacatataaatgtgtgtgtgtgtgtgtgtgtatgtatatgtgcttgtttagtgatattctttattcttcttctttccaagaaatcgatcccgaggatgatatcaagctagccgaaaagaatcaaaaggaaaaagagggcaacatctctcttccgccgtttgggttagcaacttacaagatgcaaggggacgtgtggttgtcctcctccggttgtggaggaggggaccaagaaaggctattgtcacttttgggtgttgccgattcgtggctaaagcaactaagcgttcaacaccatgacttcaactatttctcgggtattcgacatggctaaaaaagccctctacatccctaataaacatggaaaaaagttcactcatcactcatttatcatcaaaagccagnnggaagaaaanaaanaaaaaaattanaaaaaaataaagaaaaatttaacccggagattccc

SEQ ID NO: 197863 - DNA, 434 bp, Gossypium hirsutum
tgaactgggaggaacatataacccaggactcagagcagtgggagtggcagatgactgtatctaagctatttgaagaacggcctatatggcccaaggaatctgtaactgagcgcttgcttcagaaaggtctaaaatttagccatttggtgcttaaaaggcttctacttggggttgcttactacttctcaaatggaccatttcggagattctggatcagaaaaggatatgatcctcgcaaagatcctgagtctcgcatatatcagagaactgattttcgtgtacctgaaccattgcggaactatgcagatgctagcgtggctaacaatttgacgcataagtggggagatttatgttcattccaagtatttccttacaaattccagatgattttacaactatttgaactggatgatgattacattcaacaagagata

SEQ ID NO: 197864 - DNA, 611 bp, Gossypium hirsutum
ggtcaataagatatacaggaaagagctcactctggcattcctcctgcttacagcttcggttaggagcctgttatcggcacagggagtacatttctacttcctcctcttccagggggtgacttttctcctagtcggtctagatttaataggagagcagatgagctaatgctgcatggaagcttgaaagaaagcaaaatgtgctaagactctctccatttccaccgacaaaagctggtttctggctgtgcagtcgaagtttttctcctcaggaaatggtttaacggtaccatcctggtgctcaataaccaaagtttcattctctacgtcagcattgaatgccgaattgaaggtttttattcgtcagtaacactactttctgtattcacagtttctatctacttctaatatccttttatatatatatatttcacattggatagtggtcattgtattcttagggattgaaccatttgttattattgttgttagacttataggtagattttgtacttcagtgttcatgtttcaccctgattcttgattgtgtggtttggcaatgaagattcaagccatattgtatttgtaaaaacttggaaagcttgcttgatgtc

SEQ ID NO: 197865 - DNA, 600 bp, Gossypium hirsutum
gtatcgatggtgtccaagctacttgagctgccattttctggcattttcaaccaaaatgctgcaaaatcttcctcacccatttctcattttacacctagaaatgctttcaaagttatggcaacgagtttcggtgcaaatgtttatcgctctcttggaatttcccattcttcttcttcaaacataagattttcaaagaagccaagggtggatgagagtgagaaccttactctcaacagtataagacaggccttaattcgacaagaagatagcataatatttagccttttggagagagctcagtactgttataacccagacacatataagcaagattcattctccatggatggatttcatgggtctttgtctttggttgagttcatggttcgggaaaccgaaaggctccatgctcaggttggcagatataaaagtcctgatgaacaccctttcttcccatcatatctacccgagccaatgcttccacctttgcaatatccaaaggttttgcatcactgtgctgcttcaattaacataaacaataaggtttggaatatgtattttgcagagcttctaccaagattggtagaagctggagatgat

SEQ ID NO: 197866 - DNA, 441 bp, Gossypium hirsutum
tccgatttgttggaggacttgactcagatgttagtgatgatgatcttaggcaacctttttcccagtttggtgaggtcatctccgtaaaaataccacccgggaaaggatgtgggtttgtgcaatttgcaaacagaacgaatgctgaggaagcaatccagagtttgaacgggatgaccataggccagcagactgttcgtctttcttggggtcgtactataggaaacaagcagcagtggaatggaggacatcattgagggcaaggcgatggtggttatggctacggctatgctgcagcaccaaatcaggatccaaacacgtatactggggctgctgctactggttcttcttaagaggggtgcatgacaatcatgaatggcttgtaatctgaacttgcaggacaagttttcaagttaatcagattcattaattaagtaggatggg

SEQ ID NO: 197867 - DNA, 411 bp, Gossypium hirsutum
taaaaacacaaaggacagtgatgaacaccacaaactagaaacttcacctgtgttgcttgaaaaggttgattatagtaaccgtggttctgattcagattccaagggaagtgataagcgcagaactaagcacaaggatggtaagagaaagcataaacggtccgagaggcgtaaagtcacttcagacgacgatgattctagttatgattccgaaatcgatgacaggaaagaagctaagaggaggaaaaaggaagaaaagagattaagaaaggaagaaaaacgtaaacgtagcgaggaacggcgtcgcaaaagagaagcacggcgtgcagagaagctcaaaacaaaacgtcacgacgatgattctagttcagatggagagcatgcaagaactggaaagtcttgttcaggtgatga

SEQ ID NO: 197868 - DNA, 585 bp, Gossypium hirsutum
ctcttctctcccacacacaccattcaatatctcccataatctctttcaatttttttcttttttcaattctaaaaagaaaaaaaaacccaatttttgtttttttttctaagctatggatggaactggggttgttgcggtctatggaaatggagcaatgaccgaaactcataacaaatccactttctcagtgaaagtggggttagcccaaatgcttcgaggaggtgttataatggatgttgtcacccctgaacaagctcgtatcgctgaagaagccggagcttgtgccgtaatggctcttgaacgagtcccggctgatatccgggcccagggcggtgtggctcgaatgagtgacccacaactcattaaggaaattaagcaagctgttactatccctgtcatggctaaggctcgtattggtcatttcgttgaagcccaaatccttgaagccattggtattgattatgttgatgaaagtgaagttcttacacccgccgacgaagagaaccatatcaacaaacataactttaggatccctttcgtttgtggatgtcggaatttatgtgaagcacttcggaggatccgagt

SEQ ID NO: 197869 - DNA, 417 bp, Gossypium hirsutum
gttaaaggttgcctctagacataatactgcaataaaatatagaacgaaaagacagtatctgaaagtatatgggtcaagttgtaatatatttttacaacgaagtaggtgagtactccgaggattgtacctaatacaggcgagcgctagatcaattttaacctaaatactaaaagatctagttagtactttaaataaattatactatgagagcataaaagaggggttttttaagtgttcagaataagaaattaaaataacatatagtaaataaaattaggagatagaagagtaaatgaaatcttgattatgggtgattagcttgcttcgataatcctcatcgactgttacctcaggtttctcgtcaatcaactagtcgctaccctagcaggatctttcaatctttcactaatataacga

SEQ ID NO: 197870 - DNA, 429 bp, Gossypium hirsutum
ccctaatctcttcttatcaaggaaatagcggttgctgatcatctctggattctgtatttcttgatctctcgtggatctgatcatttatttgctggattattgtatatctttcaggatcttggatttcaatttccttgtattgaagaaaaaagatggctcgtacgaagcaaactgctcgcaaatcaaccggagggaaggctcccaggaagcagctcgccaccaaggctgcaaggaaatctgcgcctacgaccggcggagtcaagaagccctcaccgctaccgtcctggaaccgtcgcccttcgtgaaatccgtaaatatcaaaagagcactgaacttttgatccgcaagttacccttccagcgtcttgttcgtgaaattgcccaagacttcaagacggatttgaggtttcaaagtcatgcggttctggca

SEQ ID NO: 197871 - DNA, 223 bp, Gossypium hirsutum
atttttagctgttgaagttgtaatcttgctttactgccatttaaccttctgtggttaactgaagtatttttgtttaatatgttatttcaagaaaaaaattgtttgacattgttctgtgctgaaatgcacttattgcttcaaatatagagacttgatttctttagtgaaaaaaaaaaatacaaaaataaataaaaaaattaaaaaattttaaaattaaaaaata

SEQ ID NO: 197872 - DNA, 505 bp, Gossypium hirsutum
cccaagtcttcgttgtacagctcttgaagcatgtgcacatcccgtctttgatgagcttcgagaacctaacgctcgcctaccaaatgggcgacctttaccacccctattcaactttaaacaggaattatctggggcttcaccggagctcataaataagttgattcctgatcacgtgaaacggcaaataggacttcaacatttcatgcatccgcctgggacatgagacttcaaaaccgttttcaaattcgatgtctgtagtttgatgcgtgacacaaaaagaattactatctttggattatcataggttgatttgaggcctatccggcatcattttgtacgcttccataacacatacagcctttggtagtgtggtggctgccttctctcgatccatatatgtcaatgatgtctctcttgctcttggattctatgagtctactttttgtcaaaatgcttttttttttagttgtgtacatgtaacatgttagatactaaaaaagtagat

SEQ ID NO: 197873 - DNA, 511 bp, Gossypium hirsutum
gcgctcatcacaaaaaatttctagatcccaatatacccaatgccagatagctgccaagaagcacaagccagaaaacacaatatgtgctccggccacaccttcgtaactccaaatacccggatttgttatagtcccccctgtaatactccaaccgccccatgaattggttattcctaaacgagtcatgaagggtataacgaacataccttgtctccacattggatcaagaacgggatcggagggatcaaaaacggctaattcatatagagccattgaaccggcccaaccagcaaccagagccgtatgcattatatgaacagaaagcaagcgaccgggatcattcaatacgacagtatgaacacgataccaaggcaaacccatggaaatacccctttatcaacgaaaaatagacactatgtaactttattgcattggaatacctcccctcttcggtggattctttcggagaaaggattaatatttgttctattccattagtaattaagggaag

SEQ ID NO: 197874 - DNA, 417 bp, Gossypium hirsutum
gttgctaaacacagtagtcctgtgtgttgttcgaagcctccatgtgcaattgaaggttgcctatcaaagggttttgcagggctcttatcgagttactcgtattttgcagtttgatcgataaagaagacttcaattctctattacatagatagagcttgcaccctccgagttacaattatagaaaaatgtatcctttgcaagcctatgatttagatatattcatatctctgcaactcgtattttttggacgattttgtgggttaatctcctatttttatctatgaacgtttgtgatgtctgatgcaatatccctgtcctctagatctgttgcaactaaaagaaatatatatgatttgctatatctcttcagcttctttttgctgaaggttgagactgaagagtaagtcttgaaaacag

SEQ ID NO: 197875 - DNA, 437 bp, Gossypium hirsutum
cctagacctcttccctcatttaaccgatcctcaaaagaccaatccctagccgccgtactatcgccacaaacagtggccgacggtgaataaatctctccctttctaacctcatttagttcaagatctagcaccttcaatcacaaagcataaaaaagaaagcctcaacctctgttggatttggttttaatggaggaaaaactccgacggtataccaaagcctcaacctctgttggatttggttttaacggaggaaaaactctgacggtataccaatcagttcaggttcgattgacgaggagatggtcatacggaggtgcacgtggtggcgcgcatgaaggtcttacggcactggtctagctagggttcgctaaaatgtttttaggttttgggctgaaattttgggttagggttagattagtttaataatcgggctttgg

SEQ ID NO: 197876 - DNA, 376 bp, Gossypium hirsutum
gatcttgggttaccgtcagatcttcacggcgaaccccgataatgtccagcatatactcaaaacccgttttaataattacccaaaaggtgagttcttcattaatgttttctttgattttctcggcaacggaatatttaacgccgatggggaagcttggaagttcgagagacaggtttcgagtcacgagtttaatactaggtctcttcgtaagtttgtagaaaccgtcgttgatgctgagcttaacgaccggttggttccgatgttatccggcgctgttaccggcaagacagtgcttgatttgcaggatgttcttcagagatttgcttttgataatatttgcaagattgcttttgggtatgacccagaatgtctttta

SEQ ID NO: 197877 - DNA, 870 bp, Gossypium hirsutum
  unsure (1)..(870): unsure at all n locations
tnattttgattctcatggaagctttgattgttgggtattttaggttttgtttatttttcttgttatgtctattgttggatgggaactgagagtaagaaagaaactgtgtgaaagaagaacaaaaatggtggagaagttaagacaggacagtggttgttggtttcatgttgtaaactattacaactttgtacaatttggtcttgttttaaacaaggcagtttgagtttcaatcttagttgaatctcttttaacaacaacatccattgaaaatcttttaaagaaaaaaaaaagattgttgatttcatcattaagttcatcatcaaccatgaagagacttggcagctcagattcattgagtgctttgatgtcaatctgcccaacttcagatgaacgtagtccaagaaacaacaatgtttacagtcgagagtttcagtcgatgttagaaggattcgatgaagaaggttgttttgaagaattaacagtcggccatggcgggggtgccaagaagagacgattaagtgtggatcaagtgaaggcattggagaagaattttgaagttgaaaacaaactcgaacccgacagaaaatcgaaactagctcaagaacttgggttgcagccacgacaagttgctgtctggtttcaaaaccgacgtgctagatggaaaacaaagcaattggaaagagattatggagttcttaagaccagttatgaatctcttaagctcaattataataacctccgccatgaaaatgaagatcttctcaaacagattagtgagctgaaggcaaaactcatcgagccgccgccgggttcatctttgggtacctcatcggagccggcggaagtgaactgcgagagcttcaacgacgg

SEQ ID NO: 197878 - DNA, 396 bp, Gossypium hirsutum
gtgagcatgcaggtattgactttgttaggctgccatgcaagcatttctactgctggaaatgcatggaaacttattctaatatgcatatctctgacgccaccataaccaagctgcaatgccctgaagctaaatgtggtggtatggtccctcctgctttattgaaacagttgcttggcgatgaagggtatgaacgatgggaatcccttatgctacagaaaacacttgaatcaatgtcagatgttgcatattgcccaaggtgtgaaacaccttgtatagaggatgaagagcaacatgcacaatgctccaagtgcttctttagcttttgtaccctttgtagggagcgccgtcatgttggcatagcttgtatgacaccagaaattaagcttcgtgtcctgc

SEQ ID NO: 197879 - DNA, 397 bp, Gossypium hirsutum
ttgttggtatgggcccggacaaaaatgggcttttacatgagattaactaggagaataaacccacttgagtggagaacacgtcgctatccgttggtgcggacgtccttcttcgcatcaccgggaagtggctttacttcctgataggacatcaactctgttgtgggcgaaatacgaggcacattccacatgtgtgatcctaagatttcaatcacgtatatagttctgaaaggctgccaacacttcgatctcgggacagggctacaagctaaaatacgtgctgtttccgtagtgccaacgaagtgcttcatcgggtttttccatcctgaggcgatggatgagggacaacttcgactttttgcattgtgcaatgtcattcgataacatctgggacgagatt

SEQ ID NO: 197880 - DNA, 1185 bp, Gossypium hirsutum
ctgacgcgtgggcggacgcgtgggttcaaattctgctaaagttttgccttttgaaatcgaataattgagaaaatagcttaggttagttgattgcctgaaatgactgataacaattcaccccctgggtctcccaaagtaaacccagatcataattctgaggctaacccgttgcccaaagatgatagctcacttgaaaacatagttcgaaggtttcaggattcaatgtccttagcaaagaaacacaaattttgggaaactcagcctgttggtcaatttaaggatgctggggacacaagtttgcctgaaggtccgattgagcccccaaccccattgtctgaagtcaaacaggaaccttataaccttccgagtccgtatgaatggaccacatgtgatatggattcggaagagacttgtaatgaggtttacaatcttttgaagaacaattatgttgaggatgatgagaatatgtttaggttcaattattccaaggagtttcttaggtgggctttgcgccctcctggttattacaagagctggcatattggggtccgtgctaagacatcaaagaagcttgttgccttcattactggtgtgcctgctagaataagggtgcgtgatgaagttgtgaaaatggcagagatcaatttcttatgtgttcataagaagctgagatcaaagagacttgctcccgtgatgattaaggaggttactaggagagttcatttggagaatatttggcaagcagcttatactgctggagttgttcttccaacaccaattactacttgccaatactggcataggtcactaaaccccaagaagcttattgatgttggcttttctaggcttgggcctaggatgacaatgagccgaaccattaaactttacaagttacctgatcaaccagccacccctggatttagaaagatggagcttcgtgatgtccctgctgtcactaggttgcttagaaattacttgagccagtttgttggttctccagattttgatgagaatgatgtggagcactggcttcttcctactgaggatgtcattgacagttacttggtcgagagcccaaagacgcatgacataactgacttctgtagtttctacacacttccgtcatcaattcttggcaaccagaactattcaattttgaaagctgcctactcttactacaatgtc

SEQ ID NO: 197881 - DNA, 455 bp, Gossypium hirsutum
ccctctcttaagaatatgatggtcggagaaactcaccgtcttaatccgacggtccatgttccaccatggcctaacctcgacgatgatcaaacggccgagatttactctccactcaactacaatgcagccgatagtcacttcaacaacaacggcggcaacccggttcatttccatgaagcgttagcagcgttacaacgttacttgccgtcgaacgaaccggactttgtctacccagattccgatcttccggttctcgaaaacgcggattctccggtcgacgcttactcgtgcgatcatttcaggatgttcgagttcaaaatccggaagtgtccacgtggccgagcccatgactggaccgagtgtccgtacgcacatcccggcgagaaagctcgccggagggatccgaggaagtatcattactccggcactgcttgtgctgatttcaggaaagggaa

SEQ ID NO: 197882 - DNA, 393 bp, Gossypium hirsutum
cgcaaataagtcagttaaggagataattgaagagcttaaaaaacatcaacaaagtacagaagcttcagtggtcgagtgggcaaatgaagctctgcagggtctcggaaagggtgctccattttctcttttcttaacacacaactatttctctagagttgcatctggatatggtaaacagaacaacgaatttacgatgctaaaaggcgtcatgaaaactgaataccgcgttgccctacggtcttctctgcggaatgattttgctgaaggcgtccgtgcagtcttgattgacaaggatcagaatccgaagtggaaccctgccaccgtagacgaagttgaccaaaaggaagtggaggcagtttttgaacctttaggtccgggaatcgaagagttgaa

SEQ ID NO: 197883 - DNA, 740 bp, Gossypium hirsutum
  unsure (1)..(740): unsure at all n locations
cccacgcgtccgcacaaaggaacagttccatcgtcatcttatgttggaggcagaaagaagacaattgaggccaattattgagaataagtcgcgaataattcttgttcatacaagctccggatataagcatagtttgagagaagtcttggatgccccaaatgttatgagcatgataaaagacaccaaagcagcgcaagaggtccgagcactcaaggatttcttcaacatgctttcaaatgatccggcacgtgcatgctacggaccaaaacatgtggagattgcccatgagcgaatggcagttcaaacacttcttattaccgacgatctcttcaggaattcggacgtaattacgaggcaaaagtatgtcagtttggtgaactccgttaagaattcggggggcactgctcacattttttcgtctatgcacgtatcaggggaacatctggcacagctgaccggcattgcggcaatccttcgtttccctcttccggatctggaagacatcgaaatgtagggtaccgttttctgcatatgttcggagtttccggcgtcgagattttatactgtactcgtatttctccccctttttcggtcatatatatatatataatgcgttaatcagtatttgaactgtatcatatccagatactagcgagtatttaatcaactctagaagtgtaacattatttcattcagtgtgttatggaaataaaatatttaattcaaaagttttctgcntt

SEQ ID NO: 197884 - DNA, 795 bp, Gossypium hirsutum
gtctgtctccattcttgtctgtcccttatggttacattgggcttgaaataggtcagaaccttttcttcttcttttattttccctttcttttccaataactctcatttgtttaggttagatctgcgagagaaaaaaagagagcgagaaatggggagaatgcgacagtatttggcaatgaaaacggatcctgttgctcaagaattgatcagttccgatatcaaagaactcaagctggctgcgattaaattgatggatgatgcaactaaacttggaggtcttggttttggaacttcttttcttaaatgggtcgcctcattttctgctatttatttattaatcctggaccgaacaaactggagaacaaacatgttgacctcacttttggtaccttacatcttctttagtcttccttcaggattgttcagatttctaaggggggatgttggaaaatggattgccttcattgctgtcgttctaagactgttcttccccagacactttccagactggctgcagatgccaggatctttgattcttttactggtggtggctccaaatttctttgcagtcaccttgaaagacagcttggttggtgttttcatatgcctcctcattggatgttacctattacaggaacacatccgagcatcgggccgattccggatttccttcactcaaagtaatggaatatcaaacaccatcggcattatctttctgtaattctaccctgtctggggacttgtgctccacttcgcctagttggtgcacaaaagcactcattgcactgtggtgcgt

SEQ ID NO: 197885 - DNA, 664 bp, Gossypium hirsutum
gcgatcggaaggactacttgaagcttgctgtcggcacaccggaattttccagatgaataggcgtgtaagatggaatgaggaaaatctgggggaaattgaagcaaataaacccgtaaggcagaaaataactgaacccaagacgccgtaccaccccatgattgatgatgatgggtctttgtctcccagaggacgtagtttcaacgattgtgtcattgatgtggatgctgaggaattatgctctgctttgaaagatgtggcttcctcaagtagaaaaacaactgggcagtctggtggttggacttcttctgaggatgaggctgatcctatggatcatgatgaagaagatcggaatggtaagagttttaaggagcaaaggaaagcacactatgatgagtttttgaaaataaaggaactgcgacgtaagggttctttcattgaggatgaagatgatgaagtggagggtgattcatcatcatcattaagctctggtgtcaaagacataggaattggggaaggtcctgcaagtttgccccaaaagtcttctgcaagtcctgggcatccaggtaatggattgtgattgtagaagtcatccgaccagtcaaagacgcaaaagctcgctcttttgacattctttatggttgtttgatgtttattttgatgcacc

SEQ ID NO: 197886 - DNA, 452 bp, Gossypium hirsutum
aggaaagcccctgcatccaaccaagggtgtattgcctcaagaagtccatctccgggtggcacattaaagcgcataagaaaaggccgaggcttcactgaccgttattcctttgcacgtcggtaccgcacaccttctcctgaacgttccccgcctagatcctatgcttatggtggaagaaatgttccacaaagaaaccatgatagatattctagctacagaaatcattctgatcgatcaacacgaagacgctatagaagcccgccaagaggccgcagtccccctagatatgaaggccgaaaaagtaggagtccttctcgcagcccagttcattaccggagaagatacagagatcatagtgagagccagagtcctgttcgaagtcctagtcctagagacaaacgacctgccataagtgaggggttaaaatctcgtcttggtcctcgaatcgatga

SEQ ID NO: 197887 - DNA, 499 bp, Gossypium hirsutum
ttcctctgtttctagttccgttctcttaatttgtttcttattgtttgctcattttcgttagtattagatcagagagagagagggtggagatctggacaggtctggctgtggccgaaatcaaagaagaatatttgagggaggaggagaaaacatcgaacaagattaaaccgaaacaaattaggaaaattctatggattggtggcataagatgatcttccctgttcgaagactctggtttgttgtttcttctcgcgttaaggctcgcaaaaatggacccgcgttgttgaagcttcacgatgatgtgcacacacgtggatacgaacatgtgcaggtgacgtgggaaatgccgcgaagatcggaatcggagctgctggctgctaacaacaatcccaagcgcaagcaccgcccagctttctggagagttttcgtttggtcttctaaccacacttcatccttctcgcccaattatgcctaacttcacaccatttgcatgcatact

SEQ ID NO: 197888 - DNA, 531 bp, Gossypium hirsutum
gagatgagaaagaggcaatcaggacctggcgatggcgttttgtttcggacctttctaggactctccgataaccggacccgctagcacccggcgtcagcttttggaccggctttttcctcttctcttcctcgggccacggtttttgctaaggttacttcgatggtgaccaatgattatatcaccatgaacgggaacgggtttagcaagagggcagaagagttcatcaagaggtaccacgaactcgaggttaaagaaaatcagtgcagctcttcgctcgttaaacacatcaaagctcctgttcacctggtttggtcattagttaggaggtttgatcaaccgcagaagtacaaaccatttgttagcaggtgtgttgtgcagggggaccttcagttggaagtgtagcagaagtaaatgttaagtcaggtttgccggcgacaactagcactgaaaggttagagtatctagatgatgatgagcacatcttgagcatgacaattgtcggaggagatcacatgttgaagaactactcat

SEQ ID NO: 197889 - DNA, 522 bp, Gossypium hirsutum
cggaactggatgatgcgttcagtgcggcaacggcgttcgtggcggctgccgcggctgatcggttgtcgcagaaggttccgaacgaggtgcagatgcagctttacggtttgtacaagattgccaccgaagggccttgcactgctccgcagccttccgctttgaaaatgacggctcgtgctaagtggcaagcatggcacaaattgggtgctatgcctccagaggatgcaatgcagaaatacattgatgttgtgacagagctatatccatcttgggctgctggttcagctatgggcaaaggtggggctgataatgcttcaagtaaagatgtcaaaggaccaatgggaccggttttcagctcttttgtgtatgaagaggaatctgaaaatgatttgaaaatggatgctatccacacttttgccagagaaggagaactggataatttgcttaaatgcattgaaagtggtgtttctgtgcatttgcaagacagtgaaggcaggaccccgatgcattgggctgtagatc

SEQ ID NO: 197890 - DNA, 426 bp, Gossypium hirsutum
tagtagtggctctagcttcaatgcctcgattcctgatttccttcaagacagacgttttaatactcctcctacttcttcttcagcttcgttaccaagagaccatggactccttcaggatattgttccaacacagatgaggaaagaggcaaaggaacagtaagacagtacgggttctttttttatatgtaattatatggttgctggtatgttgtttcctaatcctttactaactgataaagaacccaattcactatatctttttttattcaatctattatcatctgtataaaatcacctgtctctttatagtgtttttgcaggagaacaagtggtcttgtacttggcttttcttgcggctattattcctttgcatttaagggagaattcatttatggaaatattggggtttttttattattaatttct

SEQ ID NO: 197891 - DNA, 620 bp, Gossypium hirsutum
cttcgcgtctcacctacccactccttttcctccttcaaaccaatgtttctccccaatccttcccctaactaacaaacaataaaccagacaacccccccccccctttctcatctatggcctgcgccactaacgctatctctctttctctctcttccaaccccaactccaaattgtcctctgacttcatccccaagcttaataagcccgtcaatgtttctcttcgcgcttccacttccgctgagttgaatcccggacgactttttctctccagacccattggactcagtcgcaggatttgcgccaatgcaactccggtgatggatcagtcagttggtgaaaggagctcttcggtccccactattgttgaggtggatttgggtaatcggagttatccgatctacatcggctccgggttgcttgatcagcatgagcttcttcaaaagcatgttcatgggaagaaagttcttgtggtaactaacactacaattgctcctttgtatttggataaagtcgttgatgcgttaacaaagggaaacccgaatgtttctgttgaaaatgtgatactacctgatggtgagaagtacaaaaacatggagactcttatgaaagtttttgacaag

SEQ ID NO: 197892 - DNA, 438 bp, Gossypium hirsutum
gggtgggggtggtgccggcggcggcggtaagaatatggggcagatgggccaaatgggtggtcagatgggtcacatgggtccaatgggtggtcagatgggttataacatgggccaaatgggaaaccatccgatgaaccagatgagtaattttgctgcagtgcaaggactaccaccagcaatgaataatggtggtgggtattatcaagggatgggaccaggaaatccttattatcagcctcaatatatggctgccatgatgatgaaccaacaacgtgcaaatggagggatgtatccacccatgatgtatgctcatcaaccatatcccccaccaaattatggacctccacccatgcattcacccccatctgaatcttatgctcattacttcagtgaagaaaacccaaacagctgtggattatgttaaaatttccccatttt

SEQ ID NO: 197893 - DNA, 511 bp, Gossypium hirsutum
tcgcccacgcgtccgagaagagctttgtggcatagaacaagctggagccggagaggaagagccagttggccaagaagttaggactgcaaccaaggcaggtggcggtatggttccagaaccgccgtgcaaggtggaagacatagcagcttgaaagggactatgacctcctcaaatcttactttgattcccttcagtccaattatgacactattctcaaagaaaatgagaagctcaatatctgaggtagcttccttgactgaaaaactacaagccaaagatgtggcaacagaagcaatagcaggtgaaaaggatgaagggttagcagctgagatggcctccgccctccaattcagtatgaaggtggaggaccgtcttaggagcggcagtgtctgaagcgcggtggtggatgatggatgccccacagctggtggacagcggcaattcctactttgcaagcgatgaatactccatatgcattggccctttcgatgggggtcattcagaagatgag

SEQ ID NO: 197894 - DNA, 423 bp, Gossypium hirsutum
ggtggaaatcccaaacaacttgagagtggaattctctctgcagtacatccatgggattggtcggacgagggctcgtaaaatcctatgtgatctccaaatggagaacaaaatcaccaaagatttgtcagaggaagagctcattacgattcgtgatgaagtctccaaatatatgattgaaggcgacttgaggaggctcaatgctcttaatatacggcgattgaaagagattcagtgttaccgaggggttcgccatattcaggggttgcccttgtagaggacagcacaccaaaaacaattgccggactttgaaaggtaagagagttgccattgctggtaagaagaaagcccctcgttgatcttaaccgtttttgtttcgatgaagtgaatcatgtttaattttatgtttgattcaaaatgaatgca

SEQ ID NO: 197895 - DNA, 609 bp, Gossypium hirsutum
cccacgcgtccgaattatttgaaatttgaagaaaaaaacatctctcaaaaagacccatagatgaaagggaaatggaaaggttcgaagagaaaactagggttgccagctgcccttctactgtgctcactctcattccttgctggattgtttgttcccacttttttctttcaggatgttccaatcattaaacccaagccgagaatgctcgaggcagtgcaggagaagacgtttcgtgatccgatggcaaatggagtaactggggagagttcgattgaatctattccatttcaggttttaagttggaaaccacgagcttactattttcccaactttgcaacttcagaacaatgtgaacatgtaatagaaatggcaaaggtgaaccttaaaccatctggtttggctttgcgcgagggagaaactgaagaaagcacaaaaggaactagaacaagttcgggaacttttattagtgcatcagaagatgaaaccgggaccttggacttaatcgagaaaaaaattgcaaaggttacaagcatcccacagagccatggagaggcatttaatattttgaggtacgagattgggcagaagtatgattctcattatgatgca

SEQ ID NO: 197896 - DNA, 571 bp, Gossypium hirsutum
ggtgtttatcgttcgtggacgtataaaacgtatccaaagccttagcaaaggcgtggttgccacaagtttaatcgagccaggaggcttcctaggtgacgaattgttgtcatggtgtcttcgccgaccatttattgaccgtcttccagcctcgtccgcaacatttgtttgtgtagagccgattgaagcattcagtctcgactcaaaccatctcaaatacatcacagatcacttcaggttcaaatttgccaatgagagacttaaaagaacagcaagatactattcatcgaattggcggacatgggcagccgtgaatatacaacttggctggcggcgttacagaacgaggactcgaggtccgatgatttctgctgccgaaaacggcaacagcagtgaccgccggttgctgcaatacgctgccatgtttatgtcaataaggccacatgatcatctagaataaagaaaagccaattgccttctgcaattcatttgctcattatgtaatcctgactgtcatttaataaagtctttcattcaccatggaaaccattttgaacatagttgttttgctcat

SEQ ID NO: 197897 - DNA, 432 bp, Gossypium hirsutum
gaaaaatgaaattgctttcctgtgtcaaacttgacgagaatcggaccttgttttacagggttatgcatccgaatacctttgacttcttttgcaacaaggtgcacccatttttaacaataaaattgtttcctcggcaaacaatcgattagtgaaatagcttctgcagacaatgggatacttgtatgttttctgctgaattccatgattttggtcatggttggggaaaagtgtctccaaactttttatttttcacttttgttttaaaaattacccaaagcaaattcaagaattatttttttactccgagcatacattttgacttgaaattttttggtgtatatgttaagaacatttgccctttatggcacaattttcaggttttattttgcacaatttattttggaattagatttagccactgcattgacatgc

SEQ ID NO: 197898 - DNA, 329 bp, Gossypium hirsutum
aacattttctcctacttgtatctgagttcttttctaggaggaactgagaattggagaacttaatcaccacctatagttttccatttgattattgataatatattttccatttctattgtatgatttgaatgtttgtagtttctatcatgaaatctgtacagctttccacttcttttccataggaaaagattttgctgccattgtacattaattgttcttacatccctgaattctgaacctttatttttcttttgattaaacaaaaaaatatatattatgatatttaaaaatattactatttgtattgttatttatataatcgtattttt

SEQ ID NO: 197899 - DNA, 297 bp, Gossypium hirsutum
aaggaagaacccaaaagggaagagatttttgctgttgttatgattgggggtcgccaatacagggggttccctggaagatagcgctacacccagagactgaaaggggcaaatgtcaacgataagattgttctaaacaaggtattacttgggggaacaaaaacaacctacatatatcggaaaaccctgtggtaactaatgctgctgtacatgctgttggtgaggagcagggactaaacccaaaagtagttgtcttccaatataagaagaaaaaaattatcggagaaatattggacatcg

SEQ ID NO: 197900 - DNA, 663 bp, Gossypium hirsutum
ccttctcgcccgcccacgcgtccgtccccgcgtgcgcggaagcctaggctcacatggtccttataacattgctgatttttcaacacagggtggctatgcggttgattatgcttcacaaggagctcacagtgggtttccagggcacttcctaaaccagaattctcaagctgggtattctcgttttggtgctggaaatgatttcatgactcaggactacgtgaatcatggatcacaaggcctgtttactcaggctggctttaatgatccttcacaagatgatgcatcacagagccactttggtgcggctaatcccaaccagcttcagtctcagggtttgatgaactctctctactcccagccctttgcacactacaacacacagccactaaacttgcagtctcctcaacagcagcaaccacagcagggccagggttcccaaaaccagaatcttcgctataatggttaataataaagatgtatttggctctgatgggttatggtctttgcaatcagcaacttggtttgtgctgtccttgtatgcccaaatatatccttctctcaagtgcaaaatgtttgccaggtcagttaacttcctgttcgtaacctgtaagatgattccagttgatggggaataaatataattggagtaaggattatatcatt

SEQ ID NO: 197901 - DNA, 486 bp, Gossypium hirsutum
gattgaaatcaagtttaggacaaaggagctactggagtgcatgggcaggcttgaccaacagcttataaacatgaaggcaaaacttcaggaagcaaagagcaatggagcccatgcacagatggattctctgcagcagcaaataagatcacgtgagaaacagcttttaccagtatacacccagatagccactaaattcgccgagcttcatgatacttctctgaggatggcagcgaaaggggtaataaaagaagtggttgactgggatcgctcacgatctttcttctatagaagattgcgccggagaattgctgagagttctctggtcaaaattgtaaaagatgctgctggtgatcaactgtcgcataaatctgcaatggacttgatcaagaaatggttcttggattccagtgttgcaaaaggaagagaagatgtttgggttaatgatgaagctttcttttcatggaaggatgatctgggaaattatag

SEQ ID NO: 197902 - DNA, 667 bp, Gossypium hirsutum
ctttaaattctctgtttcctgtctctggctttcttcttccatggcaacagctccttcagccaaactcacaccgctcttgaaagatgagctcgacatagtgatccccaccattcgaaacctcgatttcttggagatgtggagaccctttttcgagcaataccatttgattatcgttcaagatggcgatccatccaagaaaatcagggttcccgatggctttgattaccaactttataacaggaacgacgttaacaggatcttgggttccaaggcttcttgcatttccttcaaggactctgcttgtaaatgctttggttaccttgtttccaaaaaaaaatacatcttcaccattgatgatgattgttttgttgccaaagacccatccgggaaggaaatcaatgcgcttgagcagcacattaagaacctgttaacaccatccacaacccatttctttaacacactctatgatccataacagggaaggtggcggactttgttcctggttaccctttccgtctccgagaaaggtgtccccactgctgtttcccctggcctggtggcttcaccttccctgactatgatgcccccacccaacttgtcagccctcttgagagaaatactaaggtatgttggattcagtgaagacgtttccaaagggaactccttt

SEQ ID NO: 197903 - DNA, 534 bp, Gossypium hirsutum
aatttgtgaaattatcaaattatttccgatttccgatttctgatttgggaatttcttgtttttgatttctgattgtgaatcagagatgggtttaggcttatcagtcttaatagctatgaaggcaacggcatggatgttattatatctcttcttcagtagatttgggttcacagtgttggcaataccattgttgtatgcatcattgatttcatggcttgtttcaattgcttctcacccttcaatcgatcttcccatgcttttgggcaaaaacccagatgggactttcccaattttgtccactatcatgttctccccatatctgtattttgctagagctttttcaatggcgagaaggttccttgctggtgacgaaccttactctcaaatatgtgagggtttatatgttggtggttgccctgcttcacctcgtttattgccgcctggtaaccctgccattattgattgcacatctgaattcccaagaataaaggagttcaagggtcattcatatttatgtgttcctacttgggacac

SEQ ID NO: 197904 - DNA, 435 bp, Gossypium hirsutum
gcgtccgaatttttttttgggcttttgcttggttctttctctacatacttcaaatcacagccaataccaggggacaataatgcaagtgtgctagctgtcgtgggaaagacatttgatgacttggtcttgaacagtcccaagaatgttcttttagaggtatataccccgtggtgcatcaattgtgagaccacgagcaagcaggttgagaaattggctaagcattttaaaggcttggacagtctcatctttgctaagattgatgcttctgctaatgaacatccaaaacttcaggttgacaactacccgtcactctttttatacaaagctggtgataaagacaatccgatcaaactttcaacaaaatcaggttcaaaagaactagcagccttcattaacaaacaagtgagacccaagatcaagcggccaaagatgaac

SEQ ID NO: 197905 - DNA, 412 bp, Gossypium hirsutum
ggtttatgggtgttgaaggggagaaattgttgaaacatgtgttttggtcgaacggaccggaaacggagcatccgacggtggagaataaacagtgtgccggtaaggaatttttggtgttgatttctaggttgtttgtggtggaacttttccgacgttatgatacgtttgagattgaagttgggacatcgacgtttggggctgccattaccataaagtcgttaaataaagcaagcttttaagtatactggaatattcgtcaatgcaggggctttgtcaaatgtgtcatgttttttcttcaataaataatgtattatcgaatgttgaatttccgtttatgcaccatattttatataactaagatatgtagccaattcttgtattatttgaataaaattggttaaattttactatt

SEQ ID NO: 197906 - DNA, 529 bp, Gossypium hirsutum
cgccttcttttcgctccctacttagctctctgtattgtgtttttgaatttgaacttttttgcactctcagattcaggaaaaatgaaggaaccctttaactcaattgcaacttcgagccaaacccacttcgaggaaagtgaagaagaagaagagatcgaatcttcatccgaagaagagaaatccgatgacaccattgattctgatgaagaggaagagatagagcgtgaattagcagaagttacattcggagagctacaaaaagcacgagccgatggtactgattcaatctctcgcaaaccccaaacagagaccaagcgtcgtcgcgctaacaagaataggccaatggagcttagtagcaaggagccagtgaggtcatttagacaggttattcaagctcctaaaaaggtggtacgagacccccgttttgaatctttatgtggtaatctcgacgtcgagggattcagaaaaagatataattttctgtttgagaacaacctaccagctgaaagagaggaggtgcagaaacaac

SEQ ID NO: 197907 - DNA, 395 bp, Gossypium hirsutum
gacgcgtgcgagattttatatataaaatattatatatcatgtttctcctgatcggtggacatatgtttatcggcgcgctctggcttttttcaagtgttgtcaactcactctactcattttattgggacataacacgtgattgggaccttagtgtcttcaccagaatcttcaagttcaacaaaccaagtttgtgcaccaatctgttctatgggcgaagatgggtttatttttgggttatcggaagcaacttgattttgcgttgcacatggacatataaactggcttgctcatctccgccacaactacttgactgtgtttatggtcactgccttagagatgctaagaaggttccaatggatattcttccgagttgaaaatgaatggaacaaaattac

SEQ ID NO: 197908 - DNA, 668 bp, Gossypium hirsutum
aaatcagacactgttatatgtatatcataagagctactaagctgtttccataagctccaaattgatcaataaccatgtcttctctgtttctcctcctcttatccaccgccatcaccgccgccgtcgcttccattcccgcctacccttcagtgtcgacagactgcaccgtttccgccgaggatgataacccggttcccgttcgtcgtgaagtttacggcgacgggagaatcttcgacgttagccatagatacaccgtggatatgccttcgtgggggagcaaagatggtctgggtcagttcctttggcttccgtcaagcatgaagaacggttcaaggtccaataattccttgatgaagctgcagtcggtccattccggcacccacgtcgacgctccgggacatatggtcgacagctacttcgacgctgggttcgatgtcgacacccttgaccttgatgtccttaacgggccagctttattagtggatgtgccgagggatagtaatataaccgctaaagtgatggaatcatggaacatccccaaacgagtgcgtcgtgttattttcaaaacattgaataccgacaggcggcttatgtttaaaaaggagtttgatcccagctatgtgggattcaccacagatggggcaagatggttgggcaagaacactgtt

SEQ ID NO: 197909 - DNA, 427 bp, Gossypium hirsutum
attttctcggtacttgtattcaccgtaatctcccccgccaacggctgccctccgtcggaccgcgctgcgctgctagcattcaaagcagctctccacgagccttacttgggcatcttcaactcatggacgggcaccgactgctgccacaactggtacggcgttagctgcgacccacagtcacatcgagtcgccgacattaatctccgtggtgagtccgaagatcccatctttgagcgagctcaccggaccggttttatgactggttttatctctcccgaaatatgcaagctaactcgcctctctagtcttactatcgctgattggaaagggattacaggcgagattcctaaatgcattaccagtctaccatttcttcgcatccttgatttgatcggtaacaagctttccggagaaattcctgctgata

SEQ ID NO: 197910 - DNA, 607 bp, Gossypium hirsutum
gttttcgtcttcctcatatcggcaatccccatcgcttagatcatctctgaggaacgtgccgtgcctgccacccacgttttccactaccatagcaccggctttttccgggagtgcgccaagtgggacgaccaaggccggcgcttcctcgtcagtttcttggaaggcggcgtcggtgaaatcctggttcccgacgattacgcaccgggaccgggggatgtcgcgttgaaagaggtcaccgtggtcaaagattttgacttggccggaaattcttccctcggaatcgccgtcgacaggctcagaaaccggctgcttgtggttgtcgccgacttgctcggcaaccgatacagcggtctcgcggcttatgatttgtcatcgtggaagcggctatttctaacccggctcagtggccctagcgatgaaaaatccttcgccgatgacgtcgcaatagatgccgatggtaatgcgtatgtcaccgatgctaaagccagcaaaatctggaaagtcggtgcccatggcgagttattgtctatcataagaaacccactcttcactccaagacagtggtacaaaaccttggtcgcattgaacggaatcgtttaccaccccg

SEQ ID NO: 197911 - DNA, 718 bp, Gossypium hirsutum
  unsure (1)..(718): unsure at all n locations
gagganaaacacaagcagcacgttaacattttgaagcaataccgatcaaaagccgagtactacntatgctcatgtctcaacaaaaacaacgacaccaccaccaacattgaccgaaccccaggaggccttttatacatccggcaatggaacaacatgcaatacgtgacgacggcagcattccttctcaccatttactcagaattcctccaagatttgaaccaaaacctccgttgtcctgccggaacagtggatcatgaagagatcctcagttttgccaaatctcaagttgattacatactaggttcaaatcccatgaacatgagttatttagtgggttatggatcaaaataccccaccaaggtgcaccatagaggggcctcaatcgtgtcatacagggagaataaagggttcattgggtgcactcaaggttatgaccattggtataatcgagccgaagtgaatcctaatgtgttggttggggcggtggtcgggggacccgattccgaagataatttttgggaccaaagagataattacatgcaaaccgaggcttgcacgtataatacagctccattagttggagttttggccaaattgttacagttagaggaaaaccatgaactagaattgttggcctcttattagaagcaaatataaatatcaagtgagagcaaaaaaaaaaaaaaaaaattnnnnnnnnnnnnnnnnnnnnnnnnnn

SEQ ID NO: 197912 - DNA, 709 bp, Gossypium hirsutum
caaaaatttccaaatgcagatcctttggctctacgtctactgcaaagattgcttgcctttgatccaaaagaccggccaacagctgaagaggcccttgctgatccttactttaaggggctggcaagagttgagagggagccttcatgtcaaccaattacaaagatggagtttgaatttgagaggcgaagggtcacaaaagatgatgtgacaagagctaattttccgtgagatactggagtaccatcctcagctgcggaaagatcatatgaatggaactgagagggcaaactttctctatccaagtgcggttgatcaattcaaaaagcagtttgcacatctcgaggaaaatggtggtaaaagtgcaccagttattccactcgaaagaaagcatgtctcccttccgaggtcaacaattgtacattccaataccattgcccctaaagagcagcagccaagcctcaagtccttaaaagagagacaaaatgcagaggaggcatatcaagcctcaaaatccttgcaggcacaacaaagaatccctctagctaaaccgggaaagatagtaggccccgttgcgctgtatgagaatggaacaatcatgaaagatgcctatgatacgagaacgttcataagaagcacaggtcttccaccacaggctgtccaccctgcatatacttattcaaaatctaacactggaaatcaagaaagaagc

SEQ ID NO: 197913 - DNA, 421 bp, Gossypium hirsutum
gaggaaaataaagatgcatctgctgctgctggactgctggagaagttgagcgttgatgaaaagaagaccgaggataaagccggagaggagaaaaaggaaacagaagccacagaaaaggcagataccgagaagaaagatggggaggcagcttcctcaacttaaaaggcggttgggtttgttttccatgccatgtacttttggcgaatatggtgagagtagtctctggcatattcctcggatggaactagatgtgttattggttggaatggtctcgagtgtttgttgaggtttggttgtaccctgggtcatgtttgcatgttgagattcatgttttacggtcattcaaccgggttttccccagtattatactatcatgctgaatttttctttaaaaaaaaaaaaaaagggcggccgtcgagaa

SEQ ID NO: 197914 - DNA, 739 bp, Gossypium hirsutum
atttttcaactctctccattttagaaaaaagcttaaatacccaaagtttggattcatcactctcaactagatccctttcatctaccacacaaacttagctgaaagatcaatggcagccatggcaacagctctcacctcactgtcttcaagccccaaaccatctttcctagaccacaacaagtcatccttcagcggcactccaattccttctcgcttcactcccatcaagtcctcctcacacaactcaaacatttccatgtccttaacccctccttatgacttacaatcctttgaattccaacccatcaaagaatcctatgtttctcgtgaaatgacacgccgttacatgatggacatgattacctatgctgacaccgatgttatcatcgtcggcgccggctctgcaggtctctcctgtgcttacgagattagcaaaaaccccaacatccgtgtcgccataattgaacagtctgttagccccggtggaggcgcatggctcggtggccaactcttttcagccatggttgtgcggaaaccggctcacagattccttgacgagctcggcatccagtacgatgaacaagaagactacgtagtgatcaagcacgcagctctgttcacctcaacaatcatgagcaagctcttggcaaggcctaacgtgaagctattcaatgctgtggctgctgaggatttgatcgtgaaggaaaacagagtcgccggtgtggttacaaactgggct

SEQ ID NO: 197915 - DNA, 759 bp, Gossypium hirsutum
gcaaagtaccattttcccgagaaaatttttgaccttttctttcccggaaaatctttcgatctaaggtttacattcgatggctattgggaggagttgttctctgcaaatcctgatattgaacttaatcgcttcaatcttgtaccaatcatgtgagtccttcttaactcctccaagctccattatcaatccttccaaagtcaaacaagtttcctggaaacctagggctttcgtctacgaaggcttcttaaccgacctcgaatgcgatcatttgatctctctagcgaaatcggagctaaagagatctgcagttgctgataatgttagtggacagagcaagcttagcgaagtccgtacgagctcagggatgttcattcctaagggaaaggatcctattgttgctggtatagaggacaagatttcaacatggacctttctgcccaaagaaaatggggaagacatacaagttttgagatacgagcatgggcaaaaatatgatcctcactatgattattttactgacaaggtgaatatcgctagaggtggacatcgcattgcaactgtactgatatatcttacaaatgtgaccaaaggtggtgaaactgtattccctcaagccgaggaaccttcacgtcgtagaactcctccaaaagatgatctatcggaatgtgcaaagaagggaattgctgtgaaaccacgaagaggtgatgcacttctcttcttcagtctcttcccaactgctattcctgaccagaacagtct

SEQ ID NO: 197916 - DNA, 298 bp, Gossypium hirsutum
cgctgtgggaaccaaaaaaatcaaacaaacttttgttgaaggaaaggtgagataagggacttactgtgttgaaaaaatccaacaacattcggcgtcgaggctccatgagcttgacgattgcagatatcttattttagtgtagacatctatagttgtggagtattttgtaatgtctgtaaggataaacgtgttgttaagatctgttttgaagatggctgatccacttctgttccaaaagccctatgtattaatgcaaggtttcgatgatgatattgccttaaatcatcacccattgatt

SEQ ID NO: 197917 - DNA, 509 bp, Gossypium hirsutum
tctcctttgcgtccgcccacgcgtccgaaattattgcaggtaagaaagtgaacattttcttaaacctcaaaagaaacccatgcaatacgaagaacacataatgtcgatcatctctgtgcacgactggtttggttcagttcggttcaggtcatagtcaagcttgaaacatttgttttacaagatcctggatgtaggttggttttggtgtgagttggacggggctgtggggcaactccataaacctgcccttgttttcactcttgcttacatttcccaatacaatgatctttggagtaataaatagggaacacattttatatctatctatctatctatttatctatatatattataatatttgtagagaaaagcgtgaatagaagttttttcatgcttgtaatttatgtacagtacccaatgattatggctgctcatctggagatgaaactgattgtttttgtatgtttattatttttattagaagattggatttaacaaaaaaaaaaata

SEQ ID NO: 197918 - DNA, 956 bp, Gossypium hirsutum
gccgttgcttcttcatcctcgaaaccagggcatgagcttttactttttgaagctctgcaagagggtttggaagaagaaatggagagggatccccgtgtatgtgtcatgggcgaagatgtgggtcactatggaggttcctacaaagtgaccaaaggactggccacgaagtttggggaccttagggttcttgacacccctattgcggagaactccttcactggcatgggaatcggggctgctatgactggcttgagacccgttgttgagggcatgaacatgggatttctcctccttgcttttaatcagatctccaacaactgtggtatgcttcattatacatccggtgggcagtttaccataccaatagtcattcgtgggcctggtggtgttggacgtcaactaggggctgagcattctcaacgtcttgagtcatactttcagtcagtccctggaatccaaatggttgcatgctccaccccttacaatgccaagggcttaatgaaggctgcttctcagaagtgagaaccctgttatcctttttgagcatgttttgctttacaacctcaaggagagaatcccagatgaggattatatctgtaatcttgaggaagctgagatggtaaggcctggagaacatgtcaccattctaacctattcaaggatgaggtatcatgtgatgcaggcggctaaaactttggtgaacaagggttatgatcccgaagtaattgatattaggtctttgaaaccatttgatctttacaccattgggaactcagttaagaagacacatcgtgttctcattgtggaggagtgcatgcggacaggtggtattggtgctagcttgaccgctgccatcactgagaatttccatgattatttggatgctccaatcatctgcttatcttcacaggatgtgcctacaccatatgctggaagattggaggaatggactgtag

SEQ ID NO: 197919 - DNA, 557 bp, Gossypium hirsutum
gttgtggggatcgaaagtggatgcccaagttgaagagacaagcttgaagctgatgagagatgctttggaatggccgctttctgtgtcactttacagtgacttaaacgacaatgaaggtgaagaagaggtagatggtgaagaggaaactgggcatagtcgtagatccttgttttggacgagaatgaggtattacatttcgtactcggcgctttctgctaatagaatcccatgtcccccaagatcaggaaggtcttattataccaacaactgtttcaaggcacatggatcagtccacccttactctagaggatgctccaggattacccgctgcaggagatgaagttttccttttttcttttcctttttaggggatgcttggggtttgtaatattttaatgtgtattttgtgagaactatggaggaattgagtgttgaggtttcgggttttgccatttttgtgagtttttgtttcttggtttaatgtgtggattagcaatgtaattatgaacctatgatgtgtgatttggttaagatacttttaaggttatggttatggt

SEQ ID NO: 197920 - DNA, 438 bp, Gossypium hirsutum
tgcaattctattgaatacatgccttgcttgccctttggcttcaatacttcacactcctctagatgaacaatcggcaaggttctgtgctgcctctattgttactgccttagaagatctacatgagaatggcgtgctttacagaggtgtgtctccagatgttttaatgttggacaaaacaggccatttacagctagttgacttcagatttggaaagaagttatctagtgagagaacatttacaatttgcggaatggcagactctttagcgccagaggtagttcagggaaagggccatggtcttcctgctgactggtgggccctgggagtcctgatctatttcttgttgcaaggtgaaatgccatttgggtcatggagacaaagcgagctcgattcatttgcaaagattgcaagaggatacttttattcttttacataaat

SEQ ID NO: 197921 - DNA, 566 bp, Gossypium hirsutum
aaaatatattcctagtgtcggtgacctctgtccttgcaagtagttaccagttaaaatgggggtttacgactgtccgatgagaacacttcttttgctgctttggaaccagatccagccgctagcattttgaaccctgcatttctcttttaacacatccatcgttcaatgcgcttgttttgatctatagatcttaggttcggagtctctgtgtgtgctttggtgtgggggttttctagtgacaaaaatagaatggggaaacaatcaaagtcaggagggtgtttggggtggttactggcgatagtaatattggctctggttgtgggagccattgtttatgcagtgaagcagaaaatcgatcacgccaatgataataagccatctcccgttccaggtcctccaggcgctattgacaagaagtatgccgatgctctcaaaatcgcaatgcaattctttgacattcaaaaatctggtaagttagtgaataataagatatcatggagaggagattctggacttaaggatggaaatgaagcgaacttggatctttccaaggggatgtatgatgc

SEQ ID NO: 197922 - DNA, 1219 bp, Gossypium hirsutum
cccacgcgtccgattcattcctaccactccaagctgcctaaccaactttctttttttcttaatatcaaattttcttttattatagtcttgccctttccttggccaccccccctaatattccaaaaaatccacttttccacaacaaactatttcatacgatatggataccaacggagccaccacgagctccgccgctggtggtggttcaacttctaaatcttccagcaaaaagcattccagaaaacccgtatattctaggttcacgcagcaagagcttcctgcttgcaaacctattcttacacctggattggtcattgcaacatttaccatcataggaatcatcttcatcccattgggacttgtctcattgtctgcttcagaaaaggtggtggaaatcgtcgatcgttatgatgaaagttgtgttccttctaattattccaatgataagcttaaatttatccaaaacccatcaattaacaaatcttgtgttaggactttgacggttcctaagctgatgaaaagccctgtttttatctattatcagcttgataactactaccaaaaccatcgccgttatgtaaaaagtcggagtgataaacaattgaggagcgtgtcagatgagaaatccacaaaagattgtagccctgaagacaaaacggtggatggtccaattgttccctgtggtctagtcgcatggagtttgttcaatgacacatacgggttttcggtgaatagtaagacaatagaagtaaataaacatgacatagcatggaagagtgacaaagagcataaattcggatcgaatgtatatccgaaaaatttccagagtggaggcttgatcggaggtgcaaaactgaattcctctgtacctttaagtaaacaagaggatctgatggtatggatgcggactgcggcactgccgacattcaggaaactgtatgggaagatagagcaagacctccaagcgaatgagaaaatacaggtcgtaatccagaacaattacaacacctacagtttttcggggaagaagaagttggtactttcaaccacaagttggatacgtgggaaaaatgatttcctgcgaattgcatacattattgtacgagggctgtgcttgtttttaacagtctgcttcatacttctttatgttatcaagccaaggccacttggtgatccgtcctacttgtcttggaacaaaagtccagctggccatccaatt

SEQ ID NO: 197923 - DNA, 703 bp, Gossypium hirsutum
aaagaaaaaaaagcttcatccaccactctatacaatggaaaagattcagcacaaccgtgtggaagctaaaggactaaagcttcatgttgcccagattggaactggtccccaagtggtggcattcttgcatgggttcccggaaatttggtattcatggaggcaccagatggttgcggtggctaatgctggctatcgagctatttccattgattttaggggctatggactctcagagcatccatcagaaccagagaaggcaacctttaatgattttgttgatgatgtcgttgccgttctcgactctttgggcatcactaaggcgcatcttgttgccaaggattttggggcctttgtagcagccatggtgggcatacttcaccctgatagagtgtccaccatcattttactaggcgttcctttcctgctaccaggtctctctccactccagtcgcaacttcatctcattccaccaggcttttatatgctaagatggatggtgccaggaggagctgaagcagattttggccgctttgacgcaaagacggttattcgcaaggtttatattatgttctctggaagtttacccccggttgctgctgataatcaagagataatggatttggtcgactcatctgcacctgtcccaccatggttgagcgaggaggatcttgcagaatatggttctttatacgagaaaagtgga

SEQ ID NO: 197924 - DNA, 537 bp, Gossypium hirsutum
tttagcccccccttgccgaccaggaaattaaataagttcagattttaaggtttctgcttcatcatggtcaacgcgactaaagggctgttcgtttcttgtgacatttccatggcacagtttatcgtgaatttgaatgcatcgctgccagctgcacataagtttataatacatgtgctggatagcacgcactttttcgtgcaacctgatgtcgccggaatgatacgaagtgccatatccgagttcagagaccagaattcatacgagaagccaacttgactcttgaactcaatatcctttctttaatggagctcatatatgaaaaaccaataaagaacaacaaagaaattctagtgcatgaatatgtgcaattgctggcttcctattttcattttgacttcagaccctgatataattgagggctatatttggatttggattttgtatttatttatatgtttggctatcattccaaagacttgttcgagtatatcattatccttttgctgaaatattaggtgattgttaacaggagttatt

SEQ ID NO: 197925 - DNA, 412 bp, Gossypium hirsutum
catgtccttccccttgatctcccactcgactcggatcacgactccctcgactcgtttagcgttttgcgtgcaataggtgtacccgcctcgacgtcttagctcagtaactcgaattaaacgatggagccgatggatatcgtagggaagtcgaaggaggacgcttcgcttcccaaagcaactatgaccaaaattataaaggaaatgttaccgccagatgtacgcgttgcaagagatactcaagatcttttgattgagtgctgtgtagagtttatcaatctcatttcatcagaatccaatgaagtttgtaacagagaggagaagcggaccatagcacccgagcatgtactcaaggctctagaggttcttgggtttggagaatacattgaggaggtctacgctgcttatgagcaac

SEQ ID NO: 197926 - DNA, 397 bp, Gossypium hirsutum
ctcttctttgtagccaaaaagaaaatatgagccgaattaaagaaactttatccaacatttctaattctgccaaacacatttccttcaccaagaaacacaagaaaattttcttggcactatttgcatctttagtcattgttgctgctataatcggcattgttgctggagtgagctcacggaataactccgatgagtccgatacttcccatcatgccgttgtgaaatcagcttgtagtggtacgttctaccctgatttatgtttctcggctgttactaccgtccctgctggtactgccaaaaaggtgaggagccaaaaggatgttatcgaattgtctcttaacatcaccaccactgctgtcgaacacaattacttcaagattaagaagcttttggctcg

SEQ ID NO: 197927 - DNA, 1348 bp, Gossypium hirsutum
gcagaaagagagactgtatctaagtttgttggtagtcaccctgtatcatattgtttatctaaaaaaactctttctaggacagtaatgagatcaggaattacaatgggtggtgtggtatacagcaaaggacttttatgttcacaggcactttctaggagaggatttgcatctgatgcaggccttcctccttgccaagaaattggaatgccttcactctcacccacgatgactgagggaaacattgctaggtggttgaagaaagagggtgataaggtgtctcctggtgaagtgttgtgtgaagttgaaactgataaagcaacagtggagatggaatgcatggaagaaggttatcttgctaagattataaagggagatgggtcaaaagagatcaaagttggtgagataattgccatcactgttgaagaggagggggatattgcaaagttcaaggactacagtcctccagcatcagattctggtgctcctgctgcaaaagactcagcagctcctcccccgccaaagcaggagcctgttgaacagccagctagttcaccagagcctaagactcccaagcctacttcctctccttcagaagatcgcatttttgcaagtcctcttgcacgaaaattggctgaagatcacaaggtacctctctcaagtatcaaaggaacaggtcctgatggacacattgtaaaggctgatattgaagattatttggcttcacgtgggaaggaagtttcagcaccaactcctaagacaaaggatgcaaaacttgcagctttagattatgtggatatccctcattctcagataagaaaggtcacagcatcacgcttattattctcaaagcagactataccacattactatttaacagtggatacatgtgttgacaaacttatggatttgcggagccaactcaactcattacaggaagcttcaggtgggaagcgtatatctgtcaatgatcttgtaattaaggctgctgcattggctctccgaaaggttcctcagtgcaatagttcatggacagatgactatattcgccagtataacaatgtgaatattaatgtagctgtgcagacagacaatggactttacgtccctgttatcagggatgctgataagaaaggtttgtcctcaattgctgaggaggtcaagaatttggcacaaaaagccaaagagaacagcttaaaaccagaagattacgagggaggcacatttacagtgtctaacttgggagggcccttcggtattaagcaattctgtgccatcattaatcctccacagtctggaattttagctgttgggtctgctgagaagagggttatccctggcttcggtcctg

SEQ ID NO: 197928 - DNA, 318 bp, Gossypium hirsutum
tttggatgtcacatttttggcacaagggacccatttcgtccaagaacttcttcctgaggaggtgaatcatctcgtgtggctccttccttaacaagcactgcgaatagaggaaaccgatgacctagttgcttcttcatcttcttccttctttaccgctgaataaaaggacctcgtgccatttaaataaagaataatatgacctcaaaatggtcaaatttgaatgttttgggagttggagaatcttcattccagttcaaaaggacaaaaaacaaccctcagatataaaaactctgtctacgatgaaaagcgggagttttt

SEQ ID NO: 197929 - DNA, 749 bp, Gossypium hirsutum
ctttgcccatttctttcttgtgatttctctctcttcaatggcgtcagtaacagagtcgattgccgccctctcttttcctactacttcacgctttagaacttcattctcacggccggcgatgatgatctcacagccggcggtttcttcgtatagctgccgaggtttgccggaatttaaagggctgaaagtccaatcctattcactgttttcgttcgcgtccacgaattccagatatcctagggtttccaagcatagtggacgcattgtttgcgaagctcaggaaactgctattgacattccagctgtgaccgatgaaacatggcaatcacttgtgctcaacgcagatggacctgtactagtcgagttctgggctccttggtgcggaccatgccgcatgatcgatcccgtaataggtgaactagcacagcaatacgcaggaaaactcaagtgcttcaaactgaatacggacgatagcccctcgatcgcttcccaatatggaatccgaagcatcccgacactcatgttctcctcgagtcgtgtagaaatgagtcgcagttattggtgctgtgccaaaaactactctatcagcaagcatagagagattcttgtagatagcgattcataagaagtgatattgactgatggaatcatggaagtgtccagcactcatcacccacttggctttggttagatgctttatttctctctatgtgatgttgaaaattttcctacttttatgtcaaatttgg

SEQ ID NO: 197930 - DNA, 655 bp, Gossypium hirsutum
  unsure (1)..(655): unsure at all n locations
ctaaatcaaacgccactcctacctttgttttttcaatctcccttttccaatggccgatcttaccgattccgttatgccgtcagctgtaatcacccctctttcaaccacacctaacacccgtacgttacctgtacgtgaggattgttggtctgaggaagctacgtctacccttgttgatgcttggggtcgtcgttatgttgagcttaatcgtgggaatctccgtcagaaggattggcaagatgtggctgatgctgttaatgctcttcatggtcatactaagaaaacccatcgtaccgatgtgcagtgtaagaaccggattgataccattaagaaaaagtataagatcgagaaaactagggtgagttcttctaatggaaccctaacatcgtcttggcctttctttgaacggttggatgctcttattggatctaattttgctgctaagaagctttcgacgtcgcctaagatatcaccgaagccgtcgccgaggttgtcacccaggatcccgggatctcctcctgtggctcttccgcttttgcttccgtacaggaggactcctccggcgcccactgctattgttgctcttccccaaaaaaagccanctgtggacaatgggtatttcaaaaagaaatattctgctgttgctgctgctgct

SEQ ID NO: 197931 - DNA, 1151 bp, Gossypium hirsutum
caaaggttaggtcgcttactcttgatgtaaaagtatgggacccatctgttataagtttgtttcaatctctgggcaatacctttgctaactcagtttgggaggaattgttgcactccagaaatgctttccacgttgatcttaccccaagcttttccaagtctgataaaccacagctgctgcttatgggaaaaccttgtcattctgattctatatctgtaaaggagaagttcattcatgcaaagtatgcagaaaagctttttgttcgcaagccgaaagatgagcaacatcctcaatcagttgcacaacagatttgggagggcgttcgtgccaatgacaagaaggctgtataccgttatattgttagttgtgaagcagatttaaatgcagtgtacgaacaatctcccgggccttcattaacccttgccaaagcgctgcttctgcaagaacatgcaaatgtctgtaacaacagctccagttacatcacaggggattcatcagacagatcctctgctagctctttcaacttggtgggtaccagtgaagggcaaaccacagacgatttggatggttgtaccctacttcaccttgcctgtgaaacgggtgacattggcatgattgaacttctattacaatatggggcaaatataaatgtaatggattcaagaggtcaagcaccacttcatcgatgtattctcaagggcaaggctgcggttgctaaattactccttaccaggggagcagatccgcaggtgttaaatagggaaaataaaacccctgttgagctagcagtggaatcagattttgatgacagtgaggtccttgctttattatcagactcaaacgggtaactagggtgaaaagaaaataaattggagtttgagctgtacctgaagtgaaatttgaaaatgcattcgtgttggtttttttggtgtatttataacaatatctaaaaattaaagccggtggtagttgaaatggatgtcccccatatttagaggggtactaaacaaaaaacaagtgggaggttgtgctacccccaggccgaccccttgggtgttatgtgaaaattattccccccaaggacaaagatggttttaaaaccaagtttaatggccccatcagctgacagccttgcttcaaaagaaagaggg

SEQ ID NO: 197932 - DNA, 896 bp, Gossypium hirsutum
ctctgtcatcccaagaacaacaggaggccaggtgtattattattaccccttctctgctgtatctgatcctgcaaagctctacaatgaccttagatggaacatcaccaggccccaaggttttgaggctgtaatgcgtgtgagatgcagccagggtattcaagttcaagattactctggaaacttttgcaaacgcattccgaccgacattgacctacctgggattgactgtgacaaatgtatattggtaaccctaaagcatgatgacaaattacaagatggttctgaatgtgcttttcagtgtgcccttctctataccactgtttatggccaaagaagaattcgagttacaaacttatccttgccatgcacaaatatgctaagtaatttgtttcgctctgctgacttggatactcagtttgcatgtttattaaaacgagctgccattgaaattcctacaagcccacttgtgcaagtgagggaacaagtgacaaatctttgcatcaacattttgttttcatatcgtaaattttgcgccactgtatcatcatctggacagcttattcttcctgaggccctgaagctacttcccctatacacccttgcactaatgaagagtacaggattgcggaatgatggcagaataaatgaccgttccttctggttcaattatgtttcctctctttctactcctttggcagtgccattggtttaccctaggatgtttgctattcacaaccttagtacaaaggaaagagatgagtctgttcttcctcctataatccctctatctagtgaacatgtcagcgatgatggaatctattttctggagaatggtgaggatgctctaatatattttgggagctcagtggattcaagcctcttgcaacaacttttgc

SEQ ID NO: 197933 - DNA, 535 bp, Gossypium hirsutum
tttcacgcgtccgagatgcctcacttgtaccctgatgataggattttgacttcaactgttgaagtattggctaggaagcgtgaattaaaattgcccgtcaacttggagaagttcacgagctcgaccaatcgtagtctgattgaggcaatgttgaaaggatttgttaaaggtggaagcttgaaccttgcatggaagctcctttcggttgtgaagcaaagtaaaagaatgctggatccaggcatttacgcaaagctaatattggagcttggaaagaatcctgataaacacatccttgtagaggagttactgggtgatcttggagaaagaagatgatttgaatttgagttcaccaggactgtccagggatcatgaagggttgcattaaggcataggaagtttgagattggggagagcttgttttactggttcaagcaatcagggcgtgaccccagtgtggtgatgtacacaacattgcttcatagtcgttattctgagaacaagtacatggaagcattagctctggtttgggaaatgg

SEQ ID NO: 197934 - DNA, 409 bp, Gossypium hirsutum
atagtattttgtttttttgttttttacaaaaacatccttcctccatttcagaccaaggaagggaaagcaatgaagccagtctttaccattatatcggcattattacttgccgtcatcgccaccgtcaacagctgccctccgtcagacagggcggacgctgttagcattcagagcagctctccacgaaccatacttaggaatcttcgattcatggactggcacggattgttgccacaactggtacggcgttagctgcgacagtgagtcacaccgagttgccgacatcaacctccgtggtgagtccgaagaccccattttcgaacgagctcaccggaccggttatatgaccggttttatctcaccggaaatttgcaagttgacccgtctttcaagtattactatagctgat

SEQ ID NO: 197935 - DNA, 420 bp, Gossypium hirsutum
ctctgcttgtccaggagcagcaggtatggtagcaatatgcaagggatggaatgcaagggcgaagctagtttggccaaaattaataaccctggatactatggacctggacctatgccagtgatgccttacggaatgcccccagtgaatgggatggggccaccagccgggtattattatactccatattgatttttccacatataaaatagataacttttctttgcttaccttctgtattatctttttctagttttctttccctttttatcgtttcctttgagatgatatgatgttctgaaatatgttcacgaaggacttgctcattctgtggatttttttttttgtgctgggaggttcatgatctggttgtgatgtctctttgtgcttttgtaatattagaattttatttacattcttatt

SEQ ID NO: 197936 - DNA, 811 bp, Gossypium hirsutum
  unsure (1)..(811): unsure at all n locations
attggccttttttttcctcttttcaccaatcaccggtattcaaatactagtacaaatacagctgcagcaatttgtcaattacttatttgctgcttcactgtactttgtggagaggagaggagagaagccagtttcaatcgtccctcaagagaaactgtcacgaaaaaagacattgggtcttcccaaatcttggctttgcattgatggcggatctcaggtcagcatttctcaatgtgtattcccagctcaaatcggagctccttcaggatccttctttcgagtttaccgatgattctcgtcaatgggttgaacggatgctggactacaatgtgcctggagggaaactgaatcgtggactctctgtgattgatagctaccgcctgttgaaagatggaaaggaattgacccaagatgagatttttcttacaagtgcgctcggttggtgtattgaatggcttcaggcatattttcttgttcttgatgacatcatggacagctctcacacccggcgtggccagccttggttggtttagattgccgaaagttggtatgattgctgtaaatgacccggtgttatacttcgcaatcacatcaccaggattctcaaaaatactttcgtgggaaactactatgtggatctgtagaatatttatgaggtggagtttcaacagcttcagacagatgatnatctgatacacactgaaggagataggatctatcaatactattgcacacaccggtccatggtaatccaagatgccaatattattttaattccgggcggggccctgtatggggtaaaacttgcact

SEQ ID NO: 197937 - DNA, 443 bp, Gossypium hirsutum
cggacgcgtgggcgagtcgaagacgaaaccctaaatccaagccccctcccccttcaccaccggcagcagaaatgaagtacaacccacgtgtctcctcctctcgccgtaagagccgcaaggcccatttcacggcaccttcgtccgtccgccgtgttttgatgagcgctccactctcgaccgatctgaggtccaaatacaacgtccggtccatgcctgttcgcaaggacgacgaggtccaagtcgttcgcggtacctacaaaggccgcgaagggaaagtcgtgcaagtgtaccgacgcaaatgggtgatccacattgagcgtatcacgcgggagaaagtgaacgggtcgaccgtcaacgtcggtatcaacccatcgaaggtcgtcatcaccaagctgagactcgacaaagatcggaagtcgttgctggatcgtaaggctaaagga

SEQ ID NO: 197938 - DNA, 570 bp, Gossypium hirsutum
ggagaaaggaaataaagggaaagggcggggggtttttgaattagttgcctccgtttaataattaactttttccttgcctccctactctctctccaagatggacagccacgtggagcctaccatcgccaccgctggtcctaccgcgctctctccgccgcgcgattctcttgatctcattcccgtcggatccgtcgaggcagaggaggagattgagacattatctcctccgtccgaggaggatcacgaccacgctaacggtcaaaatcgggatcaaaagcagaatcaggagaactcgtcggcgactgctgtccttactgatgatctcaaaaataagatcattaagcaggtggaatattatttcagcgatgaaaatttgccgaccgataagtacatgatgagtctgattaagaagaacaaagaaggttttgtttctatatcattaattgcgtcttttaggagaatgaaaagactcagcagaagttatccatcaatagtcgctgcgcttaaagagtcttccctacttgttgttagttctgatgggaaaatggtgaagcgtcggaattctcttca

SEQ ID NO: 197939 - DNA, 382 bp, Gossypium hirsutum
attaattttgcgtctaaatttctctaaaaaatctcgtaaatcccatactggaagtccaattcgccatgtgtggaggtgcgattatctccgatttcattccgcctgcgcggtcgcgactggtgacggcgaattatttgtggccggatctgaaaaaatcctgctctaaaaagtggtcgggtagaaagcactcgaagaagccggcggtcggctttgaagatgacttcgaggctgattttcaggtgtttaaggatgaggattctgatgtcgatgacttcgatgatgatgttgatgatgttttggctgatgttaagtcctttgctttctctgctacaaagaaaccctctcctgctgtttctcatggttcaaactccataaaatctgt

SEQ ID NO: 197940 - DNA, 461 bp, Gossypium hirsutum
ttggtttggattcttaaatttttgaaatttgtttgagaatttaggaagaaatgtcaaggtttcgcgggatatggcatgcttccctgaatgcaaccaagaaagctctggcatggaatgttgatgattggatccctcccgctgaaaaatacatattcaatttcagttcaaaagaggagctcaagaaatggcatctttattctgatgcggaatttggagggttgtcgtcggcttcattggagatcaaagacgatgctgataaatcaagtggagttttctctgggaatctttcccgggatgtaaccgaaggtacaaaatggaacataactaggagcggcttttgtggaatgcggtctaagaagtttgatggcttcattgatttggaagcatatgatacaatagcattaaggattaaaggagatgggagatgttatatatctacaatctatacagaaaattgggtt

SEQ ID NO: 197941 - DNA, 396 bp, Gossypium hirsutum
ccgtgttttatttctcttcgtcggtatttaaaagtgctggagtaccatcggatgttgcagatgcattgataggagtagcaaatttaacaggatctattgttgccatgcttttaatggataaacttggaaggaagctgcttcttctgtggagcttctttggcatgactatgtcagtggtccttcaagttgctgcggcaaattcttacgtgtcaggctctggatctttatacctatcagttggtggcatgctaatgttcgtcttaacatttgcactgggagctggtcctgttccaggtctcctcctacctgaaattttccctaatcgaatccgggcaaaagctatggcgttctgtatgtcagtgcactgggtaatcaatttcttcgttggtttgctct

SEQ ID NO: 197942 - DNA, 410 bp, Gossypium hirsutum
cgaagctttagaggcacatcctagggtgaggcgcgtctattatccaggcttgccaagtcatgctgaacatgaaattgccaagcagcaaatgactggctttggtggtgtggtcagttttgaggtggatggagatttgatgaccaccatcaagtttgttgatgcattaaagataccatacattgctccatcatttggtggctgtgagagcatggtggatcagcctgctataatgtcctattgggatcttagccaagctgagaggcgcaagtatgggattgaggataacttggttcgtttcagcttcggagtggaagacttcgaagatttgaaggctgatgttctgcaggcactggagaccatataatggcgctaatccccgtcgtttggttttaggtttaaatgaccaacct

SEQ ID NO: 197943 - DNA, 378 bp, Gossypium hirsutum
gtgagcttttgttgaaaaggcaagggattcttccaatagtgaagaaaactgtaagctttgcggaagatgggaatgtttataggattattaccaatggagatgaggttaattcaagtggagatggtagtttaaccgatgagagtgtttcgagtgatgaacgtggagatacaatggagaatcttgtcaaagaaagtgaagatttagttgagaatttggaggaggcaatgaacttgaacaaacaggcaagaagtaacagtgttgaggactatcagattcaaggtggtgattttgtgttttctgctccattgcctgtgaagatggaatctaaagctgatctaatgaagaaaaggaatggtgcgctcaaaattgtttcatcat

SEQ ID NO: 197944 - DNA, 483 bp, Gossypium hirsutum
aagcaagcaagaaggcaggttgagttagcttatcacgagttggccaaggcaaagagagtggggcaacaagcacaagctgaatcagcaaaggctcaagctttaaagaaccatgcagtcaagcaaatcaactccactatttttcaagtcacttgccatgctcgtagacaccgatttcgagcaacagcacctcccgaagagaactctctagttgtgagttacatttcgtcagctataacggaaggtgaagttgaaaacgatagtcttacaaatctaacgaaacccactaacatataaaccaatatatatgtgtgtgtctgtgtgagagtgtgtataaggtgttaatactcgtctttccttcttatatatgccaaaaatggttgtttctataatctggagttgattagtgaaagtgttgtatcgtggctgatgtaatttgttcattaatttggataaatgagaagatataatgatggggttgatatt

SEQ ID NO: 197945 - DNA, 417 bp, Gossypium hirsutum
aaaacccggtccgacccacgcgtccgggccggtattgaagtcgatagaagttgtttatcatagtcctcagccatggccgggggggccgtgtagcttaccatgccagttgatggtcgggttctttgcatacgctaaatctcttgaaataaacgtggataaggaagaactagaagacgcacagtggcacagtagagaagtcgtgaggaaagcattggcggttgcagaatacaagaaggcgcaaaaaacgaccgcagccaaagtagatcaaatgtgcaaaggagtcgtgaaggcaccgactttctcggcagattttaacgtcgaaagtgggctactcactcccatgttttttccccggtccattcgcgattgcccatcaccttatctctaccttttctaatcaaggtgtacctactttca

SEQ ID NO: 197946 - DNA, 647 bp, Gossypium hirsutum
  unsure (1)..(647): unsure at all n locations
atttgaagctgctttcaaaggaggtgtgcatgttggttcaattggtgctggtgggcgttatgacaatctgatcgggaattttggcacaaagcaggttccggccgttggcatgagtcttggaatcgaacgagtgttgaccataatggaagagaaagcacagaaccaggcagtccgagccacggaaacccaagttttggttgctgtcctgggggataaactcgctgtagctgcagaactggtcagtgagctttgggacgtagacatcaaagcagatttcatggttcataaaaaggtgatgaagcacgtcgaggatgccatagactcaaagatcccttggatggtgatcgtgggcgagcgagagctgaatgaagggatcgtaaaattgaaaaacatcgaaaccaccaacgaggaagtgattcctagaagtaatcttgttggtgaactacagcaacgattgaagttgaacccatgaaaaaggggtcaatgctcttctattctcaacaaaggtagagattctcaaatatttttgtctgaacatacaaatttactttagtaattgntgtattgcaaataaatccatgtactcatgcttttgatttttttttatttacccataattatatttaaggggtttatacattttattt

SEQ ID NO: 197947 - DNA, 335 bp, Gossypium hirsutum
aattactgttattttcttggatttcttttttttttttcagaaaccaaggagaaggaattagtgggtaaaaccgagatctgagatgggggtttcttggtaacaaccctaatttttgctgcgattgggataattgcatctctttgtaccagaatctgctgcaaccgaggtccctctgcttatctgctccatctaacattggttatcacagcaactgtctgttgttggatgatgtcggcaattgtatatcctgcacaaatgaaacctttctttgtccccatttagagagatgggttttgtagttcaatacgcgttctgtggcaccattattattgtgc

SEQ ID NO: 197948 - DNA, 821 bp, Gossypium hirsutum
cccacgcgtccgaaagggcgttgcaacaattatgacatcctattctagctggaatggaaaaaagatgcatgctaatcacgatcttgtgaccgacttcttgaaaaacaagcttaagttcaggggtttcgttatatcagattggcagggtcttgataggattacctctcctccacatgctaactactcatattctgtagaagctggagtcggtgccgggattgatatggtcatggttccttataacttcacagaatttattgatgacctaacctatcaggttaaaaacaatatcattccaatgagccggattgatgatgctgtaaagcgaatcttgagggttaaatttgtgatgggtctctttgagaatccaatggctgataacagcctggtcaaccaacttgggagtcaggaacatcgggagttggcaagggaagctgtgaggaaaagtctcgtcctactgaagaatggtgagtctgccgataagccattgttaccccttccaaagaaagcaactaagatactagttgctggcactcatgccgataacttgggctatcagtgtggaggctggaccattacatggcagggtcttggtggcaacgatctcacaactggtacgactatcctccaggctgtcaaaaatacagttgattcaagtactcaagttgtatacagtgagaacccggatgcagggtttgtcaagtctggcgaattctcttatgccattgtggttgtgggagaacccccgtacgcagaaacatatggtgacagcctgaatcttacaatatcagagcccggtcccaatactatttacaatgttt

SEQ ID NO: 197949 - DNA, 436 bp, Gossypium hirsutum
ttgaaacgtagggtgcaggtcgagaaggcagctagggaatctcaggctgaagctatcagaaaaattctcggccaagaggcaagtaggaagaaacgagaagataagataaaaaagaggcaagaagaaatggcacaggaaaaagctacaaattctatgatacttgcatcagacaccgtaagatggcttatggggccttcaggaacagttgtaacattccccaatgaggttggtttaccaagtatattcgatcctaagccttgcagttaccctccacctcgagagaaatgtgcagttccatcttgtacgaatccatacaagtaccgagattcaaaatcgaagcttcccctttgcagccttcaatgctacaagacaatgcatgaaaagatgtctgcccttactgcctggtagtgaaatgcactaccaaaacgtcatttct

SEQ ID NO: 197950 - DNA, 327 bp, Gossypium hirsutum
gttaaggaccaggaagagaaggcaaagagatgcgaatgcgttcaagggctgctgttgtctgcaattgttgatgatatcttataaagctgctgtaatttccggacaccggttcctgatggacatcaagttcagggaagagccttcatcccactttcaatctagggtttgttaagctgttagtggtgaatatcttgatgtatgtattaagcaaaatgttgaaataaggtgtagcaatgagtgtaatttttaatgttcgatgatggacttattttgaagttcttattttgtccaacaacatatttaagagttaaagtgatggagattaca

SEQ ID NO: 197951 - DNA, 625 bp, Gossypium hirsutum
aaaatggcgccgttttatccccaaatttccccctgaaacgcctaattccccccaaatcggtatcctcaaaaccctttaggtgtttctctctgccgcttttgctactttccaatattcccaggtttttgttgtaataagtttcaatctgtagccatgggaaaattaaaaagaaggcccccaaaattgctggcatgaagaaaatagtcactcaaaaagctattaaacagtagttgtttcttttctttctctatttgattacagagaaattactttttttcctctctgtaaacaaacgggattttggattttggatttcgcattagccgtttaattgattggcttaaatggatttggaaattgaaaatagaatagcagctattctcttaaaagaggcaaccgaattgaaacggcaagcgggcaacgaaggtgttcatgtttatcttcagcagccaaaagtaagaagttttatctacccttaactttacaaatttgtattgatgacagaagtagcagaagaaaggtattcagctccttctgttgcaaggtcttccttgtttaaaactctgtcaattgaaaaggcagttatccgcggaatacttttatcaactttggatgatcctaatac

SEQ ID NO: 197952 - DNA, 1158 bp, Gossypium hirsutum
  unsure (1)..(1158): unsure at all n locations
ggtttgtgacattggtgtaaaatggcacaattacctccaaaaatacccaacatgacccagaattggccttcttttccacatcaaagattgcctacaatggcaaacttcatttccaccactgccaacaccgccactatgaatgcctcccaccaccaccagccttcttgggtcgacgagttcctcgacttctcctccgcacgccgcggggcccaccgccgttccattagcgactccatcgctttcctcgagcaaccattggtggaggaatgcagggactccaacaccaaccacaacaacaatgccatgataacggaaaccaatgtgttcgatcgtctcgacgacaaacagctcatgtccatgttctccgacgacgtagccatcaccatggctgctgcaccgacgttatcctcgtccaacccttccactccgacgtccgaccaaaacagcaacaatgacgagaaaccagtgccgtccctggatctgcagcagcccaagaacgaaccaggagaagtggagagctcatgcaaacctgaaccacaagctgctcaacctccatcaacctccaatggcgaccccatcgttgatcccaaaagggttaagagaattctggcaaaccggcaatcagcacaaagatcaagagttagaaagctgcaatatatttctgaacttgaaaggagcgtcacaacattacagactgaagtatcagcattatcaccaagggttgcattcttggatcatcaaagattgattctcaatgttgacaatagtgctttgaagcaaagaattgcagctttggctcaagacaagattttcaaagatgctcatcaagaagcactgaagaaggaaattgaaaggctaaggcgggtgtaccagcaacaacaaatcctcaagaaaatgaacagcaacaatagcaacaaccaccatgcaccaccacaacaacaaccatcacagccgccgcagacgaagaaagaagaacaactatgagttgttcagagaaatagagagagctagagacggcagtgagaaggtcttggtgccnnaaataaaaataaaaaataaaatgcaataaagctatctaaccaattggggggtggggggggcacntttttcccagttatgttgttcccccattggtgttttttaataagtggttgggcc

SEQ ID NO: 197953 - DNA, 424 bp, Gossypium hirsutum
ggagaaagatatcacccggttatgaagaatggggactgggtacaaacggattggttaccgacagacagatcagcacaatcaggaactaagctgggtgatttcatatctgcttctgcaaatgagtcagctgtaatcacgtgtggaaaggaagaagattggtttgctggaaaccaccatgtaaagcctgaaaaccagcattcagccaatgatcatatgctttttaatggcgatcgtgttttatctgttgagagtgatcatctatattctcagaagagtgtgaaagatgttattgatgatgattctttcatggtagcagctccgccagcaagtgaccatctggatgattcgcaatggaaaacatatataagcatggttgcatatctaacttcacatatcaaaccatatggcacaatagatgtttcac

SEQ ID NO: 197954 - DNA, 676 bp, Gossypium hirsutum
  unsure (1)..(676): unsure at all n locations
tattttttagggtttgctttataaaacccatttgcaaccctaccgttggttgatgaaagcggcaaagtcactgtgttaaagagaaacggcgcctccgcccaacaacaatggttcacgtctccttttaccgcaactatgggaagacatttaagaagcctcgtcgtccttatgaaaaggaacgattggatgctgagttgaggctggtgggagagtacgggctgcgatgcaagagggaactctggagagttcagtatgctttaagccgaatcagaaatgctgctagggatctattgaccctcgatgagaagaacccgcgtcggatctttgagggtgaagctcttcttcgcaggatgaatcgatacggactcttggatgagagccagaacaagcttgattatgtattggcgttgacggtggagaacttcctcgaacgtcgtcttcaaactcttgtgttcaagactggtatggctaaatctatccaccatgcccgagttctcatcaggcagaagcatatcagggttggaaggcaggtantcaacattccatcattcatggtgagggttgattcacaaaagcacattgatttctcgctgactattccgtttggcggtggacgtcctgnaagagtgaagagaaagaaccnagggcagctgccaaaaaggctgctggtggaaat

SEQ ID NO: 197955 - DNA, 514 bp, Gossypium hirsutum
actcaatctcctagaatcattttttttttggttttgaatatcactgatgattgctccaatgaccgatttatcagtattagacctttgacatttcttgatgacagttttcgagtctcccacaactcctattttgttgactcccatactaatccctagttttacttcctgtaatcctgcatatgcctctgccgtgaatggatttgctatcccggagtgaataactacctgtgttgcaaggatttccttttcctcgatccatacgattagacccgaagccgatctaaacgattgacggtcgaaggctgcgtcaaaatgaactgtggcccttccccttttgaatacctgttgaatattgccagtagaatgaataagttggtttctgctaaaccagataaaccaaagtctacagaagaagagtcagagttgctcattagtcccttgagcaaagacccaagacactgttgaaaaatatggcagctattttcttcttcacggcagcatctgagacattgag

SEQ ID NO: 197956 - DNA, 662 bp, Gossypium hirsutum
aaagtaccgacacttcgtaaaactgaaataaaaattatagaaaagaagttaaaaacaaggggagaagatggcaaccaaagcagcagtttcagtggcagcttctgttacggctgcctcatcttcatcttcgaagtttgtgatcaatacacctcatcggttcttgtgtctcaaaaggttgtcttctttcagctccttttctgcttctgctttggccatcaaatgcacgagtattagcaattgcagtcccaacaagtctgctagatcaatggagggttttacaacaagaacaaaggcatccgctcaacctttggagaacgccgacgagcttatcgcctccgtcgagactttcatctttgattgtgatggagttatatggaagggtgataaattaatagatggagtccctgaaactcttgatatgcttcggtcaaagggaaagagactggtttttgtcacgaataactcaaccaaatccaggaaacaatatggtaaaaaatttgagacacttggcctgaatgttaatgaggaggaaatttttgcttcttcatttgctgctgctgcatatttgaagtccattaatttcccaaaagataaaaaagtttatgtcattggtgaggatggcatcttaaaagagcttgagcttgcgggattccaataccttg

SEQ ID NO: 197957 - DNA, 390 bp, Gossypium hirsutum
agcagattgaggtactgcaacgtcaacttcagctcttgcagatgcacaagtcaaaaactgaggaaagctcagacattggtctgacaacctcatcagatagtaaaggaaagggcgttgcatcttcttcttctgaagagtaaagagggtacatagttcttgctcaactctagcttatttgaattcatgtagtgatcttaacctaacacacagattattacatacttcagaatcttattcataacttttagcgccatgttacctatttcctttaaaaaaaaaatcttttgagcttaccacatcgtcttaaccttttctttgacatcacagagtcattttatgacagtcattatcacacattaaatattgtaaaggacaaaaactgtagatttt

SEQ ID NO: 197958 - DNA, 501 bp, Gossypium hirsutum
  unsure (1)..(501): unsure at all n locations
tctatttttacgcggacgcgtgggaaaaataatcgctttcttaattccagatttctcgcctaattcttcgggattcattatttaaaatttcagcgaaaactagaagtaaagaaaaaagagggtgggctattttaagttttgggagctttgagtatgaattgaaggagatttagttgaagagatgaatgtgagccatgcctcagtccacccagtggaagatctaccagccgcggacggaggcgtaggtataggcggcggcaacaacaacaacaacgaggtgcctagagtgaggatgaaggatattcaggggatgcctggaacggcaggagggctcgcgttgcggatttgtcagtttgtttctgcagttatgggactttgtattatggcaaccaccagtgattttccatctgttaccgccttttgctaccttgtagctgccactggcttgcagagtgtgtggagcatatcgcaggctatanatgacatttatgcccttttagt

SEQ ID NO: 197959 - DNA, 397 bp, Gossypium hirsutum
ttatgcgtaagatggctgcagtggctagggatagagcatgggccgaaaggctggtggaactgcaggggcttgaggaagagaagaaaaaggccatggcttgaaatttcacttgcttatatgctttgtcttccgatgttatgctgattttgagacggtttataagaacttaattatgtttccgtcctaatgtttggttacgccagccggtctacaatttaatggcatttagacatctgatgttggtttctctagttctgcactttttcggttatagactggaaatgggtgtctttgtgtttaggactaggaaacagaaaggtgttcaaaagttccatttggccttggctgaggacttatttttagcacagtgaatcaagatctgaaataatttgagatt

SEQ ID NO: 197960 - DNA, 822 bp, Gossypium hirsutum
gccgccctacaatatccctttgcttgataattgattgttgcaatctgctattacttggatgaaggctttaatcgatacagtggggcagtcatctcaaattttggtgctctttgactcatccttttccgcaatacactgaatgcatgaccgactctgggggtgtgaattcttttggatctgtcaaatttgaaggtacattcatcaaatttacaaatgcttgcaaaatgtcagaggacgagtggcgattcttgagcgggtgtgctttgcagaatcctaagaatcagcctctatcaaagttgccgtatatattctttgaacatggagatgcacttcggtgataactttttagttctgcaggatacgggttggttaaccaagtattctttgcttttgttcttatgccgattttccttgggtctttaaaccaaaagacttggatagaaataggacacacctccaaaattctgtatagagaagtaagactcctaaaagggtacagaattgtgcgaggaactctcatctagctgactttgtgtatacagcttcaggtggaaccaaagaattctttctcagctgcgaaaaacctcagctgctgttttttttttttaaaacttgaaaaccatcaaataatggcccaaggttttaaactatactatttgttttattttcctgtgatgagatgtacttttcctcagattgccattacttaaaagtaatgcgggggatacaatttatgtagcgatgaacatatccgtacatgattcaatttattatcttaaaagttctctcaagtctataaccaggcatgagtaagaacaactc

SEQ ID NO: 197961 - DNA, 810 bp, Gossypium hirsutum
tccatcgcgtccgggccaaatcagtctaacatcataccttctaccttgcagcttcctggtagtaggctgaaaactacacttagtgctcgggatatggatttagacatggaactactggggctggaatgtcgtcgccgccgccagcagcagcaacagttaattgatgagatatctggcctttcctccccaaccagctggaacaattctacagcattttctgccgcgggcgcccgggctggtgaactaaatagatttggaggggtgaagccaactaacctcgatgatatttttggctctcttgatcctagtattatgccacaaatacaaggactctcgcttgatgctgcagcatctcagctgcaatctcccactggagttcatacgcgccagaatattaaccagcagctcagggctagctacccgaccaacctaccatcctctccagtgagggcttcttcatcctttgggatcgatccatctgggccgtctgcagctgcagtggtaagttcaaggtcatctgcctttgcaaagcgtagccagagctttatcgagcgtactgctgtaaatcgtcattcagggctgtcttcgccagcttcttctgcaagtgcaatgccttccaacctatcagattggggttcccccgatggcaaactagactggggcatacagggagaagagctaaacaaactaagaaaatctgcttccttcgggttccggagcagtggcagcaatttgggaaatgcccctcgttctatatcatcaactacagatgagcctgatgtgtcatgggtccagtctctggtggtggac

SEQ ID NO: 197962 - DNA, 417 bp, Gossypium hirsutum
cttaagcaaagaacttatgtatcagcaggttcttcgtcggtttgctcattttaatgctatacaactaagtgagccagctcctttgcaagagttaatcatgttggccctgaaggaggaggacttggacctagaaagcaatgaaaatgatgagctcaaaaagaagattgcagaaatgaatacacagctgcttaagcaaaagtctgaaatgttggaggagtatttctgcatttttattgattcagatgggaatttatctagactgccaattctacttgaccagtacactccagacatggatcgtgttcctgaatttgtgctatgtttgggcaatgatgttgagtgggaagaagaaaaaaattgtttccaatcacttgcagctgctcttgggaatttttatgctatgcatccgcctatgtt

SEQ ID NO: 197963 - DNA, 418 bp, Gossypium hirsutum
  unsure (1)..(418): unsure at all n locations
gggtgcttcattttaaattgctgagcggtggattataacttggaaactattacatttttgtttagttgtctctgtaatgagaacatttttgtttccttcacaatgaggtgtttaagactcaaagtttgtctatggagattcttggttctatggtgattttgcttgtaatacttacgtagctcgtaaacctgattaagttctatatttgtattcttatttttatcgattctttaaaatattcaaacttaagcttgaaatctgttttaaataagtaattctttgtattctttcaacagaatatttatttatttatttataagtttgtaaaaatatattttcatttnnnnnnnnnnnnnnnnnnnnnnnnnnnnnnnnnnnnnnnnnnnnnnnnnnnnnnnnnnnnnnnnnnnnnnnnnnn

SEQ ID NO: 197964 - DNA, 553 bp, Gossypium hirsutum
cccacgcgtccgcttgaagctgtggggcaagatttctttacctcatatgatgaggtttatgacactttcgatgttatgggattgcaagaaaatcttcttaggggcatttatgcttatggttttgagaagccatctgcaattcagcaaagaggaattgtacccttttgcaagggacttgatgtaattcaacaagcacaatccggaacaggaaaaactgcaactttttgctctggaattctacagcagcttgactacagcttagttcagtgccaagcattggtccttgcaccaacccgtgaactagcacaacaaattgagaaggtcatgcgggcattaggtgattaccttggtgtcaaggttcatgcttgtgtaggtgggaccagtgtccgtgaagatcaacggattctctccagtggggttcatgtggttgttggtacacctggccgtgtatttgacatgttgaggagacaatctctccgccctgatcatataaagatgtttgttttggatgaagctgatgaaatgctctcaagaggcttcaaggatcagatct

SEQ ID NO: 197965 - DNA, 428 bp, Gossypium hirsutum
tccgattctctcagcctttaaatccaccatatgtttgttgcttccgaggaatccgaccagattgggaggctctacgaatttagtggatgcctcaacgaggctaaggttaagtctcaagttggtctttcctcattcccccttgttctctctatttctagggttttgcatttttctttctgtaatttgtcccactaacatgtgcatatcagttgtagaagaaatggagaagaacaacttgtgctccagcgccttgaagaacaacatgccctatagaagcgctgccttgaaaaccaccaccgttctaatgacaccgccaataatacctctgattcccattctgctaagccctcatccgaaatccttttctaaaaataaaaatcttctcctgcgtttgtgttactaacttggtgcatcccaatacaagaatt

SEQ ID NO: 197966 - DNA, 548 bp, Gossypium hirsutum
ggcctctcgttggtactgcctcttttttgttctatttgtcctgattggggtctactttgtcacaaatttgatccttgctgttgtatatgatagcttcaaaagcgagaatgttgggttcctaaacaaagagcaatgcattcatctgtttgaagaactgaataagtacaggtctttgccaaaaataacaagggaagaatttgagttaatatttgatgagctggaatgatagtcatgacttcaagatcaacttggatgaatttactgatctttgcaatgccattggtctaagatttcaaaaggaggatgttccatctttgtttgaaagatttcaaatctatcgttcgcctttctctgaaaatttgaaagcctttgttcggggtcccaaatttggatacataatatccttcattctcatattgaatctgtttgcagttatcattgagacaacgcttgatattgcaaacaactctggtcagaaggtgtggcaggaggttgagtttgtctttggctggatatatgtactggaaatggcactgaaagtatattca

SEQ ID NO: 197967 - DNA, 860 bp, Gossypium hirsutum
  unsure (1)..(860): unsure at all n locations
agttggtgaaagaattctctctttcttcaactgatctgttccattcacctgctggttttgtccagttgtctcttgcatatgctggattatctcctgaagtaatggctattcctgctatgcctagagatgtggctgctgatgaaactgtgaaggattcggaaacaagtgagtgtgagttggaaaagattgagttcccggatcccataatcgcgaatgagaaccagatgatggtttccgagtatatcgggatccaatgttctaatttggactctgaaagttccgaaagtttgggcacctctgatgctgagagtcaaattagttcagacatgggcgctcgtttaatggagagcttctctactgctacagtcaattccatccaagcccccaagctcgattctcctccgagcagcgtgtcaaccaacggggtttcatctccttcagctggtgcaagctctgagtccttcgatggtctggctgcttcgaagacttctactcaggaacacatttcagccccgaaagaaaaagctgtggatgttggagatgttgacagccattcctcaggggcacaaagcgattccatcgtgaaacctgttgtttccgttaacattgagcccgagcaaaagctggtgcagcaagacatagtagacatgtacatgaaaagcatgcagcaatttaccgagtcattggctaagatgaaactgcctctggacatcgacagtggaccgaccaaatcggagaattcaagtaccactgatcagaaaatacaggcatcgaanaacaccagctcccgagtgttctacggaagcagggcttttttctaagcttcctgatcctctattcaaaggaagacacacaggtga

SEQ ID NO: 197968 - DNA, 427 bp, Gossypium hirsutum
ctcactgtcctgcttctgctatgcgaatgctcggatttgcacgaataagggagatgctcagcgctggcatcactgtctccttgggcacagatggggcaccatctaataatagaatgagcattgttgatgagatgtacctagcttctctgattaacgaaggacgggaagtgtatgaaaacggagcaactgatcccacagccttccctgctgaaacacttctcaaaatggtgacaattaatggtgcaaaatcagtactctgggacaatgaaatagggtcgcttgagattggcaaaaaggctgacatgggtgttagcaaccctttctcatggcctatggtgcctattcatgattgcatctccaaccttgtgtattgcgtgcgaactgagaacattgtctctgtaatgtgcaatggtcggtggattatgag

SEQ ID NO: 197969 - DNA, 450 bp, Gossypium hirsutum
gttgttaagggtcgactttaagaccaggagctcgcccgtcaagccccaaaccaccaggcttgttgctgatttgaagtttcgaatgtcgaacgccacattgaactggatcgttattctcgatatgtccttctgaccgccgtgcgccttgttggtgttgaaaggattcggagtttctctcaccccttcattttctgccatatacctctgtgttcgatgagcaagtgctctacctgtcttttccttcctctcgtgaatgagttgatttctagaaaaccagattagccataaagcaatacaaaaaaggcaacattgttccccagttcctctcttgaaaacctagggcattgacgaaaaaaataaggactgtttcaacctaagaacggcaacagggacatctgtcacttgtagaaactcttcggtatctgagattagctagatgaaggatgaaat

SEQ ID NO: 197970 - DNA, 308 bp, Gossypium hirsutum
ggtgcaacctccaccaccaagtactgcaccagatatcctctatagagtccacattgaaagtccggtgttgtgctttagggacgaggaatccacatctcgtcaaaaggaacaactagctgtttaaggccttcaatttagtgtttagctctcaatgtcgtttcaattttggcgttttcttgtggatttccctttttttttttttgggggggggggtggttggatctcaaattgattatgcatgtactgatactgggagttgctttcttttttacagcctgcctatatacatatatggaagtctttttttc

SEQ ID NO: 197971 - DNA, 240 bp, Gossypium hirsutum
tcgctttcgcgtccggtcattagtttcttgagattagggtttgaagaagatgaagaaaaacaagtgtttcaaatgtcttttgtgggattgtagtttgttcacggtgtttagttgagtaggtagtctaggcttcttagtttaatgtgaatataatctaatcatcaatatctgttacttggtcaatagaagagctgtgacttttttttttcattaatgaaatgaatgctatatttcaatttc

SEQ ID NO: 197972 - DNA, 722 bp, Gossypium hirsutum
tacttctttgcattatttgaaaccatctcgaagctattaggatattcacggctaaactttgttgtcactgccaaagtagctgataaagaagccttgaaaagatatgatggagagttgattgagtttggtgctacttcaccaatgtttgatattttagccacccttgcaatgttgaatttgtttggtatctttggggcactcaagaaggtcatcttggatgtagatgaggacttacaggttttggagaaatttgggttgcaaattctcctctgctttgttttggttacaatcaacttgcctgtataccaagcactctttttcaggaatgacaatggcaagatgccaagtagagttacttacaagtctatgattttcgccatgctagcctgtactgcaaccatgtgtttttaaaaaaaaacacaagtgttgaagtttgattctttcaataagtttgattttatatattgaggtatatgagattctagaataaatgtgtcgttaagaggatcacaacaatttactagttgtatttaaacaagtaaatggttttgtcgaggagtgttgaagttggccagcatgctgcttgttgcaccagaaacagctcgagccagtgaagttgcagcagaagatcaagccactgtttcattttgttatttttgaattgatgatttgtaacttagttgaaaacaaaacaagttgtacctgatgttttaggtactgat

SEQ ID NO: 197973 - DNA, 711 bp, Gossypium hirsutum
agcacccactgttcccacctactccacacactccctctttttatttttctcggcggattcttcaaagcactttctcatttcctttctagatcctttctatctctccttttttttttttttttgcttctgtaagtctccgattcagatctttcgtcaaatcaaataaacaatgcaaagcgcagcgtattctttgtcttctccctgttcgattccatctctgaagccgcgaaaattctgttcccgcgctggattccaacctattcgcgtttcatcttcttttgccgctcctgaacggcatgaacattccgtttctttgcctaatagatcgtggcggctctcttcctcctcgtccttgccgcttagggcctggaacttagttccttccgattcaaaaccggatcgctttgaagttagagccaaggcggcggagagtgcaggtgaaggcgaaaagtcaggaagcctggtcaagatatcggagcttggtttgttgtttggtttgtggtacctcttcaatatctacttcaatatctacaacaaacaggttcttaaggtcttccattaccctgtaactatcagtgcagttcagtttgcagttgggacgataattgtttccctaatgtggacgtttaacttgtataagaggccgaaagttagtggtgaacagctagtagcaattgtgcctcttgctttggtgcatatcttgggcaacct

SEQ ID NO: 197974 - DNA, 435 bp, Gossypium hirsutum
cataaatacccttttaccaaaggagtatacattaaaacatagcccaactcttcgttttcttcaagcggaaaacagaaaactgaggctttcccttctcaaatggcaccgagggagaaaacggcggccgtcaagggtactgggaataataacgaggttcatttcagaggagtaaggaagcgtccatgggggcgttacgctgctgagatcagagatccagggaagaagagccgtgtttggctaggaacctttgatacggccgaggaagcagccagagcctacgacgccgccgctagggaatttcgcggcgccaaggccaagactaattttccggtcccttgtgagaatctcagcaaaggtaataactgtaaaagtaatggtaacaacaaccaccatagccctagccagagtagcaccgtggaatcctcgagccgtgag

SEQ ID NO: 197975 - DNA, 452 bp, Gossypium hirsutum
ctttgaggggcttgaagttcatgcaaagggcagctcagagagaggagaaagtgaaaaaggaagaagaggttaaacctgaagggattagtactattactagaaagggtgtggtgattatagaaggggatcctcgtcctggagcaactgttgggcggatgtcatttcgaagtttcaatccttctattgataaactgaatgaagaagcatcaaatgtgtctcagccggatgcctctggtggaagaactttgtctagtgaaaatggatctgcatctgaagcaactcactcaaaagttggcactgataaacacgaaggtaatggagaccttaagagaaaacaatctgtcatggtttctgaaccagagtatccaaataaatcaccaaaaaatggttatggcattcaatctacccctagcagcggtaaagcctcatccaaaaagcagtcaaagcgcgag

SEQ ID NO: 197976 - DNA, 570 bp, Gossypium hirsutum
  unsure (1)..(570): unsure at all n locations
ctcctctcaatactcttctcaaatgcatcttgagcatcggttttccgtcctgtcataggtgtatccgataacgtgccaatagagatgctcaagatgcatttgagaagagtattgagaggaggttaaggagaaagatcaagaacagggaatccgctgcacgatcacgagctaggaagcaggcttaccacaatgagctggttaacaaggtttcacgattagaagaggataatctaaagctcaaaagagagaaggaatttgatacaaaatctcagtgtgaaacatctgaaacaaggtatcagcttagaagaacaagttccgcctctttttaactcgtgttttccgctgttttaagctctctagttggcttgttgacagagcttcgttgtgaattcgttccaagggtttggcattctgtacatttatgattatcatgtgttggtttttaccttcctctgcnnnnnnnnnnnnnnnnnnnnnnnnnnnnnnnnnnnnnnnnnnnnnnnnnnnnnnnnnnnnnnnnnnnnnnnnnnnnnnnnnnnnnnnnnnnnnnnnnnnnnnnnnnnnnnnnnn

SEQ ID NO: 197977 - DNA, 489 bp, Gossypium hirsutum
gcgtcatcgtcccgtttttatcaaactcgcaccttggccttaacacgttaatgggttgcatgcacactttgaatgctatgttccttatcctagatacccttcttaatagccttccatttccttggttccggcttgcatatttcgttcaatggagctgtctgtatgttgttttccaatgggttcttcatgcctgcggttttacatggtggccatatcctttcctggagcttaatacgccatgggctcctttatggtactttgccctggccctggttcatatcccctgctatggaatgtatgcacttattgtaaaagcaaaaaaattcgatcctcccaagattgttccctcatgcttttgttagatcatactagttttatttctttgtttcagatcaactggttttgtttatggtaaattctgttttggatgtatgctttctttctttttctggcatatgaagaaggggatatcattcctcagattcattc

SEQ ID NO: 197978 - DNA, 566 bp, Gossypium hirsutum
cttgcctgcggctacttatcgcaatctctgcttctttccaggctccactcaacctcgatcgaggtcaaaggaaactgcttttcactgtaatccaaatccattccagactccaatttgcttgtgttgtaataacataaagatgtctactgaagcaccggccaccatggagatcgaaaccgtgccttccgagcctaaacccgagtcaaatcctttacccccaaagccaaaatttgagcctcttaaggcacacgagatgtcagacggtcgagtgcaattcagaaaggtttcggttccacctcataggtattcacctctcaagaaatactgggtggatatctatactcctgtttatgaacaaatgaagatcgacatccgtatgaatctcaaagctcggaaagtcgaactgaaaacacgacaagacacgcccgacattagtaacctacaaaaatgtgcagattttgtccaagctttcatgttgggtttcgatgttccggatgccattgctcttttgagattagacgagttatatgtcgagtcgtttgaaatcaatgatgtgaaaacactta

SEQ ID NO: 197979 - DNA, 744 bp, Gossypium hirsutum
cctctcttggccttttttttaaaagagaatgcagagaatcatagcagtggtgttgtttttattttgcgccacttctcaattggcctcttctctcaatgatggctatgttgagtacatcaaatcaggtcaaaaacaaggtgacatgttgctaatagtacctgaaggaggctttgcagttaggttaggcaatgaggcattgatcaagcagaagattaaggtgattaaaggtatgttttactctctaaccttcagcgcggctcggacatgtgcacaagaggaaaagttgaatgtttcggtttctctgaactacgagaaaaacgactttggtttgttcccaattcagacgatgtatagtagcaatggatgggattcgtatgcgtgggcattccaggcttctgagtctgtaattgagatctcgatacataatccgggtgtggaggaagatgctgcttgtggccctcttattgattccgtcgcattgaagaccttgtaccctccaaaacgcacccgagtgaatctactaaagaacggaaatttcgaagaaggtccttacatcttcgcaggaccaatgtccgaaggtgtcataattccaccccacattgaagatgatcacagtccattacctggttggattatcgactccctcaaagccgttaagtacatcgacagcgaccacttcaccgtccccaaaggcaagcgagcaattgaactcatcgccggtaaagaaagttccctctcacaagt

SEQ ID NO: 197980 - DNA, 383 bp, Gossypium hirsutum
cccacgcgtccgcttttccttccctttttctttctttcctctcttggccttttttttaaaaaaaaatgcagagaatcatagcagtggtgttgtttttattttgcgccacttctcaattggcctcttctctcaatgatggtttgttgccaaatggaaattttgagtatgggcctaagccatcggaattgaaaggaactaaagtaatgagccctaaagcaataccgaattgggaaatttcaggctatgttgagtacatcaaatcaggtcaaaaacaaggtgacatgttgctaatagtacctgaaggaggctttgcagttaggttaggcaatgaggcattgatcaagcagaagattaaggtgattaaaggcatgttttactctcta

SEQ ID NO: 197981 - DNA, 527 bp, Gossypium hirsutum
ctctctttccctttttgcagtttccattgtttctgtggctcaacaatcaaacatgaattgcgaaaggaaaagcaacattggggcttggtgagatatcaattttatccaacaccttgtaccacaactttcaaacttaactttttcttttcttttctttttttcctttttgtttttctttttatggctgccactacttctctatctctactgccttcatctcttggttttccaaatgaacgcccttccagcacttcacaatcctcttcatattcttgttcttgttctgttttcttcaatgctgggacccgtctcaggtcccacgacagcttcgcttgtgtgacttttccttcttcttcctctacatgttattggagattcaataatagggctggtactcaccggtttgggaccacggtggtggctgcttctggggactattatgctactcttggcgtacccaaatcagcctccggtaaagaaattaaggccgcttatcgtagattggctcgtcagtatcatcctgatgt

SEQ ID NO: 197982 - DNA, 606 bp, Gossypium hirsutum
  unsure (1)..(606): unsure at all n locations
ttccacgcgtccgggggactccatccttgattcattctctttaagccctttgccttatcctgttctgttaatcctagcagtgacatcaatatttcttgggatatcatggtatgtgaactatgaatcagttctggaaaccactgaagagcaactgagttgggttcttttcgccacaccagttgtgttgatactcttggctcgttgggtgtcatctatggatacttccgatatgttatttggttcatcgccatgggaacgtcgccgccaggctcaccagcgtccttccgagggtagctcaccttggattgtggctgctttcattgtgctgctgctgattttggtacagtatcagtcagtttttcgcgagagctggctggtatgatactgtatatgtgtttagatacatgataaaaactagttgtgaatttcttattttggttggtttttaggtgtttgatatgtgatagactgaactgggtttgcctttatcagatgaagtataagcatgtatgatagttttgtattgtaaataacattgcanaacacaaaagaagttgcttgtttaacacagagtatctcatggttttaaataatntctaccagaaa

SEQ ID NO: 197983 - DNA, 409 bp, Gossypium hirsutum
gccacgcgtccggttcgaccgcgaaccggtgacttttaacggtatgaccacttggttgggtcccaaaacatatggagatacgcgggtcaaacatctcgcatataatcttagaaaaacaaagatgaaaaaaacaaaaaatgaagctgcaaaaaaaaaaagaagattggaatacccagattctgactttgttgtgatcggcgaagctgtaaactcaaatgattggacgactcaaatggatgccccttcttgtactgagtgcaaagctttgtccttcaggtattgaaggcgcatgctttgccttgctcatgtcgattgataactttggacttccatcatcctcatggggaggaggcttgctgcttcacacgttggacggtactcgaaccaaattcggaaatctttggctggc

SEQ ID NO: 197984 - DNA, 989 bp, Gossypium hirsutum
gaaaaataatcagcattttgtgtccaatcacaacgacaaaactccgtggattgagcaataatcgccatggcaacttccgtgaagaacaactcactacctccttctttgatctcgaatctcaatcaagttcttttatcacgacaacaacacaccattgatcatcaatccacccactcctcttcattaccttcccattcacgcaatgtcgacgagccagattgttctaaaccactgcttctcatcaccaattgcgaaggaatcgattcaccaggactcattttcctcgttcaagctctgctctctgacgctcgcttcactctccatgtctgcgctcctcaatcggacaaatcggttgccggtcattccctgacggtgcgagagacggttgcagtatgttcagttgaaatgagcggtgccactggttttgaagtttcaggaactcctgtggactgtgtctccttagctctgtctggagcattgttttcatggtcaaagcctgttttggtgattagtggaattaacagaggatcaagctatggtcgcaacatgttctactcaggagctgttgctgcagctagagaggcattaatttgtggtgtgccatcactttgtttatcattcaactggaagaaagatgttagcagtgaaagtgatttgaaaaatgcagccgatttttgtttgcctttaatatcagcggctgtaagagatattgagaggggaaagttcccagaaagttgctttctgaatatagaaatcccatcttctcccctagcaaacaagggattcaaactgaccaggcagagcttatggaggtcacctttaagctggaaagctgtatcagcaaataggcaccctgctgcaggccaatacctgtcgaatcagcaaagtcttggtattaaacttgcacaacttatccgggatgcctccgctgccggtgcagcgaggcgcttgaactcgcataggaagaatgttgagattgaatctgttgg

SEQ ID NO: 197985 - DNA, 773 bp, Gossypium hirsutum
agagaactgctgaatctgttgctgttgctgctaacggatctagtcaagttgtggggtggcctcctatcagagcttatagaatgaatagcatggttaatcaagcaaaagtgctgacaatggagaaccgcaaaaaggagacctcgatggtcgagaacagcagcatcggcggctatcgtaacgatggtaacactaagctgaagaaatccacgtttgtgaaggtgaatatggatggaaccccaataggaaggaaggtcgatctgaatgcccatgaatcgtatgaaaagttagcgaaaacgttggaagatatgtttctcgaaaccgccccgagtgtcaatccatctggatcaacggcgctgcagcttgatatgttgaacaggatgacaagacgctcgaaactgctggatggatcatccgatttcgtgcttacttacgaggacaaggaaggtgactggatgcttgttggagatgttccttgggagatgttccttacttcagtgaaaaggcttaggatcatgaggaaatctgaggcaactggattagctccaaggtaacaagaaacaaaaccagagacagagaagaaagccaatgtagaaatgtttttttgtttttggtttcaatgtcaattacagtgttgaagaaatatagtcaccataggttatgaatgtaatatttaatacaaataacagctagtgagagtgttgttctttgctttgatgcctgtaaataaaagcggcaagtttgttgttgttgtttaaaaaaaaaaaaaaaaaatt

SEQ ID NO: 197986 - DNA, 468 bp, Gossypium hirsutum
ggaagaggaggatcttgtaaatgctcatagaaaacaggtggagactatgaacattgtcaaagaggaggtgaacctgctggttgaagcagaccgacctgggaagcagcaggacggttatatatctagactgaatgctattttttcgcagaaggctgacgacgtcgtgcagttacaaacacaatttgctcatttcgagaagctttacaggagcagaacattttagtgtcttgttctggctattggtgttcagggatgaagagtagtaagccagagtggtgcaaccatgggtttgcttgatgattcactgattgccattcaacacccttcccttctttcttttaaattatatatacagccttcaagcaataggcaaaggaagtgatggatttacatgctattgtaaagttcagcagcattgtgattggatgcattatttgaatatgtcacaccatctttattttatgtaaa

SEQ ID NO: 197987 - DNA, 794 bp, Gossypium hirsutum
cttctggatgcacagcctgtgttgcaataattcgaaacaagcaactagttgttgctaatgctggtgattcccgttgtgtaatatctagaaaggggcaggcatataatttgtctaaagatcacaagccagaccttgaactggagaaagataggattctgaaagccggtggttttattcaagtcggacgtgtcaatggaagtttaaacttggccagggctattggagatgcggagttcaaacagaacaaaagtttacctgctgaaaggcaaattgtaacagctaatccagacatcaacactgttgagatctgcgatgacgatgagtttcttgttttagcttgtgatgggatttgggactgtatgtcaagtcaacaactagtggattgggtacgagagcatttgaactctgaaactaaactttcagcaatctgtgagagagtattcgacaggtgcttggctccaacagctggtggggagggatgcgacaacatgacaatgattcttgttcagttcaaaaaacctgttggttcaggtacttctttgagcagcacccagcattgaaagatcgagcacccacgaaccaggtaaaacgtacatttggattttggaccttaagaagcattagtctcttctcccaagcaaacacgtaatgaatattacactttcttattatgtaagtgatttgcggtttatgatttgtaaatgatccaaggttttttatttcgcgactccgctatgtcgggtttttcattttgtaaatatggtggtaattggtatgtttttcctttgaaatgt

SEQ ID NO: 197988 - DNA, 399 bp, Gossypium hirsutum
aaaagcccctcaaaacagatcatccaattagatggaggagcaggatcgatcctctcaaccccgtcctccacatgtcctcatctgccccctcccattacagggccatataaacaccatgattaagctggctgaactgctacctatcgccggcttcaagctcactttcctcaactcccaccacaaccataaacgctcggtcagggtcaacaatattgctgcccattttgaaagatacccagggttcgaattcaagaccataaccgatggtctccctcttgatcatcctaggtcagggagctggttccttgatatgtttgaagaaaccatggaacctaagatgaagcaaagtttgagagaggtacttgtgaatagcagcccaccagtagattgcgtaattgc

SEQ ID NO: 197989 - DNA, 559 bp, Gossypium hirsutum
gagggaccaagttgaacctcataaaccctctgttgtcatacgcccaccagcagataaagataaggatcaacctcaaaaaaaaattataatcaagcgaccgaacgaagttattgatttggatcaacttagtcaagagggaggcacttatcccgagtacaggaagacaaaattaaatagttgaattgtcaagctttgagaagcatgggaagcaggaaagcttgcgattaatggagccaaaagcaagacggaaagctaaagaggagagaagatggtgggaagaggaagagaagaggagaaatgtggagagaataagagaagacagggcaaggaagctttatgaggaagaaatgagactgctggaagagcgagaaagatttgctgagatcacaagatacactgaagacattcgaagagagagggaggaagaggaacgccaaaaagcaaagaagaaaaagaagaaaaaggctgaaataaaagaggattatttagaagactacaggacaagaagaaatgacagaagagcaccggaaagagatcgaggtgcaaaaaggaaacctgt

SEQ ID NO: 197990 - DNA, 969 bp, Gossypium hirsutum
tgattaagctttctttctaaatccctctttagcaaggactttggaccgaataccaaatttctgggaaaaatgcagttttccaggaattttatgataatttgttctgcattgctcctgtgctcttccttgacatatgggcaaacggctagtccaccggctccggtggcaatgaccccaactccgacacctgcaccggctccggcaccagaatacgtaaacctaacctatttactctctgtggctggtccatttcacactttccttaactaccttgaatcaactaaagtgattgacaccttccaaagccaagccaacaacactgaacaaggcattacaattttcgtaccgaaagacgattcgttcaagggtcttaagaagccgtcattgtccaatctcagtgatgatcagcttaaatcgctcatccttttccatgccttgcccaaatactatgcccttgccgacttcaatgacctcagtacaaaaggccctatcactacacttgctggtgggcaatacactttgaatttcaccgatgattccggcactgtgcacctcgattcaggatggagcaaaacaaaagtagccagcgctgtacattcgaccgatcccgtcgcgatatatcaggtgaataaggtccttcttcctgaggctatctttggtaccgatatacctccaacgcctgcaccatccccagctcctgatattagcccagctgcggattctccatccgcagactcgaaagaaggcggttctccgtcgaaggctttgccatcggattcagcttctcatagggttatgaagttgagcatttggagtcatctggttttggcagtcttaggtgggttggttctgcttttctaataataagacttcattttgagtcttaaagttatgttcatggggggcagcacacctctgagtttctcaattgaatttacttcgattataaaaccattttttcttgtatat

SEQ ID NO: 197991 - DNA, 492 bp, Gossypium hirsutum
gcgcgagatccggcaaattgtcgtcggatttcgtccatttgtcgtcggggttcgatagtactctctctctttctaagtttctaaccgccggagtagaaaggaattatcgaaaaatgaagggatctacacatgttgtcgcgactttgctcgctgcttccacggtggcgctctcatcatcttcctcccccggaatccacaatgtttcatttcctcctacctcttccgaccaggggacaagaaatggtgcgtcgaggaatttaacggcgacagagcgggagaatttcacgccacgatttgatgggttgagattcatagaaacattgatcacagctcacagataggacgagatgattaggcacacaaaataccgtcctttctctgcgtttattaattagattttatttattttgttgggtaaaattttaattgttacatattgaagtaacgtttttcttggtattgtttaataattcctatcgttttttgtttttg

SEQ ID NO: 197992 - DNA, 431 bp, Gossypium hirsutum
tgtttatgccgagatgaggggtattgagatggaggaattcgagaaagcttcgattgtaggggctgaaaacggggtgacattgaaattgcttgataccactaggatgtcaatgttgcggcctgacggtcacccgggaccttatcggcagtttcaaccctttgcaaaggataaaaatgtcaaagtgcaaaatgattgcttgcattggtgcttaccagggcctatagattcatggaatgatatactaatggagatggtaattagaggggcacattaataatttagccattttgtgggggactggagttgccaaaatgcttttatttttttttttgtttttttttaattttaaatttttgttgagaaggaagggatcatggtatccaagttgcttgtaattacttatttttttaacatcaccataaggtcctatt

SEQ ID NO: 197993 - DNA, 473 bp, Gossypium hirsutum
tttttattttggcttttgacgtcaaggtgaccccgttggctcgagaactagcagatgaattgggtgtgaggatgaatattgctgatatcatttatcacttattcgacgcaattcaaagcatatatggatggtctcaaagaggagagaaagagggaagcagcggatgaagcagtcttcccttgtgttttgaagattttacctaactgcattttcaacaagaaggatccaattgtcttgggggtggatatccttgaaggcattttaagggttgggacgccaatttgtattcctcaaagagaattcattgatattggtcgaatagcttcgattgagaataaccatagaccagttgattctgccaagaaaggccagaaggtagccattaagatagttggatccaataccgaggagcaacagaaaatgtatggaaggcattttgagcttgaagatgagcttgttagtcatatttctag

SEQ ID NO: 197994 - DNA, 616 bp, Gossypium hirsutum
  unsure (1)..(616): unsure at all n locations
gctgttgccttcaagctccttaccggcacatcttcttgttcaattgccggctgtccatttagctcagagactcagtgagtctaagcaatcataaaaaaaaccaaaaatggtggccgagttgaagtacgagatctcacagaacgcttacataaaattggttctacatactctgaagcacaagaccacggcggtcaacggcttcttactcggccgagtcaacccacaaaaggatagcgttgttgagatcgctgactcagtccctctatttcactctaatcttgccttgttgccttccctcgagatcgccctcatcatgatagaggagcattatggatctaagggcttgggaattgtgggttatttccatgcaaatgagagatttgatgatgcagagctaggcattgttgcaaagaatataggtgaccatatttgccggtacttccctcaagctgccattttcttgttggataacaaaaagcttgaagctttgcccatggggaaagaccaaagccctgtgatgcagctttacataagggatgcatccaagaattggaaactggctggaccggatggaggcanccgatttgtaattaaggagccagcggctaatgctgta

SEQ ID NO: 197995 - DNA, 452 bp, Gossypium hirsutum
tgagacggggggtgatgctgctgagtttattcttcttggtgcaggtactgtccagggctgggctggtgttatgatgcatggctatggccttgtgaagaaactctgtgacgagctcaaggattttatgaagaagcacaatttcaaatcaatagaagatttcagaggggtttcccttcagtattttacgactcatacggatttagtgcggaggcagcaagaagcaatacgagagaggaaagctatcaagaaaggtttgcagtccgacaaggaatggaccggagatggcttcgtgaaagagactgagagcatggtttccaattaattgcagtaccaaagtgagccttctccagcgaatagtgaaaaacagatggtttttagttatgtttggttgcattgtagaaatggttaatcatctgaatgattgagggtgccgatgtaaaaactaaagcttg

SEQ ID NO: 197996 - DNA, 333 bp, Gossypium hirsutum
tgatcgttcagttcgcgaattttacttgtaatcaagcgttactcgaggtttgcgaagggtgtaataggctgcatataatcgatttcgatgttggttatggtggacaatgggcttctttgatgcaagaacttgttttaagaaatggtggtgcaccttctatgaaaattactgcctttgcttcaccttcaagtcatgatgatatcgaactcggtttcacaatcgaaaaccttaagcattatgctagtgaaatcaacatggattttgatatcgaaatcatgagccttgaggccttgaattcgggttcttggccgttgcctttgcacttgggcgaaa

SEQ ID NO: 197997 - DNA, 895 bp, Gossypium hirsutum
ggacctgcttactcgagcaagatgaacaggaatggcatcagagtaagtgacttgaggcacatggatactttccctcaaaagcttcataatctattatctgacgtgacttcaaggttcccggattttaattatactccagaaatgctcaaagaagaggttgaaaactacaagagatatgccgagaggttggagcctttcattgctgatacggtgcacctaatgaatgaatcgattgcacagaagaagaggatattggtggaaggaggccaagctactatgctcgacattgatttcggtacttatccttttgtaacttcctccagtccatcagctggtggaatctgcactgggctcggtattgctcctagagttgtgggtgatctaattggagttgtgaaagcatataccacaagagttggctctggtcctttcccaaccgaaatccttggtcaaggtggtgatatccttaggtttgccgggcaggagtttggcaccacaactggccgccctcgtccttgtggttggctcgatgtaattgctctcaagttctgttgtgagattaacggcttttcttctctaaacctcaccaaattggatgttttatctgatcttccggaaattaaattaggcgttgcttataaacatgttgatggtacaccggtggaatcgttcccagctgatcttcagcttctcgaacagttgaaggtcgaatacgaagttttgcctggatggcaatccgatatttcttctatcagaaattattcggatcttccgaaagctgcacgacaatatgtcgagaggatagaggaacttgttggtgtgcctatccattacatcagtgtcggacctggtcgtgatgctctcatatacaaataaataatcacttttttttttt

SEQ ID NO: 197998 - DNA, 753 bp, Gossypium hirsutum
ccacgcgtccgctaaatcgtgcacttttcaacctccttccatgacctttgatagaaaggggagtgtttcggttgttaaccactatgcggttatggtatcatgtcgctgcaactacgcggaatcaagattgtttttcaagcagccaacaagttggagaccacgagtttcaagggatcttatgatctctgtagcatctgagatgtcaggacaatattctggacccaatgaaggaatcactccgcttccagttcaggttttaactcttcaggcttcaaatttgtctgatgaagatctaactatgacagttcttgctccaacatccttaacctcacctccatctgtggtgtccttgagttcttctccaacaacaccaatgagcccatttgttggtttctctgagcttgcagggaaagcgggtggtgagaggcgcactgctgtacataaacttggctcaatgcccagtctatctgagaatcaaaaacaggatggtgatgctggggctaagtttacttcttccaatgcgcagttgactccaaccgctgatttcattccaacttcgggtttgggatgtactcatctctggctgcagagtcgagtaccactaggatgtgttcctgctcaatctacggctaccattaagcttgagctacttccgttgactgatggcataatcactcttgacacattacagatttatgttaaggagaaaggtcttacatatatccctgagcactcattgatgataaatgcgac

SEQ ID NO: 197999 - DNA, 726 bp, Gossypium hirsutum
ctctttggttcctattgtcggaggaattctgctaacatctgttacagaacttagttttaacatgtttgggttttgtgctgccttatttggatgtttagctacttctacaaagactatccttgctgaatctctactgcacggatacaagttcgacagcataaacacggtttactacatggcaccttttgcaaccatgatcttggcagtcccagcactgttactcgaaggaaatggggtaacggattggtttcatgctcaccctgccccgtgggcagccctcatcattattttcagctcaggagtgctggctttctgtcttaacttctccattttttatgtgattcactcaactactgctgtcacgtttaacgtcgccggaaacctcaaggtagcagttgccgtgttgatttcatggctgatattccggaaccccatctccggtcttaatgccgttggctgttgtatccccccgttggggatgttctttttacggataacttgcggcaatatcctctcttcaccagactcccaggaaccaccccgggacacctccggacacctaggagagatgaatggaactacttcccccttgttaaattaatgacaagtcagatgagtaggggtggttatgtattttattacctggggtcgttggggtttggagacagggataaaacacatatggcatattttgcagaggatgctctgagttcccatgtgaggatt

SEQ ID NO: 198000 - DNA, 395 bp, Gossypium hirsutum
ggcaggatttgtcaaagaatacatggccgtcgatgatgttgtaggaactgaattgcacactggtgggaaccgattcacaggcttgttatccagctccggtttgctggtaaagcacaaagctttaaaggcatactttggtgataaaaagccagatgttggcctcggaagttcaagcctgcatgaccatcactttatctccctttgcaaggaagcctatgtggtgcacaaggaagatggtagaaacaatcaaagttgtttgatgccaagggacaagtacccgaagccacttatatttcatgatgggagactagctttcttgccaacaccatttgcaacactttgcatgttcttgtggcttccatttgggatagttctcgctatatttaggattctgg

SEQ ID NO: 198001 - DNA, 419 bp, Gossypium hirsutum
cctctgtcttttttccccctctatttctctttcaatctttgttacacaaattatctccaaagcttgaaaatgaagaaagtggtgctgaaattggattttcacgacaacaaatgcagacagaaagccatgaaaacagcctctggtctttcaggggttgaatcagttgccctggacaaggaccaaaaactcacactcacgggagacgttgatccagtcgtggcagtaaggaaactaaggaaggtatgttacactgaaatagtctcggtcggaccggcgaaagagccggagaagaagaaagatgagcccaagaaagacgaaccggaaaaaccggcgggtgcgagcaaagatccgcccaaaggcgcggtggttcagtacgtttatcacccctcaatgccccagtactacccgccggtacccga

SEQ ID NO: 198002 - DNA, 712 bp, Gossypium hirsutum
  unsure (1)..(712): unsure at all n locations
agaagatgctggcaaaccctccagagagagctgggacagtaaactggttaatacatgcgggtgttgaaattttggtgctaagatgtctgacgtcatccaaagaaagtgcaaaaatgtgattagcaagcttcagaggagaatagataaggagggtcaacatatagtaccacttttgacggacttgtggaagagaattgaagactctggttacacaggtggaagtggaagcaatcagttggatttccggaagattgatcagcggtgttgaccgattagagtacagtggagttatggagcttgtttcagaggtgcagctagttttaaaaagtgccatgcatttttacggtttttcacatgaggtcaaatctgacgcatagagtgcacgatctgtgtttcgacattgttgaagatagtatttacagatacagatttccggaagctagaaattcattatctttcttcagtccagcatctacgtccacctcgggtccttctttagacaggtagctgttggcaagagacagaagctgatgacgatgtagaatctgttcatgcttgcttcaaaagtcgtccacaacctggatcaaccatactggtgaggaactaggatataatgcantgcgccaaagaatctaggttggaatggaatacctggaacctttaacagtgatcttttcactatcggggacggtcctcactaaaaagaaaaggg

SEQ ID NO: 198003 - DNA, 389 bp, Gossypium hirsutum
caaaaatgctgcatgtgagggttccttcaagtccttttgcctcctgaatgcatggggtgatctcatgatgcttccatctgagatgcttgcggataggtccacaggaaaagagccccaagttcagcgtctccctcatcatcagggttcttaacgattttgtacctgatgagttcaaccctaatccagcttcacaggccgtttttgaagcattggaaaaggatctttctgagggtggggaagagtctatcacaaactatccatgtatggctactcctattgtctattcgccaccttccgcaacttccataaccaacattataggaagccaagtcatggaaaggagtaagtcattggtacttagaaaatcatacactagtgatgatgagctt

SEQ ID NO: 198004 - DNA, 425 bp, Gossypium hirsutum
aattcatcataacgtaaaagggtttttcgattcacaatgggagaggtcagttaaccaccaatttattctcatttcccccatctcttttaatctcgttttattttttttttgccgttccatttccttctatttctagttcatgacttacaccagggatttaaattgcggtcgcggtcgcgttttcggtcgcgtcgcgtttgtcgcggtcgcggacataacggactcctattgcggtcactgcggtatcgcggtcgtgaattttacattacttattgtgtattgcgggtatagcgggtttcggcagtaacggtttcggacggtgccgttaccgctatataacggccgctatttcggtaacggaccgctatttaaatccctgacttacacaccatctctttatctgggatctttattgcagaaaaaga

SEQ ID NO: 198005 - DNA, 296 bp, Gossypium hirsutum
  unsure (1)..(296): unsure at all n locations
gtcgttgtcatcctttccacggagagccaaggtaaatttttgctgttgataattcttacatgggaagtgtgggataaaaataatacttgtgggagacagacttctaaacgtatgcatttgaaggagaaattgaacaatttcatttcctgattgcgaggtgtaaaactagaaatacttggtctgttgataatggtatccagtggaatcctatatgtaagttggggttaatattatatattggttattaatgttaggccgncccnnnnnnnnnnnnnnnnnnnnnnnnnnnnnnnnnn

SEQ ID NO: 198006 - DNA, 449 bp, Gossypium hirsutum
aatgaccacatttctgtttttttttttccattgaacaaagcttgaaatcttaaaaccttcccaaatccccaattccatgtcaagtaaaatcatcaaaacatagaaaactagaagaatcagagaaaaccaatgacggtagcggctgggatcgggtacgctttggtagcgttaggaccgtctctctcccttttcatcgcttttatctccaaaaagcccttcttgatcctcactctcctctccagtacattggtttggcttataagtttgataatattatctggaatttggagagctttccttcctttgaattcaacaacatggtggccttttgcaatacttatattctcatcaattgcttttcaagaaggtcttcgccttcttttctggaaagtttataagaggttagaagacatattggatgcttttgctgatagggtctcaaagccacg

SEQ ID NO: 198007 - DNA, 430 bp, Gossypium hirsutum
  unsure (1)..(430): unsure at all n locations
gacccacgcgtgcgcgggtgttttatcctcccttatattatccgtgtcgatctctaccaacacccagctcgacatggtcagttggaactttcacttttacagttacaggtactttagtattgttattggtgttgaaaagtgttttctagaaatgaaaatctattatattttactgttattttttttattctgttttcgttcttattgtaccataaaagttcgtaacaagattaatatactattggttatctgaggtttttaaaatataatattgaattttaatttaatggttatttatatataattaataaatttttaaannnnnnnnnnnnnnnnnnnnnnnnnnnnnnnnnnnnnnnnnnnnnnnnnnnnnnnnnnnnnnnnnnnnnnnnnnnnnnnnnnnnnnnnnnnnnnnnnnnnnnnnnnnnnn

SEQ ID NO: 198008 - DNA, 696 bp, Gossypium hirsutum
  unsure (1)..(696): unsure at all n locations
tcgtttagattctaacaatgctacttgtaatggagatacatctgaagtgcagatgacgaaagtttttaaagattccggtaaagatgccgagtgtatcattgatgtagaagatggtgaaagttcaggaaggtcaaatgacgtaagttgtggactagagagaacaactggtacaagaaaaacatggtgttcaccaaatcttggcacattgaacattgtaatcgccgataaatacaatgataggaccaaaaccaggtcaggcatcgagtccacacctaaagaaaaaggatcaaagcctttcttccgtaagcaaaggtgtggagatcttcctcaggccaaaggtgcttttaatttattctatcagcgctttggctggatcagtgggtgattgagacatctccaaagtccggtgcacttgcaatttagttgctcattgcaacttacacttgctttactgattgctatttttctatttgtgccttttgtgctttattcgagttgagagcaagtggctgtcatgtgctgttgatcaagagaggtgttgtatctattcccccagggttcggattccctttggaggcatacattgcgagctttaacctctntccctgtcattttcaagatctgggtgaaacttcatctcgagctaagcttgaacaagaaaggttggttgccatcttcattgctacactgtaaatg

SEQ ID NO: 198009 - DNA, 1362 bp, Gossypium hirsutum
cccacgcgtccggttcctcttcttccctctcttttgtttgtctaaaaacagttgcttccctgcttgatttcgttgtcatggacactcccacccctctcttctccttgctttgtttcttcctcttctccctcttcttaggtgaggagcaacatgttgttgaagggtcaagggtgtggacctttggtttcagacccaagatgttgtttgtgttcggggattcctacgctgatacagggaacaacaggaaagctttggcaagttcctggaaacttccttatggaattacattccccgggaaacctgctggccgtttctctgatggtcgtgttttgactgatttcatcgctgggtacttggcgattaagacaccagtgccctacagatacaggaaagaactggggggtcgtctcaagtatgggttgaactttgcttatggaggaaccggtgttttcgacacgccagctcctgagccaaacatgacaacccagatcgatttcttgcaacagcttctcaatgactcggtctaccccaagagggccttgaaaacttctgttgcgcttgtcagtcttgcaggcaatgactactctaattacattgccaccaacggctctactgcgggatttccagtcttcattggaagggttgtgaaccaaatgaaggtgaacttgaaacgcatccataacttgggagtgaggaaaatagcggcgagtgcactgcaaccattggggtgcctccctcgaagcactgcccaattctcctttgagcaatgcaacgaaagtgaaaacgccctcgttggtctccataaccagctcttggctcaagcagtgaacgatctcaacaaagaaaccaacagctcctctttcttcgttcttgacatgtacaatgccttttggaacgttttcaatcaaaaacaagctcatcaagtgagtccaacatttgtgaatccatttgagccctgttgtgttggagtgagtgccgcattttcatgtggaagtgtagatgaaaatggtgtgaagcaatacacactttgctccaatcccaaatccaaattcttttgggatacagttcaccctacggaacaaggatggcgagctgtttactcaactccagctcttcaaagcagtctcaagcaattctggtagacattaccatgaaatgcttaccttttatcactttatgatgtttttacatttagtttcttggtatctgtcaaatcccttcgtgatctctttattcatttgtgctggtcaaaagttgtatgaaatgaatggaatattaataataaatgttcttgtccaatgctactcctatttggttttatgtctgttgttataatgttaagttattttattcttttttgtt

SEQ ID NO: 198010 - DNA, 412 bp, Gossypium hirsutum
  unsure (1)..(412): unsure at all n locations
aaaaaagaatcaccccatgggatcaaagagcaagaatctggttctgggttttgttgtcttagctgtattcttgatttcaggtgtaaaatcttggactggtgagattcacggtagagtagtctgtgatgtttgcgctgattcttccattggtcctgaagatcatattttagaaggtgctgacgttgctgtactttgtattacaaaatctggtgaagtagtaaattaccaggctttcacaaacgccaaggggatatacaccgtggccgaaacaatgcctgagagtgaccgttggaatacatgcttggcacgaccgatcagtagtttccatgatcactgcaaccatcttggggatcgcagcacccgtatcaagttcacctatactcgcccatcangtcatttgcacactgtcaga

SEQ ID NO: 198011 - DNA, 487 bp, Gossypium hirsutum
cttatgttcttactttcttccctctgaaaccctaaaccgccgccgccgccgccggccgtcaaacgccgacgaaaatggctttcgagggattagttctccgcggcaccatgcgagcccacactgacatggtcacagccatcgccactcccatcgacaactccgatatgatcgtcacttcctctcgcgacaagtccatcatcctttggcacttgaccaaagacgaaaagacctacggtgtcgctcgccgccgtctcaccggccattcgcactttgttcaagacgttgttctctcttctgactcccagttcgctctctccggttcctgggacggtgagcttcgtctttgggatttgaacgccggaacatccgctcgtcgtttcgtcggccacaccaaagacgtgctctccgttgctttttcaattgataaccgtcagatcgtttcggcttctcgtgatcgaagcattaagctctggaacacccttggaga

SEQ ID NO: 198012 - DNA, 350 bp, Gossypium hirsutum
  unsure (1)..(350): unsure at all n locations
cgaccacgcgttcgggaaaaatctntacagaggcataaggcaacggccgtggggcatatgggcggccgagattcgcgaccctcgaaaaggggttcgtgttagtgggcactttcaacactgccgaggaagcggcccgcgcctacgaccgtgaagctcgcaaaatcaggggcatgaaagccaaggtcaatttccccaacgaagacgactccttctccaccccgtacaatctgaaccgttccacgcccaattcgaacccctgcgtttatcaacagcatataaacagtaactatggattcaactacgatttgaatgaaatcggagggtacgcaactgacccgatcgtatatctg

SEQ ID NO: 198013 - DNA, 735 bp, Gossypium hirsutum
  unsure (1)..(735): unsure at all n locations
tagacttaaaatatgatttctttgctcctaaaatatatctgaggggtcatttttagttaaatactagttaacttaggggcaccaaggaaattttaggttacaatgtttggctagatgagtagaaaatgctaataattgccttctattaagcgtataaagcctagtttaaacaaactattatcagatctgaacttgtaagatatggcagcgctttttggaagtctttgatctttctttaaaatatttgcaactggcaaggtatgcgaccctttgcatccgtgagacccagggttgtctttttattgctacaaccgtgtttcagttggacacatgactgatctgcaagagtggcctggtgcgggatgcatggttgctgccgtttgtcgggtcaacggaacaagagcctattggtagttggaaaaccttcaacctcatgatggactttntactgcagaaatnaatggtaagtacatctaaatgtgcatggtgggtgatagactagatctgacatttatttggacaaaatgctgttgcaaacccctgctgtctattggagtaacacacagtcactctgatacccctnaacgatcaaacagttatacacccacaggttctgttttctagtattggagaagacctgggtatttcacattactcttatctgccgnnnggatgtgtacatacnaaaaattttccaattctgcccgaagtgaatatctttaaaaggggcgggtt

SEQ ID NO: 198014 - DNA, 420 bp, Gossypium hirsutum
tcgggttcaaggattggagatcctaaacaaaaatggcgaatggataaatataaatccttcacccaattctttcgtagtcatgcttggagaatccttcagcgtatggttgaatggtcgattgccttctgcttatcaccgcgtgctgatggagggaaacgaggccaggtatagcatcggattgtttgcaaggccgagaggagggtacctagtaaaggttcccaaagagcttgttgatgacaaaaatccgatgctcttcaaaccctttgacctggaagaatttttgaaaacttttctccccccaagctgttcaaggtgctactagatctactcttaaagcttattgcagtgtctaagatttgggcataaataaatcgtggtctctctctatgtaatataatcaaggctatcccaactcaacat

SEQ ID NO: 198015 - DNA, 265 bp, Gossypium hirsutum
ttttctcgtccgcgcagggactgatcgctctgatgctaattctattgtatcttttgatgattataacaagcctctcatggacttcatgtctgccttgcctcattctgaacaggtaataatggtaggtcatagtgctggagggttaagtgtgacgcatgccactcacaaattcgccaacaaaatccgtctggcggtgtatgtagcagccaccatgctaaaatcaggcttcttgactgatcaagatcccaaagatggagtacctgat

SEQ ID NO: 198016 - DNA, 420 bp, Gossypium hirsutum
  unsure (1)..(420): unsure at all n locations
ttgtcgcgtgggcggacgcgtgggctagcttccaagctgaccggagccggcggcggaggttgcgtgctaacactcttgccaacccatatatcaggagaagtcatcgataagctagtggaagagctcggatcattcggtttccagtgtttctcagccggaattggtggtaaaggtgtccaaatttccttcgatcattcttcctaatttgccgtccccatattttagtcgtaataagactctctgcgaataacatcatgaagcacattatatcgatgttatagttatttcccttccctttcgttttctgtacacttcactttcggattagccgttttctagttaaaccagaacgaagaanaactactgctacagaaaacaatgttgtagctgtttctatttctccttgtacattagtttact

SEQ ID NO: 198017 - DNA, 249 bp, Gossypium hirsutum
  unsure (1)..(249): unsure at all n locations
tcggtgttatttactaggggttcgaacctggattatttggattttcgtgtttggccatttagtgcaatgagctcgtgggactcatctatggcgttttcatgttttatgctgaatcatgttcctttatattcaatagaattccagattttatcaaaaaaaccatancagaaaaaataaaaagcgtcaaaccatagaaaaaaaaaaatgttgatgacaaaaacagatgaagacatattgggtgatgatgac

SEQ ID NO: 198018 - DNA, 835 bp, Gossypium hirsutum
  unsure (1)..(835): unsure at all n locations
cggccgcgtcgacccgacccagttcagattttggacttctttcaggagcaaaacaggtgtgaaactgaaggcttcagcagagcctccagcgctaacacgggagcttaaaggtgatgaactaaagggcataatggaaatggaaagtggttgtgatttgtttgacaagttgaaaaatgggttcctcagtttcaaaagccataaatatatggaaaacttggaatgctatcaagcactcgccaagggtcaagctcctaaatttatggtgattgcctgtgcagattcaagggtatgcccttcaaccatcttgggatttgaaccangagaagccttcatggttcgcaatgttgcgaatatggtgccaacatatgagagtggcccatcggaaactaatgctgcactggaatttgctgtaaattcacttgaagttgaaaacgttttcatcattggtcatagctgctgtggtggcattcgtgccctcatgagtatgcaagataaagcggaatcaagtagctttatccggagttgggttattgtcggaaagaatgcaaaactaagtacaaaggctgctgcttcaaacctcagttttgaccagcaatgcacacactgcgagaaggaatcaatcaacaattcattgttgaacctgcttacttatccatggatagaaaaaaaggtgaacaaagggatgctttctctgcacggtggctactatgactttgtcaactgtactttcgagaaatggacattggattacaagggaagcatcatgaatggaaaaaccagagttgtagtgaaggaccgattattttggtgctaaccttctcggtccatcttatct

SEQ ID NO: 198019 - DNA, 482 bp, Gossypium hirsutum
gtcatttgtgtgtgggatgcttatgaagctacaaagggtgctcatgtaatatgtattctaactgagtgggatgaattcaagaatcttgacttcaagaggatatatgacaacatgcaaaagccagcttttgtctttgatggccggaacattgtaaacgtggaccagctgagggagattggtttcatagtgtactcaattggcaagccacttgatgcatggctcaaggacatgcctgcagtggcataaatgatgcatgcagaggttatcgatgcgcgtcaatgtcagtttgattctttactacctatctttttgacaagttttattgtttccttgctttcccttccccatggtagccaagcatttgaaggcagtaaacggctcttcgttgtgccacacattgtattcaataatatttaccatctactctgttgtttgttagaaaacttgatattatttttggatttcatctaatttcatattca

SEQ ID NO: 198020 - DNA, 498 bp, Gossypium hirsutum
cccacgcgtccgcccacgcgtccgtttacgcgtccggaactcgaaaaaatttgcagttcagaatttcgcaaagggcttacttgatgttgcggacaatttaggaagggcttctacacatgttaaaggtagtttctctaagatcgacgaatccaatgacactgctggggctgtaccgctccttaaaacactcttagaaggagttgaaatgactgagaagcagcttggagaggtatttagaaagtttggagtggaaaaattcgatcctagaaatgaaccatttgatccacacaggcacaatgcggtattccaaataccggataattccaagcctcctggcacggttgctcatgttttgaaggcaggttacatgctctatgatcgagttattcgaccggctgaggttggtgttactcaagcaacggatgatggtgcaaccgagaataacacaggtgacaaagtctctgatgtttgattgtaagttaagttgagttattaatg

SEQ ID NO: 198021 - DNA, 598 bp, Gossypium hirsutum
  unsure (1)..(598): unsure at all n locations
cattaaatggcttaagttttaacacattcctgggcaacatatcaaacggtgatgaaccaactgtcttgattatcaaggatagagaaggttacatatttggaggttttgcttctcaaccttgggagaggcatggtgatttctatggggacatgaagacttttctctttcagctctacccaaaggcatctattttcaggccaactggagcaaacagtaatttgcaatggtgtgctgtgaacttcagttccgagaccatccctaatggcattggttttggaggacgcataaatcactttggcatgtttctctcagcaagctttgatcaagggcataccttttcctgtaccacttttaatagcccttgcctctcgaagaccgccaaaatctgcccagaagttatagaattgctggggagttgttagaaaaggactggaacaagaaacaacagacgttgttaagggcacagtgttanaaaggttcaaggaggacangcatatgctcaacttggtcgggattgcaaatgcaaccgagtagcatgcacttttaaatggtctttgataatcatcgcagttctgtacattagaatgattcgaatctc

SEQ ID NO: 198022 - DNA, 218 bp, Gossypium hirsutum
ctgctctgcttcctttccgtaagcccctctcatttggatcatttttagccacttatcagcctccaacaaataattgtcttcatgcaagtggctgcttctttctcacttggtttgatttattatgtagtgtttcataactggcggcttcactcactgggtcttgtatgtgttttcaatggtatatttgggcatgttttagtaacagcaactgctcctta

SEQ ID NO: 198023 - DNA, 285 bp, Gossypium hirsutum
  unsure (1)..(285): unsure at all n locations
aactttttaagcatgacgctggaattgttggagcttgacaggtacggatgaagcagatgcatgagctcgatgggttgatttcatgcaaagcaagtgtttcggagttctgcacatgatgaaaagcagccataaagcttggatattggtgcttaaaagtaaatcatatatgcagctgagcacacaaggtaaggtatttgtagaggcagatctaaatatataattgaaagttacaaagttgatagtttgtctgatactattctctgactttatctgctttnnanaaaa

SEQ ID NO: 198024 - DNA, 382 bp, Gossypium hirsutum
ctagagaagtcaaccaatgttactaggcctatgaacactccatccagcccaagaagcttgaggggcgtaaaattccttgaatcccaaatccaatccacaaaagaaattaaccacaacaagatccttatggtatttgcaagatggaagggtctattccaagggacattgctccttataagaaccttgccatattcacatcaagctctatggacccgtaatgcatttcgagttcaagttctattcctttacttaaaaagctaagggtcttgatgagcaatctccagaaagtggctttaagggcattaactcaccaccagcaattagcattttggatcaacatgtacaatgcctgtattatgcatgtatagtatggaaatgaagc

SEQ ID NO: 198025 - DNA, 436 bp, Gossypium hirsutum
tccacgcgtccgaccatcaccacccaagcacccttacaagttcaagtccccaccacctcctcccgtttacaagtctcctcctccaccaccaccccattatgtctactcttcacctcctcctcctcaccactactaagtgacgacggctttgaccatactcctaggagaagagaagattgtgattcaaataaagccacaaaagatgggttgaaaagaaatctagagggaatcataaagaagaagattggaagcccagcctacctagtctccgcgtttgaagtgaataatgttagataaattgtgtgttattcggtggcttcactcgcatttatttctttatttctgtttaaaagaatcatatatgtaactgtgtattgtgctctgcacccattttgcaaatgcatgggtttatattatataaattattaatgtgaaa

SEQ ID NO: 198026 - DNA, 687 bp, Gossypium hirsutum
aaacagaaaaagagttaagccagagactgaacggcccctcttctcacaccctgtctccgaccttgcgatagccgagcgatcaccaccaacccccctcccagaatgttgcgtcgagcatcgatgctattggcctgtcgatccattttggcagcaagggctcgacccttctccactgatctgccagcggcaccctctgcggatgccacattcacggaggcgtggactaaagtgatccccaacatggaccctcctaaaactcctctctctttcatgcaacctcgtcctcccactccttcctccattccttccaagcttactgtcaatttcgtccttccttatgcttctgagttggccaccaaagaggttgacatggttatagtaccagccacaactgggcagatgggtgttcttccaggacatgtagcaacaattgcagaactgaaacctggagtgttatcagtgcacgaaggaagtgaagtgacaaagtatttcgtcagtagcggctttgtttttatccatgccaactcttttgcagatataatagctgttgaggctgtgccacttgatcgacttgatgttaaccttgttcagaaagggcttgcagagttcacctcgaagctgagctctgccacaaccgacttggagaaagctgaagcccaaattggaattgatgtgcacagcgcactc

SEQ ID NO: 198027 - DNA, 480 bp, Gossypium hirsutum
attccacaacatctacccacagttgggtttctttgttctttttttctttttatttcttcaaaacatgtctgcgattcctccatcagcttcacaaaactcatcatcttcaggtttccaggatttcttgcccgtgatggctgacaagctcggaggggatggcttgataggggaactgtgcaatgggttcaacctgttgatggatagagaaaaaggggtcattactttcgacagcttgaagaagaattcggccccgttggggttacaggacttgacagatgacgatttgaagtgtatgatggaagaaggtgattttgatggcgatggggctcttaatcagatggagttttgtgtgttgatgttcaggttgagccctgagttgatggaagcatctcggtttttgtttgaagaagcttttcaacatgaattcaaggattttcattgattggtcttgtttcatccataattgtcgttttaatgaaa

SEQ ID NO: 198028 - DNA, 476 bp, Gossypium hirsutum
gcttgctcattttgctttgttctttaatcatgggcaatgttgctgtgccgggtctggcacgtttgttcacgaacgtgtttacgatgaattcatagagaaagcaaaggcacgtgcattgaggcgtgttgttggtgatcctttcaggaagggtgtcgagcaaggtcctcagattgacacggagcagtttgagaaagttttaagatacataagagcaggcatcgaaagcaacgcaacccttgaatgcggaggtgacagacttggaacgaaaggatactttgtccaaccaaccgttttctcaaacgttatggatgatatgctgatagcaaaagacgaaatcttcggtccagtacaatctatcctaaagttcaaggatattgatgaagtaattcgaagggcgaacaacacccgttacggtttatcagctggagttttcaccaaaagtgtagagacagcgagtaccttgactcgtgcgttaa

SEQ ID NO: 198029 - DNA, 640 bp, Gossypium hirsutum
cccacgcgtccgagcaggagagatttgcactggagcatattgctaagtgccagcacgcctcggttagcaaacttaacaataatagtcaaattgctagctgggatacaagattcgagacaggtacaagaactgccttgctgcaacctttctctcctattgtgatcgcggcagatgagagtgaacggatcagggtatggaattatgaggaagccaccctcctcaatggttttgataatcatgattttccggagaagggaatttctaaactttgtcttttgaatgagcttgatgacagcttgttgcttgttgcttcaggtgatggaaatatacggatttggaaaagattatacagtcaggggcaaacagaaactcgttactgcattttcttctattcaaggtcacaaacctggtgtgcggagtttgagtactgttgtggactggcagcagcagtctggatatctttatgcatctggagagatatcatctgtcatgatctgggacctggataaggagcaacttattaattcaataccatcctcctcagattgcagtgtctcagcattggcttcttctcaagttcatgctggttcatttgcaaccggttttgtggatggttctgtcaaactctatgacgtccggc

SEQ ID NO: 198030 - DNA, 428 bp, Gossypium hirsutum
cttttcaactctcaaaccttcaagtctcatttctttctctttctctttctctcactagagaattcccaagtttctgttggcccagagagaaattaattattgatggtgggaaaagatcaagatctgggtttaagtctaagcttgagttattctcaaaatcatcattcgcttcagttaaatctaggcccatctctcgttccatcttctgctaatcaatgctactctccttctgatccaaacatggaatctttacgggcagagactagatcatttcttaaagggatcgacgttaacaggctgccatccacggtcgattgtgaagaagaagccggagtttcatctccgaacagcaccatatcgagtagcctgagtgggaaaaggagcgaaagagaaggtaataacaatggcgacgagctcgagatcgaaag

SEQ ID NO: 198031 - DNA, 651 bp, Gossypium hirsutum
cccacgcgtccgagcaaattatagatatggcgaaagctgaggttgtaattgttctgtctttgttgttggtgacaacagtggttgatgggttgggagggaggatgacgataaacgatgtgaacaaaaacaaacaggtgcaagagcttgggaggttctcggtggaggagtataacaggcggagccaagggcggttgcgtttcagtttggccaatggtgggccgtcgacggcgttggttttctctcaagtggtgggagctgagaaacaggtggttgctgggatcaagtattatctcgagattaaagccatgcaaggtggggtaaccaagacctttgagtcagtggttttggttaacccttgggttcaatccaaggacttgcttaatttttccccttctactcattaaaaggagtagtctttttccctttgtaatcttaattaataaagcgtgtgaataaaaaagtatggtaattaactgcttgtatgtcacaaattctggggactggggttatcgtgaacatcattgattccccccacaaacaatttaacatcctgtccacatgccttgtctatcccctgaattagaaacctatcacccccatgcatggcttcttaaaaccaaatgagtacccttaccttaacctttcatcttt

SEQ ID NO: 198032 - DNA, 501 bp, Gossypium hirsutum
cccatcgcgtccgcccacgcgtccggagagagaaaagcaagaccaacgccatggctggcactattgacttccgccgcctggatgaaggcttcggcggcaaaacgtacaaacgaaagcgacaagaatctcagatcgttgccaatgacgacgaggctgcccccgccgccgcttccatggacgtggatgattcttgccccccacccgcaaagcgttcagccgtgccttcctcggacgaccccaataaacccaccttcggtcaacccacctacgacggcgtgattgcgggtaaggtgtctggtaggaactggaagcagccaagaaagcagcgtgcgtcagcgaagcacgtgagcataaggaggacgagcttggaggagagggagaggcaaaaggagatcaagagagcttatagagagaggattaacgagttgaaggaagagatacggcaaaataaggtggagaagagaaagaagagagaggagagagagaagaagaagaaagaga

SEQ ID NO: 198033 - DNA, 724 bp, Gossypium hirsutum
acgcgtccggctagtcgtaaaacagacacgaaagagtcttcaagccgatgccttgatactcaacaccgccgaagagctcgatgggcctatactatctcaaatacgcaccaaatgccctcgtgtctatgccgttggacccttacatgctcaattaaacactagactcaatgcaaaacatggagagtcatatgatcacatctcgaatacactttgggaagtggataaaagctgcatcttttggctcaataagcaaccgaatcgatctgttatctatgtaagtttggggagcattgcgagcacgtcaagggagcaacttgttgagctttggtatggacttcttaacagtaaaacgaagttcttgcttcttgtaaggccaaattccgtgattggaaaagatggtgaaggggaggatgttgttttggtgcttatggagaagagtaaggatcgaggttacattgtaaattgggcaccacaagaggcagtcttgaaccacccggccattggcgggttctttacgcataatggatggaactcgactttagagagcgttgtcgcaggggtgcctatgatttgctggcctcagtttgctgaccaacacgtcaatagtagggttgtgagtgtggtgtggaaaatagggttggatatgaaggatgtatgtgatagcaagatagtggagaaaatggtaaatgatgtgatggtggatcgaaaggaggagtttgcaaaa

SEQ ID NO: 198034 - DNA, 331 bp, Gossypium hirsutum
atccagttggcgcagcataggaaatagctatttgcagggcctgtgctcgatttgggcctcgtttatatctctatcatgaaaaacaatagatacacacaaaagcatattggaaatatggactatgcttttagtcttactgttcaagcacattttaattacccaaatgcgcctaataattaaatgaaggttttaaaattagcctacattgaaattgttatttattattttagaaatgtgaggttaaattttactattagttcttgtacgttgcgaaagttgtgtattaaatatctatactttaaattttaaaatttaaaattttagtcctcac

SEQ ID NO: 198035 - DNA, 725 bp, Gossypium hirsutum
aaaacccgggccgacgcagtcgtctccttttccaaacaatcaaaagattcagaacccactcttttcgaccatggcagtatcaacattctcttttgctttgagccttgccattttctcaatctgggccgttgatgcagctcaccaccatgcgacagcgccgtccccttcttcttcttcttcatcctcctcttcctccactgtggactgctcgactctgatactgaacatggcggattgtttgtcgttcgtgtcaagtgggagcgaggtgtcgaaaccggaaggaagttgctgttctggattgaaaaccgtgttgaaaacgggccctgagtgtttatgtgaggcatttaagagcagtgcttcaatgggtgtttcattgaatgtcactaaggcctccactttgcctgctgcttgtaaagtttctgctccttcttctactaactgcgctgcatctgtcactcctgctggtgccccagatgtggaaccatcagcaacagcaggtgcacccacaacattctctgcagcaaatgaggtagcaccaacaccagctccgggaatctcaggctctgcggtgctttcggtttcggccggatctattgtcgtaggcattataagtatgttggtgtcgggctacgtactacgttaaaaacgttacggattattggacatgagagtgagagagagattattgtttattgatgtgtggttgtaatagatttatgtttcat

SEQ ID NO: 198036 - DNA, 418 bp, Gossypium hirsutum
cccacgcgtaccacacatgtacaatccttttgtaacggatgtgtagcatctcctaagataattgcatagcggagagttacatcacttacttacattggtgtaagacctcagggagattgtaattgacttcctatttcccgtttaccatgaagacataaaacccatttgtcttcatagagcaaacaaatgtggtagggcttgaagcagtgcaacttctaggggttatgtttttgtaaggcataggagctttgatagacttgaaaaccatggttggtcatgttggtctattgcttcggccttcacattgtatttattccattcaatacatttttatctatcaatgaatctggaagaaagaataatatattggaattgtattatacccttcactgaaatggattgcagatgtttatcactt

SEQ ID NO: 198037 - DNA, 422 bp, Gossypium hirsutum
aaaaaaaattcttctctctgcttacaactcctgataattatcttcaaattttggaatatagaaatggaaggagtgggctccaccaggctgggccgagcttccgctaggtacggtggttcaacggcggtgttcaatggaccggtgaggaagtggaagaagaagtgggttcacgtgtcgccttcatccaccgctaaactctctcagtccaacgggaacggttccgccgcctccagcatccttctttgtaggtggaccccactctcctttgctgattccgggtcctccgccgtcgatggcgaggacgaggagcaacccccaaagcgcaagtaccgctatacccctgttgctgtgttagaggaagagcgtagaagggcagctgctgcgaaacaggttgaaaatgaagctaggacagatgagaataa

SEQ ID NO: 198038 - DNA, 569 bp, Gossypium hirsutum
  unsure (1)..(569): unsure at all n locations
agaaatcnctcaacagtttgtattctacttaacttattgtacaacttgctaaactttgaaaattgaaaagtatttggtcctaatctgcaattttccattaagcacaacaactgcaacaaaaatacgtggtcaatttggctttgagaaaatagagattcagatccaggaagagaaacaaggaaagaaaaaaacgaaacagatgggaatcagattcatattaatggtgaacaagcaagggcagactcgtcttgcccaatactatgaatggctcaccctcgaagaacgacgtgccctcgaaggcgagatcgtccgcaagtgcttagcccgcaacgagcaacagtgttcatttgttgagcatcggaattacaaaattgtatacaggcgttacgcttcgctgtttttcttagttggagttgacaatgatgaaaatgagcttgcaatattggaatttatacatctcttggttgaaaccatggaccgccattttggcaatgtgtgtgagctagatatcatgttccacttagagaaggctcatttcatgctggaggaaatggttatgaacggttcta

SEQ ID NO: 198039 - DNA, 422 bp, Gossypium hirsutum
cttgttaatgttttgaagtctctttccaaggggaaggtctggatactttccctcaaggtgtggttttcgttactgctgcttagcttcattccagccttaccatttcaggctatttttttcataggacttccacttgcctttatagctttctatgtatatgacaaaaaagagcacgaaattgatgctttcattctagaaactttctcaatgggatgcaaattgaaatctggtattgccaggaaattgctggcctccaagaagaatgattgatagtatactagaattggactttggagccccaattttccttaagaaaaacgggggggggagctcttttcgaggattctaagcattcggaccattgttacttgtattgtaggcatttcactttgagaccccttcatatcacttgtatgtattcc

SEQ ID NO: 198040 - DNA, 650 bp, Gossypium hirsutum
tttagaaaagaatggccatcatcacttacgagagactagaggactctgcttgtgagaggaacagacagttaccaccgtcttaaggaggccaaggattggggctggctatcggttcatagacatgattactgaacctcataggctaattcgtcggtgtgaagttacagctattctcattttgtatggtcttcctaggttactgacaggatctatcctggctcatgagatgatgcacgcttggcttaggcttaaaggttatccaaatctgagtccggtagttgaggaaggaatatgtcaggttttggcgcatatgtggttggactctgagatctatgctgcggcgggaagtgatgcagcttcatcgtcatcctcgtcatctgcatcttcttcttcatcatcatcaccatcatcatcctcttccacatcatcaaagaaaggaaagcgctcggattttgagaagaaacttggcggcttttttaagcaccagattgagtcagattcatccacagcgtatggagagggattcaggcaaggtaatcaagcagtgaacaagtacggtcttaaaaggacccttgatcatattcggatgacaggaagcttccctttttgattcacgaatctttcttttcacataattcgagaaccagatt

SEQ ID NO: 198041 - DNA, 388 bp, Gossypium hirsutum
gttcaagacttgcagggactgtggggcgacaatttcatcatgtccgatgtgccggcagccaataacgacacgcctgagactgtatacctaattgggagctgatttctggttctgttgagtgctgtgaagcctattcaggacaggaccctttacaaaatctcagtcattatacaatatgcataaagtccagttttatttctattagagattctcaaatccaaaggtggccatgttactgaactggtcaactttttttttttacaaagggtttgcattggactattttgctcccccaaagttctttgcgttgtttgaataaagtatttgtatttggaatgtgcattgcaacttgccaggtgcagaggttacgggaaaaaatggaaaattt

SEQ ID NO: 198042 - DNA, 609 bp, Gossypium hirsutum
gtttaggtggcttgtttatgtgtacaagcaatgttttaatagtcccaatgctgattagtggggttagttgactatttggtgattatttgactataaatgtatgttttttctagttgaatgaatgagctgaatgagctatcagccattagctcccttgctgcacatttgtgagcaagtaaaaatgcttcttgcaccttgcttcatgttctgtgctcttgttctctcttttgttgctgcctcttgcaccaacaattggtatcatgagcctatgtcttacgggaccattgattttgcttcccctgcttgttgaaaagaaagaagctgtcaaagcacaagcaagtcattaaggactgcttgtagagaagataatatcggctcaaacttataagatccccaaactagcttgaataagctgaaggaggagtttaaaggaaaggtgtgagctttccaaatgtgcaagcttagcaagatgtcaaagctgcaagcttagcaaagtgcgagcctgatgaagacacctgttgaaaacaatatgcaaagatgtgagtctgtcaaaagggtgagctcaacaacatgtggaagctcaatgcgtggtggataagtgcaaggctt

SEQ ID NO: 198043 - DNA, 472 bp, Gossypium hirsutum
  unsure (1)..(472): unsure at all n locations
cggaanncccggggcggccccacccgtccgaacaatgcctacaagcttttatatctgctatcttttctaactcaaacccttccttattaatcctactccccatatccagttttgccctacagactttaatcactatagatttaagttaactttgtcgactatggctgctgctacgaagcttcaactgtccttggaggaaagcagaattcgaggttcagatttaggcatgtgtcctgatcgggtgaagcctctggcttgggcacctatgaaaggaaaataccgacgaaattgttgtggttgatgtggacacagcagccgcactcatcatggacatgttttctcttcaataggttgtttttgttttatgccaatcaaacatctttctcttctaggccctttggtgttcttttcaacttttaagacttagggatggttatatgtgattgaaatagaagatgcattgaccattttt

SEQ ID NO: 198044 - DNA, 782 bp, Gossypium hirsutum
tcttgctcctccacagcaaaagcgggtcttctctctctagaaaacttctccttcccctttgtaaaaacagtgctcaaaaattcctttatcctgttttcttcaatttgcttctccaaaaagctctttgtttttgtagtagtagtagtagtagttcagatcttcgtcatcataagtactatatttacgcttttgtttttgcagataaaaaacctacgctgatggctggtcgttacgataaaaatcctttcgacgaggaagaagaagaagttaatccttttgctgatacaacagcaagagggaaggcacctggccagtctaaatttggaggaggtctattttcaacgcgcactgcaagcgttccacctgcctcaaactcaagactttcaccactacctcctgaacctgctggttttagttatgagcgtgaggcaacagttgatatccctcttgatacagcttcaggaggatcacgtaatcaggatttaaagaagaaagaaaaggaactccaggccaaggaggctgaactgagaaggcgggaacaggaagtgagaaggaaagaagaggcagtggcaagagctggagttgtgctggaagagaaaaattggccacctttttttcctatcattcatcatgatattgccaatgaaattccaattcatctacaaagattgcagtatgttgcgttttcaacatatttaggattggttctatgccttctatggaatatcatagctggtactacagcatggatcaaaggagaaggtgttaggatctggttcttg

SEQ ID NO: 198045 - DNA, 703 bp, Gossypium hirsutum
atatgaagctaagagtgttcaagttataacatttggacaacctcggattgggaatgctgtgtttgcttcttactatgccaaacttgtgccaaatacaattagagtgacaaatgaccatgatatcgtccctcatctgccaccatactattattatttccctcaaaagacataccatcactttcctagagaggtgtggctgtattcccttggactgggaagtctggtttatagagttgagaaggcctgtgatggttccggtgaggatccaacctgtagtaggtcggtgacaggtaacagcatcatggaccatttgaactattatggtgtcgatttaatgtgccaagaatggagatcatgcagaatcgtgatggatcctcgtgttgcggagtatggcaaaacggatcacaaaggaaatttcattttgtccagagcaccagccatgcgtgttcggtcgaatgaaggggaagttaaagctagtgcataattgatcaatttatggttccaccctgccacggtttatcgagttctgactgcttcaggtaactacgttttcgttctgccattgaagcaaatgtaaaaaataattgaaaaagagcattactaatgtaggttttcgttaggaatgaattcatgtaaatatcctccaaaatgtgtacatttcttattatacttatggatattaggctaatggccagttcctaat

SEQ ID NO: 198046 - DNA, 586 bp, Gossypium hirsutum
cgggaagggattgtcggaagatgccaaagcacaaaaattggcttttcaacattggattgaagctattgatccacgccatcgttacgggcataatttgcatatttactatgaagagtggtgtaaagctgatgctggtcaaccatttttctactggttggatttaggtgatggcaaagatattaatcttaacgagtgcccgagatcgaagcttcgacaacaatgcatcaagtatctcggaccccaagagagggtaaattatgagtacattgttgttgaaggaaagattatccataaacaaaccagaaacgtactcgatacaatcgaaggattgaaagaagggaaatggatattcgttatgagcacctcgaagaaattgtatgccggcaagaagaagaaaggaatgtttcatcattcgagtttcttagccggaggagcgacgttagccgctggtaggctggtggttgaacacggagatcttaagtccatttctgcgtatagcggacattatcggccgacagatgatagtcttgacagttttctatcgtttcttaaagagaacggagtgaacctcaatgaagttgagata

SEQ ID NO: 198047 - DNA, 431 bp, Gossypium hirsutum
tgcaaatgcctttttaaaaaaaataaaaattctgttgtttgtactccggatttatccttggataggaacctttttttattggaaatgtcttcttacttttcgcttaaatggaacctctttaattaattttgtgccttgtttcccctggtcaactttacctggattgatgcattaaggataatacacactaaaatattcgatgttggctttatgtgcaattggtaaagatagttggttatgtgcccctgccctcaacttattgctttgaatttgatttagatgaacttaaactcttcttcgcttacttgattttggttttctttgataataactttggatagactagattcttttgaattacctatttcttgcaatattgttatttcatttagaactgatttagtcagtttttgaggcatctttcctatgga

SEQ ID NO: 198048 - DNA, 417 bp, Gossypium hirsutum
atccttaaagtgccggcttcggatgtcatggtagcgctcaagagtagcaacattaaaaaccgccgaatttgtctcaaatgggggaggctcggcagatcgttctatggattccgtatgcgggatgaatcccttttcgatgtctctctctagaagatcttgcatcgtcaaaagacgatttagacgggctgcgggtgcttcaacgaggagccattcatgaggttttacaagttcagatatccattgttagttccagaagcaatccctgggcctaatcaaagctcgcaagcaccagtttaaacaatggggagaatcagggtaaagaatcatagaggtctttgttttaagagccacattatagtttgtccctttcagattatagtttggcccttttactcaaaaaatggataaattaatcac

SEQ ID NO: 198049 - DNA, 1251 bp, Gossypium hirsutum
  unsure (1)..(1251): unsure at all n locations
gctaatagttaaatgggttcaaggtttgggatatantggtaaattacagaggaaagagaattctcaaattaaatgctttgctgctgctgaagaagagatcgttacttctggatttgacaataagatatggagaatttctcttcatggggatcagtgtgggggtggagattcagttgatattggcagtcaaccgaaggacttgagccttgcccttctctctcctgaacttgctttggttacaactgactcaggagttgttatgttgcgtggtacgaaagtggtatcaaccataaaccttggttttgctgtgacagcattagtggttgcacctgatggaagtgaagctattgttggtgggcaggatggaaaattgcatgtattttgtatagtaggtgataccctcaaggaagaggcagtacttgagaaacaccgaggtgcaattactgtcattcgttactcaccagatttctcaatgtttgcatctggagatgcaaatcgagaagctatagtctgggatcgtgtctctcgagaggtaaagcttaaaaacatgttgtaccacactgctcggataaactgtcttgcttggtctcccaataacagcatggttgctactggatcacttgacacctgtgtaataattttatgaggttgacaagcctgcatctagccgaatgaccataaaaggagctcatttaggtggagtttacgcattagcctttactgatgaacacagtgtggtaagctctggtgaggatgcttgtgttcgagtgtggaaattgaccccgcaatgataaagaccaataaagaaatgccttgatcggttggtggatgtgctgcattttatccgagatatcgtttttgtgagcttggtcggcatcaggtatgcaaattgaaaatctttaataggagttggttgagtttgtgacattaccagcctttctagtgtgtagtgtgtgttgtatggtacctggtatcaagttttcgatctcgagaccattgtttccccatgcaaacaaagatggttctcacttctcacatcacatggttttgcatttaaatgatggcgtgatagggtcgcataatatacttcatttcttatttatctttgagcgtgttaaattatgatgtgtgattgttgtattgtactctcctcttcttttccattgcattactgctcaaaatttttctaccttgctttgctacgcgagtgaaaatatactctcttttttattataaaaagtaatgggtatt

SEQ ID NO: 198050 - DNA, 462 bp, Gossypium hirsutum
attttggatacccaggaggttaattttgagcaagggatgcaaattctcaaaatcttcaaagaccattccagcaagacatgcatccttgatgactttgaattttacgaggcccgtcaaaagatgatccaggagaggaaggctaagcatcagctgttacaaaaacaaggtctgagtggggaacctaaaggagaaaacccagcaatggcaaaggagacattggaaaaacctgtcgaggcagccttgacagaacgaacggttgcatcaacagcagaagcagtaaatgcaacgaacggagacgcaaaacccattgaagagaaaggatcagttgctgcaactgaagacggctctcaatgaaaccaggttgttttcgatagtcggctttggtagaaatgggataggattgtactttttgattggttaattctagttgctagatagtgtgatcatatcatttttagctta

SEQ ID NO: 198051 - DNA, 461 bp, Gossypium hirsutum
tttttattaaagctccttcagctcccatggcgagctcaatggtccttgtttcattgatggctttaggcctcttgatggcattttcaacgacgactcaagttgaagcagccgccagggcattttttgtatttggcgactctctggttgataatggcaacaacaattacttagcaacaactgctcgagccgattcaccaccttacggcattgacactcctacccgtcgccccactggccgattctccaatggcaaacacattcctgattttatcagtgacgcacttgggtcagagccaacattgccatacttgagccctgaactcaggggagaaaagctgcttgttggtgccaactttgcttctgccggtgttggaatcctcaatgacactggcattcaatttataaacattataagaatgttccggcaattacaatacttccaagattaccagacacggttg

SEQ ID NO: 198052 - DNA, 609 bp, Gossypium hirsutum
tctttttatttcatgacaagtctcttgcaaatgaagatacttatgaacctttcctaagattgctctggaaaggtaactggttcatacaagaaaagagctgtaagatacttgccttgatagtaagtgccaggccaaaaacccagaatggtgttgttgcaaatggagaagcctcaaactcgaagacaaagctcactaccattgatgctgtactaagaggattggttgaatggctttgcacacagctgaagaagccttaccatcctagtcgtggtattccaactgctattaactgccttgcagcattgctgatggaacgctgttgtcagatcctcctttgttcaagcggatggagcgaagttgttgattcctttaatttgtccagcctccacacagcaatctatccagcttctttacgaaacatgtctctgtgtgtggctttgatcttactatgaaccggtaatcgagtacttggcaacatctagggctctaccccgactggttgatgttgttaggagttccacgaaggagaaggtacatgtggtgctcagatggttgaccttggattgccacaaattattcagagtttgaaagcacaagcatggagtgatg

SEQ ID NO: 198053 - DNA, 791 bp, Gossypium hirsutum
  unsure (1)..(791): unsure at all n locations
ctggaaagtagtcattggaagctacagcaacaaccagggcatggctatactcttccaaagtcaagattttgttcattggactatgcatcgagatcctctttattcatcgttgaaaaccgaaatgtgggagtgtccagacttctttcccgtgtcgattaacagcaccaatggggtcgacacctctgttgaaaacccaagtgttaggcatgtcatgaaggcaagtttcaattcccatgattactatacagtagggacttatgttactgagcaggaaaggttccttcctgatgctgactttaccggaaccagtttggacttgagatttgattacggtaaattctacgcctcaaagtcgttctttgatggtaagaagaaccgaaggatactatgcgcttgggtaaatgaatccgatagtatggaagatgatctaaagaaaggatggtctggacttcagtcgattccgaggcagatttggcttgacctaaatggcaagcaactagtgcagtggccagttgaagaactcaatagtctacgtggcaatgaagtctatgtgtatgacaagcagctcgaaagcgggtcggtttttgaagtttcgggcatcactgcttcgcaggccgatatcgaaataatgtttgaattgcccaaactagaagaggccgagttcatagacaccagtttggttgatccccaactaatctgtgacaaacaagatgcatctgtgaccggaaaattcggaccattcggtttattagctttggcaacanaagacttgactgaacaaactgcgattt

SEQ ID NO: 198054 - DNA, 786 bp, Gossypium hirsutum
  unsure (1)..(786): unsure at all n locations
cggaattgagttcaacctgtggtaacctgatgttttttcattncactaggattcccaagctgggggcgtttgtgaagttctgcgcgaaaataaggtacacgagcttactgaagtttgtgagacactcgaagaagaaagtgctgtaaagagtgcacaaataggacagatgaaggaaagggttgagttcttggaaagtgaaattggagggttgaaggtctcgacgtctgcctatgttccggtcatagcttcactgaaagatagtttaatatccctcgagcaaacttgcccttcttcagcctaagctttgtgttccaaacggggaccaagataaggatgtggaaatggttgatgaactttatgtggtgaggctcggagaaactcgaagaaggaccacctgcgtttttgacagctgggatttcagacttgcaggagatgtgcactaaggttaaagcagtcgaaaaggctgtggtgcaagagatgaataggcttgtgaagcggaaaagtaacaagaacagccacgatattgatgcttcatctaaagccatcaacccctctatttcgaaattgaaaaaaagtatgcanttgggtgatgaggtttctcgaaaactcaggtcgaaaagaatgaaacttgaattttctgagttgagaaatgggatattgtggaaagatattcgcctggatcatgtctctgattcttcgttatgcgggaggagcagaagtagaaggagacagcggcgctgatgatcaaatgcttgaactatgggagtctgctgagcataaatgtgt

SEQ ID NO: 198055 - DNA, 991 bp, Gossypium hirsutum
  unsure (1)..(991): unsure at all n locations
cccacgcttccgctcttacactcacacacatgacagaaagaaaaccctaacttttcaagtttcaaactcctaattgaaaatttcaaatctctcaaaaccttcaaaatcttcaaaatctcccaaaaccttcaaaagtatcatagctggaggctagagctacagctggccgctgcccgctggtgttgccgtcgaagcacgggagcagaatgtccaccgaaccaacatctattgagggtagtggtacacctcctacttcgatagattctgaacattcgggagttggagcttcaagccaagcaaaggggactaccgggaaaagaaaagccactccttcaaaggtccggaagtttggtctcacttccactaagattattaatagtgagggtgcaagtaaggctaaatgtaattattgtcaaaaggatttttgttgtgatatgaaaaaaaaatggtacagggttattgaaatatcatattagttcatgtaagaaaaatcctagtaatattgttgacactagtcaaggacaactagttttacctagaaagggaagcttgaaggggggaaaggaaatctttcaacttggagatttgatcaagaagcatgtgtggaaaggattagcacaaatgattgtgattgatgaattacctttcaaatttgttnaaagtgaaggttttaagaatttaatgtttgggcatgcctaggtttcatattccttacgaactactatactgnnagatgttatcaattgtatttagataaaagggtcaagataaacaactttgaaaagtncttgtctaaagtttgcttactactgaccatggacttctttaaaaagtaataatttgtgatcactgttcctttaatgtaacgattgtaattgatanangatttaactttgnctatntctagcataggtgantcttggatgtgatganaatgcctgtgaatggggatgatattattactgtctgtgatatgcagttcaatagttcg

SEQ ID NO: 198056 - DNA, 632 bp, Gossypium hirsutum
cttctgccatcactctcccaaccctttatggttctctatttcaatctcatttcctaggaaaaagccccatcacccatcgtccttataaaccatttttctcggttgccaaacagcctaaaaaggccttctatgccaagtttgatctatttgaaatcttgggaggtagggggctctgcaatggagaaaaaggcattgaagttgagctaaagagaaacgtggttgaagcttcatcagttggtaacacagatgttgaaagttctgacagcacagcaatctcagttcaagatgatgctttcgaaaaggagatgatggggctaaccggggggttccccggtggtgaaaagggattgaaaaagttcattgaggaaaacccaccaccggcgaagcaatcagtttccgattcggtaagtattgctaggcttgggaagccaaaatcaccggagttgccactgttaatgccgggaatgatcgcgattgttaagaacccgaacaaccccttctacatgtactgcggcattgtgcagcggatcactgatgggaaagcaggggttcttttcgaaggtggaaactgggatagattgatcacgtttcgactggacgagcttgaacgcagagaaaaaagcccttcaatg

SEQ ID NO: 198057 - DNA, 433 bp, Gossypium hirsutum
acaagtttggtggtcgatttcaagaaccgtcaagaatgccttctagaattaggccctctacaagcccagagtccttatgattcaagggggatgggatggatgagtgtttgtatctactaatgtatcacgtataattactgcagaagaaacaagtgcaaaattgatccaagggagattgttatttatggtccggaaaagggaatgttcaagattagctagctgatctctcatccaaaacctggagcggagtgcagagcaaagaatgttggatatatgaagtttttgaaggtattgtcagcttcttgtttattcagagtattactatgattgtaaaaattcaatcaacggatagcttagatttctttcttttgtcgctttgaaattgttctttcttatacgagctccttactacccgatgaaatgtcttttttgc

SEQ ID NO: 198058 - DNA, 943 bp, Gossypium hirsutum
gcatagttaaaatgtaaaaaccctcagacttcctcagaatcccaggtctcagtcagtcctcctcagccctcgctctttgcaaaaggtattattccattcaacccacaacaagctcgaacgccacattctttttccatagtaatgtctagggttttcaaaggtttgagggccttgttagcctccccagcatcgtcttcttcttctgcagcagcagcagccaagttttcttcttcttcagcttttaccgctactgctggcaaatcagctacgtcaaaagcggctcagaaaactccgaaaaagccgatcgcttcaaaacccaagactgaaaaaccacctactcctcgaactaccactcgaccgtctgggatttttaaacttacccctgtttctcctgctttggctcgattccttggagccccaaaggcttcccgttccgatgctgttaagcagatctggagctatatcaaatcccagaaccttcagaatcctgctaacaagaaggagatcttttgtgatgagaagcttaagaccatttttgatggaaaagaaaaagttggtttcctagagatcgggaaaatgctatcccgccattttgtgaagtccagctgacctctattttcatgtttaaccactggttgccctaccaacatcaagctagctcttgttattctgaactgaactttttttatgtatgttcatgttttgcctttcattttgcgagctaaactctcttgtagccttgcaactgaggaaatgttcccagctggacttgtgtaaaaattctgtagggactagggagtgaaaaagtaacattttcatttggtttcctgattttcatttgtactggtttatggtaactggatctttgatcaactagtagcttaatcattcagtcttgcgccagtaaagatgacctttgagggaccagagatgagcactactg

SEQ ID NO: 198059 - DNA, 509 bp, Gossypium hirsutum
gtgctttctcgagaggaaaaaaaaaactaaaaaaaaaacagcagttaaaagcaaaaaaccatggtggctttaggcctccaagccacacatttgattgcccctcaaaagttaccaatacgtaaacaaagaacctttagcaacattatcatccggtgtagtattgcagagccgtcgggagaaccagcatcattgggacaaaaaactaaatacaacgatgggttgtttgccaaggcatttatgggtcttttcgcccgcaagatggagaagttcgcggctgcaccaaaagctggaacagaaccaaagaaaggggttttcgactatgactatgagagctttgttgaggtgtcaaagagagtaatgcaagggaggtctcggttgcagcagcaacaagtggtccgacaggtgctcttgtccatgctctcacccggcgcaccagtttatgtttatgaattgtttgcaccaacaaagtgggctgcagagtttaattgcttcacttactggaccttttt

SEQ ID NO: 198060 - DNA, 487 bp, Gossypium hirsutum
  unsure (1)..(487): unsure at all n locations
cgtncggaaaaaaccgggcggaccaacgcgtccgcccacgcgtccgcccacgcgtccgtttggctactttgtctaggtttgttgtcagagagggcaattttcataaacatcatgccgtgtgcagaacatcatcgtctttggttccttccagaacgctacggagagctcatctggatgttagagctggcatttctttgcctgagaatggaaaaggttttgcaattcaacgtaagccaagtggtccccttgtttctcttgcagctcctgcctcgataactcctgcttcaaggggtccccaagttatctgcaatgctgctgccaatgtatccggagatattcctacaccaagtgggatgagcaagtatgagagaataattgaaactttgacaactcttttccctgtgtgggttattttgggaactattatcggcatatacaagccagctgcggtaacatggtttgagacagatcttttcactggtggact

SEQ ID NO: 198061 - DNA, 856 bp, Gossypium hirsutum
gagaaggaagcctcctggtcgaagaaacctaaaaagacaccgcttcttattaaaaaaataataagaaacaccttttcacctaacagtcaccgtcaaccaactgccagtctggtttgtctaagtaacaagtcgctccccgtcaatcgtgctgaccaaaacagaccaacggcctagatcacccccaatttctccaaactgctgtactcaatctttcttctcccctccatatattcccccttcatttccagcacttttctctctgccctaagaccaaatcaatcctcaaaatctctgcaaactgagatttatatacatatctgaactttaattttctgtaaaatcgaaaccagatggagatgatccagtacaaccggttcaccgcacacctcttgctcctctcgttgattctagttgttcccttggcagtcgccaccgacgttcaatattgtgataagcaaggtgagtatgatgtaaaggttcaaggtgttgaaatttcgcctaacccgatcgccaggggtcagcctgctaccttcagtatcgcagcaacaacaggtgcagctatcgatggggggaaactggtgatcgaggttgcgtattttggatggcacattcacagtgagactcatgacctttgtgatgagacatcttgccctgtgtcaactggtgattttgtggtttctcactcacaagttttgcccggatatactcctcctggcccgtactctctgaaaatgaagatgttcgatgcaaacaaacgtgagttgacatgcatcggatttgattttagcatcgggtttgcatcatctgtggctgatagttaaacattaggatttagaacacacgttaatggccatta

SEQ ID NO: 198062 - DNA, 685 bp, Gossypium hirsutum
gtgacccttcttgttgatcaggttaagacattcaaacctcaattggttgctgttagaaacgagtctttggtaaatgaactaaaagaggctttggctgatatggagcaaaagcctgaggttattcctggggaatcaggtgttatagaggttgctcgccatccagatgctgtcagtgtagttacagggatagtaggctgtgcgggattgaagcctacagttgctgcaatagaagcaggcaaagatattgctttggccaataaagagaccctgatcgctggtggcccctttgtccttcctcttgctcacaaacataaagtaaaaattcttcctgctgattccgaacattctgccatatttcagtgtattcagggattaccagagggtgcacttcggcgtattattttgactgcatctggtggggctttcagggattggcctgttgataaattaaaagaagtcaaagtagctgatgctttgaagcatcctaactggaatatggggaaaaagattactgtggactctgctacccttttcaataagggtctagaagtcattgaagctcattacctatttggagctgagtatgatgatatcgagatagtaattcatccgcaatctattatacattcaatggttgaaacacaggattcatcagtgctggctcagttgggatggccagatatgc

SEQ ID NO: 198063 - DNA, 576 bp, Gossypium hirsutum
  unsure (1)..(576): unsure at all n locations
aatttatttgcaagaaacaaaggttgtgatttagttagaataagaaactatggccaaagacggacccaactgggatggattgctgaagtggagcattgctaactctgatggaactcgacctactcgtaatttaagtgaggaagataaaagatggtttatggaagcaatgcaatcgcagaccgttgatgtgattaagcgaatgaaagagataactatggttatgcaaactccagagcaggttttggaagctcaaggagttacagctgctgatatccaagatatgttggatgagttgcaagagcacgttgagtctattgacatggcaaatgatctacactcaattggtggtttagtccctctccttggttatctgaagaattcacatgctaatattcgagccaaagctgcagaagtcgtatccaccattgtacaaaataatccccggagtcaacagttggaaaggagaggctntaagccntttgnttncataaccaactgttgacttcccnttttatttaaccttattctttatagcttttactgttcaactgattattaaggagtttaaaaaatcta

SEQ ID NO: 198064 - DNA, 634 bp, Gossypium hirsutum
gttattatgctagagcaaatgagagaaataggcgcaatgacaggccacgcaattatgatagatcaaggaactatgagaggagaagggagaacatgaatactcgagatagtcagatgcctcctcaaaatcagggcatgcagaatgtcgctccaaagactgctgggatgcctcccaacaacatgggagggatgccaccccgcaacatgggagggatgcctccccagaacatgggagggatgccacccaacaacatgggaaggatgccacccaacaatatgggaggaatgacaccgaatcaaggatggtccggtaacatgcctggaaatgctccaaacttccaaactggccccaactatggaaacgctcctggaaatgcgcagaacttccaacctggtcctggtcctaactatggaaacacaccttaccaaggtgctacacccaatgctcaatatcaccagaataactatcctccaaatgttggtggaggaaacatgcctggtgggaactaccaatcttaaatctttgttctaatatgaattcagagaccattgtagcttttaggcattgttgtagataaagataatatgcctagacttatggttattggctactaaagaattgctattgaatatgt

SEQ ID NO: 198065 - DNA, 493 bp, Gossypium hirsutum
gcagcatccgccaagaaagtcccacccacgtcggagcctactcatcatagacttataattttctcttcttcttttggtaaaaaatctaaaagaaagaaagggatatggaagggaactctggcggcggcggcggagcagacagaggaggaggcggcggcggagaaagaggaggaaacgatgtggagctggtttgcaaaacacttcaggtagaacacaagctgttctacttcgatctcaaggagaacccacgcgggcgttatcttaaaatctcggaaaagacatcggctaccaggtcaaccatcatcgtcccttcttccggcatctcctggttcctcgatcttttcaattactacgtcaactccgacgaccacgacctcttcagcaaggaattgcagcttgacactaaagtcttttactttgacattggcgagaaccggaggggtcgtttcttgaaggtgtctgaagcatctgtgagcagaaaccgcagtaccat

SEQ ID NO: 198066 - DNA, 473 bp, Gossypium hirsutum
ctcttctctgcccttcgtagaataatactataaaaacctcattaaccctttatactcaaaagtctcaaacttttttttctctctctgtcgctgactgatcatcaaagttgaccatgaagaagctctaccgcagaggcacggttcatccatcacctccgagcacaaccgatcatctgtctttccttccggccaccatcttggccctcgcggctgctctttccccggaagacagggaagtcttggcctatctcatctcttgtgctaacaacgatttcagcaccttctcaacccaccggaaaaacacccagaaacacccgactaaaagaagcatcagcttcagcagcggcagcgatcatgaccatccacctctttttacctgtgattgtttcaggtgctatatgagctactgggtcaggtgggactcatcgcccaaccggcagctgatacatgagattatagatgcttttgaagat

SEQ ID NO: 198067 - DNA, 1001 bp, Gossypium hirsutum
gcgtccggtttacaatttctctcaggatgatctcttgacagaagatattttgatactcgatacacatgctgatgtgtttgtttgggtcggtcagtgcgtagagccccaaagaaaagaaaaatgcttttgaaattggtcagaaatttatagacatggctgcatctctagaaggtttgtctccacatgttccactttacaaagttactgaaggaaatgaaccttgcttcttcacaacattcttctcatgggattccacccaagctactgttcaaggaaactcattccagaagaaggtggctttgctctttggggctagccatgctgtagagggccaggatcgatccaacggaaatcaagggggacctacacaaagagcttcagcgttagctgccttatcatctgcatttaatccatcatcagctagcaaagcctctactccaaagccttccagcactagtcagggatcacaaagagcagcagctgtagctgctctttcctcggttcttactgctgaaaagaagaaacaatcacctgatgcatcccctataaaatccactagcagcactcctgcagtaaccagtccgcctcctgaagcaaagagtgaagtggacccttctgaactagcagattctcgagaggttcctgaagccaaggagacaggtgtagtatctgaaaccagtggggaggattcagaaccaaagcaagagagagagcaggatgagaatgggaatggaagcactcaaagtactttcagttacgagcaattgaagcgaaatccgaaaatcctgtaactggaattgacttcaaaggagagagcttatttgtcgggtgaagagtcccaggccgtatttgggatggaaaagatgcattttataaactgccaaagtggaacagactgctgaagaggaaattgaattattctaaagaatgaatgcccgtatgttgttctttttgcatctaatgccttcattgaatttgatcttcacttctgctcgaaaaac

SEQ ID NO: 198068 - DNA, 421 bp, Gossypium hirsutum
aaaagctaaaacaacaacagcagcagcagcagctgctgagctgagttgagcttagctactcctttcttttcccctttttttcctctctctctctttgtctccaaacagtcaaatgtcagctgcctatttccctcatcttcctcttcctcttcctccattttgtttcctcttctaaccgccatctctcacctctgttaacaagggaaaacagaaaccctaactctaacgcagagcatcaagcggcgccggcagctcagccatgaagaagaacattctcattttggcgacatcctcgcttttgctctttaatttcttgctctctttcgccatcgaagatgacatcgcctgtcttgaaggactgaaaaactcccttaccggcgccgactcccctctttccacatggagcttcagcaaccgctca

SEQ ID NO: 198069 - DNA, 493 bp, Gossypium hirsutum
cttagattcatagcacttgtaaatttattattttttatttatttcttcttttggcgaaattcctatttgcaacaaagatgatagcttgcttgggtcgaatagtacacgacagcgacgccgagtcgaagctggacgacgacgtttccaccatattcaactctctcaacttacaaggcagcatcgaaaacggcgacgtttccggcatagccagtaaagatttcggcgggctttattcggttaagcccttgtatctaattagaccatcgggagccgaggatatatctcgggtcgttaaggccgccgccgggacgccccaccctgacggttgcggctaggggtaacggccactcaatcaacggtcaggcgatggccgacggggggtacgtgatagacatgcgttccactggggaaaaccatttcaagctcttgaccgtcaatggctccccttgcatcgacgtctccggcggggcattatgggaagacgtcttgagac

SEQ ID NO: 198070 - DNA, 475 bp, Gossypium hirsutum
cccacgcgtccgctccaacctaagcgcttaagagcgaaaagttcttatcctcatcccccctttcttccctcctttcttaggtggttgacaagccaagaccaagttctctactttaaacgcctaaaaaatccatcacccatttctactttgaaatggcagcgtccttttcttccactacccttttcaggcccaatcttaatcctcccaagtctttcctctctcattcagattgtgcccaggagggattcggtcgcgtgaagtgtcatttcatcaatgttagtgcgctctcgtggagctcggctgcgaactacgccagtattcgtcacgtcgccgttaaatcatccggcaaacgcgtcgttgttaaacatttgctacgtaagagagttggactcgtgaagtgcgcaactattgaagaaatcgaagcagagaaatcttccattgagaaagatgttaaagaaagaatggagaagacaat

SEQ ID NO: 198071 - DNA, 407 bp, Gossypium hirsutum
cccacgcgtccgcccacgcgtccgcccacgcgtccgcaaaattggaggtatggggcaaatgaagaagtttgggtttgtgttgttggtgttaagtgcgtcagtagtagagcaaatagaggggaaagggtatgagaagccgctcaactgtggccaccttgaatgtgctccatacacacttattcatagccagcctgaattcgagattagaagttattcaaaggctacgtgggtggctactacccccatctcctctccctcctacacatttgctgtttcaattggcttcaaaattctctttgcttacatccggggcaacaatgatgcagcagtgaaaatgaatatgacagcaccagttttggttaatatacatccaaggacaggacatctccagaattcaacctatgtag

SEQ ID NO: 198072 - DNA, 447 bp, Gossypium hirsutum
tcccacgcgtccgcccacgcgtccgttttattttcctattttgcccggccttttttcaaaatctcgtcgattaattcgtacgttcgcctcgattgaacattccggcgccgccaattttgattttcttgagtttcttcgacacacttcagatccgtttaatcgccatcagggctagtttgcttcaatttgttgtaacttgagggttgttgaaaagaaaaacaaaggtgtcatctgggtgccccagatgagaagaactcatgttattgacagtagaaggaggagggttcttcagttcttcagtgtctgggtatagcaagggcttggcccttcttctcttgggtcagaaacacgaggacaagcccatgagagtttcgccgtggaatcattaccagttggtggaccaagaatctgaacctgacctgaatcaactggcttccatcaagaacc

SEQ ID NO: 198073 - DNA, 438 bp, Gossypium hirsutum
ctcaacggcaacacccgaccagacccgaaaaaatggtccagacaaaccagtctggttccggcaatgatttcaagctcgtcggattctcgaatttcgtccggtcaaatccaaaatccgatcggttcaccgtcaaacgtttccaccacatcgagttttggtgtaccgacgccactaacgtcgctcgccgtttttcatggggtctcggtatgcaatttgtagctaaatcggatttatccaccggaaatttgacccatgcttcttatctcctccgttcccgtgacctgaacttccttttcactgccccctattccccttctattgccgttgctcaaaacctctcccctcaatccaccgcttcgatcccttcttttgatcattcactctgccgctccttcgctgccacccacggcttaggcgttcgcgccatcgccatcgaag

SEQ ID NO: 198074 - DNA, 418 bp, Gossypium hirsutum
cttccctgattctctcttcaaacccttgaagaccaaaaaacatagtgggttcagtcctttcagttttaatccaaaattcattgtcctcaatcctgaaaatgccactctcagagcccagttccatctcaagccctttccttctcaaaatctcttgtttccccaattccccttttcctttacactaaactttcaaccctctccctccacaactcagccccaccacccaacaccataatccgcatggggggtggccccagaacttacccaggtggagtctcgaaatggcaatggaaacgcatgcaagccaagaaagccaagcagctactcaaaactcgacttgcccgtgaacgtcacatctatgaaatgcgcaaaagggccgagctcaaagccgccgtatctgaacttgaacgcccttggg

SEQ ID NO: 198075 - DNA, 532 bp, Gossypium hirsutum
  unsure (1)..(532): unsure at all n locations
gctaatntagcactttcatncttttaaaatattgtaaatttagctnttcatatactnttttggtttcttatctttttcttgcggaaaattatgggattttgcttctagatggctcctactggtgtaagaacagaggagtggatcgaaagaaactcaaagggattggagattttctttaggcgatggatgcctgaacccggggttaaaattaagggtgtcgtatgcttttcccatggatatggtgatacttgcactttcttctttgaaggcattgctaggttcattgcagcatctggatatggtgtttatgctattgatcatccaggattcggtctttctgaaggattgcatggttacatctatagctttgatgaattggctgacaatgtcattgaacaatatgcaaaaattaaagaaagacctgaagtgagaggattgccctgcttcatattgngacagtccatgggtggagctgttactctcaaagttcaatttcaaggatccacatggatgggatggaatcatccttgta

SEQ ID NO: 198076 - DNA, 529 bp, Gossypium hirsutum
  unsure (1)..(529): unsure at all n locations
gcacgcttgacagcctgtcccactaagccacaacgcatggatctctctttaagtttcanatctccatcggcttttcttctacccaaatccaaaccatcaaccctctccatccccctcatttctctcaaaccatcgcctcatcgcctcacggtggcagcggctgcagggaagatgaagatgattgagggcgtcagtgatgaattgaactccattgcttcacagaatcttgactacgctgctgctcgtagaagagttcgatctgctttcatccctgtccaccagcagcttgatcatttattgttcaagatggctcctactggtgtaagaacagaggagtggatcgaaagaaactcaaagggattggagattttctttaggcgatggatgcctgaacccggggttaaaattaaaggtgtcgtatgcttttgccatggatatggtgatacttgcactttcttctttgaaggcattgctaggttcattgcagcatctggatatggtgtttatgctattgatcatccaggattcg

SEQ ID NO: 198077 - DNA, 449 bp, Gossypium hirsutum
  unsure (1)..(449): unsure at all n locations
cccacgcgtccgtcactgtatccatcgctgtagccacggcggcgatgaagacgacgaccctaagttcccttccatttaaccaatcagttttcgggctgaagtcccaaagaaaaggccgctttaccatggcttcacacaaagtaacactgataactccgtcgggaaccaagcaattcgactgctcggacggcgactatatcctggaccgtgccgaggaagtaggaatggatctcccgtactcgtgcagggctggggcttgctcttcgtgtgcgggactgatcaaacaaggcaccgtcgaccaatcggacaatagcttccttgatgatgaattgattgatgcaggcttcgtcctaacttgtgttgccatccctaagagtgatgttatcattgagacacacaaagaggaggacctagtatcttaaaaggtgtcataaggatttgtatntttc

SEQ ID NO: 198078 - DNA, 486 bp, Gossypium hirsutum
ccctctcgtccggaatatcaagttctcactcaaagcttttgcccgactgagtcactctcagccaaccctctataaaccacttgtacctaccgtggcggatcggctctgtcaatcaaaccagcaaatacaacatcctttcccttctcttttaatctttcttgtcttctctttcacctcgctttgttgtccatcagttgaggattcttgtcaacaaataacgcatggcagaggaagaacccaagaaggttgaaaccgtaaccccctcggagcaaccacctcccgaagcccccaaagacgttgcggaggaaaaatcggtaatcccacctcctacctctgaagaaaaacctgctgagtccgccgcactccaaaaggcggtggaaccgactgaggaaaagagcacggagagtactgtggaccgagatgctgtgcttgctagagttgcgacagagaagcgaatttcactgatcaaagcttgggaagagagtg

SEQ ID NO: 198079 - DNA, 494 bp, Gossypium hirsutum
  unsure (1)..(494): unsure at all n locations
cggaanggccggggggacccacgcgtccgctttttcattggaagcttcttttttaaagagagatcagtgatatttggcttctcttccaaagatggactatgtgtacggaccaggaaagaaccatctctttgttccagggccggttaacatcccggaaccagttcttcgagccatgaacaggaacaatgaggattaccgttcccctgccattcctgccatgacaaaaactcttcttcaagatgtcaagaaaattttcaagactactactggaactccctttttgattccaactacaggaactggtgcatgggagagtgcactcactaataccctgtcccctggagatcgaactgtatcttttctaattggacaattcagtctgctgtggattgatcaacaacaacgcctcaacttcaacgtcgacgttgttgaaagtgagtggggtcaaggtgctaaccttgacattctggcagaaaaacttgcagctgatcact

SEQ ID NO: 198080 - DNA, 395 bp, Gossypium hirsutum
aacaatccaaaagctcacttccgttatccaccgtctcccacctgtatcctgccacatcctcacccgatcctccgccaccttgtcctcctccaagaaggttgccgacaggatcgtcaagctcttcgccatcgacccagaaggccaaaagcgggaggttgtgggcctagccggccacagcttacttcgggccttgactaacagcgggctgatcgatccggcgtctcaccggctcgaggagattgatgcttgctccgccgaatgcgaggtcaacatcgcccaggaatggctcgagaagcttccaccccgtacctacgatgaggaatatgtgttggtaaggaattcgagcggtcgtatcttgaacaagcattccaggcttgggtgtcaagtcgtgctta

SEQ ID NO: 198081 - DNA, 374 bp, Gossypium hirsutum
atccaccaaaaacagcgatagtgtcgttgacgaaaccttttatttccgctactcctccgccgccgccccaccctcatcctcctccgctaatcccaatcaagccacctccaaatccaccggcggtggcggcgggtccggcggtctagccccatcgaaatcaaccctttacgtctccaacctcgactactccctcacaaactccgacctccacactctcttctccaccttcggcaaaatcgcccgcgtaacagtactcaaagaccgagccacatggaattcaaagggggtcgccttcgcccagtttgtttcccgcgatgacgcgctatccgcggcgagtgttatgcacgggaatatactcatcggcagaaccctta

SEQ ID NO: 198082 - DNA, 436 bp, Gossypium hirsutum
  unsure (1)..(436): unsure at all n locations
tgaaattggacggttctgatttgaagagacttacccacaattcttatgaagatggggccgctacgtgggccccattgtacatcaatccanttgacgtggaatggccgaggaagggcgaatgtgcatttgtgggttgtcattggctgaatgaaatgccagggcgtggaaccaagttggtcggaccatgggggttagccaagcccctttgcggtgtattctaaatttgtatggtgtaattatgtgctttggagtattgtaaatctgcatggtgtacctaatctttgttttctttttcttggactagatagcagcgaaggaaataatgagcatatgtatgccccttccccatgtaattagcttgtggaatctggaaaggtgcactttctattccattcctaatataaatttcactggtcttaaatggctgggttgggtt

SEQ ID NO: 198083 - DNA, 396 bp, Gossypium hirsutum
aaattattcttttaaacgaaggtattcgtgcttgtatggcggctcaagatccgcccccgcgtacccttatattccctgaggaggttctaccccggggaaacgctctttaatggaactttagctttagccggtcgtgaccaacaaaccaccggattcgcttggggggcccgggaatgccccggcttatcaatttatcccggtaaactattggggggctcatgtagcccatgccggattaatcgtattctgggccggagcaatgaacctatttgaagtggctcattttgtcccagaaaaacccatgtacgaacaaggattaattttacttccccacctaagctactctaggctggggggtaggtcctggcggagaaattatagacaccttttcatact

SEQ ID NO: 198084 - DNA, 531 bp, Gossypium hirsutum
aaccaagttcacaggaaccagcacttaacaaaagagagatacaaacatggaataaacacccacaacaatgaaaccaaagtgatccacccaactttcaaacccttgtttaagtacatggaagaaggccataaatcttaatattcagtagtgggaagctgttcgtgcgtgtctgggccgatgaagaagacctcatagacaatagctgcaatggcagcgccgacgaatggaccgagccaatagacccagtggttgtcccacgtccagctgaccacggctggtccgaaggagactgcagggttcatggatgcgccatcaaaggcaccaccagccaagatgttggcacccacaatgaaaccaattgcaatgggtgcaatgatcccaatgttacccttcttcgggtcaacagctgtggcgtatacagtgtaaaccaaaccaaaggtcatcacgatctcgaaaaccactgcgttccatgctcctaccccagatgacaagctaaatgctgatgttgtcagtccaccagttaaaaacatg

SEQ ID NO: 198085 - DNA, 479 bp, Gossypium hirsutum
cccacgcgtccgcgaaaatatgaaatgattgataaacaagtttcaggggaatcgacaattaacagaagagagatacaaacaacagggaacaataagcacccaatcatgaaaccaaagtgatcccaccccgcatagaacccttgttaatggatcacatgaaactcatcgaaaagaccagaaatcttaaaattctgaagtgggcagctgctcatgtgtgtcgggggcgatgaagaagacttcatagacgatggctgcaatggcagagccgacaaagggaccgagccagtagacccagtggttgtcccatgtccagctgacaacggctggtccaaaggagactgcagggttcatggaagctccatcaaaggcaccaccagccaagatgttggcacccacaatgaaaccgattgcaatgggtgcaatgatcccaatgttacccttctttgggtcaacagcggacgcgtgggcggacgcgtggg

SEQ ID NO: 198086 - DNA, 461 bp, Gossypium hirsutum
gactggccgactccgacccacgcgtacgccccctctcctgtttgtgctctgtttttctcttctgagttgttttctgatttagggtttagccactctgggtatttattatttcatctaaagaaacacttttggggattaaagtgggtagtttattattattactttttggtcggagttaaaacggtatatatatagggggtatttattttgattttttgaatggcccggttgattcttccttgcaaaagttcgtgtttggcaaggaccagtcttttgggttaaaaggagtgtctgttcagtgaagagtatatctgggtataggtgtttctcggctctagaggccacgcatagaagaaattacaggtttccacattcttcgccttatagggcaagagaaaccagcagaaggctgatttgttcagttgcaacggaacctttacctaagcgagttgaagaatccg

SEQ ID NO: 198087 - DNA, 426 bp, Gossypium hirsutum
ggaaaacccggcccgacccacgcgtccgcccacgcgttcgcccacgcgtccggtaaaaaaattaggtaaagagagaaccaaagagcaagtgcaggaacagtgcaaaagttttctcaagaaaaagtggagatatataaaggttgataccttaactcaagaaaaaaaaatggcgttttacgtcgacgaagaagaggtctggaaatgtccgagtcatccttctaagcgtcgccgtactggtatctgcccggtttgtctccgagacaaacttgcttctctttgccccgacttgcgcccacgcgcgtccttgctcatgtatcacaacctcttcttcttcttcctcctcttcctccttctcccgcttctcaactgcggcggccggtggcaacacaggtgtcggttctgttggtcgagtttctaatcttatcg

SEQ ID NO: 198088 - DNA, 750 bp, Gossypium hirsutum
gaaaaaagcgtaattttaatgcgattcaaaagggggcgtaggaagtgggaaccaccacccatgtgccctccctcctgtctccaccagctgctgccgctcaatgattagcactctgctccctccccaatatccatccctctcctctctgtatttccattaatttgttttttttttttttttttgcttttcttttcacatcaaacacctacaataacactgcaaccaatcttttcagcttaaccccccccaacaaaaaaaaagaaaaaggaaaaagaaaaaaactaagtgagaacattttcagtgagcctagtcgaaattgtatacggttttggggttttgtttggtgccgcatgtcaaattcagaggctgctgctaaaaacggagcaacaatggatacccagagacaacaagcgccggggaacggtgcccttgccgtcaagaaacctccctccaaagaccgtcacagtaaagtagacggtcgtggacggaggataaggatgcccatcatttgcgccgctcgtgttttccagttgactcgcgagttgggtcataagtccgacggtcagaccatcgagtggctgttacgccaggccgagccttccatcatagccgctacaggtacggggacgactccagccagcttctccacagtgtcagtttccgtccgcggcggagccaattccacttctttgccgtcaacgacttcttcgtcgttggattataagcctttgttgggttccaccccttttt

SEQ ID NO: 198089 - DNA, 386 bp, Gossypium hirsutum
gcgcccacgcgtccgtccacgcgtccggttctaattgcttttgaagcaagaaaacggttgtccagatggagagaatttggattaccaatgaaattatccataacccaactgttaataagcgattagaggagatggaagttaaaaatattcctatcgaggaagggaagaaacggtttgatgtagtggataagaaggatgtcgtggttttgcctgcttttggagctgcagttgatgagatgttggttttgaatgacaaaaatgtgcaaattgttgatacaacttgtccttgggtaactaaggtatggaacgtagtagagaagcacaagaaaggagactttacttcaatcatacatggtaaatatgctcatgaggagacaattgcaact

SEQ ID NO: 198090 - DNA, 456 bp, Gossypium hirsutum
aaaaaaaaaacaaaaatttaattaaaaaaaaaattctcgcccgaaaacactctctgctctctggcgagcttttgaatgattataaacagtccgtaactcgctatttggagggcaagataaacaagcgttgctgtttgaagcatttaatttgaattggtttgattatgggtgaacaagaaacaaagaccaaagtccctgacccagtggctaacgggacttctcttccggaaaaatccagtgaagttgtagcagagaaaaaagaggaagaagataatggggtaaaggaaatggaagaagataagaaaaatgatgagaaagttgagactgagaagatggatgaagaccaaccggtcaaggatgacacagaaagcaaagagacggaaaaagaagaaaaggaggaacctaaaactgaggcgatggaagatgaaaccaatgcaaaagaagatgttaggaaag

SEQ ID NO: 198091 - DNA, 620 bp, Gossypium hirsutum
aatttcccttatccccattataacagagatctccgctcaatcgaatcctgaaaaccaaagaaattttccatgccttgtccaagcggaatcctcctcttcctcatcctaatctccctcccagcttcttcattcgccgtagccgatgacgacaatctatccgcgtaccaagctcttcaacagtacgacttcccagtaggcatccttcccaatggcgtggttgggtacgaattgaacagggaaacgggcgagttttcagcttatttgagtggaacctgcaagtttgacattgattcataccaactcagttacgaatccaccataaaaggagtgatctccccaggcaggataacaaatttgaagggagtgagcgttaagatcctcttcttctggcttaacatcggtgaagtgatacataatggggaccagatggagttctccgttgggattgcgtcggctaacttccctattgacaacttttatgaatctcctcagggtgggtgccgatccaactgcaatggcttgaatgctttagcgtcttctatttaaggtaggttgtgatataactattagatgatttatgattggtactcgtttaggcactgttcgggtatgtttatcgc

SEQ ID NO: 198092 - DNA, 371 bp, Gossypium hirsutum
cccacgcgtccgcagattcttcactcattcatcttttttctttggtttttgagcatcaccacacaaatccatagatacctcccctccacccccctctcaacccacaattttacacaggagaaatttatcacaaccatgaagcgagaccacaatcatctccaacccaacccagacccctcttctctccgcggcgctccttctaccggaaaggccaaggtttgggacgaagaagccgcccaacaagactgtgggatggatgagcttttggcggttttgggttacaaggtcaaaacttcagacatggctgaagtggctcaaaagcttgagcagttggaggaggttatgtgtaatgttcaagatgatgggatttc

SEQ ID NO: 198093 - DNA, 808 bp, Gossypium hirsutum
gagacactgagtttgctaaagatgctgcctttggctataaatcttcaaaccttcgagagtgggtggaggagaaaacagcaggacgaattccagctagcattgttgcatccatttctatccaacttttaagaaaaggtggaccagatgctgtttgtgagcttctttgcagtttggagaagggatcgacatgcattgtaaatgcagttagtgaacgagacatggctgtatttgctgctggaatgatccaggcggaactgaaggggaagtctttcttatgccgttccgcggccagctttgtttctgcccgcattggaattatccccaaagctccaatccgcccaaaggatctaggaataagtaaagagaggagcggtggactaatagttgtgggttcatatgttccaaaaacaacaaaacaggttgaagagcttcagacacaacatggacatatgttaaaaagccttgaggtttctgttcataaagttgctatgaagtcatcccccctggccgaccaggaaattaatagaactgcagagatggcttctgtttttcttgcagctcgtaaagatactctgataatgagcagcagagaactcatcactggaaaaactgcttctgagagtttggagatcaatttcaaagtgagctctgcacttggtgaagtagttaggcggataactacaagacctcgttacattctggccaagggtggaatcacttcatcagaccttgcaacaaaagctttggaagcaaaacgtgccaaagtagtcggacaggccctagctggaatacctttgtgggagctagg

SEQ ID NO: 198094 - DNA, 450 bp, Gossypium hirsutum
gtacaagaagacgtaccgatacgatgccgttttcgcccttggtttcggggctgtctatgatcagttgagggaagggtacccgagtgatgaggatcgagatgccatcttccaagcttatattaacgccttaaaagaggtccctcaacagtatagagctgatgcgcagaaattagaagaatgggcgcgagctcagacttctagttcgctagtcgagttttcatctagagatggagaggttgaagcgatacttaaagacattgcagaaagagctggtagtaaagggagtttcagttatagccgtttctttgctattgggttgtttcgtcttcttgagcttgccaatgcaactgaacctacggtgttggaaaagctctgtgcagccttaaatatcgacaaacgaagtgtggatcgtgatcttgatgtgtataggaatttgctttccaagctggt

SEQ ID NO: 198095 - DNA, 441 bp, Gossypium hirsutum
cccacgcgtccgcccacgcgtccgaagaaaaccaatttttccctttccaagaatttgtgaagtgtttttttttttttttgccatgggttcaaactcattgaagaaccctcttctgttcagtgatgaagttgagcctggttatgtcaaaaactcatcttttctgaaatcatcagtgaaatggggtttaaagattgtaatgtgggtgattttcattgcatgggttggtgttatttttctatatcctggagaaattggtagtcagttggttgagaaaattattaatgccaccaacggatctgttttcggcacttcaggaagtttgttcttggtattcagtgctccaattcttctcattgcaatacttgcagtagctcatctgatcatctctggtgaacatgttttcgagaagagtaagtcctcaaagaaaccagggttttcgtt

SEQ ID NO: 198096 - DNA, 401 bp, Gossypium hirsutum
agagaaggagatggaacaagtaaacattaaaccaagtcttgatgtccgccttagtgatttgaagcttgttttaggaccagaactgaggatagtgtatcctttgattctaaactttgctgttggtggggaactcgagttgaatggccaagctcatcccaaatggattaaacccaagggcattttaacatttgagaatggtgatgtgaatcttgctgcaactcaagtgaggcttaagccggaacatctaaacctagcaaaatttgaacctgagtatggtttcgatccaatgctggacttagctttgggtggatcagaatggcaattcaggattcaaagtcgagccagcaattggcaggacaagttgttggtgacctcaacacgttcagtggagcaggatgttc

SEQ ID NO: 198097 - DNA, 1230 bp, Gossypium hirsutum
attttgtgaattacagccactgccatttttgaactataagaagactattgcatggggtaattgaacaagacacatttccattgctattattagaattgaacacttaaagggagatcaagttcaaaaactgggatggcttttgtaacgtcggaggaattgctggccactttggtgccaattgctgtttattggatatactcaggtatgtatgtgatgtttgagtcaaggtttgagaagtacaagttgcactccaagaaagaagaggaggagaagaatttggtttccagaaaggaagtcttcaaagccgttctttgccatcaagtcatgtcaattgctattaacctcttcacgtatgcggtaacaagagaaaaagatggtgaggcatctccaaagaaatcactaaccttgcttcttctagccaagcaattggtgatagcaatggtggtgatagatacatggtcgttttttgtgcattggtacttgcatcagaacaagtttttatacaaacaccttcatgttccgcatcaccggctggttgttccctattcatttggaggacagtatatgcatccaattgaggggttcttggacaccatgggcggaacattagctgtactcctcttcggcatgtctcctcggactgccatgtttttctcctcctttaccatccttaaattagtggatgatcattgcgggatgaagcttccctggaaaccccttttacctcttttttaacaacaattcggcataccatgatgtccaccatcagctttatggtaccaaatacaacttctctgtctactttgacatatgggacagaattctaggaacctatatgccttattcacttgagaagagacctgatggcggccttgaagtacgacgtgctgatcaagaacacaagaaggattgattgattaattacttaattaatcagccaattatgataactagtgagcacggattgatgaatgttccattaggttttatatatgtatctaatgtgtatgtattatgtgtactactatgcttcactaggagtaaaggcaaatctggtgtgaaactaagtcaattatgatgactagtgagcatggatattgatgaatgttccattagtttttatatataatatctatatgtattctatatatttctctgcttcactgggaataaaggcaaatctggtattgaacaaaatattatgaataaaactagaagcttatattcttc

SEQ ID NO: 198098 - DNA, 683 bp, Gossypium hirsutum
  unsure (1)..(683): unsure at all n locations
cccacgcgtccggtgttgaagctttaaatcccttgtgttccttcactccattgccagtttgccaccactaatggcgacatgcatagcagctcgcatctccaggaaggccgcggcctctgctttctccgctcaccgtcacgtaatctcatcccgttgtttcgccacggagtcggcgaaaacgatctcgccgtcgtcggatcgagtcaagtgggactacaggggccaaaggaagataatccctctcggacagtgggtccctaaggtcgccgtcgacgcttatgtggcacctaatgtcgtcttggccggtcaagtaaccgtctacgacggagcgtcggtgtggaacggctgcgtcctacgtggcgatctcaacaagatcaccgttggattctgctctaatgtccaggaacgctgcgtcattcacgccgcttggtcctcacctaccggacttccagccgagacttcaatcgagaggttcgtgacaattggtgcatacagtctcttgaggtcatgcacaattgaaccggagtgcattatcggacagcattctattctcatggaaggttccttggtggaaacacactcaatccttgaagctggttctgtantacctccaggcaggagaatcccaaccggtgaactttgggcaggtaatccanctaagtttgttcganctctaacccatc

SEQ ID NO: 198099 - DNA, 398 bp, Gossypium hirsutum
cccgcccgcccgtgcagctcgcttctctagaaaggccgcggcctcggcgttctccggctgccgctacgtcaccgcttcccgtagtttctccgcggaggctgccaaaacgatctcgccatcgtcggatcgagtgaagtgggactacaggggtcaaagaaaaatagtccctctcggtcagtgggtccctaaggtagctgtcgacgcttacgttgcccccaacgttgtcttggccggtcaagtaacagtcaacgacggagcctcggtgtggaatggttgcgtcctacgtggcgacctcaacaagatcaccgttgggttctgctctaatgtccaggaacgctgcgtcattcacgccgcttggtcctctccgaccggacttccagctgagacatcaattgaga

SEQ ID NO: 198100 - DNA, 426 bp, Gossypium hirsutum
cccacgcgtccgcccacgcgtccgtaaccttagccctcacttgctgccgatgtttctgttactcgacggtgtgacggccgctagtgttctttttcctctcttctccttctctcttctttcttcgtttctccttttctctcctctcttcttttttcttttctcctttctcttgttttttctttttctttatttcttttcaaaattttcgaagatctaaaggtgtcggggcccgtttcggtcactgtcgctggggttcccgttagccctcggtggccgtagccggattctccttttccgctggcgtctcccttcaaaaggtgagttgtatttttacttttatttttattttggttgtcttggttgttcgggttttggtgatgttagaagaggaagggcaatgggtcggcgatgggcagtaacggtggt

SEQ ID NO: 198101 - DNA, 776 bp, Gossypium hirsutum
  unsure (1)..(776): unsure at all n locations
gtccactgcttctgaagctgttaatggtcattcattggttcacgggcatanccatcatcatggaattgatatggatcaccctattctancattgaatatgaccattatagcaatatgtattaaagaagggctttattggataacaaaaagagctggggaaaggcaaggtagtgcactgatgatggcaaatgcatggcatcaccgtgcagatgcgatttcatcggtagttgcacttattggggttggaggctctattcttggagtaaagtttttaaatcctcttgctggactggttgtctcaggaatgattctgaaagctgggctggaaactggataccaaagcgtccttgaactcgttgatgctgccttacctacagaacaattggagcccataaatcaaacaattctacaagttaaaggagtcaagggatgccatcgaatgagaggaaggagagctggttctaatctgtaccttgatgtacatattgtggttgatcccttttctagtgttagtactgcacatggcattggcgagaatgttcgtcaccaaattcataaatcccaccctgaagtaaccgaagttttcatacacattgatcctgcctatgtagagttctcccctgatttaatggaccaaaatgaaggtttgaagacaatcactgaacagaatagtaacatgtctgtcggtgaagagaatgttcaagcaattgtttctcatcttctctcatcaaagttttcaaagaaatttaaggtcgagcgcatcacccaacacacct

SEQ ID NO: 198102 - DNA, 384 bp, Gossypium hirsutum
gtctaccaacctatgtaattcgcttcctttaaactgttcttaattggatgatgtagaattttatggatatatacgctatcttcaagcttccgccttactttcgtttcttcagtctcagctagaccctccgcgggcgggtgtatcactgcaacaaaactctgcagcgtgctcgttgcaaatctggatctaccccgtcataaacacgacgctattctgtgactcagcgcctgcgtctaacttacgcctgcggtgaacgagccctggggacctaacccggtacccccaccctattgggcggccagcatccgatcatcgttactgcctgcccaatgagcttcgccgtttcttccccgacttacggatgaaggctactgctcgacatcc

SEQ ID NO: 198103 - DNA, 833 bp, Gossypium hirsutum
  unsure (1)..(833): unsure at all n locations
cttttccaacaaacctaatctgaaattcacttcttttgatcaaaactatttggtccaaaacttaaagtatccaaaaacctcaggaatcccattgttttccttttccattttttgtttgtttctaagggaaatgagggatgttttcatggttggcaaggatagctctggcttgttggagaccagtgagtcgatatgcccgtatgaacaaggattacaacaatagcaatagtgaggaacttgaagaagattcttcttctttacgtgactcgcttctttggtgtagagaccttgaaaaacactcttgtggtgatttttcatttgctgttgttcaagccaatgagatcattgaagatcatagtcaagttgagactggcaaagatgcaatttttgttggtgtctacgatggacatggtggccctgatgcttctcgctttatctctgatcatctctttcaaaatttgattacagggcttgctcgagcaaatggaaccatttcggaagatattcttagaaatgctttctccgcaaccgaagatgggtttcttgcgcttgtgcgtaggtcttgtggaataaaaccattaattgctgcaatcggatcttgttgtctggttggagttatatggaaggggacgttatatgtcgctaatttgggtgattctcgagcagtaatccggtatttaggtaggttcaataaaaatattgctgagcanttgactaaagatcnttatgccagtattaaagaagttagacanganctgaagtcnttgcctcctgatgaatctcatatccttgttattaagccatggagtgttgggcttattaaaggcttcctt

SEQ ID NO: 198104 - DNA, 643 bp, Gossypium hirsutum
  unsure (1)..(643): unsure at all n locations
caaaaagaacactcggaaggcattcgaacatacagaaacacacgtaccccagccagaacaagaaaacaagtagtgtattaattaacagaagctgcatattgtagagaaacacaatagttacttgccatcaatggaagctgcaaggaaatttctctctcttcctccatctttttctacgagaacccaacttaagaattctgtctcttcatcaccatcttcttcagtttcaatgtttcacgagcaagcggctgctgctgctgcaacatctattccgattaattcggtagctaggcattttcctacatcagttctctcacaagagcagcgcgatgactgcagacctctgcctatcttgcaatactttaaggaagataaagcatattcagggccaacagacaaacagcaggttgagaatgggacaacacttcatgaagagaaggcctncaacaactttgaacagcagatgctccaagggcctgatttaaggcaattattgtcagtcttggaattaggggaaaatccatcatcttccttgtatatgcagtctgntgcagctgatactgaggagattatgaatgttgaaccaagtactatattggcccttgctaagaatgctttgtcagcttctaaacaagctttagca

SEQ ID NO: 198105 - DNA, 235 bp, Gossypium hirsutum
gttgatggtgggtttacatcttccattctctcattgcgtgtcttcagatgaggattgatgaaaatatgaaccaaaatgaggctcattagctttggttcaactattaccagattgtatttcccttctattttctcctgtcactggtatgtaatttgtaacaaaaaacttctaatataattttaattatatctatatataaaatatcatatgctttaatacaaatatccaagatttt

SEQ ID NO: 198106 - DNA, 659 bp, Gossypium hirsutum
aaaaatacctgtggctctcactctccttaaacatgtcaagaaatcaaataaggtgttcactaggatcatcattatcaacaacacccaaaaaagctgtaccctcaccaccaccttaacaatgaatgacacagtggacaggcttgtgatctttctagccaagagagatggcattgacaagcttgtgaagaccttccaatacgtgtttaagcttgttaactggcaagtagaaaccacacacccagacctagcaaacaggttcaaacaatgggaggtctcctccggtcttagcagaaaagcctttagaacaggcaggttcctcactggtttcaatgggttgagaaggaaccctggtgccaccccaacattcaagttcctagctgtacttgctaatgcaggagagatggtgtatttctttttcgaccactttctatggctatcgaggattggaacattggatgccaagttggctaagaggatgagcttcgtatctgcatttggtgagtcattcggttatattttcttcattgtttcagatttgatcgtcatgaaacaaggcgttgaggccgaaaggaagctcatggctttacaagaagaagaagaaaattcaaacgatgcaaaagagaagatatgaaagataagaggggatagggtgatgaggc

SEQ ID NO: 198107 - DNA, 643 bp, Gossypium hirsutum
cccacgcgtccgattaaaataggagactccgcccatttttcttcattttcctccaaccataatcattatatttatatttcttcctctctcttctttatttcttcaagtttaaggcctcaaaatggaggcagccactgtggttggatcttctatgtctctacatcgaacttcatgctccgctgccagatccgcccttttagctgccaatggcccgctctttccacgtttcgctgctaaccctcgctcctccttctcgatcaagctttattcttcagtttcatattcaaaatcacggaataggagaatgggtttggggggtaggagaggcatggtggtaaaggcgtcttcatctcctgactcagctgaacccaatgctcaaattgcgtcacttcggatggaatctccaattggtcagtttttgtctcaaatcttgataagtcatcctcatcttgttcctgctgcagttgagcagcagcttgaacaacttcaaactgaccgtgatactgatgaaaagaaggaagagccgtctgcttcaggcacggatttagtatttgataggagaattgctgagggtaaagctaatgagcggaaaagggcattagaagagattctctatgcattggtcgtacaaaagtttatggat

SEQ ID NO: 198108 - DNA, 667 bp, Gossypium hirsutum
ccggtaattcctggccggaccgacgcgtccgaataaattagagtgttatctttctccccctaatctctatctccatggcggataaaacgagagcctcaccttaccactctcatttcttccaactcccttcttcttcttcaatttgatctatctgtttctttcttctttgcttcttttcaagctctattattataacagctacctctgcttcttcttcttcttcttttcaattgccattagtttgattgtagctatggcttctgctgctaactgtgtagtgtattttagcagcaacactaactaccttactgtctcagaactaaaaaaccattctttgcctgctacctttgtcagcagaccacccaacaattacactcttgggaaaagaagtcattacagtgtcagattgttatcttcaacgacgggaatcaatccacgggcagcagcaccatcagccactgctgtagagaatgatggaagtttccccgacactgatatggttccaacccccaaagttataattgatcaagactcggatccagatgccactgttgttgaaattacctttggcgatcgactcggagcgcttcttgatactatgaatgcacttaaaagtctcgggttgaatgttaccaaggcaaatgtctatttggattcatctgggaag

SEQ ID NO: 198109 - DNA, 673 bp, Gossypium hirsutum
  unsure (1)..(673): unsure at all n locations
ttcaattttcactagctacttgacttcattgcttaattattatttgcagaaagatggattcaattaaatcgcatgcagtatgtcttccaagcccagcacaaggtcatattaaccccatgatgcaactggccaagctcttgcactctagaggcttccatataacctttgtcaactccgagttcaatcatagacgatttatacggtctagaggggaagaagctgttaagggtctgcctcatttccggttcgaagccatacccgacgggctgccaccttccgattctgatgcgactcagtctgttccggcactatgcaattccacacggaaaaattgtttggctccattcttggagctactatctaagcttaattcctcaccccacctgccgcctgttacatgcatagtttgtgatggaaccatgaactttggtaccaaggcagctcaactcattggggtgccttatgttcaactctggacttcttcaaccgttagctttctgggatttctgcactacaaagaactagctcaaagaggcattgttccattcaaagatgaacgcttttgtagcgatgggacacttgagatgcccattgattggatccctggtatgcctaacatgcgtntnaaggacataccaagcttcataagaaccaccgaccctgatgacttcat

SEQ ID NO: 198110 - DNA, 627 bp, Gossypium hirsutum
cccacgcgtccgatgggttcaagcggcggctgctttatccaacatgggaatgttcctcgccgagatgagtagtgactcgttccagctcgagggaatggcatctagggggatgcttcctgaactatttgctaaaaggtcccgttacggaacccctttggtcgggattttattctcggcatccggtgtcatactcttgtcttggttgagcttccaagagattatagcagcggagaacttcttgtattgtttcgggatgatcatggagttcatagcgttcgtgaagctaagagtagatcgtcctgcagaatcgagaccgtacaagatcccggtcgggacagctggggcgattttaatgtgtatcccaccaacattgttgatcctcgtggttttagccattgcatcttttaaagtcatggtggttagcacggtggcagtgatgataggacttgctcttgagccatgtttaaggtattcggagagaaaaagatggctcaaattcaccatgaaccctgatctttatgatcttcgttctccttaccagtaatgtaataaaaaacacatgttattatgttttttttatgtttcatcaagctgttttagttaaatataatagagattattacatat

SEQ ID NO: 198111 - DNA, 542 bp, Gossypium hirsutum
ctcaagagtacaggccgtccgcaattctttgtagagctgacaagtccattgtgaccatgttttagctcaaaatatgacagggtgcagtgtccttaaaaccacatatggatgacactatttaactatgtcacagaggggggatcagccctgttcaggcccacatataaaagctcaacctccgttaacgcttacaggtcctcatatagagccccagttcagtgtggtcttcgtgagcttagagaccggcttgattcactaaagatcacgcagacgatcactgaagccatgaatcttgtggctgatgctcaagcatggagagcatcatgcagctgctgtctatggcagacctttctgtgagtccattggatgaagctctttacatcatgaatgaacagttccagactgcagacatagatgcgtctcttacaaacgataggcttgctaaaaaagttgatacggttgccgttactgcagatcgagggctatggggaggtcctaacaaggctatcacaaggtaagctggggcttgaacggcagcattg

SEQ ID NO: 198112 - DNA, 624 bp, Gossypium hirsutum
  unsure (1)..(624): unsure at all n locations
agcaaatgtattccatcgagatttaaaacccaagaacatccttgctaatgctgattgtaagttgaagatatgtgattttgggcttgcacgagtatcgtttaatgatgccccatcagcaattttttggactgactatgtagcaacccgttggtatcgtgctcctgaactctgtggatcctttttctccaaatacactcctgcaattgatatatggagcataggatgcatatttgctgagatgcttacaggaaaaccactatttcctggaaaaaatgtggtgcaccaattggatctcatgaccgatacgcttggcacaccccctcctgaatccatatcaaggattcggaatgaaaaggcaaggaggtaccttagtagcatgcgtagaaagcaaccagttcctttctcacagaagttccctaatgtggatcccctggcgcttcgcctacttgagcgccttcttgcatttgatccaaaagatcgccccacactgaagaacattgctgatcctatnttatgtttgcaaagtgatcgtgaaccacaccaactattcaaactagattgagttgagagaggaactgcanagaatgtagnaagcgatatcggagatatgagttcatcgacagt

SEQ ID NO: 198113 - DNA, 553 bp, Gossypium hirsutum
gccccatcagcgattttttggactgactatgtagcaacccgttggtatcgtgctcctgaactctgtggatcctttttctccaaatacactcctgcaattgatatatggagcataggatgcatatttgctgagatacttacaggaaaaccactatttcctggaaaaaatgtggtgcaccaattggatctcatgaccgatacacttggcacaccccctcctgaatccatatcaaggattagaaatgaaaaggcaaggaggtaccttagtagcatgcgtaaaaagcaaccaattcctttctcacagaagttccctaatgtggatcacctggctcttcgcctacttgagcgcttacttgcatttgatccaaaagatcgtcccacagctgaagaagcattagctgacccatatttttatggtttggcaaatgtggatcgtgaaccatctacacaacctatttcaaaactagaatttgagtttgagagaaggaaattgacaaaagatgatgttagagagctgatttatcgagagatattggagtatcatccccagatgc

SEQ ID NO: 198114 - DNA, 895 bp, Gossypium hirsutum
cccacgcgtccggttgggcattttcaccattcttgatacatcagttttgatggccgtcggtgttttactccgtcggctctttggggacagtctggtttgctttatggctaaataaggcttacagttcacctattgaggatcctgaacttctgccccaagagaaaaagcttattgttaccaactgtatttccaagcagccagttaaaacaataccttggaagttaatcttgtcaaaaccacctgtatgggcccttatagtgtcccatttctgtcaccactcgtgcgcgtttattctcttaacatggatgcctacgtactatcatcaagtcctgaagttcaacctcacagattcagggctcatttgtgttttaccctggcttacgatggcattttctgcaaatcttggaggatggattgcagacacacttgtgagcaaaggcttatctgtgacaactgttcgcaaggtcatgcaatccattgggtttcttggccctgctttcttcctaactcagctgagccatgtcaattctcctgctatggcagttttgtgtatggcatgcagtcagggaactgatgcattttcacagtctggcctttattcaaaccatcaagatattgcccctcgatattcaggtgtattacttggtttgtccaacactgctggagtactagctggggtctttggaacagctgctactggttacattctgcaacatggttcttgggacaatgtcttcgaggtttcggttgggctatacttggttggaaccgtggtctggaacctcttttcaactggtgagaaaatactggactgactcagatatttagatgtttagcatgagttagctcaagccttcatgggctcgagctaattgaaagagtcaatttattgaat

SEQ ID NO: 198115 - DNA, 315 bp, Gossypium hirsutum
gcgcccactcgttcggaacgccttctacttcgcgttgcctctgcagtccactaaggaggtgcgaaccagatcttaatgaattcaagaagctctgttgcatccacagtttcctgccaatcgggaaacaagaacgactatctgttctggattttggctagcttgcttccaagtttcctaggaacccttgttgcatacgttaactttcagttgtttaaggtcaatggacggagcctctcttcatcttatgctcatattgtaatctttacaactgtagcctctacacgctctttaaagtaatcttcgctattttttaaa

SEQ ID NO: 198116 - DNA, 383 bp, Gossypium hirsutum
ctcacgcgtacggagagaaaaacataaaacacttccgtaatggcacgcatgaagatcagagagtgcgattccatgagattgtggaaagaacatggcaagaggctttcacggtagagatttgccaatcacatgtgcacaatttacggcatcaactgatttcaatcagctagtacagatggagccatggctttcgtcacagatactggctggtaaacctggtatgttgttcggtatgcgtgggcagagtgcgttgggtggcttaaatataggttgtgctcaagttattacgtttcgcgaaagagcgcctaggcacatagggggaattgaggggatacaagggacctgttacaactccgattgtgggaccttacatacctgacaat

SEQ ID NO: 198117 - DNA, 612 bp, Gossypium hirsutum
cccacgcgtccgctcgcattgaattctgttgggaaaaaaaaatggaagaagagaaggcggcagcttactacgatgagcttaccaggaaaggtgagggagcggccagattcaagcgaggcctcggtttctcctcttgcgatgatcaacacgatgcggttcctcaaagaggcacaacctttgtctctccatgttcatccttcctcagcagtttcgtcagggcctcgagtcctaccaccgcttccaagcttgagaaagaatctcaacttcaaccgatccaacataagctaaagaagaagccggaaagagaagctagggtttcggcgagaaccaacgtggagagagacggagataagcattcaaggaggcgaagcagaagcacgagtagggagagatactgggaaaaggatagagagagaaggaagcggagaaggagtaggtcgcctcgtagagatcggaggagtgggagtagagatcgccggaggaggagtaggtcgcctcgtaaagaagggaaattggagcggaagaagaggagcaggaatttgtcgccgcgggagtcatggaggtcaaagaggcattggacgagagaggggaaatccatgaaggagaaaaatg

SEQ ID NO: 198118 - DNA, 378 bp, Gossypium hirsutum
cccacgcgtccgaaagatttaagagtcgtagtggtgcaaaatggatttaatagaggtttgggattttctggattatagtttcatcgatgaaaatacatctccagatatacttttgcccaattacagtagcggtagggaaattgttgttcatgaagaaaaggaattcgtcgatagagattgctcgcgcaagaggggacgcagtggatcatgcagcaggccagggactaaagcttgccgtgagaaattaagacgggagaaattgaatgaaaggtttctggatctaagctctactttggaacctgggagacctgccaggactgacaaatccgcaatactggatgatgcaatcagagttctgacccaactaagaactgacgc

SEQ ID NO: 198119 - DNA, 417 bp, Gossypium hirsutum
ctcaatttgaagcaacatcatagaactgctttttcttggttccactcttctgttactgtggaagggtcatgatgagtgggctagccttgccaggagtccagcactttcccaggaaagccaatgccacccacagctgaatgctggtttgatgatgcatgcatccttgacatggactactttgtgaagaccatctcaggcataaaggccaagggtgttcgtcccgacttagtaggctcaatcatagcacattatgcatcgaaatggctacctgatctatccggcaatgacaccgaaaagggtcctatgagcctccaagagtcatcgccggagagtgtcacggtttcacggatgaaaaagaggttctttgttgaaaccttggtgggaatcttgccacctgagagagattccatcccctgc

SEQ ID NO: 198120 - DNA, 417 bp, Gossypium hirsutum
gaaaaaccggggcggacgcaggcgtccgcccacccttccggagatcgtatcctaatcacggatcaaaagagagatacggctgcagtcttgctagaggtcatagagtatgtccaatttttacaggagaaggttcaaaaatatgagggttcttaccagggatggagttcagagcccacgaaattaatgccatggagaaacagtcattggtgtggtcagagttttgttgatcaaccgcacgctattaaaaatgatcctgggctgcggtcaacattttctgggaagttagatgagaataacatcaatatcaccccctcaatgatcgcaagtgcattggatccatcagaagctgatccaatcagagataatgagcaagctgagttggctgtgcccattcaaggtgggcattcacttcagaga

SEQ ID NO: 198121 - DNA, 862 bp, Gossypium hirsutum
  unsure (1)..(862): unsure at all n locations
ctccattttcactgctcacaacttcccacctttgccccctctctgtgttgcttacacataaacaatagcatagttctgtttcttctctttgcttctgctttaccctataaagattcactcacttataacactccccttctctatatcctctctgtttcttttctcgcttgatggatttcaagtattctttttccagctttaatctgtcactttatgagttaagttgccgaattttaatgtgcatatagattttcttgttattcggtatgattttagatctgttatggatgtctaaggctttcaagatttgatacttctttgctcatttaacaagtcacttccctgcatttttttacatctttgagttgctccatttcaaagtgggagagaagcaagtttttttttttttaaatcatgatgaatcggggacttcaagttctatctcaaacctcttacttacagacttggaattggttgtttcaagagagcaagggaacaaactggagtgctgaagagaacaagtgtttcgaaaatgctctagctttatatgatacagacacacctgaccgatggtttaaagtggcagcaatggttcctggaaaaactgttgaagatgtcatcaaacagtatagagaattggaagaggatgtaagtgatatagaggcgggattgattccaattcctgggtataccactgattcttttaaattggagtgggttaatgatagtcagggctttgatggaattaaaaactattacactcctggtggtaaaagaaggtctgggtctcgaccttctgatcatganaggaagaaaagggtgccatggactgaaaaaaacacaggcaatttctaatgggttt

SEQ ID NO: 198122 - DNA, 1048 bp, Gossypium hirsutum
tgaaaagcagaaagataaaataactgctgttgtcttttgtactagcacatcggctggtactgagatctataagagattacttccactttaccttcctcgagataagcatgaggaggcggtggccatatctaagcttcctgctgatgttggggatgaaaatggtgagactatcaatcatgagcgtaaaatcagaataaagccattgcccaaaaaggtcatcccaaagccttcccaatctccagctgaagtccctgctagtgatgtaggtttggtacaaagaaactcaagttacttagatacatatttggatcctgctttcatgtccctgatgaaagatccagaccagagacgccaggaacgatgggaaaaaactgctcaagcccgaggtggttggaattgtgctaagatgcttggttttggtgacataggtgggcctccattatctgctgcagaagaatactcacttcactccagatgtcttgctaaggcaaattctcttaatctttctgaaattgcagagatgaaaattctttaccgcgggggggtggacagtgaaggtcgccctgttatggttgttgttggagcacatttcctgctgcggtgtcttgagcttgagcgcttcgttctctatgttgtaaaggaatttgaacccttgatacagaagccttatactattgtatacttccactctgcagcttctttacaagtccaaccggacttgggatggatgagaagattacagcaaatactcggtcggaagcaccaacgtaacctgcatgcaatatatgttctccatcctacctttcacttgaaggccgcaatttttgctctgcaagtgttcgcggacaaggtggtgtggaagaaagtggtatatgtcgacaggcttctgcagctattcagatacgttcctcgtgagcaattgaccatccccgattttgtgtttcagcacgatttaaaagtgaatggtggaaagggtcttatagtggatccccggacgaagtatgtatatcaacgaccgtagacacgaaatatacggtatcaccagttc

SEQ ID NO: 198123 - DNA, 427 bp, Gossypium hirsutum
cccacgcgtccgcttttgtttagattaaattctgtttgagtttcctttggtgaatgatcagacttagagagagagcagagtaatttgggtcaagtgtttctgggttttcacaaccatggcttcttcaatgcttagtggagcagccccaacaggggtaggatttgcgaggtccaattttcattttaggagcttgccccagaagagtttattttcttatacaaagaatcagaagactagaatggtggtaacaaccagatgcagtatatcatcctcaaggccggcttctcagcctaggttcatacaacacaagaaagaagcgttttggttttacaggtttttatcaatagtgtatgatcatatcataaaccctggtcattggactgaagatatgcgggatgaggcgcttgagcctgctgatctttattct

SEQ ID NO: 198124 - DNA, 393 bp, Gossypium hirsutum
aattattttctggcatttatattggggattttctcagttagatattctttttctttaaattgtcatcgatggcacagcagcaggctcaggtgaagttcacggcggtgaagccacagttgatggtgaagacgccaaaggcagttgatgcagttaatttctacaagtccgcttttggcgccgtcgaagcaggccgatctgcttgctgccccccgccaacggccgaacagaacctccctaacatcctctgcgctcagcttgagctcgccggctgttccttcgtcgtatataacgacgactccgctccacagaaaatcgaagggatcgctactcacccctgcccggaaactgatgacgtggaagccgccatttccaaggccgttagcgccggagcgg

SEQ ID NO: 198125 - DNA, 421 bp, Gossypium hirsutum
ggaaaacgaagaaaggaaattttcccaaacatgtcgttactcagcagccataccatccctccccgacctttactccaccttcctccccgaaaccctaacttcccaatcttcaccttcaaacccatcttccttcccctttctcctcccattaaaccctcaaactccgtctccaaaccccccaaatttatccctttagcttccatttctcctcccccggcaacaccctgcaaatctcccgaaatcccagctctggccccactcgacggttcaactcgaaccctcaaaacccttttctccttggccctctccgccaccatcggcttcaccaaaatgatccaaaattatgctctcaaaacaatctcccagaaccccaacgcactttccaccgtgggccctctcttcttcgcttccttaaaggacc

SEQ ID NO: 198126 - DNA, 437 bp, Gossypium hirsutum
ttcattcgtccggccacgcgtgcgatcaaagtgtagagcagtgggcaccatggtccgacgaccctccggcgacactgatcgaagacctcaaaatcaccacccaaaacgtttctcttatatttccctcccggaaaaccgagagaaaaaaatccatgttcttgtcgaacatagacaaagtgctgaatttcccggtggaaaccgtccattttttccggtcccacgaggattttccgccccatgttgcggctgagaagctgaaaaccgcattatcggagctgctagtgccgtatgatttcttagccggaaggttgaggtcgaacccggaaacaggtcggctggaaatcgactgtaactcggccggaatcggtttcgcggtggcttcaagcgattatgcgttggatgatgttggagacttgatttatcctaatccagcattt

SEQ ID NO: 198127 - DNA, 419 bp, Gossypium hirsutum
agagtttctctcatcatcctctcaaaaccgaaactcgggaatttcaactcatcttccactttgactagcggttcacttcactgagtcaactaaaagttatggcgttacctactcatcagttacagagattccttgcaatcgagttcaatttcatctccaatcccaaaatcgcttacaggaaccaactaaccgcaacaacggcagtaagatctagtccaagaagcccctgccgttgctccgcgattgcaataaacgctccttcttcgctaacggatgtttccgggatccgttgggggtcgacgagtgtgcagggcaggcgcgaagagatggaggatgatttagttatacgatcggacggtcttgatggattctcgttcgctgccgtctttgatggccacggcggcgtagcttccgtcaag

SEQ ID NO: 198128 - DNA, 415 bp, Gossypium hirsutum
tacccatggaatcaaagcctttctttcgtttcctctttttcttcatcgccatagctttcctttttctcttcgcctggactcacctccattacgcgccatcccctggcgtcaccaccctcctcgactgtgccagcaactctccttggtgcacctcctccaagaaccggtttcagtccaaacaacccacactcacaaaaaccccacgtgcctccacctcccagcgtcgtcaccacgagtcagctgtccctcgccacccactcgaccccctcaccatccaagagttcaacaaggtccgcaaaatcctttcttcccacgcgctcttcaagtcctccaataactacgcgctccattccgtcgtcctagaagaacccaacaaagaacttgtccttaaatggaaaaaaggccaaccactctt

SEQ ID NO: 198129 - DNA, 518 bp, Gossypium hirsutum
gtgagtactctctatagagaaaaaaactaaaagagagagtaagagactgctgttagagaaacaatgggagaccaaatgccatgtgcagctttgtctaatgtatggaacaaagtgaaaccattcttggcaatcatctccctgcaatttggatatgcagggatgtatatcatctccttggtttctttaaagcatggaatgagtaatttcatcctttgtacctatcgtcatgttgttgccaccattatcattgctccctttgcctttgttctcgaaaggaaaatccggccaaagatgacccttcctatcttcctcaggattgtggttcttggtttgctcgaaccagtacttgaccagaacttatactatctgggaatgatgaagacaactgcaacatattcatcggctttcgtcaacatgcttcctgctgttactttcatattggcaatgatttttaggttagagaagatcaatttgaagaagatatacagtgtagcaaagatcattggaacagcaatcac

SEQ ID NO: 198130 - DNA, 387 bp, Gossypium hirsutum
cacaaacgcagtaccaattttctctcgacaatccaaagccctttcaatggcgtgcagtgcgaccgcattcggttccggcgtatcaacaacagctttggggttgagcagcctcaagcgaagccccactgttggtgtcgctaccattatttttccaaagcctcgccgctcgtcggctatggtagtcagagctgagggtcaaaccataaacccagagataaggaaaacggaggagaaggtggtcgactcagttgtagtcactgaactctctaagccccttacagcttattgcagatgttggaggtcaggtactttccctctttgcgatggaggacatgtgaaacacatcaaggctacaggggacaatgttggtcctttgctcttgaagaa

SEQ ID NO: 198131 - DNA, 817 bp, Gossypium hirsutum
cccactcgtccgaccacgctttcttccacgcgtccgcccacgcgtccgagaaggtggccactttgatctagtcgtcaagatttacttcaaaggggtgcacccgaaattccctaacggtggcctcatgtcacaatatttggactctctccccctcagttcgtcactagacgtgaagggtcctttgggtcacatcgaatacaccggtcagggcaactttttggttcacggcaaacccaactttgccaagaaactagcaatgttagccggtgggacggcgatcacccccatttatcaactcatccaagccattttaaaagaccccaaggacgagaccgagatgtatgtcgtgtacgcaaaccgaaccgaggacgacattttgctgaaagaggagctcgacgactgggctaagaagcatgatcggttgaaagtatggtacgtcgtacaagaatctataagggaaggatggcaatagggcacaggtttcatcacggaaagtgtaatgcagggatcacatcccggagggctccagcgacacccttgcgttggcttgtgggccgccgccgatgatccagttcgccgtgcagcctaacatagagaagatgaagtattacgtcaaggattttttgttggtattttaaggaaaatttggagatgtttaaatgttttttagtcactgttctttgtcttgtattattattaatttttcccatggcatagcaaagttgttgggaaaacgatgtacatagagaaataagggtgttgtagtttgagagaaggaaaataaataataataataaatcttcttgtatcatgttct

SEQ ID NO: 198132 - DNA, 780 bp, Gossypium hirsutum
ctttctgcagaactaaaactgaaaagccttcccaaactcagctcacacccacagaaagagagaggaggagaaaacataacttctagcaaactgggttgttgaaatggcatcgaagttgtgtgactcgtgcaaatcagcgacggcgactcttttctgccgggctgactcggcgtttctatgctccaactgtgactccaaaatccacgcggccaacaagctcgcctcgcgtcacgctcgagtttgggtctgcgaagtctgcgagcaagcgcccgctcacgtcacttgcaaggccgatgcagccgctctctgtattacctgcgaccgtgacatccactccgccaaccctcttgctcgccgacacgagcgcctccctgtaacccccttctacgactccgtcaattcagtcccagccgtcaaacccaacggagttgttaactttctggaggagcgttacttctccgacgtggacggagacgctgatgtcagccgggaggaagcggaggcggcgtcgtggctgcttccgaaccctaaccataaggctgtggacagcccggacgtgaactcggggcagtacgtgttctcggagatggacccgtttctggatctagattacgggcatggggatccaaaaatggatgcccaggagcagaacagctccggcaccgatggggtggtccctgtccaaagcaagaatgttcaagctccgtcggctaacgatcactgtttcgacttggacttcaccggatccaaatccttctcttatggctacaaccccaactt

SEQ ID NO: 198133 - DNA, 422 bp, Gossypium hirsutum
cccacgcgtccgggacatttggtcttggatatgtgagcctcctaacaatgacgattggggtgaatcagacccacacccaccgctcgcctttacaatggcgagttctgaggaaggcgactcaagctcaactcgttcgatccaactcaaagccgagcgtaccatggggtccgattcagaggtctgtataaccttcacaataagcttccaagggttccaatcttcacctctttgggtctctgacccctgttctctatcttcagagcaacctttcctccctttagtacttcagcttctccaagaaaccatcagccgttcaccagcaatgcccaacaccatttgcccgaggtctcagcttcaaaaactcaaacccgaacccatttcttggatcattgagtctcactcacccgaatcattctcgagtt

SEQ ID NO: 198134 - DNA, 470 bp, Gossypium hirsutum
  unsure (1)..(470): unsure at all n locations
aaaatgccttcgaatgccttgcgagtttctatcttcnnttcctcttcttctctggtcaggtaagcctttttttntctcatttctcccaagccttccccatctccttctctcctccctctctccctttccctcaaaccagacgatccatttcccttcacacacgccccatgaacatccccaaaaatctaggcttcggagccaacaacaagcctgccccgtccatggagggttcctccatcgctcagggtccagacgacgacgtccctgctcctggtcaacagtttgctcagttcggcgcgggttgcttttggggtgttgaattggccttccagagagttccaggggtgaccaaaacggaggtggggtatagccaagggtttatgcataatcctagctatgaagacgtgtgtacggggtccaccaaccataatgaagttgtgagggttcagtatgaccctaaagagtgtagc

SEQ ID NO: 198135 - DNA, 954 bp, Gossypium hirsutum
  unsure (1)..(954): unsure at all n locations
cagctcatgaaaatggcatggtcaaatactctgcttcagattcacatcaaatccccttcgagcccttctatccatttcccacattccctcccaaaaagatccccattccttcttaatcctaaccctataaatcccattcccagatccctcagaatgcaattccttcacagacccaacgctgtcccactcgtatcaagagccatggacatcatccaatcgtctcctcccacgtggcaatccgcagtcctcagtaacctcttgatcttcgtcgtcggcaccccacttttagtggcggggctttctctctccggaatttgtgctgcgttcttgcttggcactctcacttggcgcgcttttggctcccctgggtttctcctcgttgcttcgtacttcgttattggaaccgcagtaacaaaagtgaaaatggctcaaaaggaggcccaaggggttgctgagaagaggaaaggaagaagaggaccggggagtgtaattgggtccagtgctgctggttgtgctatggtgctgttctaacaatatatggagttggcgggagaggcattctacacgtctttggcgacttcggttttatggctagtttctgtactaagttgagtgataccagtgtccagtgagattgggaaagcatatggcaaaaaaacgtacctggtgacaaactntcagattgttcctaggggaacagaaggagctgtagntgttgaaggaactgttgctggacttctagcatctatactggcttgcacctattgttgcctattgggtgaaataatgtnccctgagtatggtatggtatagcaatccagatgctaaacttgtagagcantatggtctgattcaanggaaagaaggatcttgctgaccaatgagccgtatgcataacttncatagctgcttttgagtaatgacactactcaattggcaatgtatacctctccn

SEQ ID NO: 198136 - DNA, 424 bp, Gossypium hirsutum
atatggttccctgtttttttttcatttatttacttccccctgttacgtgctaacattagatttcagatccgacgcctgctctgctctgctgtcttgtccgacatcaaattccataccggagctcaactctctcgctctccgccgacgcctgagaacaagatctcgtctctagaaaggtacgttctttgatcaaatccgatcccatcaattttatctctgcttacatcctcgcattttgcgaaaaccatgagctccaattatgggaaaggttcatctggttcgctaaaatccttcgatttcgatctcggcctcggatcgggccgacccaaatccctcaacgaccaaaagaacaaaaccacttcttcctttttatcttattcatcagcaacatctgcaccatcgaagcccgcatgggaacccaaca

SEQ ID NO: 198137 - DNA, 422 bp, Gossypium hirsutum
cccacgcgtccgattaggccaaccagcgctattaaaatttgctatcccaaatcggtgatgatcttaatctcaaactcgatctctctgcttgtattttcttttttgttagttcatattaatctcagcaccaaggaaccaactatgttcgtggacctaaatggttgtgaagttgctgtcgatcaagtctttttcatcatctatctcaaccattatgtatttttttttgttcattttgtagcctttgaattagaccctatagttcttgatgtatcacaaataatattcctagtagcgttgacttttgtcatatttcgatttggacatagtacttttgcagctgatgatgtttttgtatcattgctggttggaacatatcgatgttatgatgtcgatgactagcttccttgatccattgtatttca

SEQ ID NO: 198138 - DNA, 422 bp, Gossypium hirsutum
cccacgcgtccgcccacgcgtccgcccacgcgtccggttggctcgtaagctttcttcgtgctctccaagcaagtttgagaaattttattttttagcaatcaacagtgatggcttcatctctagctctcaagaggctcctctcatgcaacatcctccctagctccttgcgggtggtccgcccaatggccatcgctccatcctcctccaggctctttaacaccaatgccatgcgtgagttcgacgacgatggtgatgggcgtgacctcagtgatgaacgccagcgttcactttctcgccgcggtgacggtttcttcacagaggtgttcgatccttttgctccaacaaggagcctgagccaagtcctgaacatgatggatcagttcatggagagcccatttctctccgcttcccgtggcatgggg

SEQ ID NO: 198139 - DNA, 568 bp, Gossypium hirsutum
cccacgcgtccgaaaacactgaaaaagcaaaaagcttttcaaaaaccaaaacaatggtgtttttattttaacattcgaaccatatttctactttttctttccttaaaacatcgaaaattcgactaaaaccaaacatcaaatctctaatttacattcttagcagcttttttttttgttcccttcagaaaatgagtccaaggcaagaccttctcaaaatgacggcgttcttcatctcgccggagaaaccgcgagacatatccgtactcatcacccgaaccgctctcctcctctgccttttcacctccattactctcgtcctttgcgtatctttctcgaaccggcctcacccgttctctcggttcacttcccctaacaggaaggctttctcccgaccgcccgataattcaccgaccaacatctcccacctcctcttcggcatcggcgggtcagccaagacgtggcaagagcgacgcgccttgagttcactatggtgggacgtgaacctcactcgcgggttcttttggctggatgaaaagcccgaagcgacggcggttaacagttatggtac

SEQ ID NO: 198140 - DNA, 518 bp, Gossypium hirsutum
cccacgcgtccgattttccttatccttgaagttgacgaaaatgctctgaaaaggaaaggaacagtaacaagatttgcagaaaaggagatttatttgctgcaaatactacgatgaatcaagacaatgaacaagacaataaccctgatgcgttagatgattttctgctaaagcgcaaacgtggtcgcccaagaaagcacccaaaacatgatttaaatcagggggagaatgctcagatgccttggaatcagaacctgaaccatgctgagaatgcccatgtcccacctggatttggagcagtgaatggaaaccgaccccaccaagtgaatcctgatgcaaatgacgtaatggttggtcaggctgttagtggtgttattgaggcagcattcgatgccggatatttgcttactgttagggttggcaactctgacaccactttaaggggcgtggtcttcaggcctgggcattatgttcccatttcagctgaaaatgatgttgctcctaatctccaaatgattaga

SEQ ID NO: 198141 - DNA, 493 bp, Gossypium hirsutum
cccacgcgtccgcccacgcgtccgtttagaaagttcttttccgacagcaagcatacctgacgtagaaaacccaaagccaaagcgagggaaaggagaagacgtagaagacgttgaaagaagaatagagattatgacgttggctctctcttcggcaacgtctgcttcttatttcatcactcgtcataatgcaaagccttctccggttatcaaaacgaccttcatgactctgaaaccagcgtcgtttccttcccctttaaccgccgtcattgtgtctgccggggcgcggaggatcgtttcttgccaagctgtctccaccgcttccctcgacaaggacgagaaaaaccgcgtcggcttcggggtccgccgaagccgacgaggaagctaaagtaggggccaaggttaaggtgaaggtaccggtcaaagtgtatcacgtcgttcgcgtgccggagttggatctgatcggtatggaaggagtgattaagcagtacgtcgg

SEQ ID NO: 198142 - DNA, 470 bp, Gossypium hirsutum
cccacgcgtccggcaaaacggatttttgttaaaaaatgagtcagtgtgttccgagttgggaactggatgacaacaatccactcaccactcgccatcactcgttccgcttcaactcaaattccactgcccctgaggttcccttgttagattatgaagtagctgaatgaacgtgggaaaatgggcaactagccatgcacagcttaggtccaccgcgtgtggtggctaaacaactaaacgccaccacttgggataaaccaagagccagtggcggtggcggtggcactttagagtctatagtgaaccaggctacttgttttccatatggtagtaaggattctgtcggtgttgggtggggatgaattggtatggttggaccaccaccgtgtttcggcggcggcgtcgtcttcatcagccaccatggctatggatgctttagttccttgttcagaagacaagaccaccaccgtaca

SEQ ID NO: 198143 - DNA, 568 bp, Gossypium hirsutum
gctggggttaatcctttggcaggttgcttccctactttagctactattccagtctggattggcctgtatcaagctctctcaaatgtggcaaatgaggggctgttgacagaaggtttcttttggatcccatctttgggtgggccaactacaattgctgctcggcaaagtgggtctggaatttcttggcttattccatttgtggatggccatccaccattgggtgggcgtgacactgctgcataccttggtttacctgtgcttcttgttgtcagtcaatatgtttcaatggagctgatgaagccaccccagacggatgatccagcccaaaagaacacacttcttgttttcaagtttcttccgcttatgattggttacttttcattatctgttccgtcatgattatttatttactggttcactaacaacgatcttagttctgtacaacaagtgtggcttttcaaattttgtggtgcttaacctgttgtttatttttattgctaatttaattttttttgcttgtcattattattttcatttattattctttttttctttatatatttttttt

SEQ ID NO: 198144 - DNA, 494 bp, Gossypium hirsutum
agcatgacatgattagcaagctgaaattaaccctactaaaggaacacaagctggagctcacggtgcgctctagaactagtggatcccgggctgcaggaattggcagagctcttcttcatcttattagagcaagcaaagggaaatcaataaattagaaaagaaagagagaatcaaagatgtgcttggtattcgtatgtgatgaggatgaaagggtgatatcggaggcagtcggcaccaggagcctgtcccctactgcggtgggatggtgcaagccatggatgttgaaagccagtggaggttctgctttttgcctttgtattttaagaccagaggaggtactactgcagctttcgcaggcgcttggttgttcattgatttcaagttttgcttgttatcatcctgcccgatctcccctcttctctatacctatctctttccatcttcgcttgtacatgtaaagttttgataataaaaaagagttcctctatttcttt

SEQ ID NO: 198145 - DNA, 435 bp, Gossypium hirsutum
cgatggctctctcaaactcagtcccgtcagcttgcattatctgtctcagtgcttctaatcaattctatcccccatcgtcacgctttcaagtctctcaagccccctctcttctggccatggcaaaaggtgaaaatgggtcctttgactgtttctccaatggggtttgggacgtgggcatggggaaaccagcttctctggggttaccaaccttcaatggattctcaacttcaacaggtttttaatcttgccgtggagaatggcatcaatctttttgacaccgccgattcttatgggactggcagactcaacggacagagtgaaaagcttttagggaagttcattagagaatttcaaggggaaaaacggatacgagatgagattgtgattgccacaaagtttgcagcttacccatggcgtctaacatcagggcaattt

SEQ ID NO: 198146 - DNA, 400 bp, Gossypium hirsutum
gcctcaaccacgtctgctgctgcttctccttctctattccctctttcaatccatatataaatgattggctgtgaggtggaaaattaacaggattaggaggacactctttcgtcttaaagatggcttccgtgggcatggtgccggcttctggtttaagagaatctagtactgccggtgttgagaagttacctgaggagatgaacgacatggaaaatccgagatggcaaagaaatgggaggcaccagtaggggccggtaaccggacctgagccagggcatttaattggggccacctatggggggtggaaatgggcagccaaaccagccgataagttccatggctgaccgtggggtgggccatggatcattggaggttgtcttccaggcaaagtgcttggaga

SEQ ID NO: 198147 - DNA, 283 bp, Gossypium hirsutum
catcgctcacatagcacaggctcgaaaaatagccctttttactttgttatatagattatgttatatagattattatttatctatatagagtattattaatccatagatatatagattctaaatttgattattattagatagattgattatatagctatatccaacttttctatagagatatagaacttttatcagtaattccatctcatttatattatattctatatcatccatatttttaaataaaacaatggctctaaagaaatatctctcataacacaac

SEQ ID NO: 198148 - DNA, 682 bp, Gossypium hirsutum
agcatattttatttatttaagtccttcaagctttatttcatgttcttcatcttcttcttttagttgttcatcaattaagcaagcttatagattccagccatggcggaaaagaaatggattctgatactttttttaactttcatcattgcagtgtctcaagttcaccatttatacatgggggaactagcaagcataatgcttgaaaagcttcaacaatggcggaaaccattcaacaatggtggaaagaacttagcaattggacctaacttaacagcttgtcattcatcgtacggtcgaccagatcttctggtttattgttgtccaccggggtttcagactccagtaccctttaccgattttaagttccctgacccatcaccggtccgggtccgacgaccggcgcatcttttaaacgaaagttttatagctaaatataataaagctttatcaataatgaagtcactaccatacgatgatccacgaagctttctccggcaagctaatttacactgtcagttctgtaccggcgcttacgagatgttgaaccgttccggctcggagctgaacatccaccgtacgtggatgttctttccctggcaccggatgatgatatactttcacgaacgaatccttggtagcctcatcggagacgatactttcgcgttgccgttttgggcttggg

SEQ ID NO: 198149 - DNA, 759 bp, Gossypium hirsutum
cacgcgtccccacgcgtccggcacatacaaagctaccatggctaattttcaaatgaaaaaagttcaacaatgcacacacggcaagctgtggaactcttccagcgaagctctaaccttgaccgacaagaaagtttggcaaggctctcattatgcggatttcccagaaataattgaagatggggatgcgagtgagtttacacatgaatcagtgactgatgatgctgatattcatggttcagttgctggtcttgtgtacaggcgacgtgacggaactaagtggattgttgcctggagcaacccacaagctgagaacagcaaggtctatactgatatccagagacaacctgttcactgggggcaaatcaaaaccaaccttgagaaaagaggaaaaccaaaatttaaagttacaaagtttggttacaatgcatctattgaaattgatcccgtgagtcgttcacccacaatgaaggcatcatttgagttagaggcataactgccttatcgtcttcatcaagctggggtggtaattaaggctatcaaaattaaataatagtgtgatgcttgctgctgcattacctggactactattatagtaaaaagatttgatagccagtagaaccattagaaagtgtgtaggccttcacaatcatgtcagtgccatgtatatgtacatggttgactatttgtgtaatattatggaagaataaaacaaaatggcctttactattttatctttagactaaatttatactctaaaaa

SEQ ID NO: 198150 - DNA, 439 bp, Gossypium hirsutum
gctctttggcttctcattttctctctttcctcacttccttactttggattaccccttttctattatatcacagaagatttctgcagtctttctttcagacgcaagcagcaggcacctgtcctagaaacagagatcttctcaagttagttaaataacggtttttgctatccccattttgccctttcattcttcttcttctccttcatcggaagatgattagttggaacgatctttacaccgttttaacggcggtgatcccactgtacgttgctatgatcttggcttacggctccgtccgttggtggaaaatattcacccccgaccagtgctcgggtatcaaccgctttgtcgccatatttgccgttcctctcttggctttccacttcatttccaccaatgacccttacgcccatgaacttaggttcatagcagccgacac

SEQ ID NO: 198151 - DNA, 671 bp, Gossypium hirsutum
  unsure (1)..(671): unsure at all n locations
tgtttatttttatttgatagtgttttattgcaacttcaattctttgatagtgtgttctaatttcaatatcttgcagtaatggctcgtctgcctttaattgcacaaagtgtgaggcgtaaaagaattggtattgctgtgacaatatggttgcaaatctgtggaatcgcgatttggttcttacttacattgggtgcctgccttagcctacggtcttatagaccaaggattaggtcatatattttagatttttatgcaaaacgggattatgtgaaaaggcttgtatatgctagtgacgagacctgtatgaacaagttaggatgaatagaattgccttttttaaactatgtgagatgttacaaacgttagggaagttgaaagtcgtcaagaaacatgcttgttgatgagcaagtgacaatgtttttacatatgatttcccatcattaanaaatcgagttatcaagtatcactttaataggtcccgggaaattgttagcagatcattnatagtgtttaaatgctgtcatacgcttacaagagtgttatttaaaaggcagagccattacagctaantctttacacaaggtggaatgtttagaattgctagtgctctgatgaaccacatcaanataggttccacagtgataaactaattcnaccccaaagtgcttacn

SEQ ID NO: 198152 - DNA, 557 bp, Gossypium hirsutum
  unsure (1)..(557): unsure at all n locations
ctcaactcaaactcatcgaaccagcgcagcgagagattgaagatcagatattgaagcccctataatgggtgacgtccagacagcggagagcagtaacagagctaggctagccattatggagctggccaacatgataagcgtccccatgtctctcaacgctatcgtccgcctcaacgtacccgatgctatctggcaaggaggcgccaacacccctctctccgccgtccagattctctcacgggtactcccttacggcggcggagaccctgaaaacctccagcgtatcctccgtatgctcaccagctacggcgttttcgatgaacaccttaattgcagcggtgatgactcccactccccggagagaaaatactccctaactgacatcggaaaaacactcgtaacagacgctgagggtctatcctatgcaccatatgtcctccagcaccaccaggatgctntgatgagagcgtggccattggtgcacgaagcagtgctgaatccgacatcggagccattcgtgaaggcgaatggtgagggagcttatagttactatggga

SEQ ID NO: 198153 - DNA, 535 bp, Gossypium hirsutum
  unsure (1)..(535): unsure at all n locations
tttcgtcaagtatgggagctggtaggagaatcttgggaggtttcaatttagcaatcctgatggtggtgatgctagtgagcaccaaccgacactgtgcggccgacgcggttacgaagactaagagcatgagcagccgctggtgcgatgatccttcaaataaggagtgcctgcagctttcggacgacatagaaaccatggagctgttgatggattcagaagcaagcaaaatggtatttgaagcaagtgcagctaccgacttcgccagcagtaaaaatccaactaccagggcccttgacccttctccagctgcctgcggccgtaattctggcaagtcttgcgaacctgctaggaatccaggcacaaaggtacctccaaattgtagttcactatacaccaaagattgccactgatttactactttntcttgctatgctggtatattgtgtttcaatttatcaagatatatatatatatatatatatatatatataaataaggatgatggagaaacatctctttaatatatgcataaata

SEQ ID NO: 198154 - DNA, 758 bp, Gossypium hirsutum
aaaactccacacaatagttctaaggaaaaaaaaacccaaaattcaaatctacagaaaccatgtcgtgttttttacaggcgccagtggctcacacaatcctatcttcagcttcttcatgtcgaactgttcgaagaacaaaggctttgaagcttaggtgcggagctttgggtgccaaaaacgccgccaaaatccccatgcctccgataaaccctaaggacccttttctttcaaagcttgcctccgttgcctcttcttcccccgaagcgctacataatggctcggctaatcccgatacgccgccgtttttggacttgtttgagtcccccaagcttatggctactcctgctcaagtggaaagatcagtgtcatacaatgagcacaggccgagaagccctccaccggacttaccttcattgcttcttaatggtagaatagtttacattggcatgccgctcgtgcctgcagttacagagcttgtagttgcagaattaatgtatcttcagtggatggaccccaagcaaccgatttatctttacataaattctactggaacaactcgtgatgatggtgaaacggttggaatggaaacagaaggttttgccatctatgatgcacttatgcaattacaaaatgagatacatacggtcgctgttggggctgcaataggtcaggcttgtcttctactttcagcgggaaacaagggtaaacggttcatgatgcctcatgccaaagctatgaatcaacagcctcgtgttccc

SEQ ID NO: 198155 - DNA, 460 bp, Gossypium hirsutum
ctctcttctccttcatctcctccgccggagcttaattgcttcgccggtttttaccttctcgcagttcatttcccatggcggctggcttatccgccgccgtaccccttaaacctttcctttcatttcatccctcacccaagcaaaggctagttttcaaccctctacttcgcctcccacagctaacacacggtgctcgaaaggagacaaggctttccatttgtttcgtgttggaggaacaaaatgatgttgaaccccagaccttagtgaatctagtagaagaaggatccggttccgaggattttgggaacaaacagatcttaatacctccacatgtggcggagaaattagctagaaaaaaatccgaaaggttcacttacttggtcgctgctgtcatgtctagtttcggtatcacttccatggctatcatggctgtttattatagattttcatggcaaatgga

SEQ ID NO: 198156 - DNA, 337 bp, Gossypium hirsutum
tttattttcattcaccgcttaatggctcgttcactttgccaaaccgcaatcaagctacgacccggcaccaaaccttgcacatcttcctctcgtctcgtttcgttgcgaacccaatcgagccaacccaatcatttcgatcagtccgatgcttcttccgagtcttcctccgatccgctcctgcgaaaactcgaagacgccatccatcggatcattgttcgccgttcggcgcccgattggctccctttcctacccggatcctcttattgggtcccgcctcccacgtcgcaatcatacggccttgctcagattgttgagaaattggctaatactttgaccc

SEQ ID NO: 198157 - DNA, 456 bp, Gossypium hirsutum
taaattttctttcatcctctccgatcacattcgcaatggattacgatttcaggaacagaacgggtccaccgtacgaggcgcagatcccgatttaccggcaacaacccacttcatcgtcatctacccatccgatgtacggatcttcaatgtacccgaggatcggtggtcaacccgccgctcacagtgttgcccctcccaccactcgcgcctcttctttccaccagaattcttcgccttcctcttcctcgggattgggcattagggttgctttgaaaccagaatatcgtattacacctccgcctcagttgtctccccaagttggggatattcctcgaagcaattttcagtttgatttcgagtttgagaggaaaattttggctgaagcagaaaaagaaaacatgaattggagtaagcttggcttggaaaacctttcttccaagcctatcgaaacttctt

SEQ ID NO: 198158 - DNA, 759 bp, Gossypium hirsutum
ggaaataactgccggaccgacccatgcggtttcttgagaaccatggctggctatggttatgcatacagaggtggctacacgacctacagtggcggcgttgctccacgaggtggcaccgatgggtggaacaaaacaagctatagctcagatcatacgtgtcagcctgtgttcattgatgcagaagggaggcggaagccgatcacgtcttacactggtccgcacggtagcaccgagtattacgttacaaaaaccgagatcgtcgaggttccatatatggccgaattcaagcaaagggctcctgtaagagttgaggtggtgagggaccatggtgagggtaagctgatgactaggcccttaagtcccggggaatggcgggagagttcaagtcctgttcggtatcatactgaagagaaatggaataagccttctagccccgttcagtatgacgtcgaagagaaatggaataagccatcgagtcctgttcggtatcgtgtcgaagagaaatggaataggccctctagtcctgttcggtaccatgccgaagagaaatggacgaaccggccttcaagtccggttaaggaacatcctcaacaagttatggattttattagcaaagttcaaactcaagccagccgaccaaacaagttcggtcctctcagcgcaacatattggcgccagacaccagccacgaccaccacaaccgttggtggtccatggaacaaccagagtcatggtgggggatggtccaaaggacacgag

SEQ ID NO: 198159 - DNA, 1738 bp, Gossypium hirsutum
gttgagagggttgcccaaaagcagtttataaggcgtgggcagtaaaacttacaggtaaaccagatatagagatggcgactaaggttgctgtttccattattatataatttcaagatcacaatgggtctatgataagattgtttatttacagcggaatgatatacaaagtcaacagtatctcactggattccaaattagatttatggcttcacaaaccggtgagggtagttctagatctggtccaagacgaactgttgtaggggattttttgaaaccattgaattcggaatatggtaaggtagcccctggatggggaacgactcctttgatgggtgtcgcaatggctttatttgcgatattcttatctattattttggagatttataattcttccgttttactggatggaatttcaatgaattagattcacaagaatcacgaagcctcgcgtttcaatacaaaaatggaaacttttagttctcggattttttagccccattctatttcggtagttcgaccgcgaaatttatttgtttctgtatttccggaatatgagtaaagtttatgattggttcgaagagcgcctcgaaattcaggcgattgcagatgatataactagtaaatatgttcctcctcatgttaacatattttattgtctaggaggaattacgcttacttgttttttggtacaagtagctacaggatttgctatgactttttactatcgtccaaccgttactgaggcttttgcttctgttcaatacataatgactgaagctaactttggttggttaatccgatcagttcatcgatggtcggcaagtatgatggtcttaatgatgatcctgcacgtatttcgtgtctatctcactggtggttttaaaaaacctcgcgaattaacttgggttacaggcgtggttctgggtgtgttgaccgcatcttttggcgtaacaggttattccttaccttgggaccaaattggttattgggcagtcaaaatcgtaacaggcgttccggaagctattccggtaatacgatcgcctttggtagacatattacgtggaattgctacgtgtgggacaattcactttgacccgattctatagtttacacacttttgtattacccctccttactgctgtatttatgttaatgcatttcctaatgatacgtaagcaaggcatttctggtcctttatagagaatatagaccatagctatattgtaaccaataatttatcttattacttgggggaggaacaatagtatttcatggctccaaatatggattattgaaaaaaaaaataagacatgtatttggatatttcctttcaactacaacaatattctagtatttatttgatatgacatgaatagttgaagggaattccccgaagagaaaatggattatgggagtaacaaaaaaacctgacttgaacgatcctgtattaagagctaaattagctaaaggtatgggtcataattattatggggaacccgcatggcccaatgatcttttatatatttttccagtagtaattctcggtactattgcttgcaacgtgggcttagcggttctagaaccttcaatgattggtgaacccgcggatccatttgcaactcctttggaaatattacctgaatggtatttctttcctgtatttcaaatacttcgtacagtacctaacaagttattgggtgttcttttaatggtttcagtacccgcgggattattaaca

SEQ ID NO: 198160 - DNA, 584 bp, Gossypium hirsutum
gattcgtggagttggttaacagaaaaagcacaaagggaacgtgcagagttgaaagcagtgctgattaggtcagtggcgtcgggcgatggcggaagataaggcagagacacaagcgttcactcctggtcccggatatcggcaattcaaggggagagatgaattcccctccaacattttgcacggcacattagcttgtgccatctggattggatctatgcattttaacgtctccctcctccttttctccttcctcttccttcctttctcaaaattccttttggtggttggagtgcttttgattttcgccgttcttcctattgatcataacagtaaatttgggctgagattggccaggtatatatgtcagcacatgtccagttattttccagccactcttcacgttgaggacatcaacgacttccatcctgatcgtgcttacgttctcggttatgccccacattcggtgttgccgatcggagttgttacgttggctgaacgtacaggtttcatgcctcttcccaaactgaaatgccttacctccagccctgtattctacacaccatttttgaggcatatatggacgt

SEQ ID NO: 198161 - DNA, 438 bp, Gossypium hirsutum
cccacgcgtccgaaaaaaaaaaaacagagagaatgcttttgagaagttcttcaacaccagttcttggatctctggtatcttccatagctgctgatagtcctagcaacaacaatcattactatgaaaccagcagcccctttaggcattacccatcgagctcttttcatggtcacacccaccataacaggctctcgtttcattcttctccaggctccgtccacctatctactgtagtttcttgtggctcttccccggtatctccttctgttgatcagttttctgattttgagcttacagggtttcgtcgggctcaatctgaagggaacttggaagggctcgcccatgctgcttgcgatggcaatgatgaattctacaagcggaaccaacctaagaagttttctgcaaggcacaacaagaagtgcttgatgttgcaaacca

SEQ ID NO: 198162 - DNA, 634 bp, Gossypium hirsutum
attttcaaatacgtcttgctgggtaaaacatataggtaccatgtgttgctgtggttgaaaatatgagtcactttgatgcggatggcaaacgctactacccgtttggtcgaggttcaggctctcaggttgtccagcagtttgggatccctcatctttttgatcttcccattagaccaaccctttctgcttctggtgatagtggaacacctgaagtggtggctgatcctcaaggtgatgttgcccagacttttcagaaccttggagtatgtgttgtgcaacagtgtgccaagattcgccagcaagtatcaacagcagttacatatgacaaatccatcaaggccataagagttaaggtaccggattcagaggaagaattccttctgcatcctgcaacagtaagacggaatgaccgctctgcccaaagtgtggatgagtggaccggggagcaaaagctgcagtacggtgacattccagaagatattgaacctgaagaaattcgacctatgggaaactatgctgtgtcaattacgtggccagatggatttagccagatcgctccctatgatcagctccagatgatagagcgtttagtggatgtttcctcaaccgacagccgtccaatcattgatgataa

SEQ ID NO: 198163 - DNA, 882 bp, Gossypium hirsutum
attttcaaatacggtgtgttttgttcattagagggggggggacttattgggggggggggaaaaattagtcctttttttccggaggaaaaccttactccccgttgggctagggtcaagcttttaaggtggtcagcagtttgggatccctcatctttttgatcttcccattagaccaaccctttctgcttctggtgatagtggaacacctgaagtggtggctgatcctcaaggtgaagttgcccagacgtttcagaaccttggagtatgtgttgtgcaacagtgtgccaagattcgccagcaagtatcaacagcagttacatatgacaaatccatcaaggccataagagttaaggtaccggattcagaggaagaattccttctgcatcctgcaacagtaagacggaatgaccactctgcccaaagtgtggtaagtatgtttttcttactagttaatggattttatttaaatctttctagttgaagaaacgatagcctcagcaagtcctccacgtggtggaacttagctgtcgacagaagtttcaactttaactattgattcatcctttaatttatctgctcaatctttctttttcttgatttaaaacatgatgagtggaccggagagcataagctgcaatccggtgactttccagaagattttgaacctgaagaaattcgacctatgtgaaactatgctgtgtcatttaccttgtcagatagatttagccatgtgatacttaacttgctactgtcttaatttgatatggattgactatgattattttaacggttacataggtattatcttttataattaataaatatatatcctattggtattttatataatgtaagttctgtatatttaaatgatcaacgaag

SEQ ID NO: 198164 - DNA, 454 bp, Gossypium hirsutum
gagctgtcttttttccctccaacaatcctttttcaaacaaaacataacaacaacagcggcggcattaataataatcacaaatatctcgcaccaaaacccaaataacccacctgcttcctcatgccttattcatcatcatcatcatcagcaatggctagcaaattggctttcactttgatgcctcctcgtttcttcactgcgactattcaaaaacccgtggtttgtttctcttcttcttcttcttcttcttctatcagggttcaacccagtgggaagcatctatgttttcgacgccgattgctcttactacccctcaaggctactgccgatcaacaaggtcaggtcgaagaagatgaagttgttgatagtaaaattctgccttactgtagcatagacaagaaagagaagaagtctttgggtgaaatggaacaagagtttcttcaagccctacaag

SEQ ID NO: 198165 - DNA, 414 bp, Gossypium hirsutum
gcctcccacctccctccctcgtgactcccctttctttcttcttctcccaattccttccccctggctcccatgactctcgcgtcttccctttccttgtccttttccttcctcccattactaaatcactacactcgtcatcatcatgcggtcgccgcagggtttccgcaacggcgagaccccttcccctcataaccgaatccctacgcctcacttccacaacaccgtcacgctccgtaaactcaaacgcttcaactcactgattctcgtcttccgagtcaccgctttcactttctccctcgcttcctccgttttcatggtcactaactctcgcggctccggttcccctcattggttcgattatgacgctttcagattcgttttcgccgcgaacgcaatcgttgctctatattcatt

SEQ ID NO: 198166 - DNA, 450 bp, Gossypium hirsutum
cccacgcgtccgaactcattccccgcaaaaccttaacatttcttgatctcaccttccctcatttcgtcaaaaaaatatctccccgcccacgcctcggaatctctctccattcaccgtggcaacttctacttcttctttgctccaatccaacactttgaacttgaaacactatttcccccttcatttgcctcttccttcccctcctcgcctatctcatttcactggaactttggctttcaacggtcaacgttcggcaaagttcactgttaaatgcttcttctcgtcggagcagaggaaacatttgacgagctcgagtttgggctccaacaaccagttgagttccagctcaaatgacaaaaacccattcgacattattgctcaaacaatgttaaaagctttgaacgcgttaaaaaagcccgctatagccgcggttttatcgcgtttgttgct

SEQ ID NO: 198167 - DNA, 639 bp, Gossypium hirsutum
tcgcccacgcgttcgcgagccaaaacgagtggttaccatttttgaacgattagatttttagatggcatctttattccatggttgttttttgttcccgagggagcaatcccctgtaccaactccagaaacacagtttctttctcacttgtcttccccccctcacccctcaatggctgcaatcactaatttcttaactaagccacctacttccgatcttcacttcaccccaaaactcacttctctttgctctcatgcttcttttctaccatcccttgcgactaggcccagatctttttcaacaaagctaggaacaagcacaagctctcgcttcattaccaaggctacagctgctcctgggaccaagaatgctccgagtgatgagcgagttcagaaggttcacagcattgaggaattcgatgaagctctcaggaaggctaaaaacaggcttgttgtggtggaatacgccactagcttcagctatcatagcagtaaaatttacccgtttatggtagaccttagcaggacatgcaacgatgtcgaattcatcctcgtgatgggtgatgaatcggacgagactagggagctttgcaaaagagagaaaattacgaaagtcccgcactttagcttctacaagagcat

SEQ ID NO: 198168 - DNA, 436 bp, Gossypium hirsutum
aaaccgtcgcaggaactttttgtttgcggaaagaacggaaaaagaaaggaaagtgtgcgatcaagaacgagattgggatttctatctgcgaaccgtatcgaacagtgcaggagactcgagttccgctaccgatccagcctcccatccttctcttcttcacgccgtcaagaaactctgcgatttctgtagacaagaagagaaatcctctgaggatttggtcgctagggtttatcctcatatcaacaagctcttccaacgctctacttgcttccctctctcaacctacctctcccaacggaattctcttactggtcattcttcaatttttccttgattttggagaggtggttctccatgatgctgaccctagtctgaggacatttttccgttcatgtttgagccgtgagttcgcagatcctgttgttgcagctgcaac

SEQ ID NO: 198169 - DNA, 539 bp, Gossypium hirsutum
cagccaaacacggctatatagaaatattgaaagcaagaaaatagtctcctttttttttctcttcttctgcaaattcttttctacaacaccctaagaaaatggcggcatcttctagaaaatcgagtggaccggttctccgatccctctccccatcaggccgattcagttctcactatgtgtcacactctccgtcttcttcttcctcggcttttgcttattccagttcgagctttacttcacgctcttctactttctttaatcaacctagatctatttctccaccgcgcgtcaatgtttataaccacactcaatcgtcgcagtctgttcgattctcgctcgatagccgtccgatctcgccgaatcgttcgatttcagctgtccgtagaaacaccgaggcgttgagaaatttacagagcaaacagccaaagcgtacctgtatgtgttcccctacgacgcatcctggatcggttcgttgcagtcttcataaaggattcaataattcgcacgcgtcgtctggttacgcgcctagcaatcggctc

SEQ ID NO: 198170 - DNA, 700 bp, Gossypium hirsutum
ggaaatttctcaaggattctcattgcttttcttaggcaaatcccaaagccataacagatgcaatctctcgtacccaaccgcccaccgcccaccgccaccaatggttccgccgccgtctacgccgccgcctgacccccaacaaatccaacaattcctctcctccgtcctctcccaacgcggcccttccgccctcccttactccgaagactccaaatggctgatccgccaacacctcctttccctcacctcccgctacccttccctccaacccaagaccgccacttttacccacaacgacggccgctccgtcaacctcctccaagccgacggcaccatccccatgcctttccaaggcgtcacttacaacatccccatcattatctggctcatcgaatcttaccctcgttaccctcccgttgtctacgtgaatcccacgcgcgacatgatcatcaaacgcccccatccccacgtttctccctcggggttagtttcgatcccttatttgcagaattggatttacccaagctctaattttgttgatttggtcattaatttaggctctgctttttctcatgatcccccgctttattcccaacgtcgctccaatcctaaccctaacccgcctaattacgggcagcagcagcagccaccgccactgaaggttgctgccgcgggttatccgccttcgccttatggcagg

SEQ ID NO: 198171 - DNA, 677 bp, Gossypium hirsutum
  unsure (1)..(677): unsure at all n locations
cccacgcgtccgcctacttaaaatttgtctttataatcacagtcgaagagtccttggagtttgtgaatgacccttattgcatacaggtaaagagtctgttatttacaaacatgtggctgtttggcagaaaagggccatctgggttttcgtcatcttccacagctgaggaagttacacaggggatcgatggcactggtctcactgccattgttacaggagcatccagtggtattggcactgaaaccgcacgtgttcttgctctgcgtggtgttcatgtaattatgggggtcaggaatgtggctgctggtaaagatgttaaagaagcaattgtgaaggaaattccaacagctaaagttgatacaatggaattagatctcagttcaattgcatctgtgaggaaatttgcagcagatttcagctcctcaggtcaccctctgaatctccttatcaataatgcaggaattatggcaactcctttcatgctttcaaaggacaatataaaactacagtttgcaaccaatcacataggtcattttcttttgacaaatctcttgctggacactatgaaaaaagctgcacggacaagcaaaagagagggaagaattatnaatgtctcatcagaagctcaccgttacacttataaggaaggaattcattttgacaagattaatgatcat

SEQ ID NO: 198172 - DNA, 435 bp, Gossypium hirsutum
cccggcccgacccacgcgtccgcccacgcgtccggaagaagagaaggaggaagatgatttcccagaggtggtgctaaaagtgcatgtccactgtgaagcttgtgctagaaaagttgcaagaaccctcaaaggatttgaaggagtgggggatgttgcgactgatagcaaggcaaataaggtggtggtgaaaggaaagacggccaaccccgtcaaggttcacgaaaggctattaaagaaatacggtagaaaagtggagttagtctcgccgttgccggaaccaccgccgcccgaagagaacatggcagaaaacaaagaagctaaacccaaagaagaagaacagaaacaagagcctcctgcagtgataacggtagtattgaaggtcggcatgcattgtgaagcatgcgctcaagcattgcgtaagcgaataaggaagat

SEQ ID NO: 198173 - DNA, 430 bp, Gossypium hirsutum
atcaatttttgttttctcagtttctttgcgatttcccgacatggggtttttaagatctgtgaagataagggaagtttggtcggatggtttagaatcagagttcgagctgatcagtcgggtaattgatgacttccctttcgtttccatggacactgtatttcccggtcttgttttctgaccaaaagtggacctctctaggccttaccatgagcatctcctccgaccctccgttcattacatgatcctcaaatccaacgttgatgctctcaacttgatccaagtgggcctcactctctccgattcttcaggtaacctgccggttctcggaaccgacgacactcagttcatctggcaattcaatttctgcgacttcgatgtggagcgtgacgctcacgcccctgattccattgagcttttgaggaggcaaggg

SEQ ID NO: 198174 - DNA, 444 bp, Gossypium hirsutum
gcgaccacgcgtccgccacgcgtccgattcatgtctctccttttatccttggtttttgccacttcaattttctggttaacttggatgtaccttttatcctagaagagggatgccgccacccccaccaggccctctaggcctccccttggtgggaaaccttcccttccttcgtactgaccttcactcctacttctctgaacttgctcacatctacggtccagttgtgatactccagcttggaggcatgcttgcgatcctgattacctccccatccacggctcgagaagttcttaaagaccaagacatcgcgtttgctaaccgtgatgtgcctgtggttgccaaggttgtaaccggcggccgtgatatagtttggaacccctatggcccggaatggaagatgttaaggaaagtatgcgttatcaagatgcttagcaatgctacttt

SEQ ID NO: 198175 - DNA, 586 bp, Gossypium hirsutum
ccctctcgtccggggtcggtgaaagataatggctccacacccaccttttaaaccatcttcaattgctcccctgcctcttccttctcctttcacccaattttcttaccaaccaaacatgtttgatcctaccaaagaactgcccaaatcttatgtcagtttatcggatcacttaactggaggattcagtgattgtaatgacagttatgatcgtgccatgaactacggtcccaaagtgcagaaaactgctcaaaactacgcaaattacagcagttggaacaccttggaagggaggttcgaagctgaaacattgatggcggacgatgagtccggaatttccagtcctcctttatggaaatccagtcctcaacatgaaaacaacgttaattaccggtgtctatcgccatcgtcgagagctcaagccatagctagaggccaaaaggagcttatggaaatggttagtaaaatgcccgagtcttgttacgagctttcgttgaaagatctcgtggaacatcagcctgtcgttgttgtggaaccgaagcaagagagtttcgcccaagggagaggttcaaattcgatcgatgaacgc

SEQ ID NO: 198176 - DNA, 428 bp, Gossypium hirsutum
agcttttctccgtgtcttgcttgtaactcatcctcttattattttctttaaataaaacccattttcaagactcagcctttgttcaaatttccaagctgcaagcttgaaaagattgacactttcatggttcaaagcttgtagctccctctcattctttgacaaagcccttgttaacctttttcttcttttctcttgatctatcaaggacgggaaaaaaatgtttggtacccaaagtaaaagagaccttgctttggaattgcaagcacaatttccaattttaaggccaagcatccatgccaggaggagctaatcttacagtgaaattccaagacctttatgggtttactgttgaaggtaatgtggatgatgttaatgtgttgaatgaggtaagagaaaaggtaaggcaacaagggcgagtttggtgggca

SEQ ID NO: 198177 - DNA, 433 bp, Gossypium hirsutum
cccacgcgtccggaagatcaaacgaaatcgtttattagccattctttcaagctccttttttgtggtctccatcgaccacacagtttaactcaccgcctcgcccatggaagctctcagctctcaacccctcgcccttctctccatcttctctcctaaaccaaaagatttcccggctagaatcatccgctttcccacccattccaaaaaggacggtaacgattccgatatccaatatgatcctaacaacacaagcatcgttcctcttgtcggcaatcaaactttctcccaggatgcagcgatgggattggttctaagcgcggcgtctgtaagaggatggacaacaggatcgggcatggagggtccatctgtacccgcccgaaccgatgatgaccaatctaatacggagcaaggtttcacctttccatggtctctc

SEQ ID NO: 198178 - DNA, 562 bp, Gossypium hirsutum
gcgaaaaagctccacaaaagaaactgaaattataggttgtggatgtgaaagatggaaggagttgagcatagagttattaaggtgaatggcataaacatgcacgtagcagagaaaggggaaggcccactcattcttttcatccatggcttccccgagctatggtactcttggcgtcaccagattgcttctttgtcttccaaaggttaccgagctgtggcacccgacctgagaggctacggtgacacggatgcgccagatttggtcaccagttatacctgcttccatatagtgggggatttggttcagcttttaaatattatttcccctaacgaacacaaagtgttggtagtagggcatgactggggagctgccatagcttggtatttgtgtttgtttaggccagacaaagtgaaagctgtgttcaacctcagtgtgtcctttattccacataatccacatatgaaccctattgatgggtggagagctatctatgggaatgattattacatgtgtagattccagcaacctggaaaaatagaagctgagtttgcggagatgggta

SEQ ID NO: 198179 - DNA, 436 bp, Gossypium hirsutum
acaaaccaaaagatatgcttactcacaacgtgtctgcgccgtcttctctatgcccaattctttccaatgactggcatttccatgtatctgatcagcttatatttcctcacaatctaaacccaaatctattttggagagcaagcagaaagattaagggatgccgactcaaggctagcttttgggagtccatcagatctgggattttgaagaacaacacaacacaaatcgttgaaccaccctctacacttgaagaagaggaagaacccttacctgatgaatttgtgcttgttgaaaagtctcaaccagatggtgaagttgaacaaataatattctcttctggaggagatgtggatgtctacgagcttcaagccctatgtgataaggttggctggccgaggagaccattgtcaaaactagcagcggctttaaaaaatag

SEQ ID NO: 198180 - DNA, 720 bp, Gossypium hirsutum
cccacgcgtccgttgcatcaaaaagaaaaagtgagcttttttgaaggagcggaacgtcatacatcaatacacaactcctcaattttctcataaaaaatggaattcgttgttgaacaaggcaaacaaccacaccaagaatgctctactttgcttctgcctgctttgtcgattgggaatgtggggcaactagcggtggatttattagtatcatcaatgaaagcagagagaattgggtacttagatgatccctttgtgcttccttgtgttggaaatgatgcttatggccctattccatgtggtgaccttgctcttcctcttgaagcttacgagtcagcttttagtcgagttgctctcctccaacagcggtctcccgtcgttaagggacgaatggttgaatttgccaaaaacttggcaaattttgctgctgcaagtggaaagaagcatgttgttctgctttccagcttggattttggaaagtggcagaaaattgacatgtcaagtggtccgcagatttattacctatccagcataaatcccgatggaagagatgacaactgtgaacaacttggatggaaaaggctgcaagaatacaatcctgctcaaagatgttggaagtaccttagcaccttagctgaaggaaatactatgctggaaagcaatttaccttttgaagatgagctggaagatgaagattattaccctagtttgccatttgcagca

SEQ ID NO: 198181 - DNA, 420 bp, Gossypium hirsutum
cttttatcgtctctgctgtttgatgtattgctcttgtctctcagactttcccatgtgtgtatatcttctttgacccaaattcattgcctctaaatctttgtcttaaaatcatgtttcttcttgttttctagttttccgcaaaaaagataacacacacccaattttgtcgttgtttttgttgttactttcccatctttgttttgtttgagggagagaattactttcgttgaaaaaaaataaaaccaaggagatggtgtcacgaagtttttgtaagagaagggaaatggcggcggttcttcccgcctggatcatggtagcgattttggttttggaggctagtctggtcatgggtggttttcaagcgagtttgaaactggagaggaggattccactggtgagtcatgaagtggagctgggtcg

SEQ ID NO: 198182 - DNA, 456 bp, Gossypium hirsutum
tcggacgcgtgggcggacgcgtggggtaaagctaagccatgaaaccccaatcgctttgcatcttttttcttctccatttcttcgctttactatgcacggcggcgtcggagtatgaagatccgagcaacggcggaaccatcgtttttactacacttggccgatcaaattatgcttgggacatctatactcttccaacttccgacccaccaagtccttccaatgaacttcgggttaccgacggcgaatctgtcaacttcaacggccagttcccttcgacctcaccgtcctctgttctctctctgctacataaccgaagcctaattcgaaccccaggtccacaagctccgccgcccctccagctcgtctacgtgacggaacgcaatgggatgccgaatatttactacgacgcgctttattacagtgcgcccgggaagtactagatcgagatcggcactt

SEQ ID NO: 198183 - DNA, 656 bp, Gossypium hirsutum
agggcttagagtttcaattttgaatctgaatttctgtttttgttgttagaaaaaaaatatagaaatattaagcatggctgaagttttggggaagtcaaatctgtttacagcttgtaactatagtcagaagaagaatcaagaaggtggcgttcctttgttttccaggagaatctctgtgttttgtttgagaaagaatagttttccttctttgaggttggaacctcaagctttgaggagtggttttaatggtcaaagagtggttgttttagagaaaagaagtctaaatgagagaaggttctgtcgagttcccattaaagcacagatgcaaactgggcttattggtaaaacccaaaagtggtgcggagaaggggaatcaaccaaatatgaaagaagtgacatctgcacaagacctggtggactcacttttgaatgctggggataaacttgttatagtggatttcttctctcctggttgtggtggctgcaaggctcttcatcccaagatttgccaattggcagagatgaatccggatgtgcagttccttaagctgaactatgaggagcataaatccatgtgttatagccttaatgtacatgtgttgcctttctttaggttctatagaggagctcagggtcgtttatgcagctttagctgc

SEQ ID NO: 198184 - DNA, 459 bp, Gossypium hirsutum
gaaatttgcctatccccccaacttcatcctcttcatggctcaaattacatttcttgctgctgtttgtgctcttcttctatcacattcctttatatcaggagtgcaaggaacaagctttaccatagtaaacaaatgcaattacgtggtatggcctggagttctctcaaacgcgggcgtttccacaatttccaccacaggtttcactctccgaagaggtgaatccaaaaccattagcgccccggcatcatggggaggtcgtttttggggaaggacccattgctccctagattccgccggtaaattctcatgtttgacgggcgattgtgcttccgggaagctagaatgttcagggaacggcgctgctccgcctgccactttggctgaatctaccttggacggtgccgggggtcttgattttttcgatgtgagtctggttgacggttacaacgtccctatgct

SEQ ID NO: 198185 - DNA, 449 bp, Gossypium hirsutum
gggaaaacccggcgcgacccacgcgtccgaagggatcagaaaagagtggtggagcaacatggctggttaaccaggcattctcagtggggggcgatggaagtcaatggggaacttcaagtatgcccttgtggttccgggggcaatttacagcacctactcgttcataatgtgcaaagatgaaaacgagaggaactggttcatgtttttggtcttaccatttctggtgtttagattgattcactatcaactatggatttcatactctcgctatcgcactgccaaagggaacaaccggatacttgacaagagcatcgacttcgaccaagttgaccgagagagaagctgggacgatcagataatactgaacggaatattgttctacggggcggggatagtgttaaaagatcaatttaacatgcctttctttaaagccgacgggacactgatca

SEQ ID NO: 198186 - DNA, 484 bp, Gossypium hirsutum
  unsure (1)..(484): unsure at all n locations
cccggaataacccggngtcgaccccacgccgnntccgagttgnngtccaacgtgttggcattttgaagactggattaccattattctggtnngttccagatacatgtgcttgagatgaatcannctgaacaagctggcnngttgttctcttcccttgggatcctannagccaatagagggtgggacttggaatggtgcctggatgcctgttgannatattggcaatatcccacattagtgaaaatgatagaaatggagggggtttggtttgttatatatagaacccctccccctttggttgtatcatcccaaaatcttctcctttgtaatatttctagaggaaatattaatttggtagtgtccgaggacgtaagctaaattggccgaacctcgttaaaactctggtattttatttcttatttgtttgcttttatttaatagctttatgttggttatatttatttagttattattgctataaata

SEQ ID NO: 198187 - DNA, 450 bp, Gossypium hirsutum
cttttatctcttccttccctcccctactatccatctttagacgttatggttcccatcgtgttgacccagatggctaccggtttgggtgtattggccggggccgtttttgtcaaatcggtcatggaccagaaacccatggccggaccgttccagagatgccccacttgcaacggcacagggcgtgtctcgtgtatttgttcccgctggtcggatggcgatgtcggttgtcggacttgctcggggtcgggtcgcagggcttgtagcagttgcggcggatcaggtacgggccgccccattccggtccaactcattgtgcgtcaaccaaccaatcgaagcttctaattatcgagattttgctgtccttgaatcacgacagtcgtaagaactcttagcttactataaattgatctatatatatatatttttaggaattttattgtgaaatatata

SEQ ID NO: 198188 - DNA, 597 bp, Gossypium hirsutum
tgtcttatcagcttataaactaagaggtgactttgcgagactcaacttccctaaccttcgtcaccacggttcccacgtaggtgacgtacaagcctttgccttcctctgttgacgctaagcttcaagccatttgtgagagcttggtacaaaaccctaagcaagggagcaagaagaaatcatccaaggttacggcagacaccaaaagcaggaacaacaaaaaatccgacatggcagagccaaagcccgaggagaatacagcgaaagtggagaactcctcatctttgtctacggttcaatccgagagtgagggttcggctgtatcttcacctttatcagatcttacattctcggatttcgacgaacaaccatggccggaagtcgtttcttcttcggaaacttttatgttgtccaagtacccttcagagatcgattgggattccatctaaaagcctgaagggaaaaacccatgtgtacctttctgtgtaagtcttttgatgtttaggaagctcctttcatgtatttgggtgtattttgtaaagctagctgcaatggggtttttggcagttgcaggggcctgtattttaggttattaaaagt

SEQ ID NO: 198189 - DNA, 463 bp, Gossypium hirsutum
  unsure (1)..(463): unsure at all n locations
ccacgcgtccgcccttttctacattcaagtgcgcgtgttttnttttccttcgtacaatgccacagggcaagggagggacccttgtttccgcctgtgccggccgctcttgcgacaacaaaatcatttgcgagactttagcaaccagcgaaagtgattccgacgaccacctccacccggcggagaaacatattgaagaagaaatcccgtcggatttcccgccagaatcgttttgcttatccaaagacgccgagttcgactggttcgatcgtaacgctttttacgaacggaaagattcgcatactggaaactcaggtcccaactctgcaaacctcaaccctaatcttaactcgatctccaattctcaacgcttttctctgagaaagtctaaagcttccatcattggcttaccgaaaccgcagaagtcttgctttgtcgaaacgaagaacaagaaacctgggaacac

SEQ ID NO: 198190 - DNA, 382 bp, Gossypium hirsutum
cttcgtttccgagagaagctcaaggctgactataaatcttatctattgctatggctactgaacaatgtgtgcgccctgttgaaaaaaccctacacgaagggaaacatgaacaccatccgagcagtggccaaactcaggttcataaggagagtaagggtgtgaatcaatcacatgggcacaaccaactgagtcatgacacacccaaaacacatgccgagtccaagaccgtgagccatggtgtccatgctcagcaacatgtggctcaaagcacggccatgcctacaacttgccatggaaagaaggaaaagaagatgaaagacaagaaggagaaagacacggacaggaaggaaaagaaagaaaagaaggaaaagaagaccgagag

SEQ ID NO: 198191 - DNA, 420 bp, Gossypium hirsutum
ctttgtgaatcctttcaacccttgctttaacgtcccttttttttttctgaattacagagagaatgggattttccaaagacaagaggaagcagctgaacctgaaactatatgtatcaaacaacaaagcgagctaagatttgatggagatagcaatgaagcagttgaagaagggaaagcaggagagtggttgaacctgagcttgggtgggaattcagtatcaacagcaggagattctgacactcaactaacaccagtttcaaccagggttttctcatgtaacttctgcatgaggaagttttacagttcacaagccttgggtggccaccaaaacgcccacaagagggagaggggtgcggccaggagataccactcccagcggatgacgtcgtcgtctatgatggctttgccaatgattagtag

SEQ ID NO: 198192 - DNA, 446 bp, Gossypium hirsutum
tttttgcgctgctaaaaaccctgattctattccctttgttttcatcgatcaaaatccccttctcataaattttctctcttgatggaagagacgcgatgtgcaatttgactgttccaatttccttttcaatgttcaattaaaaccctagcctcttccttttgcttctattggggggggggaaggaatcatgtctttcgatctcatatgctgaagccgtcctgcagctgctttggatcctcccaagatctgtacggttgaggaccaaaagaagaaagatgatgacgatttggtgagtggccgttcgggatttcgccctcgctggttctctacaccgcaaatccgtacgctcttccctttttttattttatttccttttgaaaaataaaattttaaatctatattcaaatcttaattctttttattctaatatagattatttaatttct

SEQ ID NO: 198193 - DNA, 681 bp, Gossypium hirsutum
  unsure (1)..(681): unsure at all n locations
ggaattcgggattccaggccacgacccacgcgtgccattatttctttatccaaacagagaaaagacccagggaagccaacttaccggaaacctgaaacgatggcgtttcgtttgagcaacaacttagttggaatcctcaacttgattaccttcctcctctcgatccccatccttggcgccggtatctggctgagacgagaaggcgtaacagaatgcgaacagttcttggacacgcccgttatcataatcggagtcttcctcatgttggtctcgctcgcgggactaattggcgcgtgctgtcgcgtgacttggctactctggctctacctggtcgtcatgttcctactcatcgtcctcggcatagccttcaccatcttcgctttcgtagtgacgaacaaaggtgcgggacacgtattatccgggaaaggttataaagaataccgacttggagattactcaaactggttgcagaaaagagttactgataacaagaattggaataagattaaaagctgtttggctgatagtaaaaggngnaccgatttccatgataaatatctcaatgctgctctcccagagatttaccagcctcacttatctgccgcacagacgggttgctgtaaaccatcaaacgattgccagctcaattacgttgggccaactaactggacaagggggagt

SEQ ID NO: 198194 - DNA, 457 bp, Gossypium hirsutum
tctcacgatactttccccattctcaatcgtcatctactcctcacctcacctttctcctccgctgcatggccacttccgccgctgccggtcccattaacccatccaacactcgccttggatggattgggactggcgtcatgggtcgatccatgtgtgctcatctgatcaacgctggctactctctcaccgtcttcaaccgtaccctttccaaagcccaacccctcgttgacatgggtgcccgcctagcccaaacacctcacgacctcgctgcccaatccgatgtcgttttctccatcgtcggttacccttccgacgtcctccaggtcctactcgatccctttaacggagccctctctggcctccgtcccggcggcatactcgttgacatgacaacatcggagccttctctcgccgtcgaaatatccaccgccgcatcttccaagaactgctcctcaat

SEQ ID NO: 198195 - DNA, 427 bp, Gossypium hirsutum
tctccgttgaaaacaataccgtttgcagccgattaaatggtagttgcagggccaggttagggtggtggcgccatgtcaaactccaagagcttagctgttcagattctaaagggcccatggctcatggttttcggctcactgttgatcatgtctgccgctggtgcaacctacatgtttagtctatactccggcgacattaaagaatcgctcggctatgaccaaaccaccctaaattatctcagtttcttcaaggatttaggcaccaacgttggggtcctttcgggtctcatagccgaggtaacacccccatggttcgtgttatctgttggtgcaggccttaacttctttgggtactttatggattgggttggccgtcaccaaaaggatccccaccaaagtgtggcaaatgtgtttgtatatttgcata

SEQ ID NO: 198196 - DNA, 473 bp, Gossypium hirsutum
ccttaacttgtcggtttatttacttactttccgtttttctcgattttctcttttattttccttcttttttcccttcgtttgtttttctttgattttgatcatcaaaaaaggcttctttcataacacaagctttccttcaacttccaaagattcgttctaaaagagggaccaaaaagaaagatggtttgtttgcaaggaccggtgatttgccccgccgttgatagcaagcaagttggggtttatacgctgccgtttaatgggccttttccgaggtctagattgcatcagagtgatatatggggatataggagggatagttgatggaaaaggtaagccacgtggcatttccggtcacctgaaacggcggaggaggtttaacaccacggtgcagtgtatttttaggtcatcttccgatgggaaatggaagttggctgggaattttaatgaaaacaatgaatttaatgttaattcta

SEQ ID NO: 198197 - DNA, 467 bp, Gossypium hirsutum
cggacgcgtgggcggacgcgtgggcggacgcgtgtcgagaaaactcagaaacacacaggaaacccaaagtctttctccttttttttccccctctttttttatacacaaaggtaataattttcgaaaatggcgtttgctgttacctcttccccggctgcaatttctggttccagcttttctcgttcaagtgcctcctctgacctcaaaattccgcaaattggttcatttcggctagcggatcgccatgcaacggtgaatctatctcaaaagcgttgcgcagtgaagcccgtgaatgcggagccaaagaggaacgattccatgctttctcatgctgcaaccacctctgctcctgaagtgtcggaaaaagttgaggtggaggattttgaccaattggccaaagaacttaacaatgcttctccactcgaaatcatggattaggctctggagaaaattggaaacgacatcgc

SEQ ID NO: 198198 - DNA, 655 bp, Gossypium hirsutum
taaaaatgatgacccttttaactccactctcccataactctttatcctctccacaattatcaacgaagcgccatggttgtcctcttcatcaaccccatgtacctctcagaatcacctgttcttcttctgctagcaaacgtgttcccaaatccgaggaatctccctttaaggaactgaggactgtagcttgtggccttcttgctgtatgtaccgttgccactgcctcgcctgtaattgctgccaatcagaggcttcctccgttgtcaacggagccaaaccgatgcgagcgtgcattcgttggtaacaccataggtcaggcaaatggtgtgtacgataagccgctcgatctacgcttctgcgattacactaacgagaaatcgaacctgaaggggaaatctcttgcggctgcacttatgtcggatgctaagtttgatggtgcagacatgtctgaagctgtgatgtcaaaggcttatgctgttggagctagcttcaaaggtacagacttctcgaatgcggttttggatcgagttaatttcggaaaagcgaatctgcaaggagctatattcaagaacacagtgttatctggttcaacattcgacaatgcgcagcttgaagatgcagttttcgaagataccatcatcgggtccatggatct

SEQ ID NO: 198199 - DNA, 941 bp, Gossypium hirsutum
attaaaatttatttcttgttagcatctatccttgtagagaggtgagggtacctaagacacaataatgaagatgggagaggatggagctgcaagaaatcaccttcacatcaaccaagtgttcgacctctccagtgatgtgcttccacaaggtgggaccaagtgctatgatgacgacggccgcctcaagcgatctggaaccgtgtggaccgctagcgcacatattattacagcagtcattggttcaggggttctgtcactggcttgggccacggctcagctgggatggatcgctggtccaatagtgatgattttgttttcttttgtaacttattacacctccactcttcttgccgcttgttaccgctctggtgaccctgttaacggcaagcgaaactatacttacatggatgctgtccgatcaaatcttggtgggtttaaagttaagatttgtgggtgggttcaatacttgaacctttttggagttgccattgggtacacaattgcatcatcaattagcatgatggctatcaaaaggtcgaattgcttccatgctagtggcggctaatatccatgccatatgaatagcaacccttatatgattgcttttggtattgttgaaatcattttctctcaaattcctgactttgatcgactatggtggctttccattgttgctgctgtcatgtctttcacctactctacaattggacttggccttggtattgctaaagtagcagaaactgggaaaattaggggaagcctgactggaatcagtgttggaactgtgactcaaacccaaaaaatatggaggagtttccaggcacttggagacattgcttttgcctattcatactcccttatactcatttgaaattcaggacacccctttaaggctccaccatcagaaatcaaagacaacggtagaaagccacccttgataa

SEQ ID NO: 198200 - DNA, 423 bp, Gossypium hirsutum
cccacgcgtccgcgctctgtttatatctcagttctccaagatgccctccttattcggcgctaacccttcatcctccgatcctgcaaacgacaccgtgccttccccttcctcttcttgttcctcctcctcgtctccggacatgtggaattacttttttatccctatcctcctctgcctcaccaaagaactttcccttgctaaagctcaaacctcaactggactcctcctcccgaatcaacgcggcgacggctcggccgatgattcactaatttccttttcgagttgcgcgaatgctgacccgaagctatattatcggcctgtgattgggatactgagtcatccaggagacggcgcgtcggggaggctgaacaatgatactaacgcttcctacatagctgcgtcgtacgtgaagtttgtggaagc

SEQ ID NO: 198201 - DNA, 424 bp, Gossypium hirsutum
gtctatatctctagctgcctctctagttgactctaccttacaaactcttccttacctggttgcccactcatctcgtctctgccgcgtatcgaccccgcattttattttatttatctcaatgggtttttctgatattattttcatggataaattatcttaattagtttccttctaatatcattcagctaatctggaagcagattttgggggttaagagattttatctacagagaagatggtgacatctgagcaagaacatgattttgttaagtggggtttgcaactattcaatagtgatccctatgctaattgtggatattgtggtgtgttaactcaagaaaatggagagtattacaatggaaatagtttcaaggaggattaccattacgacgcgggagaatgttgtaatgtggaaaatgatgag

SEQ ID NO: 198202 - DNA, 757 bp, Gossypium hirsutum
cccacgcgtccgatttctttcccttcttttatcccccacctccattatcactctgcgggcaagctttttttattagttttatttcatatcccaaaaaccagccacgcccccactctaaccctaatttctcctccctttcccatccccatacccacaccacctttgccatgtctctagtcccctttcctttctttctcttcttcatctccctgttctttgccactttttccttcactatatccagccctgacgccctcaatgtccaatccctccctctatccgcatccccacctgcaacgatccctgcatttccagagcaatccaatgtcgttggttgcccacttgacttacctgaacaactctttcacagcgttaagaacgcttgcggcactaagagaaacaatggggtggtgagtgagctccaccgtagtcgctgctgtcctgttctcgctgcatggctttacgccgcttactccgccaccgcccttggtggggttggaagagtagtgccagcggttgcggggcgtaccccatcttatgacatgccattgctgccggatgactcggaaacctgtgtggatgacttagggaaagctctgaaacagagaggcgtggagttggctaaaccgaacgagacatgcgatgcggtgtattgctattgtggcatcaggcttcacccactgacttgccctgatgctttctcagtggaccaaaagggcaaccttgtaggggatgacagtgtggagagattggagag

SEQ ID NO: 198203 - DNA, 603 bp, Gossypium hirsutum
caagtttatcagccatgccgccaccaatgctccgccttatctcaaccacctccgtgtccaccgtagctggcctcccgccaatccttacgaaacctcccatttcaaatcaaaacctttccatcacccccagtgaagagaatcgacagaaagtgctccgccttatctctcgcagagacgctgcttttctctccttaatctccctctttccttccctactccatacccctcatgcttctgccttctccattggaatttcaggaccaaaggattggcttaaagagcaaaagaggaagtcttcgaaattcctattggcaccaatcgatgcttctcgacaaagccttcgctctgtttatcttttgctcatggacaaggaatcaactatttcgaatactgatttagaggaagtgcaaaagctcttgaaatctgccgctagggattgtgttgcacaggagaggaattcctttgttgcatttcaagccaacaccggagtcgaggtttgcacatttcgtttgattgtgaaaaatgcttcttctctgcttgagaataagaatcctgttaagctggaagcttgagctatgctagatgatcttataagctcattta

SEQ ID NO: 198204 - DNA, 1089 bp, Gossypium hirsutum
  unsure (1)..(1089): unsure at all n locations
gtagatttctctcaatttcttcacatttcttgattttatacataaacatcccatctccatcacattctcaagcctattcaatggagtttttaatgaaaatatgtctccttttcctttgtggcctcatttctcactttgttaacatgtttttccagaagagaaatcagcaatgctatatgttgggttatgaatgtttcaaggctgccgatgacaggaagctcgacactgatgcgtgcgtgaaagttgtgttgaggaacaagaatcttggtctggaccaatacaggtttcttttaaaaaccattgttagttctggtcttggtgaagaaacttatggtccaaggaatgttattgatggtagagaagagtttccttcggaaaacgatgcacatgccgagatggatgagatcatgttcagcactctagacactctgttcgagaaaacaggagtttccccgtcagaaatcgacatactcgtcgtcgatgtctcgttgttttcacctgcaccgtcgttaacatcccggattataaacaggtacaagatgagggacaacattaagtccttcagtctctccggaatgggatgtagtgcaagcatggttgcaatcgatatggtgcagcagttgttcaagacatacaagaaccagttcgccatcgttgtgagcaccgaatcaatcgctaggcattggtactgcggcaaagagaagtcaatgatgttatcgaattgcctgttccgtaacggagggtgttcaatcctcttaacaaacaaaagggacctgaaggatcgatgcttgttgaagttgaagtgtgccgtaagaaccaatttaagttcaatttnatctcggtctgggggtgccattnttgtctcaccaggtggaagggcatgatgatggctggtgaagagttggactagtgatatgactagagccactagatgcactatcagattgggaccatcaccgtgggtatgatgntgagacatgaactaaaaagctgaaaagtatagattctgtgacctggactggtatgtcacactgtttgaagatgaagatgtggaaactggttgaggcttgagtccttaaacggatcttn

SEQ ID NO: 198205 - DNA, 423 bp, Gossypium hirsutum
cccacgcgtccggtttttcaaaaatatatgcaattttttttaaaacacacacactcatgaacaattttattcgtggcggttgggaaaatgttatatgaaaactctctggtgtccgacttgttcgccgccgtggtttgctgcggcgttatattcgcgtttctcttactctggcaagtaaccgccaaatgcggcgtagatcagaaactgaataggaagcttgtgcatataagtattgggctagttttcatgctttgctggccattattcagtgcagggtatcgcggagcaattttagcagctatcactcctggtgtcaatattatacgaatgcttcttatcggttctggaatttggaaagatgaagccactgtgaagtcaatgagcagatatggaaactacagggaacttctcaaaggaccactc

SEQ ID NO: 198206 - DNA, 491 bp, Gossypium hirsutum
gaccgacgcgtgcgctttattattattattattcatttacctctgccctattcctaaccctaaccctcaaattcgctgtgaaaattcccccccctttgttcaaatcctttctctaattacactaaaagccccttcaatttttgataaattcaatgtattgtaaaaatttccccattccttttttttttaatttgagaaatttccatggccgccgttgttcaagaaaccatacaatgattgaatcattgcggtctccgttcaattgtatggggtttatgaaatgcctgagttgcgaaaaggtgtttgtagaggccgtgccaagttagcgcagcctcagcagccacaagaaacccggaaacaaacgaggaatcaaggtcggaaacgtgcggcggcggcggttattgaggtaggtaggccaaggacgagattggccgccaagagactaaaggaggaggaggaacaccctcaggtcgttgtgatttctgagagag

SEQ ID NO: 198207 - DNA, 463 bp, Gossypium hirsutum
tcgctctctctctctttctctctttgactccgcccttttctcatggatccttttggtctcttctgtactggggctcttcttgcctgcggtctttactggttcgtctgccttttagggccggccgagcaaaagggcaagcgagccgtcgatctctccggcggctccatctctgccgagaaagttcaggacaactacaaacagtattggtctttcttccgccaaccaaaggagatcgaaaccgccgaaaaggttccagatttcgtcgatactttttacaacttagtcaccgatatttacgaatggggttggggtcagtccttccacttttctccttccattcgagggaaatctcaccgggacgctacgcgcctccacgaagagatggccgtcgatatgatcgaagtcaagcccggagatcgagtcctggacgtcgggtgcggcgtcggggggcccatgcgtgcta

SEQ ID NO: 198208 - DNA, 696 bp, Gossypium hirsutum
  unsure (1)..(696): unsure at all n locations
aaggctaccgattctcctcttccgactgttccaggctatgatgtancgggagtggtggtgaaagttggaagtcaagtgaaggagctaaaggaaggagatgaagtgtatggaaacataaatgagaaagcattagaagggccgagacagttcggttcccttgctcagtacactgctgttgaagagaagctgttggctttaaagcccaagaatctagatttttcccaagctgctggtctccctcttgctatcgaaaccgcctacgagggtcttgagcggaccggcttttcatccgggaaatccatccttgttttgaatggttctggtggtgttggaagcttagttattcagttagcaaaacgagtattcggtgcttcaaaagttgcggccacttccagtactggaaaactggagttactgaagagcttaggtgccgatttggctattgattacacaaaggagaactttgaagatttgccagaaaaattcgatgtagtctttgatgccattggacaatgtgatagggctgtgaaggcagtgaaagaaggcggcagcgtcgtggccttaaccggtgctgtgacaccgcccggttttaggtttgttgttacttctaagggagaggttcttaagaagctaaaattatatttagagagtgggaaaggtgaaccggttgtggatcccggggaccattcccattta

SEQ ID NO: 198209 - DNA, 410 bp, Gossypium hirsutum
ctctccacaaaacccgaaggaaaaaggaaaatccttttttcctctgtccttccctttcaacgcagaccgaaagagaaggcggagtcctcccacaatttcttgtggccaccaatcacgctctactcttaagggaagtcagcatggatcaggctcaacacccaactgtcatgcagaaggtagcagggcagctcactcgttttagcaattcccaagattttcaagggtatgatgggtctttccgtaggcctgctctctaccaaagaaatgttgcatatcaaaattgctccaatgctgcactgcagtaccctattgtccgagcttgtggagttaccagtgacatgcctatggttccatcaacagcatctgctatttgtattcaagctcctgctgagaaagggtttaccggcttt

SEQ ID NO: 198210 - DNA, 470 bp, Gossypium hirsutum
gaattatcctattactctgcttctgtttttcgccacacgattttctctttttcattttgtggccaacacgatatcattgtcttcacttttctctttaatcccctatcttgtttcagcccaaggatcggagccatgctccttcatttctctcctgcttcttctacttctccaccttccccttcttctttcacctccaattatttcctccacagattatcaatttccagaccaccgtacttggagttcccattaaaacccagaacccatctctttaaacctacctctcctcccgtttcttactcgaccaagaccaagttgttgtatccttctgccaacagggctgaattcaggtcatacgctcttcctggatttgatttcgggagcgttgaatctgtgttggaggcagctggcgttttgactgccatcattgttgttcatgagacgggtcacttcctcgctgcttatctcca

SEQ ID NO: 198211 - DNA, 393 bp, Gossypium hirsutum
gctctagagactctctagtctcaccgaagttgcataaagaaaagtagctaactgccttggcttgtatctgcggtgctggaccaagtaccatgttttgtgggctactggctctcttcagtgttcacctagcctaatcaccgccctgaacccaccaaaccaccagatttgggtgctgggtttttgtctttatatttgtattttctcatttctgtcaactttcaactaaacattgcagcttcttaatttgtgggggtttttttttttttttggtttgctgcttaatccatggcttcttccctgctggatggagcatgaaaccttcactctcatccgagggggaaccccaaaaaagattgggtttttgggggtcaggtttacatgggaaacagtttt

SEQ ID NO: 198212 - DNA, 436 bp, Gossypium hirsutum
tttggattcaacgattctcttccctttcatgaccacgagtatgtctcgtagctgctctcactgtggaaacagcggccacaactctcgtacgtgcggtgaagttgttgccggtgatgcaagcaatggcagcggtggaagtggaggaggagaagagaagggtatcatgttattcggtgttcgagtcatggaagggtcgttcaggaaaagtgttagcatgaataatctttctcagttcgatcaacctcaggtttctaacgccgatgctggctatgcttctgatgacgttcttcatggatctggaataggaagaagccgtgaacgcatgagaggtgtaccatggacggaagaggaacataaattatttttattggggttgcaaaaagtagggaaaggggattggtgaggaatttcaagaaattttgtgaagacacgtaca

SEQ ID NO: 198213 - DNA, 549 bp, Gossypium hirsutum
  unsure (1)..(549): unsure at all n locations
cccacgcgtncgnggacgcgtgggttgaattctttatttcacacaccaactcaacaatcaacctagtgaatacccataccatcccatagtaagaggatctgattgtctcccctctcatttaccgccatcaatggctaactctctgctctcttctaacttctttggtactcaactggggctgtctcctccaacaccagaagactacaagaaagttgcaggttactcaatccatcctcaacaagaaacccaactctagccacactgttaaaaccctccaatctcatgccactcttgctgccttactcttctctgccgtagccccacaagcactcgccgttgacaacgccccacccactcccccacctgtaattgaagcccagcctacgaagccaagcccatcgaaccagtcgcccttctcccaaaacctgctcttaactgctcccaagcctcaatctcaatcctccgatcttccggagggcagccaatggaagttcagcgaattcttgaacgcattcaagaaggggaaagtggagagagtcaagttcaaca

SEQ ID NO: 198214 - DNA, 400 bp, Gossypium hirsutum
gtttttggcaggccttggattatgtcattgcagatgcagggcaccaaggaattaggctgcggctcagcttggtaaataacttgcaaccatatggcggaaagacccagtatgtcaactgggcatggcaagaaggcgttggtttgagctcttctaatgattccttcttctttgatccatctatccgcaaatatttcaagaattatgtcctgactgtccttaccaggaagaacactatcactggaattcaatatcggaatgatcccaccatctttgcttgggagttgataaatgaaccccgttgcatgactgatccttctggggatactcttcaagattgggtagaagagatgtcggctttcataaaatcaatcgacaaaaaccatcttttgaccattggctt

SEQ ID NO: 198215 - DNA, 546 bp, Gossypium hirsutum
cccacgcgtccgcgatgattcaattgataggatcgtggctggaatggaaggaacagggatgactgatggaaagagcaaaagcttggttgcataccacgaggttggccatgccatttgcggaactttgacaccgggtcacgatcctgttcaaaaagtcaccttgattccacgtggccaggcacgtggtcttacctggttcattccttcagatgaccctaccttgatctccaagcaacaactctttgcaagaattgttggtggacttggtggcagagccgcagaggaaatcatcttcggtgaacctgaggtgacaacaggtgcagctggtgatttgcagcagattactggtttggctaaacagatggtggtgacattcggaatgtccgaaattggtccatggtcccttatggactcatcagcccaaagcgccgacgtcataatgagaatgatggcaagaaactcaatgtcagaaaaactcgccgaagacatcgatactgccgtcaagaggttatcagacagtgcttacgagattgcgttgcaacacat

SEQ ID NO: 198216 - DNA, 442 bp, Gossypium hirsutum
  unsure (1)..(442): unsure at all n locations
cccacgcgtccgcccacgcgtncgcggttgtggtgcgccctcgttcgttgttccttccgctcccctaccattcggttgggtgggctgttgggcggtgtgcgtgggcgctactactagtacgcaataggcatatgagtggtgttttggttgtgtgtattggcaggctccatgctactcgcatcgaactgtcgagccgcactcctcttcattaactccccttgttgtaatcgaactcaaggggtgcgatcgggatcctgtgctgcgtacctaagccagatggaattatggatgtgttgccgtcccttctccatcccgtgcccttcggggtgcgtggtggacctcaatcgtgccttgtgtcccgagtgcgcccccttaaatcggtgtggcctcgtcggtgcactggtgctcgatcgtgctttcggatgcggaaaatgtttttgag

SEQ ID NO: 198217 - DNA, 453 bp, Gossypium hirsutum
cccacgcgtccgcccacgcgtccgcccacgcgttcgtccacgcgtccgcttttgaatgcaaatatatcatgtcctaccagcaaggggaggatttctattacatggatgaagattttgtagatgacatggatgaagacaactacggtcaagctggtggagatgtggatgctgatgaatatgacatgctgaccaaggtgaccgatacgacttctgcgcaagcgcggaaggggaaagacattcaggggattccgtgggaaagactgaacataactagagaaaaatataggttgacaaggcttgagcagtataagaactatgagaatatgccttcttccggtgaagctgttgacaaggaatttaaacatataaagaagggtgggaactactatgaattcttctacaatactagattaattaaacctacgatccttcattttcagctcagaaacttgg

SEQ ID NO: 198218 - DNA, 485 bp, Gossypium hirsutum
cccacgcgtccgcttttgcagataaccggctttctttaaacttagttttcttgattgcccgacacaccgttatcccttgttaaatgctctttgcccttttctcctcttctcttattttttctctctgaaaatggaaggagtgaaattggatagatggggttatgaagttaaaacctcttccgattcttgcatatctgtaatcaacgcttactatcaccaggtgctttcctatggaagaaataggaaagtgatcttagaagctcctgttcttgacaaagactgcgttttagccaacattttggccgcccattttctctcttcctctgacccttcaaaggctccttcactcatagaagctgccaacgctggaattgagcaagcctcgtcttatgagaaagccgtttttgaagctgtcaattatttgatttctcagaacagagatgatgatgttgccgtggagttacactctaagctctagagagatt

SEQ ID NO: 198219 - DNA, 390 bp, Gossypium hirsutum
aaaagacacagatatgagttctgcttccctttcctgctctctcccgcccaccgcctctgcctccgccggttcccgccgcaatccccacctccggattcccaaaacccttttcacttttcaccatcctcatcatcatcatcatcaccacccttttctactcagagttacaaatgaaactagcaggactgaagtgtctactactgatcctatcaatgagagattggaaagcgataagattgttgatgggatggactttggcgagctttgcaacgagttcgaatgcattagtagtcccttagtcgaatcaacagcaagacaactcgtacgtgacatcctagagctccgagaagggaaccgtgcactcggaacatacgctgtttctgtcaaata

SEQ ID NO: 198220 - DNA, 666 bp, Gossypium hirsutum
gttttgagcttgagataaaatcatcagataatcgtatcctgcaagagagaactgcaaaacaagtgttctgagaatgaagaattgcaagcaaaggtaactctcctggagcagcagttggcatctctctctggcgataaactatcatcttctgcacatggaatatcagaagaacatgctgatgagttacgaaaaaagattcaatctcaggagatcgagaatgaaaaactaaaactggaacaggtgcaactttcagaggagaacagtgggttatgtgtccaaaatcaaaaactggctgaagaagcttcatatgcgaaagaattggcatctgcagctgctgttgagttaaagaatttagctggtgaggtgaccaggctttcagtgcaagaatgcaaaattggagaacgaattattggctgctagaggatctgctaatcaaactataaatggtgctaaccggaagtatagtgacagcacaagacctgggaggaaagggctgcactcttgcccatctcatgacttttctggaacaggtggtgaagactttgaattgtggaaatctgatctagatgatctaaagatggaatcgcatgcgttgaaacaaccggaggcagctcttgtagctacactagcccagaaagaattcatagaagttgaatacagggaaaa

SEQ ID NO: 198221 - DNA, 509 bp, Gossypium hirsutum
aaaatagtaaagtattccttcaccataacactcttctctcctctccatactttgaaaggaaaaaacgttatctcaaagcgaaaatcctcccaaaactggattaagaagagcagataaaacctgatgaaccccaagagcaccttcatcttggctgctctgctacttacagcttcactaactgcagcagctaggccagactcatttgaagctttatcatctgaggaaaagggcaacaaaggcagcggcaaaccaggcaaccaaaacaacaaaggtagtggtggaaacactggtgggatgggcggcttcttcggtccagggcctgggtttggattgccagggtttgaaaaagggtggggacatgggatcgtaggcggtggctatggagctggcttcggaggtcctaccggagggtactcaaaaggtggtgttattagaactacggttgtttgcaaagaaaaaggtccttgatttaacatgaagctaacctgccctgctaagtgcttcaccta

SEQ ID NO: 198222 - DNA, 693 bp, Gossypium hirsutum
  unsure (1)..(693): unsure at all n locations
tctctctctctaaaagcccactcagcagtttaaaagagagagaaagtgtcctttctctctctagaactctaaagggtcaaagctttaaagccttcaaatatatacatataaatcgagagagagggagggaaacatttttttttaaattattttttgggagagattttgaatcatgggtggtgagaagaaattcggggttcttctatgcgcggaggactcggactacattaagaagaggtacggagggtattttggtgtgtttgtggaaatgctggcggaggaaggggagacgtgggacgttttcagggtggcgaacggcgagttccccgacgacgatgagatcgccgaattcgacggattcgttataaccggcagttgcaatgatgctcacgggaatgacgtttggatctgcaggttgatctcgcttttgaagaaattggattccttgaagacgatagttcttgggatttgctttggtcaccaaattcttagccgtgcgcttggangaaaaacagggcgagccgtntcgggttgggacattggagttacaacaattcatttatcatcgtcctcatcgaagttcttttcatcacttgagatccccaccactcttctcatcatagagtgccaccgagatgatgttcgggaacttccccanaggccgaggtgttagcatggtctgagaaaacaggt

SEQ ID NO: 198223 - DNA, 423 bp, Gossypium hirsutum
atttttaacagtgcatgtctgcttcaaaactttacactgcaacaaccaaaacccaacgctctatactggtctccttcaatggcagtgcagatggctatccgagtttcacccactgcaaggctttctcttccaccaccatcaccatcaccaccttctccttcagtaccatcatccacaatctcaaccaaaccttctttaaaaccccaacaacccaaacccatctctctatcactcccaacatccacagctatctctttattggctttattttcacctccccatgaagccaaagctatcaatcttagcatagaacaaattatttcatctctcaatgaagtggagaaaaccattgatcaagttcaagaagccagttcaagtgccttggatgttgcacaacagatatttgatgttgtcggaaaagtt

SEQ ID NO: 198224 - DNA, 429 bp, Gossypium hirsutum
cccacgcgtccgttcatacgcaattttggggacaagaagagcacgcgtcttggagattatatctacaaatcattaagcctcgctctgcaatttccccctttttacccttccaccactactagcaacgttgccgccatttcagtcgctgacccaaccacaccgacgaaaccataatcaatggctgccgcgttacaattacaaacacacccttgcttccatggcacgtgccaactctcacctccgccacgaccttccgtttccttcccttcttcctcccgctcgtttccatctagcagacgttccctgtccgcgcatgtgaaggcggcggcgtcgtctttgtccaccaccaccttgcaggaagggatagcggagttttacgatgagtcgtcggggatttgggaagacatatggggtgaccatatgcaccat

SEQ ID NO: 198225 - DNA, 445 bp, Gossypium hirsutum
ttccacgcgtccgcaaaagaatagtccccccttaaaaatcgaccaaaacagaaaacccagatcataaaaagctccctaaaatgttgagtgaaacattgaagaacaagtaccaattatgtgaagagatcggaagagggcggtttggggttatctctcgagtgttttgcccttcaacccaatcctccttcgcctgtaaatccatcgacaaacgcctcctttccgaccccaccgatcgagaatgtctggagaacgaacccaaaatcatgacccttttgtctcctcactccaacatcgttcaaatctacgacatgtttgaatccgatgatacccttcaactcatcatcgatctctgccagccttttaccctctacgacaagattctggaacccgatatgtctgaacctaaagccgcggcttacatgcaacagcttatgttgggtttggc

SEQ ID NO: 198226 - DNA, 398 bp, Gossypium hirsutum
acgcgtccgctgagataagcaaaattctattcaaagatgttgtgggttgataaatatcgacccaaagccctagctcaagtcgttgttcatgaagacattgcccaaaatctaacaaaactggttacagagcaagattgcccgcatttactcttctatggaccatctgggtctggcaagaaaaccctaatcatggcccttcttagacaaatatttggtcccagtgctgaaaaggtgaaagtggagaataggaattggaaaattgatgctggaagtagaaccattgatcttgagttgaccacattagcaagcacgaaccatgtggagttgagtccaagtgatgtaggcttgcaggacagatatatagttcaagagattattaaagaaatggctaaaaatag

SEQ ID NO: 198227 - DNA, 608 bp, Gossypium hirsutum
tcgtcacgcgtccgcagaaattcggtggagagactctctctgttattctttttttcccgattgtttcttccatctttttagggtttaattttattttttgaatcttgaaaataattttgataattttatgaagcttttagacatttcatttcaataaatttatcaaaagattttcaaaaagaagagagacgaaaaagattcataaatatttggatcaaaaaagaagaagttgctttgttttctcgagaaaatggagtcaaattcatggagctttcgattctccaattcttcttcttcttcttcgtcttcgtcaaggcgtcgtcaatcacgatctgatctgtttctaggaggaggatatgaagaaattgacggagatgaggatttcaaggcacagtttttatgtccattttgcgctgaggatttcgacattgttggactttgttgccatatcgatgaagaacatcctgttgaagccaaaaacggggtgtgcccggtttgtgcgaagagggtcggaatggatattgtcagccacattaccatgcaacatgggaatttttttaaggttcagcgcaagcggagattacgcaagggtgggtccaatttgacat

SEQ ID NO: 198228 - DNA, 622 bp, Gossypium hirsutum
  unsure (1)..(622): unsure at all n locations
cccacgcgtaatggaagcctcatcttcacaccatggactggcaatcctcttcattgtcctcacttcacaaatagccttaaccttagcttatccaccatttctcaacgatagaaacattgaatacatcaaatcttcatgcagcaccacaacatatcccaaattatgttaccagtccctctcagtctatgcgagcagcatcagcaccagccccaaattgttagtccacactgcactcaatgtaactcttagagccagcaaagcgacttcgaggttgatggtaaagatctcgagattccacggtttggaaccaagggtagctgccgccatggctgattgtatcgaggtgatcggggactcggtggatgagctgcaacagtcgttaggggaacttggtcacattagtcgctcgaacatttcacttacgatgagcgatgttcaaacatgggttagtgcggcactgacagagagatcttgatgatggatttgtggacacatgaaggattgcagacatggcaggaacgatataagtgccattgcagcatgctggtctatatatatgctaaccaggtcattacctatttctgaactcagagaatgacattgaatagatactggacaatgn

SEQ ID NO: 198229 - DNA, 621 bp, Gossypium hirsutum
cgcgtccggaggaagtgaaagagtagtttttcttttccagaaactcttcaccatggcgggtgacgtcgataatcgacagttcaggcgccttgaaccggctttgaacggtgtttttgccccgttgaagctcggtccaagtacccaaatccaccgccctgtcaaacatgttttcatcgaccatgaatatgatgactcttccagtgatgatgaaggaaatgagatcaacgggcattacaaagagttgattatcaagtccggtaacgagcttgaaccttccatcttggaccctagagatgaagcaacggccgataactgggtcgagcgtaacgcttccatggttcgtctcaccggcaaacaccctttcaactctgaacctcccttgaaccgcctcatgcaccatggtttcatcactcctgttcctcttcactacgttcgtaaccatggtcaagtccctaaagcttcttgggatgactggaccgttgaagtcgccggtttagttaaaagaccggtgaagttaaccatggatcaactgtttaacgagttccaaagccgtgagttcccggttaccctggtttgtgctgggaatcgacgtaaagaacaaaacatgatcaaacaaaccat

SEQ ID NO: 198230 - DNA, 750 bp, Gossypium hirsutum
cgcaaatcaaattaaagcaactcatcactgtgaatgaattgtgatggatgcctggtcttcctcctttctctccaccctaacaccttcaacaaaactcctttctcccgttatcaccaccactctcagatcaacttccccatcaccttattatgctcctctcccacgcgtccgctctgtcagaattgaagagaaacctccaacctccacaaccaccaccaaaacatcacatccaccaccaccccaatctcctaaagcttggcctccaccagcgccatcctatgcttctccatcagttggagccaagaaaagagtagaaccaaggctgtccaccatgatcttcaatacatttgacgatattataaacaacttcatagaccctccactcaggccttctgtcgaccccaagcatgtcctgtcccacaacttcgctcctgttgatgagcttcctcctacaccctgtgaagttatacaaggatccctcccgccttgccttgacggtgcatacattcgtaatggccccaaccctcagttcctccctcgtggaccttaccacctcttcgatggtgatggtatgcttcactccattcgaatctccaagggcaaggccaccttgtgtagcagatacgtaaagacgtacaagtactccattgaaaaccaaatgggttctcccgttttccccaatgttttctccggctttaacggcctaaccgccgcggccactcgcggtgctctctccgctgtcagaattct

SEQ ID NO: 198231 - DNA, 429 bp, Gossypium hirsutum
agaaaaccaaacaatccttatccttttttaaccggtgctgctaccacagtacaggatggagctaaggatggaaaatctgaaacaccgatatcttcttcacgttgcaagcaagtgttggacttggagaaagaaccacttccagagagacctaatggagatgaaaaggctacggatctgtaagaaaatcaagacgagagttgctctggggtttttacccttctccacgaagcaaattgctcctctgcttcttccatgaataagaattttataccagcgtcagcagcactcaaaagctcttgcacatttagggagtttgtaccttctccaaacgagaaaattcatgataatggtacaagttcggcctcaaacctggagtattcttgcacttcatatgattaaccagctcaagtccagaaaaaagatgatttg

SEQ ID NO: 198232 - DNA, 472 bp, Gossypium hirsutum
caaaaaagaaaaaatgatgcttggagaaactcatcgtccaaatccaaccgtccacgtaccaccttggcctgatcttgacgatgatcagacggatgtagtttactctcctatccattacaatgcaaccgacaacaacttgagcagtaacggcaacccgttttacctccatgaagcgttatcagctttacaacgttatttgccatcgaacggcccggatgttgagttggattccgagtttccgggtttggatagtccggattcaccggtcgatgcttattcctgtgaccatttcaggatgtacgagttcaaaatccggaggtgtgctcgtgggcggtctcatgactggaccgagtgtccgtacgcccatcccggtgaaaaagctcgttggagggatccgaggaagtatcattattcgggtactgcatgcccggattttcgtaaagggaactgtcggaaggagattcatgtgagt

SEQ ID NO: 198233 - DNA, 329 bp, Gossypium hirsutum
catttatactataattacagtctggactctcgacacacacaaaggagaagctccataggttctctgcaattaattcatggaggtcgtcaaggaatctgaaccaaacactaccaccatgagaaaagctctgctagtaataaactgcatcatcctttctataggtaactgtgcaggtccacttatgatgcgcctttacttcatccatggtgggaaacgagtctggttctcgagctggctcgagacgggtggttggcccatcatccttttcccaatcgcttgtgctcacttttaccgttccaggacccaacccagttcagaaaacaagcttt

SEQ ID NO: 198234 - DNA, 439 bp, Gossypium hirsutum
tgtgtcttgaactctcatggcttcaagtgctgcaacccttccatctaaaatgaaagcatggacttaccctgagtacggaaaatcatctgatgttctgaaactacaatccgatgttgttgttccccaacccagggatgatcaagttcttctccaagtcgtagctgctgggattaaccccattgatttcaaaagaatgcttggaatgttcaaaaacattgattcccctttacccatcattccagggtatgatgtagcaggcgtggtggtgaaagtggggagccaagttaagaaattcaaggaaggggatcaggtgtatggagatataaatgaaaaggccgtggatcacccaacacaatttggcactatagctgaattcactgttgttgcagagaagctgttggctttaaaacccaaaaatctcagctttgttgaagctgca

SEQ ID NO: 198235 - DNA, 592 bp, Gossypium hirsutum
cccacgcgtccgaaagaaacgggattatgagagattatcacgattgagagaggaggaaaggaaccatttggagaatagaaagaagaaatttttctcagaaatagttaatgcattccgcgacttccaattgcagattcaagctactctaaagcgtcgaaaacaaaggaatgatggtgtccaggcatggcatggaaggcaaaggcaacgtgctacaagagcagagaaattgaggttccaggccctgaaagctgatgatcaagaagcatatatgagattagtaaaggagagcaagaatgaacgattaactatgcttctgtcggaaacaaataagctccttgttaatttaggagctgctgttcagcggcagaaagatgctaaacattcagatggtattgaagatttgaaggatttagattcagattcaccggagctggatgcttcgaaggatggaactcctggagattcacttcctgaagaagatataggtgccactgattctgatcagaatgatgaatccagtgatctacttgaaggtcagcggcagtataacttggctattcactcaattcaagaaaaggtagcagagcaacca

SEQ ID NO: 198236 - DNA, 717 bp, Gossypium hirsutum
tttcgtgtttctttattcctaactctctctaccacctaaacctcattctattctttttttcgttttaatggatgagttaaacagcaagaagcgggctagggacgactccaacgagtcgggcctggactcgcccgacgtgaagagactcagagatgatttatttcttgatgattcagattccttgcctcttaatcaagaccttgcatccgtaatgaagagttttgaagaggaaatagcagctgtcccatctacttcaacgggatctatgccagttgtggatctcacttctgattctagtgactcgcaacctgatcttggttacctttttgaggcttccgatgatgaacttggtctccctccccctacggcttccacaactgatactggaaggaggtccgaagcgactgatttggtgcgagctgtctcaaactcctcaggaatcgatgatttgtgggggttcgaggaacagaaccctaactacgattctttcgagtttggattcgttaataatttcaatgatggcaccgctgcatatgatgcactgttcgagtattccgatgtctattacgattcctccgatatttctggtcaactatggcggccggaaactttgtcggcagagtaaaaatctaaacttaaaatccaaaaaaaagagagaagaaagatagcaaaccaagctaaacacaagacagtcatagccgatctgtaaattttttt

SEQ ID NO: 198237 - DNA, 447 bp, Gossypium hirsutum
cggacgcgtgggcttctctctttttaagctgatatgcctgtctttcattcaagtcataatcaaatcaaatctttgatgcaaatatagttctttagcgacctttcggtaagacaatcttccaaagatgctcggtgcatcggaatattattcattgggaagaggatctaccattaattactacacgcctcaagctctgcaacaactgagaagattctactctgcaattaaaaaggaatcaccacgagttctacattaaggtggatttgatgattttctttgagttttggtgctaatccatgaagaatttttactggtttaagcaaatctcaaacaatgttaagtcagagaggaggctttctcttggggaatacaaaagagcagtttcttggtctaagtatttggtttcctctggcggtgagataaaaggagaaggagaagaatggagtg

SEQ ID NO: 198238 - DNA, 410 bp, Gossypium hirsutum
tcctcttttaaccaaacactccacaaaattttctcgaaaaaaaaaaaaaaaatgaggaagtgtgaactatgtggaaggctagctcgaatgcactgtgaatcagatcaagcaaatttatgttgggactgtgatttcaaggttcatggagccaatttcctcgtagctaagcataatcgaaccctcctttgccatgtttgtcaaagtcctactccttggctcgcatctggtcggaatctcggctccgcggtttctgtttgtgattcatgcgttgtaaacggcaacaataagtgtgagtcatcggagagagagtatggtgaagaggaggaggaagaagaggaggagggagattatgataatgacgccgtggaagaatcgggggaggaagaggaggccgagattgaagatgctta

SEQ ID NO: 198239 - DNA, 502 bp, Gossypium hirsutum
cccacgcgtccgcccacgcgtccgaaaatttccccccaaaattctcccaatctttctgattttcttggcaataattctcagccccagtgatgaaaacaggatttcacatcaactgtaactaaggaattcgattttagtttcagccatgtgttatagcaaagccccaaaaatgaacaacaatgatgtaatgagtgatattttactgaggctaccattgaaggatttggtgggatgcaaatgtgtctgcaaatggtggaatactctcatctcggaccccattttcaagttgaattattcgctgcgaaaccctcagtacaatatctcagggttcttcctacagaaattcttgtaccttgagctgcattcgaaattgttgttctttccttgtgaaggacgagtagatgctgctcctaaaccatctctctctttcatagaagatgataaaggtgtttgtatacaacattcttgcaacgggcttctcatatgcagcagtttccgatgt

SEQ ID NO: 198240 - DNA, 461 bp, Gossypium hirsutum
ctttttgcctcttagctagctcattatctttttcatacaaagtaaccgaatttggggtcttattcgtgataacgactacttccatggattaaattgcatttgttttaacttctttctcttcacctggttaaaaatcttttcaaaaatgcaaaacccttctacggttacccaagaatctggccctgctgccttcgatctcgtcacacaattgggtcacttagcattcaacaagagctttcgcagctcaaacactgatgggttttgttcatttaagccaaatcacgtgtatttttcaggcttcagagactcaatttctcagaaaaagcgcagagttgctgctgctgcttcactcagtttgggtgctcgaaacagcgtttcttcaagcgttaggataattctgaatgatttttacagagcaatcaagtttcactgagatagaatcccaattggatctgctttta

SEQ ID NO: 198241 - DNA, 444 bp, Gossypium hirsutum
cccacgcgtccgcccacgcgtccacccacgcgtttttttacacatccgcccacgcgttcggggtgggtaatctaacatgtctagcattactcccacttcccggaatcgtaatccgtcgaagcccgttagcgtccgccgggtttccaacaatatgcctggtttaggacatgaagaagaagatgtcatgttgctgcatgacaagtcttatagctgcagtaacgggggtgttctacaagggtcagctttggttcctagagggcatggtcagtgatcgaaatgacaaggattcgcgacgtgaaacgcttaaaagacaccgagaagaggttgctggacgagttttggtaccagataaatggggtaaagaagagttgcttaaagactggatggattattcatcgtttgattcattgttagctcccactggacttgcttcagctcgtaaag

SEQ ID NO: 198242 - DNA, 428 bp, Gossypium hirsutum
tttatctctaaggaccgacattgccaaatctctttagggcgtttctcataacagagcaaccatgagctccatcattcaaagctttcaaaagaacagctccctccccgtctcccaaactgaatcaaaagaccactttccaccaccagctggcccagggcggctgcgaagaaggctttcatctctgtctctaaaactacaacccacttcttcaccggcgacgtcatggacattccccagatccaagtccttgtcttccatgggagaatacgccggtagctccatcaggaaatggtgggactggggttggtcttgggttctctccaaaaagccctcgttcgctaaagacattgaaatgaacgaagaagaaaccaggatccttgggtgccacaacaaaggcagttggaggcatgtgttttacaaagtcagat

SEQ ID NO: 198243 - DNA, 459 bp, Gossypium hirsutum
cacacacacacacacaacaattacacctttcctttgatatccgcatttctttctttttctcttttcttgttcttgttcttgttccccccttgttgatattctctatttactttgagggattaatataagaaggcaatgtgggatggtggggttgtgggctcgatttggcgtttgaagcctgcctccctccctttgttggttttcaggtgctttcgggactaattggttgcctgcttttgacgatgatggcgaagcttaattttgtaaagaacggtgtgcttagattgcctcctgggttccgcttccatcctactgatgaagagttagcggttcagcacttgagaagaaaggtgctttcttggcccttacctgcctctatcatacctgaagttgatgtttgcacagctgatccttgggacttgccatgtgacttggaacaagagaggtacttctttagca

SEQ ID NO: 198244 - DNA, 575 bp, Gossypium hirsutum
cgccaacccttccgtttaaatggcattgaccctaatccccatcaccttacccaccaatctaatctgttagctatccatcatcatcatcatcatctttgagaagctcccatggctgataattctgcttgcaacccggacctcattattgctcataaattccccgatacaacttatgctcatactgagagagatgtagctgtctatgccttgggtgttggagcatgtggtcgggacgccgtcgataccgacgaacttaaatacgtttaccatgaaaacggacagcagtttatcaaggttttgccaacattttctactgtattgtcacttacaggtctgccacaacttagtggagtgcctggcttaaagtttgataaacgtcttctgttgcatggacaacaatacatagaaatacacaagccacttacttcaaatgcctctctacttaacaagacataccatcgcaggtttccatgacataggtaaagcagcaatacttgaacttgtaaccagaagatatgagaaagagactggggaactattaaccttgaatcggtaaggttgtattttcccccact

SEQ ID NO: 198245 - DNA, 465 bp, Gossypium hirsutum
ttttcaatttaactcagctcagctcagctcaactcaactcacttaaatcttttctgctgcggtggcgatgggggcggcgatgttgtcggagttggcgacggagatcgtggtgccagtgtgcgccgtgattggaatagctttctcgttggtgcagtgggtgatggtgtcgcgcgtgaagcttacctccgagcgccatgcgtcgtcggcgaatagtagcaagaatggttacggtgattacttgattgaggaagaggaaggaatcaatgaccatagcgttgtcaccaagtgcgctgatattcaaaacgctatctctgaaggtgcaacatcctttctttttactgaatatcagtatgttggcatcttcatgattgctttcgctatcctgattttcctcttcctgggctctgttgagggcttcagcacgaatagccagccttgcacctatgataaggagaagatgtgcaa

SEQ ID NO: 198246 - DNA, 372 bp, Gossypium hirsutum
gattatcgtgcaaaacttagcataatactgtccctcataacattcttcgactcgcttcattgattagcccaaagattaacataaccaaaaagataaacggcttgtgcttccgctactgttctcaagactttacctatgatcgacacgaccgagtggatgaaggggcggaacctgcgccaccctccgggtcgctttgtacggtgacacgctacatcagacgccttaaccgtccgcgctagctcatatgccgatgagcttgccaagaccgcggaaactgccgcatctacaggtcgaggtatttgggccatggatgaatcaaatgctgcatgtggggcgcggcttgcctcgattggtctctagaataccgaggcg

SEQ ID NO: 198247 - DNA, 639 bp, Gossypium hirsutum
  unsure (1)..(639): unsure at all n locations
cacgttcttgtttttttcacttctttctctttctcgaaaaccggtcacctgaaactcaaacgcctctctgaatcctcgccggaacctgtcaatctcttacatctccggcggctgtctcacggatctgttcacgatgagcaccggccaacttctcagcatcgagcctcaagagctccagttcccatttgaattgagaaagcagatctcgtgttccctaaacttgtccaacaagaccgacaattatgtggcttttaaggtcaaaacgacaaatccaaagaagtactgtgtaaggccaaatactggagttgtgctgcctaggtctacgtgcaacgttgttgttacaatgcaagctcaaaaggaagcacctactgatatgcaatgcaaagataagtttttacttcaagatgtgggttgctagtcctggagctaccacgaaagatataccggggannatgtttaataaggaatctgggcataagttgnaaagtgcaagggnggtggggnnatgttgcacctnctcgggcncttcccctgtcagaaagatctgaggaggctgtacctaagcttagtctcgaaatggaactttatgctgtgaactacattgcagccctatttcagctaacgagagaaacttgcttt

SEQ ID NO: 198248 - DNA, 482 bp, Gossypium hirsutum
cccacgcgtccgaaatcactgctacgctctctaactccaagtccgacgccccaattcggtccccgaaatacccacacacactatctactcgtcatgcaaacgctactgctcccggctactcgctccggtatatgtgcggtggcggcgggtcccctccgaccaccgctcactctctctcctccaaattttctcacttcaatcaaaactcggaaccaaaacctccgttgtcccctttcgcatcctacgaccctcttaatgttctaagatctacgcttttttcgcccaaagtctcttcgtcctcagtttcacccagttttacctgcctgtaatgatgatactgacaaggcgaagcttgctcaggtttcgaagaggctagagaacacgtcgaggtactttaagcgattgggcaatttatggtattggggacagttagcgtgcactttggttcagcggtgatactctaattatctgaggttttactg

SEQ ID NO: 198249 - DNA, 488 bp, Gossypium hirsutum
ccgggcccgaaattccgggggggcccgacgcgtccgggcatctcctttcccctcttcttcctccactgtcctctttcgctgcctaacctaaacaaagcaatggctttccttccgcccatcaccactttcgcagccgccctcctcctcttcctccacaccccactcgccacgtcatcccccctcaaccttactggcgactccctttcaccctacgaagtcctccaaggctacaacttccccgttgggcttctcccacaaggcgtcttaaagtacgatttagatgaatccaccggtcggttccatgcctacttagagggttcgtgtagcttctcactggaagggtcttatcaactcaaatacaaatccacgatcagcgggatcatctccaacaacaggctcaaaaacctgagtggaatcagtgtcaaggtcctgtttttatggctcaacatcgtggaggttgttagagatgaagatgagctggaattttc

SEQ ID NO: 198250 - DNA, 484 bp, Gossypium hirsutum
  unsure (1)..(484): unsure at all n locations
ggaannnnccgggnnggacccacgccgtccgggtcagtaaagcttcaattcaaaggagtgttagtttccatggcgttttcttcttctgctctctctcacacctcttcttcatgcctctcttccttcccacatgccttcacaaccagaaaaacccatcttcgcttcccatcatttttactcataaaagcttcttctgaacctgacaaaggaaaccccactgctacacagaccaaaaacgctgaaggctctagcaatgctcaacctcaacctcaagccactcccgccgccgccgctaagccacctcccaaaaagcccgtttattccatgaagaaaggccagattgttagggtggataaagacaagtatctcaacagtattaattatctatctgtagggcatcccccctattacaaaggcttggactacatatacgaagaccgtggtgaggttctggatgtacgcatttttgagacaggagaacatg

SEQ ID NO: 198251 - DNA, 449 bp, Gossypium hirsutum
caatctttcagaaagagagaggcaaagagaaaaaagagagagggtattacatatattcatctaattatacaaataaagatggctcttcacctttcctgggtttccgtttttggcgatctcggtactgaaatatatattcatatgcccttcttgtttgcgtattttaatattcactaacattacattatattgtttttaattaggcgtcattgtttcatttatggtcgccttttctcccatgccagcattttatcaaatctataagaagaaaacatcagaaggattccaatcattaccctatgtgatatcgctattcagtgccatgctttggatttactatgcacttcttaagaagaatgaaatgcatctaattatcatcaacattttctgctgtttcattcaaagcttttacattgtcacttacgtttactacggtcgaaagaaggaaa

SEQ ID NO: 198252 - DNA, 454 bp, Gossypium hirsutum
cccacgcgtccgatggcacccatttcattacccaacaagccccatgcagtatgcatcccctacccagcacaaggtcacgtaaatccgatgctcaaagtggccaaactcctccatttcaaaggcttccacatcacttttgtcaacaccgagtacaaccacaaacgcttgctcaaatccaggggcccccacgccctcaatggcttgcctgacttccggttcgggacaatccccgacggccttcctccgccggacatcgacgccacgcaagacatccccgcgctttgtgactccactagcaagcattgtttggctccctttcgccgactccttgttgagctaaaagctacttccggtgtcccgccggtcacttgtatcgtcgccgatgggtgcatgtcgttcactctcgaggcggctaaagagttagggattcccagtgtgttgttttggacaccca

SEQ ID NO: 198253 - DNA, 415 bp, Gossypium hirsutum
tttccggttagaccggcgcgtccgcccacgcgtccgctcgagatgggtgggccagcccgatccgacccaataaccttttatttgattcgggtgcgatcgactttgccggttcaggtgtggttcacatggttggtggcattgcagggttatggggtgcattaatcgagggtccaaggattggccgattcgatcgagctggtcgatctgtggcgttacgtgggcacagtgcctcattagtagtgctcgggacgtttctattgtggttcggatggtatgggttcaacccaggttcattcttgaccatcatgaaagggtatggtggtggtaggaggttattattggacaatagtagttccgtagtttttttctatatttaccttcttcattttccgttctctataattttaattacata

SEQ ID NO: 198254 - DNA, 403 bp, Gossypium hirsutum
cccacgcgtccgctcgagatgggtgggccagcccgatccgacccaataaccttttatttgattcgggtgcgatcgactttgccggttcaggtgtggttcacatggttggtggcattgcagggttatggggtgcattaatcgagggtccaaggattggccgattcgatcgagctggtcgatctgtggcgttacgtgggcacagtgcctcattagtagtgctcgggacgtttctattgtggttcggatggtatgggttcaacccaggttcattcttgaccatcatgaaagggtatggtggtggtggaggttattatggacattggagtgccgtagggaggacagctgtcacgacgacattggccgggtgcacagctgctcttacaaccttgtttagcaagagact

SEQ ID NO: 198255 - DNA, 277 bp, Gossypium hirsutum
gccacgcgaccgaggcgattacacacgatctgccgaccatggcatcagttgacggtgcagactttaacagcgtggatgctacattttgaagtcggcctaatggaactacacacgttatgataaccagcctgcctggtcattttaagagtgcatagctatctgcagactgtgtgttgaaatatattgcattgtatgaggaatgatcttgtcaatcacatagcgctttacatggggacaaagaatctgactctggctggacttaaatttcaagagagga

SEQ ID NO: 198256 - DNA, 453 bp, Gossypium hirsutum
ctttctttctcttttgtcaaaccctaaatccctcactccaactgcagattcacctccacaaacagcaaccaatacattcaagcttggagggatgactttttagccttgagatctcctttcggcttcaatttcaacgaagcaaaaagagatttatggcatattcgcaaggtaagactcctctttcttttttccttttattttcaaacgcaatgatggaagatttgaaggcaataaatcgcaaggaaatgcaaaaacttaaagaaatttaaacagaaatcaacttctaaaaattttgactgctttctttgtattcaatatgcgttcgtcctcttttacactgattttctcggccttttatagccgatttacaggataaatagaaaaaggaaaaaaaaactcttaatttttgctgtcatctgctggtttattttctgttattggggcttgtctcgc

SEQ ID NO: 198257 - DNA, 339 bp, Gossypium hirsutum
accacgcatccgtacggagcttgtgttcatattcacatactccttcttttcatgctgggttcttcatgacagtgggtcgatgcagtgactcggaggatacgtgactcgaaattatccaccaccaaagcgggattatggagggagcgcacttgatcgttccacaggcaacaaaccaaactgtattcttccctgggacgatggctcctgagagtctcatgaatgggagcgtgctggaagacggtatctacccggacgggttggggctaccatctgcttcctagcgtcacgtgagggatattactatccagaacgattcttagagtacatcgcatgagataa

SEQ ID NO: 198258 - DNA, 776 bp, Gossypium hirsutum
aaagaggttcataaggaagttcccacccgatgttgttctttatgttgatcgtttggacgcgcatgacagagatcatactgattttctattattgaagtctctcacggattctctcggttcatcaatatggcaaaatgcctttgtgactcttactcatgctgcatctgcttccccagaggggccgatgggggaacccctaagttttgaggtctttgttgctcaacggtctcatgtgattcatcgagctatcagccaagcagttggcgatctgcgtctaatgaatccgagtatgatgcatcccgtggctctcgttgagaaccatccatcatgtcctagagacggaaatggagaaattttgcttccgaatgggcaaagttggatgtcacagttgctactcttgtgctattcagtgaaagatcttatctgaagcaagttcattgtcgaaaccacgagaacaatttgatcaccagaagctttttggcttccgacttcgttccccacctctagcttacttgctgtcttctttgttgcaatcccgatctcacttcatactacctaacaatgaaggcagtgatggatgttgacttggatactgagttgggacgtctgacatattctgatgaagaatatatgattattatgatcagctttcaccattcagctcttgagagactgaggctgtaaccttctctgataagattactactatgagatttgatttggtttccactgtaagaccatgtcaaggtgtaatattgtggattcatataatggat

SEQ ID NO: 198259 - DNA, 601 bp, Gossypium hirsutum
  unsure (1)..(601): unsure at all n locations
cgggcngaccacgcgtncgaagcgtttgatcggtagaagattcatcaactcttcttttcttaaaagcaacaagaaattgtcgaccaaggagagttctgggcctggagacaagccaatgatcgtcgtcacatataaaggagaagagaagcaattcgctgctgaagaaatatcctctatggtcctcatgaagatgaatgagatcgccgaggcatatctcgggtccaccatcaaaaacgccgtcgtcactgtaccagcttacttcaatgattcccagcgtcaagccacgaaagacgctggtgttattgctggcctcaatgtcatgcgtataatcaacgagccaactgctgctgccattgcctacggacttgacaaaaaggctggaagttctggagaaaagaatgttcttatttttgaccttggaggtgggactttcgatgtctcattgttgacaattgaagaaggaatcttcgaagtgaaagctactgctggagatacccatttgggaggtgaagattttgataatagaatggtgaatcattttgtgcaggagtttaagaggaagaacaaaaaggatattagcgggaacccaagagctttgaga

SEQ ID NO: 198260 - DNA, 513 bp, Gossypium hirsutum
  unsure (1)..(513): unsure at all n locations
gcggacgcgngggcggacgcggggttttacgcgggccgaaatttggaaaaactagcaaattccgcaaggcgggcgacttccattagggttcttcgattccgattttacagaacttttatcgaatttgtgaaatttcatcttcaaaaccctagtttctgctaatatcttattgattcaacatggctactgcatcagtggcgtttaaatcaagggaggatcaccgaaaacagctggaattagaggaagctcgaaaagcggggcttgctcccgctgacgttgacgaggatggaaaagaaattaaccctcatattcctcagtatatgtcatcagcaccttggtatcttaacgcctgaaagacctagtttgaaacatcaacggaagtggaaatctgatcccaattataccaaatcttggtacgatagaggcgcgaagatatttcaagctgaaaaatatcgaaaaggagcctgcgagaactgtggagccatgacacatgatgcaaagtcatgcatggag

SEQ ID NO: 198261 - DNA, 397 bp, Gossypium hirsutum
  unsure (1)..(397): unsure at all n locations
cccacgcgnccgcttactctcaatattgaaatgaaatctctctgagagaggagttgcttaactgaattggttttggttgtaataagcatggtttcgctggaagattcacattctaattccaaccgctttcctttgggtcgtaacttttacacccccagttcagcttccaccaccaaaatccaccgtcatgtcggccgctccatgcgtacgattcgctccaatctttaccaaaacgacaatagtagctgctccttcaccagttccgtccctgagaggtccgcctttgtctccgaaaatctcaccgagtccgttatcgacatgcgtctcggcgaactggctgccaaaagcaacgctaaatctgntacgtctgagtccgaaaacgaggcccttttggagt

SEQ ID NO: 198262 - DNA, 596 bp, Gossypium hirsutum
  unsure (1)..(596): unsure at all n locations
ggaaaaggccaaaacaagcccccgaattcactcttttcctcccacttatacaaaagccaatggcctccttatccttcctccacctctcctccgccacccgttttaccccccgcgccacccctattaaccaccgggctcgaacccagaaatcattctccatcaggtcccaatctgccccagtcctttcccaagatgagctcaaaaagcttgcagctgacaaagcggttgagtcagtcaagtcaggtatggtcctaggcctaggaacaggctcaacagctgcctttgtggttgacaaactgggtcaactcctttccaccggtcaactttctaacatcgtcggaatcccaacctcaaaaagaacccaagagcaagctgcatcgcttaatatccctttatccacccttgacttgcatccccatattgatctcgccattgatggtgctgatgaagttgaccctaacctcgacttatttaaaggccgtgggggtgcacttttgcgaaagaaaatggttgaagcagcttcatcttctttcattgtagtggctgatgatagcaagcttgtttcanggcttggagggagtggtttagccatgcct

SEQ ID NO: 198263 - DNA, 540 bp, Gossypium hirsutum
cttcttcaatctaagcttctcagagacttaaaatggctcgcaagaagatcagagaatacgattccaagagacttctcaaacaacacctcaaacgcgtcgctaatatcgacctccaaatctgttctgctcaggtgactcaatctactgatttcaccgagttaacgaacgaacaaccatggctttcgtccaccagattagttgttaagccggatatgttgtttggtaaacgtgggaagagtggcttggttgctctcaatttggatcttgctgaagttgctgaattcgtcaaagctcgcctcggcactgaggttgaaatgggcggttgcaaagctcctataaccacattcattgttgaaccttttgtaccccatgaacaagagtattacctttcaatagtctctgaaaggcttggttttaccattagtttttcggaatgtggaggtattgatattgaagagaactgggataaggctaacaccatgttccttacaaccgagaaacctatgaccttggagacatgtgcacacgtgatagctacac

SEQ ID NO: 198264 - DNA, 391 bp, Gossypium hirsutum
taattttccctttcctttctctctttctattcaaccaaactatccctttctttctcctcgtaatcaccaattttctacattctttgactgagaaattttttgggttgttcatttgtttcttttcttcttgcttgtttcctaataaaatgcaaaaataacttcaagaaaccatgtgtgtttttctatatttctagatttgaggatttgattaagttttgaccttctctcaccaaacccatatcggagttgaaatgagttcttgaaagtgtttgaagaaagaagcagttgattttggacttctttttgttttcgtggtattttctttctgtcttccccttcgttttctaggcagccaaacggattgcttagagtaaataaaagggtgaaagtg

SEQ ID NO: 198265 - DNA, 630 bp, Gossypium hirsutum
ctgcttctctcgtcgagtgaaagaaataagcatggccgtggttggagtattggctttacagggatcttttaacgaacacatagcagcgctaaggaggttaggaatgaaaggagtggaaataaggaagccagagcagcttcaaagtatcagctctcttatcattcctggtggagaaagcaccaccatggctaagcttgctgagttccacaatctttttccagctctgcgggaatttgtgcaaatgggccggccggtttgggggacttgtgcaggtcttatatttttggcaaacaaagctgttggacagaaagacggaggacaggaattagttgggggtctgaattgcactgtccatagaaattactttgggagtcagatccaaagctttgaggcagagctcttagtgccagaacttgcctcccaagaaggtggccctgagacatttcgtggtgttttcatccgagctcctgctgtccttgaagtggggccagaagttgaagtgcttgctgattatcctatcccatcaaataaagttctatattcaagttcagctgttgaaattcaagaggagtctgccgtgcctgaaaagaaagtgatagttgccataaagcaaggaaacttgctggggac

SEQ ID NO: 198266 - DNA, 440 bp, Gossypium hirsutum
aaacatccacaaaaacatgttggctatgagtaaatggttcacgctcacaccttttatgtctgagcaggtttagtaagagagttgggttgtccggcagccctggttctgttcgagcccatgtcaatggaggaggagacgacaccaacaacagtaaaaacaacgacaagaagaagaagaagaaagttgtggtggttggctcgggttgggctggtctcggtgctgctcaccatctctgcaaacagggatttgatgttactgttcttgatggtggtgatggtataggcactccagataatgtcggtatccaagggttttggtatccctataaaaatatattcagtcttgttgatgagttggctatcaagcccttcactagctggacaagatctgcacagtattcatgggaaggattagaggttgaatttccagtataccaggaa

SEQ ID NO: 198267 - DNA, 671 bp, Gossypium hirsutum
  unsure (1)..(671): unsure at all n locations
cccacgcgttcaaaccccctttctgtcactgtaacagtgcgatgaatacgggatattcggacaatgaatttgacgtaatcgtcgtaggggcgggcgtcatggggagctccacggcgtaccaactagccaaaagagtccaaaaaacgctactcctcgagcagtttgactttctccaccatcgaggttcctctcacggcgagtcacgcaccatacgagcaacgtaccctgaagactactacttcggcttggtcgatgagtcgtatcggttgtgggagcaggctcaatctgaaatcgggttcaaggtttacttcaaggcccaacagttcgacatgggcccatccgacgccaagagtctcctttctgtgatctctacttgtagaaagaacggcatcccgtaccaagtcctcgatcaccggcaagtcgctgaaagattttccggacggatcgatataccagaggactggattggcgtgtcgtgcgagcttggcggcatcatcaagcccaccaaggcagtgtcaatgttccaaatgctggctttcaagaatggtgcatgccttaaggacaacatcanagtggntagcatanacaaagatggtgaccganggattgaggtagctgcaagcaatggtgaaattttgggggtaaaaatggntgtgacagtgggtggtggn

SEQ ID NO: 198268 - DNA, 804 bp, Gossypium hirsutum
agattagattcatatttcctttatgtacggaagttgggaaaggaacaaaaagatttagccaatttcctcaaagtttcctcccaagtcgaagaagaagtcctaataatttaggactgttggggtggttttcgtttccgttttgtttccttcatttctgcttctgatcccccgtttgtaggagggaaaagaagagagattgaatggagagtgtagtatggcaagggttggctttatctggaattttctcttggattgtaattacttgttatttcgatgtaaccaaaaagattagatctttgctgcaaccttgggtgtctcaccatgttgtctctggcacttctatcatccttaagatccagaaacatcagcataaattcttggatgctctcttttctgggttgtcttgtatagtttctgtgcccttttacactgcgtttcttcctttgcttttctggagtgggcatgggaaactggctaggcagatgaccctgttgatggctctctgcgattatttagggaactgcataaaggatgtggtatcagctcctagaccaaattgccctcctgttagaaggataacagctaccaaagatgaagaagaaaatgctttggagtatgggttgccttcttctcatactctgaatacagtgtgcttatcaggattccttgtatgctatgtgctatcctacacacagtgtgaagatgcttttgtgaaacttggtgcagtcacccttgcttgcttgcttgtgggtttcattggctctggaaggatataccttggcatgcacagcttgattgatataa

SEQ ID NO: 198269 - DNA, 453 bp, Gossypium hirsutum
gcgacgccccacgcgtacggttgaatctttgggtggccactaggtgtttggtaatagaactcagagagtttggatatttggtcaaggtagtttgaaggttggttatttgaatttcgggggtaacacccaaggttacacattgtggacatcacggctatatacaaagtttctcggtctctttttcatgtccgagctggacgacgtaagggttgtgtgatcgagagcaacccttcgccgcacggcgggcgtggagctttgccttccgaaggcggcaatccttccgatctcctcttccttgctggtggtgggattgtcttttagagtttgggtaccctatttttagctagcttattagtctgtaaaatattactatcgaagaagcttgtttttcgttgtttttttggggttttctttatttgatctcttattggataaataaagaagagaagtagt

SEQ ID NO: 198270 - DNA, 1004 bp, Gossypium hirsutum
  unsure (1)..(1004): unsure at all n locations
catgatttttttatcgaagtcaatagtgatttttttttttttgagtcattttggaaaaaacagaggcctacactgtgtccatctactcaagaatttgatgctatataatttcagggcctctccctctttcttcagtcagtgtctctaaacaaagcgttcttcatatggttttcctgtttgtttccatggaaaacctgtaccattaccttgtaatcatcttattcattcttctcaccatcaagcttttgactcataaaaccaaaaatttgcctcccagtcccttttctctgccaattattggccaccttcacctcatcaaaaacccactttaccaatcactggccacgttattatccaaatatggccctgttttatatctcaaattcggttgcagacatgtccttgttctttcttctccttctgctgttgaagaatgcttgaccaagaatgatataatatttgcaaaccggcctcgtactatggccggggatcttatgacgtacaactacactactttcgtttgggctccttacggatcactttggcggaaccatcgccgtctcagcgctgttgagatcttctgttctaacagcgttgaaaagttttcttccatacgtgaagaagaagttgcggactttgttcgtcgcttgtttgaggtctcatcaggcaacggcacccaaaaggtggacttgaagtacttgttttgtctcttgacggcgaatgtcatgtggaggacggtggccggaaaacgtggggtcgaggatcctaaggacgtggaggcagaaaagatgttcttcacggaatttaagagcttgttttttccgagcctagggaccaacatatgtgatttcttcccagttttgaggtggattggtttcctagggattgaaaaaaaattgaaagaaatacataggagaagagatgaatatcttcagaatttagtaaatgggataagattaaatataagtaagaagaatttttcgctgattganaggcttctgtcc

SEQ ID NO: 198271 - DNA, 443 bp, Gossypium hirsutum
  unsure (1)..(443): unsure at all n locations
cccacgcgtncgcccacgcgtncgcccacgcgttcgtccacgcgtacgcccacgcgtccgcccacgccttcccctttggaaacagcccccccagtactgccagagcagaaatggcgctaactctcccaaacacatttctccaaatcaagccttctcctcccccttcactccctctcagaaaggtggtgactgcaaggggagggggctataggccacaagttacttgccggaagaaggacatccacccggaattccacgaggatgctaaagtttactgcaatggagaattggtgatgacaacaggtgggacgcagaaggagtatgtggtggatgtttggtcggggaaccatcctttttacctcgggaacagggtcggccgtccttgttgacgctgaccaggtcgagaagttccgtaagaaagtcggcagntatctgagatttgg

SEQ ID NO: 198272 - DNA, 401 bp, Gossypium hirsutum
atttagtgcaaaaaccatcttcttttttctgctttctcgtatagcagcctggtgggagaaactttttttttgaggaaattagaaaatgtcatcggagaacgggaaaaggttgctggaaactgatgccggcggcttgaattttgaggctaccgagctgactttagggttacctggagagcctagagtaacatcggacggtggagctaagttgggcagtaaacgtggattttcggaaaccgttgatcttaagttgggtgacaacaatcaagaggttaagctgggtcactccctccaagaagctgccaagtctcccgtttcaaagacacaagtggtgggttggccgcccgtgagaggctttgcaaagagaggaaagaagagttgcaaatatgtaaaagtggcgg

SEQ ID NO: 198273 - DNA, 689 bp, Gossypium hirsutum
cccacgcgtccgcccacgcgtccgggagaaccgatctgcgagtctcatgaaaacaagttgctggagcggatggcaataagcgtggaatacttgaacaaaaaggttaaggaatgtttcttggatttgggatcatttccagaagataaaaaaattccccttgatgttctcattaacatgtgggttgagatacatgacattgatgaggaggaagcatttgccattcttgtcgagctttctgataagaatctactcacttttggtgaaagacccaccggttggagatgcgtacagtagttattatgaaatctgtgttactcaacatgatgtgttgagagaccttgctcttcatctcagcaatcaaggggatgtgaacgagcgaaagcggttgcttatgcctagaagagatactgaactccccagagaatgggaaagaaacacagaccagccattcaatgctcagatagtttcagttcatacaggagaaatgagggaaatggactggtttcgcatggaattcccaaaggctgaagtacttatcttgaatttttcctccaatgaatacttcctgcctcctttcatagacgacatgcccaagcttagggcacttattgtcataaattatggtacaaatgaggcaatatttgagaatttttcagtcttcaccaatctggcaaatttgcgaagcctat

SEQ ID NO: 198274 - DNA, 677 bp, Gossypium hirsutum
cccacgcgtccgcccacgcgtccgcccacttttccgggagttaataagctctagggcgagaggttttgctgtatcttttggttctttaattggatttttgccttaccgaaacctggctgctaaatggaagttcttagctttcgaatcatggttgagacagaggggtttagacccatctgcttataagcagaacttaggagtcattggaagttctgatgtaatgagcaagaactcttctctagattcaacctcagattcagaaaacaagcaacagtttgagggaaaattttcaccggatatgaaattggaagatcttttgaggatttatgatcaggagaagcttaaattcttgacctcatttgtcggtcagagagtcaaagtaaatgtgctaatggctgacagaaagttcagaaaacttatagtttctctgaggccaaaagaaaaggaagagttaatagagaaaaagagaaatgttatggccaagcttcgtgttggggatgttataaaatgttgcatcaagaaaataacttattttggtatatttgtggaggttgaaggcgtgcctgctttgattcaccagacggaagtatcatgggatgccaccttggatcctttgtcacatttcaaaattggtcagattgtcgaggccaaagtccaccaattggatttcacacttg

SEQ ID NO: 198275 - DNA, 461 bp, Gossypium hirsutum
  unsure (1)..(461): unsure at all n locations
tccggnnttgaaaaaccggcgcggccccacccgtccgggaagaatcaatgtcgactgtaccttcttcttccctttgggcctccattttcagctggggtacaccttctgcctgctttgtctgtcttaatatcactatcggtactatctttttcacttccaccttctcttccaacaattctggcgccgccgcttctggcggtgtcggcgacggcccatcactccacgaaggagatgaaacaaacgagcctagactccttccatctccatctgttttacaaaggctcaaatccatctactggtactcttacggatcccaacaaccttttactaccaccaccgccgccgccgaaatcccagattccggcgccgatttccatatctcttttcaacaacaaaccagtgaaactgaaaccacacctgaaccagtcccaacccacctcgatagatctccttctgttttg

SEQ ID NO: 198276 - DNA, 521 bp, Gossypium hirsutum
cgtttacgaaaaatataatattctcactttcccggggatcaaaggccatatattttgcgaattcaattaatgggttttagaagaatgggttggcatgagctactatgggtcggaaggctgcttgttcttatgcaactgcttcatggggtgtttggttggggaaaggacggtcattttgctgtttgcaagatagctgaggaatatcttactaaagatgctctggctacagtaaaggaactgctccccgattccgctggaggtgagcttgcatctgtatgctcctgggctgatgatgtaaggtggcactatcactggtctagtcccttacactatgttgacaccccagatttcaagtgtaattataaatactgccgggactgccatgatgctgctggacataaggatcgctgcgtaactggagccattttcaactatacaaagcaacttttttcagcatatcagggatatagtcctcagttgagttacaatttgacagaggcgcttatgttcttagctcattt

SEQ ID NO: 198277 - DNA, 422 bp, Gossypium hirsutum
gacggtcgatttgtttaaccccagcaactcgttgaaatggcgtccaagttgtgtgactcatgcaaatcagcgacggccactctgttctgccgtcctgactcggcttttctttgccccaactgcgactccaaaatccatgccgccaacaagctagcctcccgtcacgctcgggtcttggtctgtgaagtttgcgaacaagcaccggctcacgtcacctgcaaggctgacgcagccgctctttgcgtcacttgtgaccgtgacatccactccgctaaccctctcgctcgccggcacgagcgggttcctttggctcccttttacgattccgtcaagcccaacacagcgtttaacttcctggacgaccgttacttatccgacgttgatggagacgctgacagcagcagggaagaagcggaggcagc

SEQ ID NO: 198278 - DNA, 807 bp, Gossypium hirsutum
  unsure (1)..(807): unsure at all n locations
cggacgcgtgggcggacgcgtgggcggtcgcgtgggcggacgcgtgggcgagaccggggcgcaactatttataatttggtcatttcttttgtgtggtggttctctcactttttgagtttgctgcgcttgtctgtagtccatgtgactctctttcctttgctttcgtttcccagtctcttactttttgaatctcagatcaggaaattatcaaatccgagccgccatggaggttaacgacaagcttttgaacacgggtattctcatagtagccaccctagtagtggccaagctcatatctttcctcataatgcctagatctaagaaacgggttccaccagcagtcaaagcctggccggtaatcggtgggctccttcgattcgtgaaagggcctatggtgatgctccgggaggagtacccgaagcttggcagtgttttcacattgaacttgtttaacaagaagataactttcttgattgggcctgaggtttcatcccacttctttaaggcttcagaatcagacctcagccaacagggaggtctatcagttcaatgtgccaaccttcggcctggtgtgggttttgatgttgattacactataagggcagagcagttccggttctttacagaggcccttantagtaataaactttaaggttatgttgatctaatgttacagaagctgatgactacttcttcaaatggggggatagtggtagtggacctaagtttgattggagcatgaatctactgactgctatatgtgtccttgggcaagattcttataaactattgagagttctgcctccg

SEQ ID NO: 198279 - DNA, 481 bp, Gossypium hirsutum
tctttgtctaacctttttttctcggtgctgagaaattcagagaaaaaaatgattctcccagtttgttacttttctctttaatctacgtgactctctctcttcctgttcctttttctttgccgatctcctgtattctgaatctcaaattagctgagtactgataggaaattatcaaatccgaggcaccatggaagcagacgacaagtttttgaacatgggtattctcatagtagccactctagtagtggccaaactcatatcgttcctcataatgcccagatctaagaggcgggtgccgccagtaatcaaaagctggccggtaattggtgggctccttcgattcatgaaagggcccatcgtgatgatccgggaggagtacccaaagctcggcagtgttttcacgttgaacctgtttaacaagaagataactttcttgatcggacctgaggtttcagcacacttctttaaggcttcagaatcg

SEQ ID NO: 198280 - DNA, 629 bp, Gossypium hirsutum
  unsure (1)..(629): unsure at all n locations
atttatttaatggttaaaattcatgaaagctatgatagggtgaacagagtggggggcactccagtcccgatcattcaactactccccattcagagagatggacaagtttccggcgtttcttcttcttccatttctttgttttttccactctttatttctttccgacgccgatgttactggaaattcgtccgatcccggcctaactctctccgccgactctctctgcgcccagcttatcgagcccaatggttatttctgcactgaacacactattcaaactaaggatggctatttattagctctccaacgcgtctcatctcgttctggggatcttaaagttcagcaaggtcatcctgttctgcttcagcatggattattcatggcaggtgatgcatggtttttggattccactgaacagtcgttgggcttcatccttgcagaccagggttttgatgtgtgggttggaaatgttcgtggaacacgttggagccatggacacatatctttattaaatacagacaaggaattttgggagtggagttggcaggaattanctttgtatgatcttgcagaaatgttgcactacatacacgcaattaccagctccaaaatctttattgttggacatt

SEQ ID NO: 198281 - DNA, 643 bp, Gossypium hirsutum
ggaaaaaagcatccaacaaagtaggcggagatgtggcgctgcgtttctcgtagccttcgagttccatattccaacagatcagttgccgctaactctcttagatctaacatttccagtttcttctccactcatgctgggtccccttatacccgagtggatcatacgtatgatgcagttgtggttggtgctggtggtgcggggctgagagcagccattggtctttcagagcatggatttaatactgcttgcataactaagcttttcccaactcgttcacatactggtgcggctcagggtggcataaatgctgctttgggaaatatgactgaagatgactggcgatggcacatgtatgacacagttaaaggaagtgattggttaggtgatcaggatgcaattcaatatatgtgcagggaggcaccaaaagccgggattgaactcgagaattatgggctgcctttttctcggacagaagatgggaatattatcagagagcatttggggtcaaagcttgacttggaaaggtgacaggctatcgtggcatggctgttgtcaacgggcatgcttactgcaactttttggcactttaacctatcccattctggggaattttcttggactatgggacacatggactgcgggg

SEQ ID NO: 198282 - DNA, 386 bp, Gossypium hirsutum
ggaaaaaggaaaaagggaactgaattctttgacggagagaagggttaggcgttatggacggcggtactacggaggctgagcggtggttgacgattgcggagaagctgttggcggcgcgtgatttgcacgggaccagaaccttcgcgatccgagctcgtgaatcggcccctatcctcgccgaccaaatcctagccgtgacggacactctcataacggctcaatctaactctcaagactggtacgggatcctccaactcgtgccgttaactcagtccatggaagttgtggcgagtcagtataggaaactcgcccttcttttgaatcctgggaggaacaggctctctttcgcagatcaggcgtttcgatttgtttccgaagcttggaat

SEQ ID NO: 198283 - DNA, 486 bp, Gossypium hirsutum
gatgcataatgatgaacaagaaaagctctacttgatagactttgagtatgggtcttacaagtacagaggctttgacattggaaatcacttcaatgaatatgctggatatgactgtgactatagcttgtatccgagtaaagatgaacaatatcattttttcaggcattatttagaacctgaaaaaccatgcgaggtatcagaaaaagaccttgaagctctgtatgtggagactaatacgttcatgttagcttcacatttatattgggcgttatgggccttaatccaggcaaggatgtcacccatcgattttgattatctcgggtatttcttcttgcggtacaatgagtataagaagcagaagagaatgtgtttctcccttgcaaaatctcacatatctggttctggaaaagcataagactctgatagcgttcgcacgaatagccagtttctgtatgtcatggatttgcatgttttgagtattttgat

SEQ ID NO: 198284 - DNA, 438 bp, Gossypium hirsutum
tttaaagaaaaaaaaaactgaacctatcctctccctttcaaggttcccagcagccaaacatggcccacgccggcgagcggcggttccaaaggccaaagctccttcacgagcggtggtcggagcgagaaaaggagggctttttaaccccgttctcgacctccaccttaaggcccggtcctccagaccaaacaagccgaaacaaggagagacctttcgtctccttctcggtccgattccaacaccgaagatggtctccggcgacgggctttcgagaccggtactggtgaagtcaacgggtattggaagaataaacctagcctttttggtgcaaaactggtcgtgcttcgggcgttgagtgcgctgcaaatgcacgaggagacgtacggcgcactgaggctgctggttgtgagctgaattgggctagggttttgccatctt

SEQ ID NO: 198285 - DNA, 637 bp, Gossypium hirsutum
  unsure (1)..(637): unsure at all n locations
aaaaaaaccctagcaaaaaacactatacgatctatgaacagaagctgaaaaaataagcatcaaataagaaattaacccacagttctaaagaacccccatcaaatgatttccgatcctaagctgatactatatgcttgcattgcaaaaggacccacacttgtagctgaattcactcgcaaagaagctgtggggatcgagccattagcaagggcatgcatcgagaaagcccctccttaccattcaatgttctctcatacagtttcccaaaggtcctataccttcttaatcgatgacccttttgtttatttcatcatatcccatgaagatctcgacaaatctgagtcgttttggttcttgaatcgctttgaaagttgctttggacgattttctactcactggtttggttatgggtaccgataatttgaccccaaattgtcttcaatctcatttcgatcccgttttttcaaaagctttgggtttgggtttggattttgttccatccccattattaaaagatagtaaaaacccaaccgtggtggctcctttgttanggggtttgaaaaaaaaaaaaaaatccggtggtggtttggaagtcaacggcgttgaaaccaaaaatggttgccgtggactccgcggc

SEQ ID NO: 198286 - DNA, 685 bp, Gossypium hirsutum
  unsure (1)..(685): unsure at all n locations
cccacgcgtccggtcgcccaacaaaaagcccaataacatcgcctaacgttgatcaatgcccactcattcatatcatcaatttccaccaactttcctcaaccaatcgccgccagctgacaaattaatcaacacccaatcccatgttggccattcaatgaccatcatcaaacacccaacatcgaccacccttagattcctttcctccatcaacagccgtagatttcaatacccacggcggcgatttcttctcgtcaacggttccgttcgattcaaacccatggctacgaagttggaagagacgatgataaagggtgccggcgaagatagcaaaaagggaggtaaaggggaagaaccgggtaagggaatacaaccgccgccgccaccaccggagaagcctgagcctggagattgttgcggcagcggttgcgtgcggtgcgtttgggatgtgtattatgaggaacttgaggcttataataagctttacaaatcagattccaatggatccaaatcaaattcattttaatttcactttcttttttttaatttttaatttttgtttttaaatttgcttcttttttttttaagtttagtgaattattgttgttgttgtggttgtcgggttttgacaacataaaaattattgtttttccactttttcggnnnnnnnnnnnnnnnnnnnnnnnnn

SEQ ID NO: 198287 - DNA, 466 bp, Gossypium hirsutum
atcaacttttataagagcgctctccacctcccatcaaagtcccgaaggcagagataaacgaaatggcggaaacatgcgacttcctcgcgacaaagagatgtgcagtggtgagtggaggaaacaagggaattggattggaaatatgtaagcagttggcttccaaaggtgtcaccgtggtgttaactgccagagatgagaaaagggggcttcaagctcttgacaagctcaaggaatctggtctttctcataatctggttttccaccagctcgatgtcactaaccctcttagcgttgcttctcttgctgctttcatcaacacccaattcgggaaacttgatatcttagtcaataatgcagcaattgctggagccaatgtgaactatgagattttaactaccgctgttgaaaaagcgagtgattggccagtaggggaggaagtgtggaatgagattattacaagtgaaac

SEQ ID NO: 198288 - DNA, 545 bp, Gossypium hirsutum
acggccacgcgtccgagaggctggaattgcaaatgggaccaaacccacttgatagcgaaaccacaacacgacccgccaattgtcaatactacatccttagcagcaactttgaaagtcgtacctttttctccatcccgaggaaacaagcggcggcgctgcccgctctccgcctctaacttctttatacgtctaactcttgttttccgttaaccgaatatgacctgtcgtcctcaacacccatatgtgtaaaaagcactctcattggtcggtgtgtatgtaatgaaacaaaagctgtcacattttttgtcctgttttcttcccccttccatctttatttcgctgtagaaaaaaaaaatctttcaaaaccttttttcttttttgtccctcgaagcatctctcagctgccaagtacttgcatttcagcttcaattgagaatttccatcaataatcctttaattttcagttaaagcaacatcttttttttgttgaacacagagatggatgtagttcggtttcagttggaatgaagaactttacagacaca

SEQ ID NO: 198289 - DNA, 413 bp, Gossypium hirsutum
cggacgcgtgggtgacccccctccaaaacgacgccgctctagccaatcggaggccgcatactcgccgtcaatgagctttgatactttcttgattggagctccgatatccgcttttcacaagataatggagcaaaaagcttggctaattttggtgatttttacatgtttaattgcatcttcttgtgggagagaattgaaggtcgaccacaagcataaactccccgtctacaatcatactcttgccaccattttagtagaatacgcttccgcggtgtacatttcggatttgacggaactttttacttggacttgtgaaagatgtaatggtttgaccacgggatttgaagttattgagcttgtggatgatattgagaactgtttacaggcatttgtcggagtggcgaagaatctta

SEQ ID NO: 198290 - DNA, 490 bp, Gossypium hirsutum
atttcatagcaatggagagttacgaagaaaaacgggaagttgaggatgaagaacaagaagaggctttgtcactctgtgatttgcctgtgaatttgattgaagaaaaggaactgaaaaatgaagaaaatggtgaaccatcacaagaagaagatttcaacttcggttcatggcctggccatggtggttcgtttaggtccgagccagaaatgtgtgtagctgatgaagtgttcttcaaaggccaaatcttacctttgcgtcactcagtgagttccgacaccgggttccgccctcatgacagccacaacatgtcccggtccttgtcgaggtcagaatccatggaccatggttcattaagtaggttcacaagtgtgagtagcagtagcactaggagcagtagccattactcaacgagtagtactaactcgaaacccggtatgaaaatccgaaacaacttcaacacacacccgagcccaaaaccttaaatccgatc

SEQ ID NO: 198291 - DNA, 483 bp, Gossypium hirsutum
gtaatgttgagattgatgcagcaattagcaaacttcgtgattggtatccccagattgttcacgtctgtacactattcgattttgtctactgttgtgaaaacatatatcaactgtcataagaggattaagttatgttgtcaatgcatgtgaatgggacttgtatgtggctcctttaatgtcattctagaactttgtttctttgttctgttaaagcatttgcatatttttttgtcagctaaaatatgcagttagtccttgtactttacaatgattaatggcatattttaaccttttttgcctcttgattctttcttttctggttccattattgttgttttggccattgggaactcaaggagtgccctgcatttataaatatcaaatttaacttgcattcttgccttttacttcagtaattcttgtcattccttctttcccttttcctctgtccctatattatggctaggatagagatgtttaaac

SEQ ID NO: 198292 - DNA, 493 bp, Gossypium hirsutum
gggaatcggaaaaggaaatgaagggtcgattattccctacaaaatgccactcacaaacaagacgaggaggttcatgtcaactttggccaaaacaaatttgcttttgatttgaaggaatatgaagctcaagagaggttgaagcggcagatgactattgaaaagatatctcttccaccaaatattaggtatggacttgttcgctcttacttgctacattatggctatgaagatacactcaattcatttgatttggctcgtataagcactatcccccctgtctatatagctcaagaaaatggctctgacgagcaggatatcggatatgcactaaatcagagaaagattctacgacagctcatcaggaatggtgagattgatgcagcaattagcaaacttcgtgattggtatccccagattgttcaggatgacaaatctgctacttgctttctgctgcactgccaaaaatttatcgaatttgttcgggtaggagcac

SEQ ID NO: 198293 - DNA, 406 bp, Gossypium hirsutum
  unsure (1)..(406): unsure at all n locations
cccacgcgtccgggaaaaggtggtgggattggcaaaggaggaggtgttggtggtggaatcggaaagggtggaggatacggaggtggcgtcggaaagggtggtgggattggcaaaggaggaggatatggaggtggaattggtaagggaggaggccatggaattggtggtgggatcggcaagggtggtggagtcggtggaggaattggaaagggtggcgggattggaaaaggtggtggatttggcggtggtgccggaggtggatatggcaagggtggtggttttggaggtggagttaagtgtggagctggaggtggaaagggtggtggttttggtggaagtggtggtggtgagaatggacaccattgatattacaagcnttgcgatgcatgcatgcattgatcaaaat

SEQ ID NO: 198294 - DNA, 622 bp, Gossypium hirsutum
cagaaaagccagagattccccgacaactccggcgataactgtaccccataccctatctctgcccttctcgactaccgcaccctcgttcctaagccctttctttgatctgagtaagaaatggcgatgtatatcgtatctcggcgactctccgctggatccaccacctcccagctggtcacctctctccgttatgccacctgctggagatccttctccacgtcttttagggaggaacgagacactttcggccccattaacgttccctccgataaattgtggggagcgcagactcagagatcgttacagaattttgaaattgggggagagcgtgaacggatgcctgaacctattattcgggcctttggtgttctcaagaaatgtgctgccaaggttaacatggaatatggtcttgatccaaccattgggaaagccataatgcaagcagccccagaagttaccgaaggaaaactcaacgatcactttccgcttgtcgtttgggcaactggtagtgggcacccagagtaacatgaatgcccatgagttattgcttataaagcagctgagatccttggaacatcagcgtggtgaaaagttggtgcaccccaatgattctgttgacagg

SEQ ID NO: 198295 - DNA, 378 bp, Gossypium hirsutum
cccacgcgtccgcccacgcgtccgcgcgtgcttagatcccgttggttgcaagacggttttcgtcgataacattgatttccttaaggaattggagtgagtttcggttgaactcgtgttcttatccttcagacaatgaaattcgaatccaagctgaaaggatttgtcgaagaaagcctccatagagaatggcagccaattccgttttgtagataaatgtttttgcggtgacaatcgggtagcccgttagattcgttagcgaagaaatctttagatataaagtgtatgttcagtgatcttcctgtttttatttcaatgaagcatttatgtatatttttcgatacatatttggatatggatattgaaaaaatatgatctttt

SEQ ID NO: 198296 - DNA, 415 bp, Gossypium hirsutum
gcagggctctatgactagggtttcgaactttccttgatttttttcctctgaaatcgctgctttcgaaggcaatatgagacccattttctgtggaaactttgagtatgatgcacggcagtctgatttggaacgactcttcagaaaatttgggagaatcgaaagagtagatatgaagtctggatttgctttcatctatatggaagatgagagagatgctgaagatgccatccgagcacttgatcgaacagaatttggtcagaaaggacgtaggcttcgtgttgaatggacaaagcatgagcgtggcattagaaggcccgagggtggggggcggtggatcaaagaagatctgcagcaaacacaaagaccttcaaagactttatttgtcatcaattttgatccttaccacactcgaact

SEQ ID NO: 198297 - DNA, 804 bp, Gossypium hirsutum
  unsure (1)..(804): unsure at all n locations
cacgcttggaaccaaacgccatctgatgatcagagtcgagtagaaaccaagctaacataacaaaaaggccatcttctttcatttcatttcttttcccagttccctatttgtcacaaaacagataccatcccttccccaagaacctaaaatatggcggatgcagctccacccagtaaatcaagagacctcgataagctgctcctccgaccgggaaacctcgttggcccaaccttcgaccctggcgttcaattacgggatgatttacaagaatatgcgagagttttggtggtgggagctggaggattggggtgtgagctgcttaaggatttggctctctcggggtttaaaaatcttgaggtcatcgacatggatcggattgaagtcaccaatctcaaccgtcaattcctcttcaggctggaagatgttggtaagccgaaggctgaggttgcagcaaagcgtgttatggaaagagttagtggcgtgaacattgtgccccatttttgccgaattgaggataaagacattgaattttataacgacttcaatatcattgccctcggtcttgattccattgaggctcggagctatattaatgctgtggcttgtantttccttgagtatgattctgatgacaatccacgtgaagaaacaatgaagcctatggtatatggtgggactgaaggtttcaagggtcacgctanggtgattgtgccaggggttacgccatgctttgagtgtacaatctggctatttccgcctcaagtgaagtttcctctatgtaccttancagaaacccctagaatt

SEQ ID NO: 198298 - DNA, 443 bp, Gossypium hirsutum
aaaataatcgaaactgacgttagctacacgttcttaaagacaaccctggcagatgattattcggaagagagctcttacaatgttgtggtgtcagctgaaggaagcattggtacaaacgactacaaagtaatgtaacataatgttgcgaaatcccagatagcatctttagtggcagatgttttctccaacacagcagtggcagaaaacaaggttgtggaagtttttactagcccatcggctccatcgaagagtgtagacgagcttttcagtgctattcctgaggatggaagaaggaaggcgtatgcagaagccaccgcacgggctaaagctgaagaagaggcagtattagcagctgtgaaagctcgtgaggcggccgaagcagcgaagaagctagaagtggaagtgaagaagctttcagagcaagaagcgaacgcagctaacct

SEQ ID NO: 198299 - DNA, 509 bp, Gossypium hirsutum
cccacgcgtccgcccacgcttccgcccacgcgtcccaaaacaataaaaaatgccgatttctcgcattgcagtaggatctgcagctgaggctggccaagctgatgccctcaaagcagctttagctgagtttatttcaatgctcatttttgtttttgctggtgaaggctcgggcatggcttttaacaagctcactgacaatggctctacaacaccggctggtcttgtagctgcatcggtggcccatgctttcgctctgtttgtggccgtttctgtcggtgctaacatctcgggtgggcacgtaaaccctgccgtcaccttcggtgcctttgttggtggccacattaccttggtccgaagtattttgtattggattgctcagttgctgggatccgttgtcgcttgcttgctcctcaagttttcaactggtggattgacaacatctgcatttgccttgtcatccggtgtgggagcatggaacgcagtggttttcgagatcgtgatgaccttcg

SEQ ID NO: 198300 - DNA, 497 bp, Gossypium hirsutum
tccacgcgtccgaagggtatcgacgaattggcttttattttcttttttaggtttgaagctctaagtccagctagattttcacttttcgggtggagaatgccgatttctcgaattgcagtaggctccccagcggaagctagccaatccgatgccctcaaggcagctctagctgagtttatttcaatgctcatctttgttttcgccggcgaaggctccggcatggcttttaacaagctcactgacaatggctcatcaacaccggcgggattagtagcggcatcagtggctcacgccttcgcgttgtttgtggcggtttccgtcggtgctaacatctccggtgggcacgtaaaccctgccgtcacattcggtgcctttgttggtggccatattacattgttcaggagtattttgtactggattgctcagttgctcggatccgttgttgcttgcttgcttctcaagttttcaactggtggactgacaacatcagcatttag

SEQ ID NO: 198301 - DNA, 812 bp, Gossypium hirsutum
cccacgcgtccgcccacgcgtccggattgctctgctcacatgctttgggttggtgagaggactcggcaattagatggagcacatgtcgaatttctccggggtatttccaatcctctcggcataaaggttagtgataaaatggacccgaaggaccttgtgaagttgtgtgaaattctcaaccctcggaacaaacctggaagactgacaataatcacacgaatgggtgccgataacatgcgaataaagcttccacatcttataagggcagtgcgccaggctgggcttattgtcacttgggtgagtgatcccatgcatgggaacacaattaaagctccatgtggtctcaaaactcgtccatttgatgcaatcagatctgagttgagggcgttcttcgatgttcatgaacaagaagggagctatcctggaggagttcatctggagatgacggggcagaacgtaacagagtgcatcggagggtcaaacactgtcacttttgatgacttgaactctcggtatcacacacattgtgacccaagattaaatgcgtcgcaatcattagagctagcctttgccatatcagaaaggttgaggaagagaaggctcaagtctgccaaggaactttgcaatgacaattaattgtcttgtgctatgtctgaaatggagagggttttttgtagtagaataaataaccctctcctccgatgtcccatttgagtttggatttttgtatgaactatgttctttgttttgcaattgacataaagtaatgcttggttaatggctactattcaaaccaaaaaaaaaaaaaaaaa

SEQ ID NO: 198302 - DNA, 835 bp, Gossypium hirsutum
  unsure (1)..(835): unsure at all n locations
gcaggtgttaataggaaaatatcagccgcttccgcaagagctcacactagaagagccaagcaaaacgcttctttcaagcttccttcagggatttgcacaaagatactattggtcttgtttgctgggatattggcatgggcttatcaggctattcagccgccaatacctaagacatgtggctctcctgatggtccaccggtcacggcatcgagaataaagctcaaggatggaaggtatttggcctacaaagagcatggtgttccccgagatgcagcaaagtataaaattgtctatgtccatggctttgattcttgtagacatgatgcggttgttgccaataccttgtcaccggaaattgttgaagctctcggggtctatatcgtgtcttttgacagaccaggttatggagagagtgaccctaatccaaaacgaacggttcagagcttgcctttggatatagaagagcttgctgatcaattgggattaggatccaagttttatgtaattggattttctatggggggacaggttatttggagctgcctcaagtacatcccacacaggttagctggggcagcattgttagctccagttgttaactactggtggcctggttttcctacaaacttagttacggaagcatatcagcaacagttacccaagaacagtgggccgttcgtgtgagtcactatgctcccctggcttactactggtggaacactcaaaaatggttccctagttctagtgttgttgctcacagtaccgatattcttaatagtgaggacaaaaaactcttgcccgagatagtctctactangaactacacggcagtatc

SEQ ID NO: 198303 - DNA, 520 bp, Gossypium hirsutum
cttattcgtccgcccacgcgtccgaaccaccattagacccatttttaaaccccaattcctcctttgttacagaagtagaacgaaaatgtcgcctttatccaaggtttttgcttcatggtgcaagaagcatgcagatggagatgatgatgacaatgattttgactatgctcccgcagcatgcatggaaggcaatggcgacgatgatgatggagactatgacgttgctccagcagcttctctcgagggtgatgatgatgacgatggcagctatgattatgctccagctgcatgattggagtgagtttatgagtgcccctaaccgtggggtttctaacccaaaactttttgcatttatgagtgcccccccccccccccgggtgcggctttaaagcaccttgtggttgtcgggtttataaggattattttaattaaatgatattcaaggagaacattggatcgtattctatgtcagctatcgttattattttagcaatctgtgacaaacgttaatatcatatac

SEQ ID NO: 198304 - DNA, 435 bp, Gossypium hirsutum
cttaatttgagcataattcaacgccaaacacaagccaccattagacccatttttaaaccccagctcctcctttgttacagaagttgaacgaaaatgtcgcctttatccaaggttgttgcttcatggtgcaagaagcatgcagatggagatgatgatgacaatgattttgactatgctcccgcagcatgcatggaaggcaatggcgacgatgatgatggagactatgacgttgctccagcagcttctctcgagggcgatgatgatgacgatggcagctatgattatgctccagctgcatgattggagtgaggtttatgagtgccccttaccgtggggtttctaacccaaaactttttgcaattctactatggagtgaggtttatgagtgcaccccccccccggtgcggctttaaagcaccttgtgattttgggttt

SEQ ID NO: 198305 - DNA, 581 bp, Gossypium hirsutum
  unsure (1)..(581): unsure at all n locations
aactcatccagtttcctcctctcttcccctcctcgacggattccccaaaaccctttccttttatttcttctctgtaactcttttaaatcctctttctcatttcctttcaagttcttctctcttacaaatccaatctcatttcttattctctctgtcgattgaaaaataaatggcctcttcactctcaacaacaccctccgctgccttcgcttccgttgctaaaacaaccactgccttgcctaattccactaaccttcagctctccaccgtctcctttcgcttttcttcgaggctaaaccttcgattcttctccaagagtttgcaacatggtcagaactctaaagcagtggtgaaagcccaacttaatgaggttgccatagatggatcatcaaatgcttctgctgcacctacaatcaaatcagggggcaccaacagcagaagcaaaggatgctaagacatcaagcgatgtatctcctccagctatggccacagaagagtcaattgcagaattcccttatcaagtttcaagtctagtaaagctagttgaatcacgagatattgtggagttgcagcttanacaa

SEQ ID NO: 198306 - DNA, 777 bp, Gossypium hirsutum
  unsure (1)..(777): unsure at all n locations
gcaaattttgccgtaaaaccaaacaggaaaaagtaagcgaaaattcatcattcaaacgtaccgaacaagctaaaatgcgccccgaattcgcgtcaccgtcttcttcttcatcttcgtcggccgatcgtcggttaaacgctctggtccgacacctcgcaaccccatcaatggtgtctcaaaccgccgtagcattttctcccacctccgggtttcatggagactccgttttctctcacgtcgttcgcgcccctgaagatcccattctcggagtgactgttgcatataacaaagatcccagccccgttaagttgaatttaggagtcggtgcttatcgaactgaggaagggaagcctcttgttcttaatgtggtgagaaaagctgaacaaatgttgttgaacgataaatcacgtgttaaggaatatcttcccattgttggaatagctgagtttaataaattaagtgctaaacttatttttggtgctgacagccctgctattcgagagaatcgggttactacagttcagtgtttatctggaacgggttcattgagagttggagctgaatttttggctaggcattatcatcaaaaaactatatacattccacagccaacatggggaaatcaccccaaggtttttactttggcaggattatcttgtgaaaacttaccgctattttgatccaacaacacgcggatttgaatttccagggttattggatgacctttgctctgccccttttgatcaattgtgcttttatgcagagctcataatcccn

SEQ ID NO: 198307 - DNA, 617 bp, Gossypium hirsutum
ctcgaacccagaattcgcagtttcttcctaacaactccctgttggatgcttggtagaaatcgtataaaactctaataaagggagcaactttatttcatttatgtttgccaccaatggcatctccttcgcagtcaactaacttccccaccatcatcttcatcttgttttcattcgttctcatccgaaccataaatgccgttcctttcatcgtgttgcacggcattagtgataaatgtagtggccatggagttactcgatttactaagcttctaagcagctggtctaattctcaaggatactgcgtggaaattggagatggttcatgggattcatggactatgccccttttggaacagacatcaattgcttgtgaaaaggtgaaaaacatgactgaacttagccaaggttacaacatggttggactctctcaaggtagcctgattggtcgaggcattattgaattttgtgatggaggacctcctgtcaagaatttcatatcgttggcagggccccatgctggtattgcttcaattccattttgtgaatctaccgtgatatgcatatttctcgatagcttaatcaagtccgaagtttatagcaactttgtacaagaacac

SEQ ID NO: 198308 - DNA, 677 bp, Gossypium hirsutum
tcacgcgtccgttctttctttggcaatggggaggatttattacacatcttgtgttgtgcaaaaccctgtcgccatgttcaacaccctttgttatcttcttcttcttcttcttcttctccacttttctctatctcagggcctgactttcccgcaggatatttcagctcttaaagccttcaaggcctctatcaagccaacctcaatcccttcatggtcttgtctcgcttcatgggacttcgccgctgccgacccttgcgctctccctcgccccactcacttcacctgcggcattatttgctccattgactcaactcgtgtcacccaaatcacccttgatcctgctggttactccggccaactcacccctctcctttcccaactcacccaactcactattcttgatctctctgataacggcttcttcgggtctataccttcttccatttcttccctacgtagtctccaaactctgattctcaagtccaactccttctctgggtcaatccctgactctgttaccaccctgaaatcacttgaatccttggacatttctcataattcactttccggacctttgcccaaaaccttcaactcgctttctggtttgaggagactcgatctcagttacaaccaactcaccggttttctacctaaactgccttataacttattggagc

SEQ ID NO: 198309 - DNA, 509 bp, Gossypium hirsutum
  unsure (1)..(509): unsure at all n locations
ggaaatnccggggcggccccaggcgtccgagaagctacagtatgagctgtggagaagtaattgaccccacaatttacggtgaagaagaagagtgtgcgcagttgcattgtggtgttcctccatacgaactggagagaaggttgcatgaattgttggaatcgaggcaggaagagcagataagagaattagaagctgctttggcaagtgcacagcaagaactggtcgacaaggaaagagagatttcatggtggaaagacactgcacggcttatgtcgattcatgtccaacaaccttcaccgtttggttcctagctgaggtgagaaaatttcttaactgcttttttttcatgtgtatcatatcaggtgtagttgtttggtgtttaaagatggattgtttgttattttggctttaaaagcattttggatgggtgattagtttgcaagtgaaacagggaaattatttcacatttttaagggatattagtttatcaatgaatagttatctacatt

SEQ ID NO: 198310 - DNA, 1344 bp, Gossypium hirsutum
cccacgcgtccgtggaataagaaaccaaagggagtggcagtggaagatggccgctagcagcgatcctaacccggagggttccgatgagcagcagaaacgatccgagatatacacttacgaggccccttggcatatctacgccatgaactggagtgtccgccgcgacaagaaataccgtctcgccatcgccagcttgctcgagcattacaacaaccgccttgagattgtccagctcgatgactccaatggcgagatccgatcggacccaaatctctccttcgatcatccttatcccccgaccaagaccatcttcatccccgacaaggagtgccagaaacccgaccttctcgccacctcctccgacttcctccgcatttggcgcatctccgatgaccactcccgcgttgacctcaggtctctccttaatggcaataagaacagtgaattctgcggtcctcttacctccttcgactggaatgaggcggagcccaagcgaatcggcacctcctccattgatacgacttgtactatatgggatatcgacagggagacggtggatacccagcttatcgcccacgataaggaggtttatgatattgcctggggcggcgtcggtgtttttgcttccgtctctgctgatgggtccgttagggttttcgacctgcgcgacaaggagcactccactatcatttatgaaagttcggagcccgatactccgcttgtacggttggggtggaacaagcaggacccgagatatatggctactataattatggacagtgctaaggttgttgttttggatatccccttcccgacactgccggtagttgagctgcggaggcaccaggctagcgtctatgccatcgcatgggcgccccacagctcttgccacatttgcaccgccggggatgattcccacgccttgatttgggacttgtcctccatgagtcagcctgtggagggtgggcttgaccccatccttgcctacaccgctggggctgaaatcgagcagttacagtggtcatcttcccagcctgattgggttgccatcgccttctccaccaagcttcagattctcaggttgtgagagcaaaagagctgcagactcatttttttagaacgcatgggaagcagtgatttatggaccctgaactgaaacacaagatcaagacgaccactctttgctgtttggtttatgcaacataatctttgtcgttctgttggacaagatgagtgtgttttcagctttatttggttgtctgataagtttgattagttactataaatgtgataaatgatgggcaggaagaatatggggggcttaccctgggctgctttcagatg

SEQ ID NO: 198311 - DNA, 631 bp, Gossypium hirsutum
cccacgcgtccgcccacgcgtccgacgtaaacagggaggtctgaatttctgagaatttttagaaccgggtttctctccgtaaatcaatatgttgaagctttgcttaatggtttctcatggctaccctcgtggtctggggcctgttttacaccaagagccaggctttagcaggatggtcaaggagtttggttccgtcttcccaggtcagctagtgaaacaagacatggtacagattggctcctttgagctgaggtgcagccaattccatttccaggagcagccaaagccagttactgcactatgtgagaccaaactgattatcgatgctgatccaacggtacacaaccccgtggttatagataaaccagatgctgatctagacacagcacggttcagctttaggatagctgaaaagtgcactagacatgaaaaaatcttgaagattcttatgtctggatcgaatgaataagagaatggggaacttgagatgtctctgctatatgaatagatgggacttcagccactgatgtgaggcgtgcatcaacagccttatgcgctttctctaatgtatccaagtagcataatcgattaccacgtgcctctcccagattgtttatgagagatgatccac

SEQ ID NO: 198312 - DNA, 485 bp, Gossypium hirsutum
tcaatcgtcttttcttttaatatttgttcaaagctttcgattacaaatccctcgcgaaagatgcagatctttgtgaaaactcttactggtaagaccatcaccctcgaggtggaaagctccgacacaattgataatgtcaaggccaagatccaagacaaggaagggatcccccctgaccaacagaggcttatcttcgccgggaaacagcttgaggatggccgtacccttgctgactacaacatccaaaaggagtccaccctccaccttgtccttcgtctcaggggtggcatgcagatcttcgtaaaaacccttactggcaagacaatcacccttgaggttgaaagctctgacacaattgataatgtcaaggctaagatccaggataaagaagggatccctcctgaccaacagaggcttatctttgccggtaagcaactggaagatggtcgcacccttgctgactacaacattcaaaaagagtctac

SEQ ID NO: 198313 - DNA, 448 bp, Gossypium hirsutum
aaaaaagataaagaaagagagaaagagagagagagagggggggcgacatggaaggaaagtgtgaggagcaaccatggttgaatggagagaaaaaagagccaaaatacagccatgggttttgttcagccgagatacagacgctggccagcgttgccgaagtgtttttcccttctttaccaccggattctggctttcaacgaaaggacacccagccaagcaaggctgttcaatccttcctaaaagcttctgcctctcaaccccctttccccgacgaggtagcagaattgctggggaaaagagcattcaattgaaagtgtgatagtggtgagaattgtattagtggtactggggacgagggtaggaagcttgttgctatgtggaaagcagtgtttggggaaggaatggccgtttataaatgactttggaagcatgggattggagaagagag

SEQ ID NO: 198314 - DNA, 415 bp, Gossypium hirsutum
cggacgcgtgggcggacgcgtgggcggtcgcgtgggaaaaaattgaaattagctgctgcgcgtttaaatgtatagttccttttatgggaaacggtgacttgggagaaagggtggaagcaggttagggtttctgggattgttgagaaggagattagcagcggggtttccaggtgatgggcgatgagaaatcgatgatcgtgatggccagtagggattagagagagtagagatcgggagcttctgatcccggtcgctgacgcccgccacgatgattcctccaaaccttctccttcctctgcttccagtcaacgccggccgcgagaccttttacaaagttttcccgagctgggcttcaaagaagttcatgacgggatggtgtcattttgttttctatagcaatcactttctacataac

SEQ ID NO: 198315 - DNA, 439 bp, Gossypium hirsutum
ggaagcggctttcagactctcttttccctatcccccgtttcgattgccaaaaaattgtaattagcttcttctcttttaaatgtatagcttctttattttgttcttcttgatttgattcataaacggtgacttgggagaaagggtggacgccggttagggtttttgggattgttgagaaggagattagcagcgtggtttccaggcgatgggcgatgtgaaatcgatcatcgtgatggcgagtagggattagtgagagtagacatcgggagcttctgatcccggtcgctgacgccggccacgatgattcctccaaaccttctccttcctcttcttcccatcacgccggccgcgagaccttttacaaagttttccggagctgggcttcaaagaagttcatgacgggatgtgtcattttgtttcctatagcaatcactttcta

SEQ ID NO: 198316 - DNA, 394 bp, Gossypium hirsutum
atgttgataacagacaggggaaatgtgaactatgcggaggaatcggatcaggcaaaccggtgttgggactgcgacgtcaaggttcatgaagctaactttcttgtagctaagcacacccgaaccctcctctgccatgtctgtcagaacccaactccatggctcgcctctggtcaacacctcagccctgctgtctccgtttgcgagtcatgtgtagccaacaaaaatactacttgcgaaatgacgacggagcaggaggagtcatcggagggagagtatgaggatgaagaagaagattatgacggcgatgatgatgaatgagggggggaagaggaagatgatgctgaaaatcaagcggttccatggtcagaggtttcttcttctttctcgatgttaa

SEQ ID NO: 198317 - DNA, 859 bp, Gossypium hirsutum
cttatttccatatccatatatttttagttttggttttattttttcatttttttaatttgattttttgccatctctgtcatgtcaacggctggggagatggagccattgacatcgggagcaagcaatcggataatcccgatcttaaaaaccctaagaactcctctgattttcattcaatcagtaatcttgtacatcctcatcctactcttccctcggcgccggcaatttcggacggatgttgcggcggttgacggtgctacttccgggccgcaatctccggctaaaacggcgaggctgaaatcgttatggaggctagaagaggaggacaccttaagaaggagatcgttggcggagggtttgaacatggggttcgaaaccgaggacggagagattcagtaccgctggaacacatctctgttctttggcgttcgaagaaatgccttgtttagccggtcttggcttccggctaccggtgaactaaagggaattttgatcattatacacgggctgaatgagcacagtggaagatatgctcaatttgcaaagcaactaatctcttgcaactatggtgtatgtgccatggactggataggtcatggtggcagcgatggattgcatggatatgttccttcacttgatcatgttgttgcagacaccgcggctttcttggaaaagatcaaaacagagaacccaggtgtaccttgcttcctttttggacactcaactggtggagctgtggttctaaaagcagcttcatattctcatattgaagaaatggtggagggaattgggctgacattttcaaccctgcgtgttaagccagcacatcccattgttagggctgttgctcccctttttt

SEQ ID NO: 198318 - DNA, 476 bp, Gossypium hirsutum
cccacgcgtccgcccacgcgttcgtccacgcgtccggttttggtattgggcacctgggcaagcccgttcgtgctgagggtgaagattgcacttcacctcaaatctgtcaactacgagaaccatgaggaaaatttgccggaatccaaaagcgaccttcttctcaaatctaaccctgtttataagaaagtcccagtcctcatccatggtcataatcccatctgtgagtctctaatcatcgttgagtacatcgacgaggtttggaccacctctgcttcttccatcctcccttctgatgcctatgaacgcgcccagtcccgattttgggcggcctatgtcgaagataagttttccactgccttaagaagagtgttgtttggtgctacagaggaagataaaagggcagccctggccgaagtctcagaagggatcgtgctgttggaggaagtctttgtgaaattgagcaaagggaaagcttt

SEQ ID NO: 198319 - DNA, 431 bp, Gossypium hirsutum
attcatcacctcatctaaaacatcttataatccctctttttaaatactcggctgtaaaaacaaaaattgtgaaacatgcacaatccactttttcttgtagcttactgtaatattctccagcctggtggttcagccagtcatgggagcaaagggtttcagtgtggagcttattcatcgtgattcgccaatatctcctttctataatgcttctctcacctcatcacagatcccaagaaaaaatgccctccattccctggaccgtctcagacacttccaatccttgattgatcaaagcgccatccaatctgcagtgactccaaatgggggtatctatctgatgaaactctcctttggaaccccgccagttgactacatggccgttgcagacactggaagcgaccttatatggatacaatgtgttccatgtcttc

SEQ ID NO: 198320 - DNA, 485 bp, Gossypium hirsutum
cccacgcgtccggattatcacaagaacctaataatcctctccttcttgctaattatgctcagtttctctaccttgttgttcatgattatgacagagcagaagagttgttcaagaaagcaatacaaatggaaccggtagacgctgaagcacacaataaatatgcgatttttttatggaaagcgaagaaggatatgtgggcagcggaggaaaatttcttggaagccattgaagttgatcctaataactcatattatccggcgagctatgctaattttctatggagtaccggtggggaagatacttgtttccctcttggttcatcggatggtattgcttaagaaacaatggccaacactctgttttttctttctttttctggaattttgctcagataaatgaaaacctttctttcccaatgattttaggtttgtttttattgcaccaatccatgtgagaaaatgtaattagtaataatatatattgtt

SEQ ID NO: 198321 - DNA, 497 bp, Gossypium hirsutum
atacaaaaaaagcagataggtagataggttgaactctcttttctccccttagaaccaaactttcaccgaccttcactttctgcctaccatgacggccaaggattgcggcaaccatggcaaaggccggcggcagctcatccgaaggctcttcggttgccttctagtcttcctccttatcgttctcatcacaatcctcatcatttgggcaatcctccgccccacaaaaccccgcttcatccttcaagacaccaccgtctatgctttcaacgcctccagtcccaatttcctcacttctaatttccaagtcaccgtatccacccgaaaccccaatgacagaatcgggatttactacgacaggctcgtcatctacgccacctaccggaaccaacaaaccacccttaggacagctctccctccaacataccagggtcataatgagatcaatgtttggtcccctttcatctacgggaacatggtccctatagctcccgatttct

SEQ ID NO: 198322 - DNA, 647 bp, Gossypium hirsutum
gtgtttttggggctatgatggggagtaaatggaggaaagcaaagttggctcttggcttgaacatgtgtttgtatgtacctcaccaaaaacttgatgattcatcaccatcatcgtccattatgcatcaccctgttactgctaatgttccttcaaggtgttcttcagatgctgttcctctgtctccttcacccaacgactgtcgccccactactcctaccccttcctcttccggcctccgcctctccaaatccgtccctaaatcttccaagaaaacctgttcgatatgcctgacatcgatggaactagggcaaggccatgccattttcacagcagaatgctcccattctttccactttcactgtatagcttctaatgtaaaacatgggaatcagatttgtccggtttgcagagcaaaatggaaggaaatcccctttcagaggcctgcttctcatcttcccaatggaaggtctagaatcaacccagcagactggccccgggatgacgcctgggcaactgtggtacggcggctaccttcccctcggttggatccaactaggcacgtttcttcactcttccatacctctgagccaggtacttttgatgatgacgaagtactagatctgcagcatgagacaactgaagaaaat

SEQ ID NO: 198323 - DNA, 428 bp, Gossypium hirsutum
ctaggttctcttattattggtctcattaaggctgctcttttgctctcttccttcccaacacaacggtaggttattctggtttttggtggaggcgccggcggcggctgctgctgctgctgctgtggctgaaattcaacaagtctcgtaatccgacatggcgaccaaagggtttcgttttgtatctgctgtccggttttttcgatagcagttctctctgttttggtcatccaaaaaagcaacaacgacgacatgaaccagagctcaaatctcttagagtccccatataatttatccaccactgaaaaaggttggcctgcattggagttgaactggaggcttgtaatggcgaccgtgatagggtttctaggatcagcatgtgggacggtggggcggcgttggcggcggcggcatttttgttccaatgctta

SEQ ID NO: 198324 - DNA, 820 bp, Gossypium hirsutum
gctagaaccaaaatgcaagaaagcagttcacagttgtctgccacttcatatcaaagcgtcccaactttccctcttcattcaaccaatgagaaagctattccccttctaggttcgggcacagccgaataccctttcggtgcttccatcgataccatgaaacaaaccattctcgaagctatcgaagtagggtaccgtcacttcgatacggctgctctttaccaaactgaacagcctttaggtgaagcaatatcagatgctcttcgtctagggttaatcaaatccagagacgaactctttatcacttccaagctctggtgtagcgatgcacaccatgattgtgttctcccagcactcaaaaaaaacactcaaaaatttgaagttggaatatcttgatctgtatctgattcactggccagtgagcgtgaagcctggggaatatgagttgcctgttaagaagaaggaccttgttcctattgatctaaaatctgtgtgggaagcaatggaggagtgtcaagctcttggcctaacaaaatctataggagtaagcaatttctcctgcaagaaactcgaaactatcctttccactgccaaaatcccacctgcagtgaaccaagtggagatgaacccaatgtggcagcaaaagaaactgaggaagttttgcgatgagaagggcatacttatcgagtcttactctcctttgggggccaaaggaacggcgtggggaacaaatcgggtgatggaatgtgaggtactcaaagaaattgcccatgccaagggaaaatcgcttgctcaggtttgtttgagatgggcacatgaacaa

SEQ ID NO: 198325 - DNA, 493 bp, Gossypium hirsutum
tttctcttgctctctcgtaaaaaacattccttataaatcctctagatctctttttacctttgagtaactctaggttattccgctttgccctaaatggagagggagctgctgcatttgttcgacgccgccaaaaaagctgccgatttggccgcctccgacgccgtttcctccaacgcccctgaaagtttccagatgcgttgacgccttgaaccaccttaaggatttccccgtcacttatgacactcttgtttctacacaggttggaaaaaagctgcgacctctcactaagcatcctagagagaaaatcaagactgtggcttctgacttgctttgagttgtggaagaaaattgttattgtggagactaccaagagtaagaaaaatggcaccactagtgctgtcaaggttgagaaacttcctaagccaagtgctgtaaagtctgaaaaactctacaatacagaatctgtgaaggttgagagatctaaaggtgattc

SEQ ID NO: 198326 - DNA, 487 bp, Gossypium hirsutum
caaaaaccacacaagaaaacaaacaaaggaacaataaaaaaaaaaaacattcgcagtttcagcaatggcagagtcgtcaaacaacgttgtcgagacgatcaaccgtgattgtcacgattttaagtctcttgctctcttcttcagacagggatttcctcgttcgcaacaacggtgatcaggttaaaatcgatagcttgaaggggaagaaggttggattgtatttctcagcatcttggtgcggtccatgccgtagattcaccccaaatttaatcgaggtgtacaccgagctctcaacgaaaggcgatttcgaggtcatttttattctcggcagatgaagatgaagagtcattcaatggttacttctccaagatgccatggctggcaatccctttttctgattcagaggcacgcaagcgcttagatgagccgtacagtgtgaagggaatacctcacctcgtgctcttggatgaaaatggtaaagtcttga

SEQ ID NO: 198327 - DNA, 680 bp, Gossypium hirsutum
attcatttctattttctctctctgctaactctgccttgaagaagatttagagcatacagtttgtgggttggtgaaaattggggaatggaagctgcggcagaagggctgtggggactggcggatgagtttgagaagatgggagagatagggaaggcggtgaagtgcttggaggcaatctgccagtctcacgcttccttccttcccatcgttgaggtgaagactcgactccgcatagccactcttctgctgcgccactctcacaacgtgaaccatgctaagtcccacctcgaacgctcacaattgctccttaattccataccttcatgcttcgacttgaagtgccgaacctactcactgctcagtcagtgctaccatctcgttggggctatccctcctcagaagcagatcttgtacaaggctcttcaccttacttctgcggcggctcccgatgttttcggccaattatggtgttgcaacttcaattctcagctggccaacgctctgattattgaaggagactacacaactcaggctccactttaaaatcaagttatgtttccgccactccaatttgctctccggagcctcagatgttccttgttgcttctatcttgcttttcccctccctatgcctttgggataatccaactggccatcaagttgaaccaactcctcccatc

SEQ ID NO: 198328 - DNA, 857 bp, Gossypium hirsutum
cccacgcgttcgaccagacaaatctagcacagacaacaaacaggacagtgagatggcgaaatcagaacggttgttcctcaatgccggattcaatggctttagcgtctccccttatcggtaaccagtcaggattttccttcatcggatcatctgaattggaagggatcacacaaggcagtccaaagaaaccgacaaccactaatgaagttacaatgaaggttgacaaagatgggtacacattcatgggaggcacaactaataatgatttcatgggtcgctttggacaataccccattggcgaaataacaaggtttgatacagaacaggtcactccaaggttttcaggcaatggtgtttcactcactttgggacttccccattgtgaaaacctgtctttatcaggcaccccttatcaaacttttctccctaaccaagccatgcaaatggggagaagggtcgacattggtgaacccaatgagtttgggtctataaacccttccacaccacactcttcagctgcatatgacaacatcaacattcagaacaggaaaaggtttgcagcacaattgttacccgactttgttgcctgactaaacttacaggggcttgcttcacattttccaggaaaatgaatggtagtgtaaagaaaaaagaagaaagcgaatttcagcctagtataggtttttatactttgggccaagtacaatttgagtcctctagacagtttaggattctcagcatatatttgaggattgtatattaattttgaaatgggagattgggatagatggattgatatcataaaattagttacttgaggtatactctggtaaataaagataaataaactaaagcat

SEQ ID NO: 198329 - DNA, 644 bp, Gossypium hirsutum
gccaccaaaaagaaaaacagaaaacaattctttccgaaccgcttaggaaccttcactcttcagagcatccattgttatccccaagtagctttagtactctaccaccgaaatccaacccttaaaacaataccatttgcagagtggaaatgggcatctacgccatggattttgcactcaaattcaaccattctattttctctactccatacccacctaaaccttcacccaaatgtagatttctaaccgcaagatgctccctccctctctcctctgacggtgccgccactgggttggcagagaggccatggaaggtagcggatgctaggctggttcttgaagatggttctatttggagggccaaatcttttggtgcctctggtacccaagttggcgaagtggttttcaacacttctttaacagggtatcaggaaattctaacagatcctagttatgctggtcagtttgtcctgatgaccaatccacatattggcaataccggagtaaattttgatgatgaagaatcgaggcagtgctttcttgccggtctggtgatcagaagtctaagtataactacttcgaattggagatgtgcggaaacccttggtgattatttagcagaaagaaatataatgggaatttacgat

SEQ ID NO: 198330 - DNA, 464 bp, Gossypium hirsutum
cccacgcgtccggatttctcaatctccacgttttaatttcttgaaatctttttggatttgttttcgatggaatcgattagatcgccctattggtgctacagatgtaatcgattcatccggatccgggttcgatctccccatgattcgctcaactgccccgactgtggcggaggattcatcgaagaaattgaaacaccctcgcgatctcccatccaccaccgtttccctgtcgctgccatgtattccgacacgccaagccctgcgctcagcccaagccccaccgccactcctcattttcgccgaactcgtcggaacgctggcgatcgctcccctttcaatcccggtgtggtcctccgtggacccacctccgaatccgacggcatagttaccgaaagagggaacagaaatttcgagctttattacgatgatggctctggctcgggtcttcgtcccttacctgctag

SEQ ID NO: 198331 - DNA, 460 bp, Gossypium hirsutum
acaaacacttgttttgggagagttgtagtttcataaaagggaaagtgaaaggaaaaccagcaggaaatgtgtaagttttctagtgatcatcatcagcttcttcttcttcttcttctttagataagattcataacgccatgaaccgaggtgtgttgcagagctcaccggtgcagcatctgatggccggaaaccctaactggtggaacatcaacaccatgcgcccaccaactcatcatcaccaacaagcggcgtgcggtggcggcagcacctcctcctttcttgcatcctcctcccactactttcttctctcacacacccacttcttcttcttcgtcgtcttcatcttcttcacttcccgttccttcttggcatgataataaccaggagctttctgagtcatggaatcaacttctcttgggtggatcggcacgagaagaaaaaaaggggggtgatatatgac

SEQ ID NO: 198332 - DNA, 432 bp, Gossypium hirsutum
atatatttttactccaacctcacttggtcccttcaaaccggaagagaaaccccaatttcttaacttccgaggggtttccagttagggttttactggatctaccactattggaatatttggtttttggataattcgtgatatttacggctttgggttgcttttgtttttcttggaggggttttatttgttagatttctggagctccggcttagttttaaaagggaagaatttgaatagccaatgccatatttgggtaattggtatttgaaaggtgtatttttagcgtaattttttttggagagaccgaaaaaaaagtgatcaatgtcttgggcaggccctgaagatatctacctttctacttctcttgccagttatcttgacagaaaacttttagttccgctgcgggctcgtcggtcgctcgcgggaacttga

SEQ ID NO: 198333 - DNA, 538 bp, Gossypium hirsutum
  unsure (1)..(538): unsure at all n locations
cccacgcgtncgcccacgcgtccgcccacgcgtccggacggatcttccaaacgacaggctgtcgtgctttttgccttcacgttaaagcatgcagtgaattgaaattctgaaattacccttcaactttgtataactgccgccaactaaccatcatcaactctcgccaaccaagttttatctatcatcttcctaatcctaatctgtacccgtcatacctcttaaacctttcatttcatcaccatctttttgcagtttctctttatgggtgaaagtgaaactcttaaaagctgctaagagggaagtgaattaaaggagagatgataaagaagccacaaaaggtcaacatgtttattaaaaaatggtctgagcttgattggcgtcttctcttcttagtcgtcgttcccctttcgtttctgttttttgtttcttccttaacttctacgcatctcaattctgtcgtctcgctccgctcctttatcttcagcaacttgtcggattttataagtttacatccccactcggccaacgctgttcggtc

SEQ ID NO: 198334 - DNA, 375 bp, Gossypium hirsutum
caagaggtagcaatggcgtcagtcaaggctgctggcactcaactctttgggcaggtcaagaaggaagccactgatgcttcctccaagtccaaacccgctgcttccaagccccgccgccaaaaaggctgctccaaagcctcaggaacctaacaagaagaagggaaaaggtgggaaagcagcgaccaagcagtagttgccagccccaagtcaagcgcagacttttacgacttcagaccctgatgatctaacttaactataatactatacatgcatatgttatgctcacgaaacttaatcaattagggttccctgtaagctatggtgagaaagatattgcgctaattaaatcaagacagcatctatgtaattatcatt

SEQ ID NO: 198335 - DNA, 535 bp, Gossypium hirsutum
cggacgcgtgggctttgcagagaggtgaagtgagccagccagccagccagccaagcaaccaagcagtcgagctcgaaactctgccaccatgggtcgtatgcacagccgaggtaagggtatttccgcatctgctcttccgtacaagagaactccacctagttggctcaagatctcctctcaagatgtggaggagaacatttgcaagtttgcgaagaagggtttgaccccatctcaaattggtgtcattctccgtgattctcatgggattgctcaggtgaagagtgttacgggcagcaagattttgcggatactgaaagcccatggtcttgctcctgaaattcccgaagatttgtaccacctgattaagaaagctgttgccatcagaaagcatcttgagaggaaccgcacagacaaggattccaagttccggttgatcctggttgagagcagaatccatcgccttgcccgctattataagaagacaaagaagcttccacccgtctggaaatacgagtcgactactgccagcacactt

SEQ ID NO: 198336 - DNA, 640 bp, Gossypium hirsutum
cgccctccgggagggggagagaggggcctttcaatcaccggggttggcggcggcggctcatatagatatagagccagcaatacccgaagaagaaacgacgtcgaattcccttatacgaaacactcgttgctgcttctgtttcccttgcttcagctcccgtcgtacgcctgccgttggcgtagccttttggcagcggataggttcgtcccacgtccagtccgatactggcttctggtcctcaagtgttagagccttcaagaaggttcgagagtggtccgagatcgtcgccggcccccgctggaagacttttatcaggagattcaaccgtagcaaaagtgggggcggaatcgtctccggcggtaggcatggacaattccattatgatcctttgagttacgctttgaatttcgacgaaggcccgggacagaatggtaatttggaagacgataatgatttcggtgcctttcgggctttctcaacccgttacgcttctgttccgggttcggagaaaacaacattggcgtagatgacgccgaatggatcatgtacagtgaaccggtgacgtcactacggcgtggcttcttcgtttacttttatatgataagatggcacattgtagggttatttttgcctaatggat

SEQ ID NO: 198337 - DNA, 686 bp, Gossypium hirsutum
  unsure (1)..(686): unsure at all n locations
gtaggtacagctgttgcaaaccttcttcatggacagccacgtgttgagaaactgagcatactgccaagatctggaggagcattgggctttacttatattcctcctaccaatgaggacagatatttactcttcattgatgagttacgtggccgtttggttactcttcttggtggacgtgctgcaaaggaagttatctattcaggtcgtgtttctactggtgcacttgatgatattaggcgggcgacagacatggcattcaaggcagtagctgaatatggtcttaatcagactatagggcctctctctttagctacggtttctggtggaggcatggatgaatccgggggtggagttccttggggacgagatcagggacatctatttgatcttgtccaaggagatgtgaaggcattactgcagtctgcccatgaagtanccctttctgttgtacgtgctaatccaactgttttggaagggcttggtgcctcacctggaaaaaaatgagaaagttagaaggtgaacagctccaaaattggttgaaattgggtgtggcccccaagggacttatcctcctccttgaaggcaagccagattctctcctgccggtccaacccggctctggaataagtgttttgcccattgcttgtccacattgaccttggctttgacccaaccgaattatttct

SEQ ID NO: 198338 - DNA, 872 bp, Gossypium hirsutum
  unsure (1)..(872): unsure at all n locations
gttaaaaaataaaaggccatggttcctttacaattatttacaaaccccattcttaagccatcaatcaaacattccctctctctttgatctttaagaatcaagatcctttctttttctttcactaaatcgacgttaacccaatcttcccaacacaatcaggccatcgaattctctggtgtttgaattgaatatctcatatatggcttacatccctccacacaagcgacattcgaaggatgcggagagtccaacgccaacgccaacaccaactccagagtcctttattcccaaatttaaaagaaatgtacagttaagagcttcaaacaccaaagctgataggagtggaagaatcgtatattcaaactatgccatctctagatggtttgctgttggtttggatgatggaaatggggacacatcttccgttcatcttaagccagtttcagttgaatctattgagaggaaaacaggtgagaaacctgcaatcttggtgaaaagtaatttaaataaagagaataacgaagcaaaagggagcccgtggtcttctattgcagaanatattctgccagacctattatnctnctttgagaaagtgagggctgaaacttgatgcaaagatttgaaagatgtaaagccaggattggtgcnntccgtttggcaaatactttttcaagggagccttncatgaacggggaagtgtagtaatgnttgcgtacagagacattatgagtaaattgaaagaacctttcacgagtcttctgcttatcacgggaacatatgctgagttgtctaaagttgagttgtttccanagtgaagatgtttcagtgaggatattttccataactctcttttgatatgatctcactgtgga

SEQ ID NO: 198339 - DNA, 1054 bp, Gossypium hirsutum
aaagaatggcgtcatcatctagcagcggtctaactttcaagcttcatcctctggtaatcgttgacatatttgatcactacactcgtgtcaagtcccagttgaacccaccttctctcaccttcaccttcgccaccgtcaatggcgtcgaaaaccatcagcaagctcctcgagtctatggatgtgtcatatgctttcagaggggccgcaccgtctagatcttcaacagcttcgagcttctctacgatccctccacccactcccttgaccgccccttccttaagaagaaacacgtgctttatatgaaggttttccccatttttatatacttattatggtactccactgggagcgatgccctagaatcctatatgcacattcatagagcctcgatggatattaatgaaagtcctctctatgtgctgctcaatcctgcaatcaatcccacgcaaaaagatcttccagtcaccatttatgaaagtgagctgcacgttatagatgggattccgcagcttatttttgtccgttcgagctacacaattgagactgttgaagctgagaggatctctgtggatcatgttgcccatctaaagccatctgatggaggttcagcagcaactcaattggctgctcatcttactggtatacatagtgccatcaagatgttgaatagcagaattagggtacttcatcactatcttgttgggatgcaaaaaggtgatattccttgcgaaaattcactattaaggcaagtatcaagtctcctcagaaggttacctgccattgaatcagaaaaatttcaggatgactttctgatggaatacaacgacacattattgattacttatcttgcaatgttcactaactgctcaagcacaatgaatgagctagtcgacaaattcaacactgcttatgataggcatagtcgaaggggtggacggactgctttcatttgaatgtgggtattgtttattagtaagttggatttttgttggggagaatggtgatgctgtttgtgtttgcagtgttttaaaccttcttaaataaggtaatatgc

SEQ ID NO: 198340 - DNA, 708 bp, Gossypium hirsutum
aaaaaaatgagaatcaccttgtggttaccttttttagaaaagcttttttgtgattgattttccttttgtgtttgtgtttgctcttttttattgcctgttgtgtattcgtgaaaaaaaatgctttcctcttcttctcctctcttcctttacaaagattggaagctgggcttttataggcgaaaaaggaaataaatcgaaaaaatacaatatacttgtttccattcgctgctgtttttgtttccttcttgcaggtacagagtctgttggcatgcgtacgggtgcaggcgtggcatacgagggctgtggaggtatgggactgcttcttggttgtggcacaaaacgaaaagagggggggacctaaggtttctggagctgttaagggaatggccctattgggcttgtttcgatttgggctcatgatgggtatcgggctagggttaatgtatttgggctgctttgtaccaaagacctggactgtggtatacatatttttttttgtgattttgttttttgtattttcgttttggttcttgtctttatacgggccgggcaaatttggcccattacatctatcatttctttcattatacattctaactactaaaaatagtaattacattgtattaaatcattaagcatagtttatagaaatacaaactaaatttctcgagtttactcgaaaaaaaaaaaaaaaaaaaaagggcggcc

SEQ ID NO: 198341 - DNA, 449 bp, Gossypium hirsutum
cccacgcgtccggccatacattttttgggttttttggagtagaactgcttgaaagtagaaaagcatggcaacagtgacagcttcacactttgtttcgaggatttcccatggagctgaaactaaggccaatctgagtcagacagggttggggaatcaatccatgactcacaatgggttgaggtttttaaacaaggtagataggttgcagatgaggaccaatgcaaaggctgttgctaggaacgcagtgaaagatgaacacccaactgcaaatgacaagctatctgggaaaattatatgtggaacagggatgaatattatctttgtgggagctgaggttggtccatggagcaaaactggtggacttggtgatgttcttggcggacttcctcctgcaatggcggccaaaggacatcgtgttatgacagtgtctcctcggtacgaccagtaca

SEQ ID NO: 198342 - DNA, 653 bp, Gossypium hirsutum
tttaaaagcatagaatttcacatccaacagcaaataagcttttgttactttgtgacgaatggagggtccttagctttctcttttaaatggaaaaaaaaaatcacacataaaaatatttaaaaaaaattaaactttgaacaaatttcaaagattttggttttcttctgcaatttctcatccaccaattgaatcaggttgtgaagtattgagggtgtttattatttgttgtttttttataattactgatgtctccgccgctgcttggcgtggaggaggaaggggattcagagcaatgttactttactcggttcttcaggctcaatggaaagtgtgtgccagaatagtgctgacttgaaggaacggaactacatgggcttgtctgattgttcttcagtggatagctctgttttttcccctccctccgaggaaagaaaggctagtttgaatctaaaggcgactgagcttaggctcggacttcctggattgcagtcgcctgaaagaaatccagagctttgcttgttaagttcttctcagcttgatgagaagccgcttttccctttgcatccttcaagtgatggtcactgctttgcatcacagaagagtgttgtttcacggaaataaaaaaggtgctctgatgcaatggatgggttctc

SEQ ID NO: 198343 - DNA, 471 bp, Gossypium hirsutum
ctaaatacacggtgtttcaaatattcgatgccttgaggaagttcgggtggatcgtccctgcatacacgatgcctgcagatgccgaacacatcgcagtcctgcgcgtgggtgttagggaagacttcagttgtagcttggccgagaggcttatctcgcacattcaagaggtgttgaaggaactcgactcgcttccgagtcaaatcgtgaaagattctcacgttgtcgccgttgcgaaagaagtggtaggggagaacaaagatgcggaggcagctaaaatgggtgacagaaagattcaagaaaaggttactaagcaatggaggcattttgtgaaaactaagaagacgggtgtgtgttaaaaggctcctacaaaatctatgttctatcatatactgtttgtagctatatttccaaactgcagcataattgacctattacttggtcataatctcgttgtgtcatgcatttgtagca

SEQ ID NO: 198344 - DNA, 475 bp, Gossypium hirsutum
acgcgtccgaaaaaaaatcgaaccccccttctctctattgctttccatggcgaactcggtggctgattcacgtagcaacagggcagcggttcaagccaccaacgacgatgcttcagccagtaaactgtcatgcgttaaaaagggatacatgaaagatgactacatccatttgtttgtcagaagacctgtgaggagatctcctattattaaccgtggttattttgcacgttgggctgctttcaggaagcttctatatcagtttcttgattgtgagggatctaatagtgaaaagggtaaaacaaggaggcagatactatcacttggtgctggatttgataccacctattttcagttgcaggatgagggaaaagcaccgtatctatacgtggaactggattttaaagaggtaaccagcaaaaaggcttcccttattgaatcctacagtcagttgagggacaaaattggtgcaacagca

SEQ ID NO: 198345 - DNA, 422 bp, Gossypium hirsutum
cttgattgcaaaattcagaaaaaagaagaggaaggaagccctttcttcctctcttttagtcactcaattttccgtagtattcttttgcatggcagtgaggttattgtcacatgagttgtctgacttgtgtcttggcaagccagcgctgaggtcactttctgtaacatctaccattgctgaggctcttgaggtcttgaaaacctcggatgataacttcgttagtgtgtggagttgcgatcataaggctaaaaccagttcagggtttgagtcggctgctggtttttgcgacaattatgatgatgatgattgtagatgtgtaggcaaagtttgtatggtggatgtgatttgttatctttgcaaagatgaaaacttggtgtcaccttctgttgctttgaaggaaccttgttcagtgcttttgccta

SEQ ID NO: 198346 - DNA, 547 bp, Gossypium hirsutum
cattaattgccatgattcagtcatttacattttagcacctttgagatatgctaccatttatggatgctctgatgctactatagtccttggagctgttgggaaggcagtaagagttgaacactgtgagcgagttcatgtgataatagctgcaaagcgagtctgcagggcaaattgtcgcgagtgtctattctttttgggagtgaatcagcgcccccttgttgtgggtgataaccacaagctacaggtggcaccgtataatacattctactctcagttggaggagcacatgactgaagttggcattcaggccactatgaatagatgggatgaacctttggcacttggagcggttgatccacacgattcattatctcatcctgcaggtgtttctgatgcgcaagcagagtcagctgcacagttagatcccgatcagttcacaaatttcctgattccaaactggtttgaaggtgaatcagctgggtcgacaaaggataacccattccccttacctgatgcatacttgaaatctcaactgagaaatcaaaac

SEQ ID NO: 198347 - DNA, 675 bp, Gossypium hirsutum
cccacgcgtccggttttatcctgatgtgttaaaccctgattctccccatccccacgaatatctccttgatggctttgagggcggcggcgacgagagcgatgttcgctggggcggctccccagggattcaggcgcatgtgttcaacagctacggctaattcctttatgccgcctccaattacggcgatgggcaacggcgagggaacccctggtcgagagcaagcgcctccaagtaccaacctctttgtctctgggcttaacaagcgcactaattcggagaaacttcgagaagccttttctcagttcggacgtgtaattgatgccagagtagtgactgatcgtgtatcaggatattctaaagggtttggtttcgtaagatatgccactatagaggaagctgagaaaggaagagtgggaatggatggcaagttcctcgaaggttgggttatatttgcagagtatgcaagacctcggccagaacgaactccgcctccgagcaacatggctaattcaaatggctataattcctatggccgtgaataacttagatctgaaacatgatttgtcattttttattttaatcagaggcgggtttccaacaggtcgacctatcatttccttagcagaagaaagaaattaattatgaattttgtaatgtgagacttgaatgcaatac

SEQ ID NO: 198348 - DNA, 615 bp, Gossypium hirsutum
ggccaatcaccacagctactcgtcataaagtaaagagaaaaatggtctccgaaagcaggggctgtacgagccttatattcacgtacggaaccttgaaacgagggttctccaatcacgtgcttcttcaagatctgacgcgaaccggagatgccgtgttcaaaggcagttaccaaacgggggagaaataccctctcgtttgcgggccttaccgcgtccctttcctcctcaacatgcctggttcaggacaccgagtcacgggcgagttgtacgccgtgtcgtcacgtggactcgcccgcgtcgatgagttggaaggcacgagtcgcggtcattacgagcggctgccgatcctgctgattcccgccggctacgggtacgaaagcgggaataacaaagaaaacgaggaagatcaggcggtgttaacccgagccgctgcggtgggaataacgtgcgcggcggaggcgtattacgcgcacaagagtttcgagaaggagatgtggatgaagaacgggggggaaaggtttgggatatattcagacaaagaagccaaagggtatgtgaaaaggaaagataggcctcaagatctcaagtttcttgatcatgttaggatttttattt

SEQ ID NO: 198349 - DNA, 500 bp, Gossypium hirsutum
cccacgcgtccgttcactcttcggcttattatccatgttttatctctaatttcaaaagtaataaagatgcccagatcctccattgatgctctgcaaatttccctacttcaagctaaggtattctagtatttggcctgtagttgattttaattgatttttcggaggaaggaagcagcattctgtttggttaatggggggtagtagttccaaggagggaagttggaggcagggttcttcctatcattcaaatccaccttcatgggattctcatcaggggtatcctcagacatcatatggtcaagaaaaccatagttttccgcctcaatatagctatgcagagccgcagtattatccgtattcacaaccagagccacagcagcattatccacccccgcaaccagagccacagtatcatccatctccacaagaccgtgtcggcgacaaaaagaagctacaaaggaagtattcgaaaattgcagacaattacaactgcttagatc

SEQ ID NO: 198350 - DNA, 544 bp, Gossypium hirsutum
ttttatccgattctaattcggtaagacattttcaggaaaattagaagccaacaccgattttttgcttccccttccccttcccccatctttgacacctgatcttctgcttgccgtcagccaacactgattctcaacaccagacaccggcgttcatcaaagcttttacccattttcgcctttcgttgtcaaaatctgcactggcattcatcttcttctctcgaagattcgatcatagtgcttattgttactttaaaatttatttactgaaagcatttgtggattgcaacggatgggtgcactttgtgaatataagatattgtgtctagttaaaagctgatctttgtgcatttgaatcaagtgcttaccatactcttcattccatgaagcttatggtaatgattgagctaaaagtcgctcgagccactttaaatccccaggctgtttaccttatggtggcaactcatttaattcctatgatggtcataatcgaaacatggaagcttatagaactgagggatgggatactgagaagacgggatctgat

SEQ ID NO: 198351 - DNA, 440 bp, Gossypium hirsutum
gaaaatgctatcatttttctcttccccttcaccgaaatatgcagcaattaaagggttttgatgctggaaaatttcagcaacatatggcgccgtgcttagtttccaggttcgctcgggttggacgccgtcagagatattatccccctatcgagttaacgtcatcggaataggtaaactcaagtgattcgagtctatggcatgtatagggttttaatgtgagtatgtaatattatgatttagccaaaggcattggcttgttattaaggtagtattagtcatgtaaattggcctatgtccgctaatgacgctatgggcccatatgattattcttatgcatgtatgttattatctcttgtgatgtggcttacaacatgtatgcctagagattgaattgggattcattgatgagctagtaactaatgcaggattaagtgattggt

SEQ ID NO: 198352 - DNA, 472 bp, Gossypium hirsutum
caaaatcccacacctcctaaacagccatcatttcaacaacactgccctcctgattttccaagaaaggtataagcaacaaaacaggctgtacgcaacatgttttaaataaaacattgttttgtgatgaacaaaaacattatctgcaacatgtaggtgtttgcagagacgatagcaacctacttgctggtttttgtgacatgtggatcagctgccattagttcggttgatgaacataaaatctcaaggttaggagcttcagttgcaggtccgcttattgtgactgtaatgatctatgcaggtggtcatgtttctggggcacatatgaaccctgctgttaccctcgctttcgcagctgtcagacattttctatggaaacaggtctcattttatggtgcagttcaactaacaggggcaatctatgtatcattcacactccgtgtatcattcgattcaatataacatgctggtttca

SEQ ID NO: 198353 - DNA, 383 bp, Gossypium hirsutum
gacaaaatggagagccaaatggcgctgccattatcacagctcagctgagggggagaactattactgaaaagctcctaactgtcgttcgccgtcgcgcacaacctcctcaaccgccgcagcttccgtcggccaatgacttcgtctctaggcaccaccgcctcttctcgaatctcagcatcttcctcccccggagttcgactttctctccatcccccctcctctttttctctcctttctttctcttcctcttttaagcccttcgctttctctcctctatcttctcatttctctccccaccagaggagatcggcagttaatgtgtcgagtagcagaggattcggcacagttgcaagtccgaaatgtgcagcttcgaattctgatca

SEQ ID NO: 198354 - DNA, 400 bp, Gossypium hirsutum
gtttttcacaccataaatttgtgtgtaagattatgaagagagccttttttttgttctttggtgagatctagacaatttgagtggttctggtttttgttgtttgaaaatctttcccccttttctctattactccccgcttctctgaatccctttctgttaatcatctgtcttttgaatcaaaatctgatttttgggtttgtttttcatcagtacttagcaaatgggtcaaaagcaaacttagacaaggatttcttgaaaagtcaggtgttttcagaaaccagatccaggtttttttttttttcttttccttcagctttggtgatattaagtttcaatttttgtctctatttccagggaaatcttataaaatttctcattttttttcgtctgtagataaatt

SEQ ID NO: 198355 - DNA, 246 bp, Gossypium hirsutum
ttacaatgtgtttgatctgaagtgttttgagtgaaattgatgagatatgagagtgggagaaggatgaactctgtattttgttgtgtggtgaagtagctaacttctgcaattagtttgtttattcatatgcttagcatatggtaatgtaatctgcagttgcttcttattcataaggttgaagcaaggtatcgttttctatttatcttgatttaaaattagagttatatcaataaatatagttttttt

SEQ ID NO: 198356 - DNA, 491 bp, Gossypium hirsutum
cccacgcgtccgctcaaacccacctttttttctctttgtaattccgtagaacggatacttcaaccgaaaaaacaaaaaaaaaaaaacaaaccagatgtcttcggtttattcagatccgatccatggaacccacccggaaccaatcgatcacttcgaccgtcttcccgattctcttctccttttagtcttcaacatgatcggcgacgtgaaagcgcttggccgatgctgcgttgtttcgcgtcgtttccactccctcgtccctcaagttgaaaacgtcgtcgttcgtgtcgattgcgtcatctccgacgacgattattccccttcttcctctgtcaaatcacgtgccgacggtccattttccaccctcttccgtctcgttttcggtggcattgtcaagcccctccaagctttgggccaattccttggccccgaacgcccctctctcaacaaaacgctcaatacctcttcatcttcctctttatctgtcggtc

SEQ ID NO: 198357 - DNA, 375 bp, Gossypium hirsutum
agaagagctctctctactccgaggacatctcagagatgccagcctatttaactccattgcttcaaaccggtagctgtgacgaccgaaactgagcctggtagcttcaatctacgtcaagccccgccaatgggtccgaacaataaccaccacccgtcctccacctccacctccaccttcactccgcctaactcggcgcatgactgcccttttctcaccctccacccattttagcaattcccttcttcccaaaaaaaacctacttcctcttgtgagatttgcctttcccaactgcttctcttcctcagcaaacaataaaggagctatcaacgggtcgggtcccggatcggaccgcattcttgcagatatggatcccga

SEQ ID NO: 198358 - DNA, 414 bp, Gossypium hirsutum
attataactcactcttctgctcacctacttccaactaatacccttttctcttcttcttcttcaactgagactgcttatagcctgaccgtgttctgggatgtgcagtggttcaaagagtgaacataagccctcaagtttcatcatggaaggtgaattacaggagccgaaagccggttctcaatcaattttgctcgaattggctgcatctgatgatctagtagccttcacaagcgaagtagaagagacaggtgtggatttcggggaggcgagcttctggtatggccggagaatagggttgagaaagatgggatttgaagagcggacgcctctgatgatccccgccatgtttggtagcatcgaaattttgaaatacatcattggcagtggcaagattgatgcgaatagagcttgtgg

SEQ ID NO: 198359 - DNA, 411 bp, Gossypium hirsutum
cttcaaaagtcaagtgaagcaaatggccatgtcatccacccccaacatcttattatggctcttttccattcattctttgctttcgttagcacagatcaatgaggccaaagttcctgccatcatagtgttcggggactcatcggttgatgctggcaacaacaactatatccccaccattgccaggagcaattttgagccatatggtcgtgatttcaatggtggccatccaacaggtcggttctccaatggcaaaatcgctaccgacttcatctcccacgcgtttggtctcaaaggggccatccctgcttacctcgacccttcatatagtatatcggatttcgccactggagttaccttcgcttctgctggaaccggctacgacaatgccacttccaatgttctctcagtgat

SEQ ID NO: 198360 - DNA, 409 bp, Gossypium hirsutum
ccggaaacaagtggaacgacacagatccgacccgaatatgttcataggtacgggcacagccgagcacaaccaccctgcgccaacgcatcggaattcactcgctggcagcactcgccagaagcctttcactccacaaacggtcaccgccggtgactcagtcaaaccttcctcatctaaacccgccgacagcttgtctccgacggcctccgtggatgaaggggttgcggttcaaagtccataggtggacagccgagaggatttggttgaagatgaaggggaagatgaatctgggatgtcggacacggcggcgagtgatgatttcttcgagggcttaaaagggctcgctgaaattgtcaccagaaattgctttcccgataactttccggcaaagtttgactttccttggact

SEQ ID NO: 198361 - DNA, 411 bp, Gossypium hirsutum
cccacgcgtccgcaattccgctgtgattgttcttggagctacaaaccgttctgatgtcttggatcctgcccttcgtcgaccagggagatttgatcgtattgttatggtagagactcctgacaggattggaagagaagctattataaaagtgcatgcctccaagaaggaacttccccttggagatgatgttgatcttggtgacattgcctctatgactactggttttactggggctgatcttgcaaatctggtaaatgaagcagccttactcgctggaagaaataataaagttgctgtagagaggattgatttcattcacgcagtagaacgatcaatagctggcatagagaagaaaactgccaaattgaagggatgtgagaaggctgtggttgcaaggcatgaagctggcca

SEQ ID NO: 198362 - DNA, 473 bp, Gossypium hirsutum
cccccacgcgtccgcccacgcgtccgattttctgttattattatttttttgttcatcaatgggattccctgtggtttacacagacgttttcgtacccaaattcttcgttcacacgctatcgtttttgggtttcatcagaaacctaatcctctcactttttaattacctcggactctccgatttcctcgaaaccgacaccgtttggccggaaaacccgacccgaaccacaccttttaaaccgccggtatccgctctcttgatccgtgaaatcctacccgtcgtaaagttcgaggaactcgcgttggtcggtggtggtgatccgccggagagttgcgccgtttgcttgtgcgagttcgaaggaaaggaagagatcaggtggttgaagaatcgtaagcatgtttttcatagaacgtgtttagaccgctggatggatcacgatcaggtgacgtgtccgctttgtaggacatctgttg

SEQ ID NO: 198363 - DNA, 588 bp, Gossypium hirsutum
agagaaactctcaccttcaatctcctttctctctctagaaacccccctaaaagattccatttttgtacatttaaaaaacttaaattttctccctctttttttttttaatctttcatatattcagattcagcgtttttacgtatcgctgagttatttgttcttttttgaatcggtcggcagagattgaatctcacgtgataagatctaggtatgcagcaaggtgatcaaacggtgttgagtttaagacctggggggggtcgagggaacagactttttggtgggccttcgtcatcttcgtcggcatcatcatcctcggcttcttcattagcatttggttccttttcttctgatcttcctctatttcgttcccatggcggtggcggtgcttcttctcttaaggctgcagactcacgttttgagggtcgtgaatgtgtgcggtacactagggaccaacttctacagcttagagaggctgtaaaagttgctgatgagattcttaaaatcaaacaagattttgaagtggagctcttcggtgaagataaaagctggagtcgtggagaaagcaatccttcaaattatagtcagaac

SEQ ID NO: 198364 - DNA, 418 bp, Gossypium hirsutum
gcagattattattagttttatattcctccctattgtctttctgttttctttcttccggttaaccatcttgggaaataagtcgggaaatcgccagatacattctcatacattaaggtcacttcaaactttactcagaatctcttttagatacttctgatgttttatattcagcacttagtatttataccagacattcatttatggtattatattaagaatttaggtctttatgatcaacacaatgacaattttcgacaagagagaagctatttctgagcagaactttttggtaatacaagaacaacttaaaactatgttacttaggctatggtgtgactgtcagatggtagtaagtgctagaggggtacctaaagaaaaactagcctttgaagaactggtttggagctgcatttgatcg

SEQ ID NO: 198365 - DNA, 654 bp, Gossypium hirsutum
ccataatcccttaacgaatggttctttgggtgttcaattgggatatttcaaagatgttttgccttcattttgttcatcttcttcagattgtaaagatttcctcaagaagtcgttaatagtgatgggagagataggaggaaatgattacaattatgcattccttcaaggcaaaaacactgtggagattctacactttgttcctcttgttgttgataccattgcttcagcaatcgcggagttgatagggctaggggcggtcactattttggtccctggaaaccttccaattggatgctccccagcatatctcacatactttcaaggttccgatatggcggattatgatcctttaactggttgcataacatggctgaaccaattctccgagttccacaacgaacagcttcagaaaaagctcgatcagattcgcaagcttcatcgaaatgtcaacatcatttacgcagattattacaacattgcaatgcgtttctaccattcccggaatcagtttggatttactgaaacacttagagcatgttgtggagggggaggtcgatacaattacagttcatcaatggcatgcggggatccgccattaacgacaagctgcaaggacccttcttcacatgtgagttgggatggtttacattatac

SEQ ID NO: 198366 - DNA, 327 bp, Gossypium hirsutum
cccacgcgtccgctgaggcctgggcacgggggtcccaatcaccgaacccgtccgctgacggcacactgttcgagctactcccacggcgagagccgctcatcgtgtgccgacccgcggacggactgggaacggatcactaaccggcctctctcagtcgacgaacacccgactcacaactggttccgacaaagcgaatccgactggccaattaaaacaaaccattgcgacacgtcctggacatgctcactcaatgcgattgatgcccaatactctaaacgtcaaagagaacaaagtactccaagcgcgcgttaacggcgatagtaacta

SEQ ID NO: 198367 - DNA, 423 bp, Gossypium hirsutum
atcaatacagaaccagtctccaacaatggaagtgattggttcagaggcaatgaggcaagaaatgccttgtgagcttcttcgttctagtcttcctcacacaaatgaagctcagaggaagcttttaatggacttttcccagcgttctgtacccatgaacggagccaattcccatgctgggagtaccagccaaataaactctgaatcagtgaggggttaagaaagggagcaggtcagtgtgaaaaatgtgcactcgatggagtgtggaatgggagagcagaaactagggctgtgtgttttacttgaggagtctggtttaaaggggccaccattatcttatctgcagttcatcgcgagatgagttccctttcgattcagccttccatccattcaagaaggctgagtatggtaaagaagaaaagatga

SEQ ID NO: 198368 - DNA, 407 bp, Gossypium hirsutum
gcgggtttgaatcctcgtaccgtacgggaatacgatgaagcaataacacgagtgtcattaggttacaagtcagtggatgaatattactcaaattcatgtagttgtcatgtcgtacaacatgtccggatccctttgctttgcgtccaggctgcaaatgatccaattgcgcccattgaggcaactccttactcagatatcaaggacaactcgaactgcatgctgatagtaacaccccagggtggtcatttaggctgggttgccggtgatgacgcaccctttggagctccctggactgataatgtggtgatcgaattccttgaacatctgcaaaagaatgcatctaaacccgaatcatcttgagctatggagatagaaaactctgcggcaggattcagagggcttgcatc

SEQ ID NO: 198369 - DNA, 417 bp, Gossypium hirsutum
cccacgcgtccggttgaccaggaggaggaggattactacattttcccctaaatagtaataccaagagagtgcagcgcctgcaaatgcaactgcaaaatcaagaattaatgaaggaagacgaccgccatgcaacttcaacaagaagaagacaatttatacttcacgcgcctcttattgctttttcttttccccaattaattatgtctactgctattgcaatcgcagagattgatgtgccacaagatttccgagtttatactgatgaagtgaataagttcaagatttttattccgcaaggtcagtgactctttcctatatccatttcaatgtttgtaaaatgaaatgattacttgttgctgttgtagattggcaagtgggagctggtgagcccaataatttcaagtccattactgcttt

SEQ ID NO: 198370 - DNA, 656 bp, Gossypium hirsutum
  unsure (1)..(656): unsure at all n locations
atcatctcgacgagaactggcgcacacgcgtccgaaacgcaataattcaatccgacgatggtccacacattttagctggaggcctcaattccttggaggaaacagattactccacagagagatggactgatattgttaagtactatgaagaaattggtaaaccaacaccaaaggttgaagtaatgaaatacctgaagaataaacagtacactgatgccaaggatttctcaggggaatgtgagcccgtcgtcgtgattgccaaaggacaaagtgtgcaagggacatgcaagtacggtactcgggttgattacatactagcatctccgaattcgtcgtacaaattcgttccgggttcgtattcggtattgtcttcaaaagggacttcagatcatcacatagtgaaagtcgacgtagtaaaaacagatgataatttcatagaaatggcagccggaagcgacggcaacaccgaaacagatagtcctgaagataccggagacagttctcctcaaaaacatatggtaaacacttcatgacgggagaattataccttgctttaataattttgaatagaactatagggtatatcggtaaactatatgaaggttcttactagaatcatatggatttggccatcattaaaaataggcactaatccn

SEQ ID NO: 198371 - DNA, 600 bp, Gossypium hirsutum
agattttcatgtttatgacttgatacaccaatctttttcacccgtattcatataatgtctttctgatcctgaaatccccaagatgaacaatctgttctcaggctccttctctcgcttccggagcgaagaggcgtcccctgatcaccatgtaatcgagatgactcagtcttcctccacctctggcggtgttaacctcgacaagttcttcgaagacgtcgagtccatcaaagacgagctcaaagaactcgagaggctaaaccacgacctttcagcgtctcacgagcgaagcaagacgttgcacaatgcgaaagccgtgaaagaattgagagcaaagatggatgctgatgtagccatggccttgaaaaaggccaagctcattaaggttaggttggaagcgcttgaccgctccaacgcctctaaccggagtttacctggctggggaccgggttcttcttcggacaggacgaggacgtccgttgtgaacgggctgagaaaagaagttgaaggattctatggagagttttaatgggttgagggaaaagatctcgtcagagtatagagaaactgttcaaagaagatatttcacgggtacagagaaaa

SEQ ID NO: 198372 - DNA, 419 bp, Gossypium hirsutum
cccacgcgtccgaaaagatttaaaaactaaagtccaagtcttagtgaaagaataagaaatttatttatttattcattcatttggagctttgggttttgattatttattcctcagaaacaagaatttcaaggtcaattttgtttttgaaggcataacttctattatggtgttgaagtttcttatagttgttgtgaaaaagtggttgacaatcctgtcctaagctgcctataaattttctgagatctcttcatcgagttggaaagctgatgtcaaactcatagcatggactcacaccagctttttggatatggtgtgactggtgcaggcctatcctactcaacttttccttcaatacctaataggctgtttagttctttgaaatctgatataggaaactcacccaactcaccattttttac

SEQ ID NO: 198373 - DNA, 536 bp, Gossypium hirsutum
ctctttatccgattactccctcccacctctgttctgtgtttcttcccatatttctcctctccaaatttctcgtctctttttttttctcaaagacaaacccacattcccctcgaaatgtcgttcgatgaagaagactctattgaacacaccctcctcgtagttcgcgaagtctccgtcttcaaaatcccgccccgctccacctccggcggttacaaatgcggggagtggctccaatccgacaagatctggtctggtcgattccgggttgtctcctgcaaggaccgttgtgagatccggttagaggatcccaactcgggtgagctttttgccgcttgtttcatccacccgggacagcgcgagagttccgtcgagccggctctcgattcatctcgatacttcgtgctcaagatcgaggatggcaatggaaaacacgcgtttattgggctcggttttaatgaacggaacgaggcgtttgatttcaacgtggcgttgtcagatcacgagaagcatgttagatgagagaacgagaaagagac

SEQ ID NO: 198374 - DNA, 400 bp, Gossypium hirsutum
gcaaccagttcaacggatggaactgcttgcatttgggatttaaggagtatgagcggccataaactgaaaaccttaaagactgtgagccatagtagggctgttcattccgcttacttctctccctctggaagctctcttgcgaccacaagtttggacaacaaggtgggtataataagtggagttaattttgaggacgcttgtatgatataccatgataattggactgggaggtggctttccagtttcagaggtatatgggggtgggatgattcatacatcttcattggcaacatgaaaagaggtgttgatgtaatctctccatcacaaaagagaagtgttatgactttgcagagtccagaaatgtctgcaattccatgcagatttgatgcgcacccatatg

SEQ ID NO: 198375 - DNA, 409 bp, Gossypium hirsutum
gtcagtgctattatcaatcacttgaggacatagctgagggtgtttctggttcaagagaaaagctcactactatctaccttgaaaataatccatgtgtacggtttgtaacttgcagtatttagagactatagtttttgttggtttttgcgattgcagcatccttacgatcccaaatgttttgttatggctaattggttgattatcttgatatttttggttctctgtctggttcaaattcgtagttggaacatgattaattcttactttatatgatacgaagctccgttttcttgttgtgttttcttgatttcatatatgtaatctattctcaattatgtttccaatttaatatttgaatgaagactctaattattgataaaatatgtctttggtgcatgctgttttctgg

SEQ ID NO: 198376 - DNA, 417 bp, Gossypium hirsutum
cccacgcgtccgacaaaacccaaattcgaacgttgtaaaagaaacaaaggagaagccaaaaaaaaggagaaaaaaaatgtcgtgttccgttgccgtatctaactctccggcgttttctccgtcatcgtcccttttccttaacaaaacgccgatcatctctccttcgacggaagctctgaatttaacgttaacccacctcaagacttcttcttctccagcttctccgtctccttctccttcttcgcctttcaggctccggcttccaaagccgccgcctgtgtctttgctctcgtcttcttctgtttctaattcatcgccttcctccggttcgggttcggctccaggacttggatcgggaccggtatcaacagttttaaagaggaagagaccggcgaggctggaaataccggttgtgac

SEQ ID NO: 198377 - DNA, 668 bp, Gossypium hirsutum
ctttctctaactttcctggataaaccaaatccttttgaaacatcatctgaatttagcctctatatatttccagattcctcgctctgggtattattactctcttattcccttctcaaaaacctttcactctctcttcctcatcgtttcttcacagcttcagctccatcgcctgcctctttgcttcttcttttcttgttctatagtgtaatttcggtgatggaatcggcttgggtggatacgactctcgacctcaacatcaattcttcccataataccatccaagttctgaagagagaatccagtggaaaactggctgattctgatgtgaaagtaccagttaaacaagagaccggagctttggtggaggaattgaaccggattatcgctgagaacaagaagctaactgagatgctaacagttttatgcgagcgctacagctctttgcagaaccaatacatggaattggtgagcaggaactcgggaagtgatgcaacagctgcaacatcaaaaaagagaaaagccgagtgtgaggattatgtccctatgattggattcagtggaaaagctgagagcagctttagtgatgaagactcgtgcaaaaagcctaaggactgcatcaaagcaaaaatttcaagggcttacgtccgcacaaatccttctgataacag

SEQ ID NO: 198378 - DNA, 911 bp, Gossypium hirsutum
gtcaagtccagtccactctcaaaattctttcaaaaaatattccagctatcctacgcaccgaagttatccggtgcacgttagcatcaccaccaaccaaaagcaacgaccagcgccaccaccactgccgtcgcagctaccatcatggctactcactctcgacctccgccaccaagaccacttgacctcgacttgacgatcgtgtcagccaagcatctaaagaacgtcaactggcaaaacggcgatctaaaaccctacgcagtcttctgggttgatccagaccgacgtttatcaacccggtcggacgattctggctcaactcgacccgtctggaatgagcgtttcacccttccccttgttgttcctccacacgaaaccgttttgaccctcgagatctttcattccaaaccctctgaaactccgaagcctttggtggctactctccgggttgagctcaaggaattacccgacctggatgatggttccaagatccgaaccttttctttgctccgaccctcgggtcgtccccaaggtaagatccggttgaaacttgggatccgggaacgtcctcttcctccacctcatgattaccattttgcccctccttctagctattattacacaaatgcccctcctccaccaagatactctgctccgccttacgtttctcttcccccgccgcctcctccaccgtcatcctctcctcctccgccaaatccgccttactcctccatccccgagggttaccctccctactactccagccattactattcctctccgccaccgcccatgcctccacgtcctttcttcgaacgagcttccagctatggaaccccatcggcgccagtagattactcgccgtacgatcagaagcctcggggaggttctaaaattggggtaggaactggatc

SEQ ID NO: 198379 - DNA, 491 bp, Gossypium hirsutum
cccacgcgtccgcggacgcgtggggacgatcacaaataaaggaaaacagaagcaaatcttttccgtgaaaagattcacagggccggggacggggaagagagccagcagttcttgggatgaaccctaaacaccttccaccgtagtactattactgtttgcctgatcagacacaagccatggctacaaagagattgtaatctgttagtgaaagatataggtagcttagaatttagatagtttaggcagagccctcccttcggccttgtctctactctccggcacttgaaatctagacaaaaacaaagtccaagttaaaaaaaaaaaatcccacagagataaccaaaacaccaacccttgttttcatttttgttttgttaatggattctgcttctgtagggggtgctgcaaccgatccgaatagcgtcaacgagggtccatcatctgctgtagttacagctatagcaactccgcccacggtttcacaacaaggt

SEQ ID NO: 198380 - DNA, 737 bp, Gossypium hirsutum
ggattattgaagttttcttttctttctctttgtttgggaaaaaaatggctggaattgttgtggttttcgatttcgataaaaccattatcgaccgtgacagcgataactgggttgtcgatgaattgggctttaccgatttgttcaaccagcttcttcccaccatgccctggaatactctcatggacacgatgatgaaggagatgcatgcacaaggaacaaccattgatgacattgttgaggttctgaaacgatctccaatccaccctaggatcgtcccagctattaaatcagctcatgctttagggtgtgaactgaggattgtaagtgatgcaaacatgttcttcattgagaccattctggaacatcttggagtgaaggaatgtttctcagagctcaactcaaatcccagctttgttgatgaagaagggaggctgaggatcttcccttatcacgatttcaccaagacttcccatggctgcaatctttgccccccaaatatgtgcaagggggtgatcattgaaaggattcaagcatgtttagaggggaagaagaaaatcatttacctcggagatggcagtggggattattgcccaagcctaaggcttggagagagtgactatgtgatgccaaggaagaattttccagtatgggaattaatatgcaggaaccctatgctcatcaaggctgacattcatgaatggagtgatggcgaagacctggagcgggttcttctggat

SEQ ID NO: 198381 - DNA, 612 bp, Gossypium hirsutum
gtcgccatcatggtcacgggattcaggcagtgagcagtctaagagtgttggtggtggaatggatgagactagaggtagtagtaaggtgcaactgaaggatgttagggatgtgagctcacctacacggtcaagggattctttgggggcaggcagggttgttggggaatcaggggaggaggatttgaagaggagaagctccaagtcgaagtctaagtcaaggtcaccaacatggtcacgggattcaggcagcgaacagtctaagagtgttggtggtggtggtggagaggagaagaagaatgaggaaacaccggtggagaatgggactagtagtgagatggaggaaggtgaatttgatcctgaacctcaagctaagtgtgaaactgatttggctactgaagctggaaccggaaatgatgggaaagagtcttgtcagatagaaatggagaatgttgaaggtgggatgattccaaatgtggaaggtttagaggaggttaatgaagaggtggtgaataaaagagaaaatgatgtgaaggatgatggtgagttgcaagattgtagacagactctaaatggtggaactaatgaggtggtgaatagaagagaaggtgatgt

SEQ ID NO: 198382 - DNA, 404 bp, Gossypium hirsutum
cggacgcgtgggtgatgatgagcagctcctcctgacatattgaaaaagaccaaccttttcatattcttcataaagtccctcagggtgatactcctcatgttaaagccaaacatgctcagctggttgaaagggatccagacgcagcaattgtactattctggaaggcaataaacgccgggcatagagtagagagcgcactacaagacatggcgggggtgatgacgctactcacccccactgacgaagcagattgatgccatcacgtctttcatgggccgtcgccccaaacacgctcatgaatcactcgacaatgttctcattgacttatacctgatatgtgggaaaggagacgagctgattgagctattataacgaaagccacgattactataccgaggagagat

SEQ ID NO: 198383 - DNA, 384 bp, Gossypium hirsutum
aaaatattagatttcagaacctttttaaatacactttcagtttttgccagatcttgctctattcttcactatcatctttccgctcaggtctttatgctgagggtgtctctttcttttatggagaatgggcaactgaatgactactaaataatgcttaaaggctctcacaatctgaattttgtgtcatttgttgcgcctatatgatctgacctatttaaatagtttggggatctttacacgcagcgttgcttgtacaaagccgtatgagagcatgaggcttattagttacagccttcgctggatgcgtatctcggcttgttgataggattatgttttgcaaaattgtcgttgacaaaattcagtctatcaggcagcattcttact

SEQ ID NO: 198384 - DNA, 397 bp, Gossypium hirsutum
cccacgcgtccgctctgatctaccccctatttggccgtcctcagaccaaaggctgagtctgtcgttaatctggccccccgagctgctggcttcagtgtcttccttggttctggtgggagtggctctgatgtgtaccagaaagaagaggatgagtcatctactcgagcggattatgaatcagaatctgatgattcttcactcaataattactcagttttgtcagggaatgggagtgatcaaggggttagcaggaaaatggttgagttggagcttgaacttcatgaaatgaaacacaagcttcggatgctagaggaagaatatacagatggttcagtaagaggggcagaatgtaataattccgaacttcttgctagaattagggagtatgaagaaaaac

SEQ ID NO: 198385 - DNA, 735 bp, Gossypium hirsutum
tactccaggtattgtatatcagtgcaatctaggcactgagacaccagatatgaagatattccgtgaaattagtgttcctggatttgaccgctcagagtatgaagtcaatcaggtatttgtgccaagtaaggatggtacgaagattccaatgttcattgtgggcaggaagaacattaatttggatggatcacacccttgtttgctatatggatatggtgggtttaacattagtctcacaccaacattcagtgtgagtcgtattgtacttacaaggcatctcggtgctttttattgtgttgccaacattcgtggtgggggagaatatggagaggagtggcataaagctggtgctctttccaagaagcaaaattgctttgatgacttcatttcggctgctgagtatcttatatctgctggctatactcggtctgaaaagttgtgtattgaaggtggaagcaatggtgggcttctcattggggcttgcataaaccaaagaccagatctttttggttgtgctttggctcatgttggtgtgctggacatgttacgatttcacaagttcaccatcggccatgcatggacatcggattatggatgttctgacaaggaagaagagtttcactggctgatcaagtactcaccactacataatgtacgaagaccatgggaacagcatcctgatcagccattacagtaccctcctactatgctgttgactgctgatcatgatgatcc

SEQ ID NO: 198386 - DNA, 425 bp, Gossypium hirsutum
cggacgcgtggggaaacattttgatttcagaaactttttaagtcaaaagaaaaacaaaaaaagcatgcagccggagaatttcgagctctaccgtttcctcgccgaaaacggcgtcggatcctacggcggctttccttccggttccgagtttccggctatgcaaagcttctccagttcctcgacgtattaccctttggagatgtcgggtgttaccaccgaaacgacaccgcatgataaagcacttgcggcgttgaagaaccacaaggaggcggagaagcggcggagagagagaattaactcgcatctcaacaggcttagagcccttctcccttgtaattctaagacagacaaggcttcacttctagcaaaggtggtccaacgagtaaaagaactaatagagcaagccctcgagacaactgagctcg

SEQ ID NO: 198387 - DNA, 903 bp, Gossypium hirsutum
cggacgcgtggggcaaaattaagaaaagaaaagaattcatatgtaaaataatagaagaaaatatacatactgaattactgatgttgaaattccgctggaagaaccataaaaaagacatcagtatcagcttcaagaatcagaggagagaaattcgagattgctctttttctctctagaaatttctaggttttaagactccgtcttaattaattattattatcgaaaacggctatttcctctgtttatttgctaatcgacaatgagcgatcaatcggaggaattgcctctcatggctcccccaccgatcaccgagcccagcgagatcgacctcgaggccggtccagccgatcaaattcagtgtcgaatttgcctcgaaaccgacggtagagattttattgctccttgcaagtgcaaaggaacatcaaaatatgtacatcgggaatgtttagatcattggcgagctgtaaaggaagggtttgcatttgctcattgcacaacctgtaaagctccttatcatttgagagttcatgttgctgctgatacgaaatggcggactttgaaattccgtttttttgtgacgagagacattttatccatatttctggcggttcaactagtcattgcttcacttgcatatttggtctatctaattgatggttaccagcagtcatggctccgtcttgcatggggttttgatagcgagcttattttctattacatatgtggggcactgctattttttgctttgctggggctatcagggtgctttattacttgccatgatcgacgagtgccttatgatttggctcaccctcggtgtgaattatgcctctgttgttgtcagcctgggatgtgtgctgactgccacttgcctggcactctttgtatgtggactgactgtat

SEQ ID NO: 198388 - DNA, 498 bp, Gossypium hirsutum
cggacgcgtgggttccattccacgggagtattttttttcccttttcattttttgccctcaccttggtctgcttctttcctttccatggccgggtttccattttttccttcttatttcccttttttccttcattactgatgttgaaattccgctggaagaaccataacatatcagcttcaagtatcagaggagagaaattcaagattgctcctttttctctctataaattaattattattatcgaaaatggctatttcctttgtttatttgttaatcgacaatgagcgatcaatcggaggaattgcctctcatggctcccccaccgacactgaccccaacgagatcgacctcgaggccggtccagccgatcaaattcagtgtcaaatttgcctcgaaaccgacggtagagattttattgctccttgcaagtgcaaaggaacatcaaaatatgtacatcgggaatgtttagatcattggcgagctgtaaagatgtacctt

SEQ ID NO: 198389 - DNA, 402 bp, Gossypium hirsutum
gaaaaaaaatccctccactattgcttttactttgcttttaatctcacccggacggtgactattgactctgagggtggtgttggcttcttttgagggtggtgaatgtgtacaagtttgttgtcaaattgttgggtttttttttttttaactttttgttgggtgatatataaaagtagatattagctttgatttttatttttattttttggtttttgggagttttggtgttttggggttcgatcttcaaaactgggaaagatgaatataagggcggccgaggaagaatcggcgcaagagattcatatcccggccgatatagattgggaaatgcttgataaatccaagtttttcttcttaggcgcagctctattttctggtgtttcagctaccctttaccccgta

SEQ ID NO: 198390 - DNA, 408 bp, Gossypium hirsutum
gcttgaatggcattacatggccagatcgaactcctcatcccaccttacacgaggttaagtatgtctatcaaccgatcaaggtttatctaagggaaagcacagttaagataaagaacactaatttttatgagacaacagaaggattggtgtttgaatgggctgttcttggggatggctgtgaacttggatgtggaattctctcccttcctgtgattgaacctcagagcagctatgatatcgaatggaagtctggcccatggtatcctctaggggcttcctcagatgccgaagaaatatttttaacaatcactactaaacttttgcactccaagaggtgggtagaagccggtcatgtggtttcatcgacacaagtccagttgccttccaaaagagatattgtacctcata

SEQ ID NO: 198391 - DNA, 542 bp, Gossypium hirsutum
tgccgctgtatgtgtttttattagtttatacctcatggcttcttggaactcagtttttctttcatggcttaagaatttcagtaatattttcaagtacaaaatggatgaagtccagcttggttcacatactataaggtcccatggtctcaccattgcaaggacacacatgcatgattggcttattcttgtattgcttgtggtgatatgggttgtcatccttatcattcatccattttatcgctttgttgggaaggatatgatggatgatctaagataccccttacaaagtaatacagttcctgtttgggctgtgccgatgtatgccgttctgttgcccatgctgatttttatctttgtgtacattcgtagaagggatgtttatgatcttcatcatgctgtactaggccctcttgttctccggtctagtgaccgctgttatcactgattcgataaaaaatgcagttggaagacctcggccagacttcttttggcgctgtttcccagatggaaaggatgtttatgataaatggggaaatgtcatc

SEQ ID NO: 198392 - DNA, 457 bp, Gossypium hirsutum
aaatgagagagtactcgaactcatttgcttcacttctaggggtgttggccttttgccaaagcctcctccaactcattttcccaccccatccccgctttctctgtctcaagttcttcaaccgtatcgtccatttgttctcttcctactgctacttcgacatcactgaaatcgacggcgttaacaccaacgaactctataacgctgtccaactctatctcagctcctttgtttccatcaacggcagccgcttgagcctcactcgcgctctcaattcgagcgccattaccttcggcctctccaacaatgactgcatcgtcgatacgttcagtggtgtcaccgtgctttgggaacacgttgtgatccaaaggcaatcccagaccttttcttggcgaccattgccggaagagaaaagaggtttcactctccgaatcaagaagaaaaacaagtccttgattct

SEQ ID NO: 198393 - DNA, 895 bp, Gossypium hirsutum
  unsure (1)..(895): unsure at all n locations
ctcctttgctctttctattggtcttggaaaatggaagcctccaagcctaggatctgacacaaaccaaaaccctaagagagagcgagagagagagagagagaggaccacgcaattttaatctataaatcatccatcccctttataagttgcctgcgtccccccctcccgcccgttttattctatctcagagtagatcactcccaaggttttctctctttcatctatctaagttgttgagtatggttttctgggtttttggttatggttcactggtctggaaccctgggtttgagtatgatgagaaagtcataggcttcatcaaggattacaggcgtgtttttgaccttgcatgcattgatcacagaggtacacctgaagatcctgcaaggacttgcaccttggagcacattgaaggagccgtttgttggggtgctgcttattgtgttcggggcagtcctgaaaaggaaagagcagcaatgctgtacttggagagaagggaatgtgaatatgatcagaagaccctcgtggacgtcttcaaggaaacagatcccctgcggcctgctctaagtggagttattgtgttcacatctactcctgacaaagtttcaaacaagtattacctggggcctgctccgttggaggaaatggcctggcaaattgcaactgctgttggaccctgtgggaacaatagggattatcttttctcgctggagaaggccatgtttgatataggtcatgaggatgacttggttataaagctggcaaatgaagttaggaaggtgcttggaacaatggcgaaagagaagaaactagtaggttctcctctcaaacctcttaaatcccaaacccangcacagatcccatcaattcagttgcatctgcttcctccggaagg

SEQ ID NO: 198394 - DNA, 553 bp, Gossypium hirsutum
cccacgcgtccgcttttctgggcaaggaaaggaaataattaattccctgaaaaaagttaagaaatttttggatcaatctgagattttctatttctttttctttgcagaaataaactttcccggctgattctcacgctaattttttttttcaaatttcattctcttattttattttattttatttcatattttgggagagggagaacgatcagcgaaaatgaatatattcagattagcaggggacatgacccatttgtttagtgttcttgctttgcttcttaagatccacacaatcaagtcttgtgctggcatttcactgaagactcaggaactctatgctattgtctttgctactcgttacttggacatattcactaatcatatctcgccttataacacaatcatgaagctaatattcctgggcagctctttctcaattggatggtacatgcggtataacaaaatacaccgtagatcttatgataaggaccaggatacatttcgacattatatccttatactgccttgcctgattcttgcccttcttataaac

SEQ ID NO: 198395 - DNA, 613 bp, Gossypium hirsutum
cccacgcgtccgcccacgcgtccgggaaattaaaaaaagaaagaaagcagggaaatgcttaatctatggaatcttctcttcctctcctttgttcatttctcatcattcagtgttactttgggtggggtgtcgggaaacccatttactccaaaatcctccttcattcgctattggaacaaagagctccacaaggaaatccccaacacccattttttactctctaaagtttcaccattaactgccgtcgactccgccagtttctcgaaactcgccgcccacaacaacctcgcttctcgtcttccttccttttgttcctccgctaaactcttttgcttccccgacttatcgcccagtctcgagaaacattccaaagacgttaacttcgccgtctacctcgacaggaacttcactaattacgactccgatcgactcgctggactcgactccttcaagaactactctgaaaacgacaacgttgtcattgactcttttcgtcgctacagccgggactccgcgggtcacaaggaccaattctccaattacgccagtgcatcaaatgtcgtcgaacaaagcttcaacacctacggcggagacgccactggtggttccgaga

SEQ ID NO: 198396 - DNA, 830 bp, Gossypium hirsutum
ctttacccgtcgccttcggcttcgcgatccttttgtctgttttctttagttttctctttttaaggttctcatggtctgtacaattatactatatcaatatacagagcaaagacccaatcgatttgaagatcagctgcttcgaaattcagataattgtttgtgcagctgagattgatacagaaaacatatatggctgcctttgcaactgccgaggcctgcgattcaaacacagcgcttttggcaagcggtgaactgcgtgctctagaaccgattttcaagatatacgggcaacgtcgttcattctcaggacccattgtaacactcaaggtgtttgaggacaatgtcctggtgaggcagcttcttgaaacccggggtgaaggaagagttctagtcatagatggcgggggaagcaaaaggtgtgctttggtcggaggaaacttggcgcagtcggctcaaaacatgggttggtctggtattgtagtgaacgggtgcattcgagatgtggatgagattaatgcatgcgatatcggcgtccgagcattgggatctaatcccttgaaatcaaataaaaaggcaattggtgaaaagcatgccccgatcagcattgccggaaccttaatccgtgatggcgaatggttgtatgccgatagtgacggcattcttatctcgaaaatggaactatctatctaaagcagtagtccttacctttccgagccaataaggggaccgattaagttctcagtaacaggatcgatatcatcccaattgtgagttctttagttggatattgattatgaacatgatgatatttcttgtttttaacatttttc

SEQ ID NO: 198397 - DNA, 413 bp, Gossypium hirsutum
atcgtgaacaccttttgaagggaactgtgatagtgatctttcagccggcagaggaagccggaaatggtgctaagcggatgatcggagatggggcattggaaaacgtagaggccattgttgcagtccatgtatcccacgaacaccccacgggtattatcggctcaaggcctggtcctcttcttgccggctgcggcttctttcgagctgttttcagtggaagaaaaggccttgccggcagcccccatcactccgtcgacccaatcttggctgcatcagctgccgtaattagtttacagggaattgtttctcgtgaatcaaatccattagattcccaggtcgtctcggtcacttctttcaatggaggcaataatcttgacatgatccctgaaacggtggtcatcggaggtactttc

SEQ ID NO: 198398 - DNA, 598 bp, Gossypium hirsutum
ctcaacattaaataaaaagggaagaaattagaacaaaagagagggagagggagagagagaaaggaaaaggataaagaaaccccaatcccccttttgtttacaaaggggaagattttaatgttccaacccaccaacctccatttcttcatcgtaaagtctcctgttatccaattatttacgtccatgtcgcattagcactcgattaccgtgagaaagggtaaaacggggcaacataaataggagagaaagagatggatttgagtttcagaagaggtgaagctaaaggcagtgttgttgcaggctctgtctgggaaactagaatgaagagtgatgaagttaaagatggaattaaggttttcaatgctggcaccattactgaagaaaacagtaatggtgttggtggtactaaaagattgagcttgaagaaaggccaacctgttgtcggcggtgtcgggatgagaaaaacttggaaaaatgagagttttgaagggttagagaagaacccaattcagattgctaaaggcaaagccgaggaacaatgcaaggagttgagtgtgtctgttggtggaattaagtagagaaaccacccaattccggt

SEQ ID NO: 198399 - DNA, 506 bp, Gossypium hirsutum
cccacgcgtccgctgagttggaatcgtcccgaaatttggaaactcagttggtaccggcccagaactacatggtaaggatgttgtcgtggaagaaaagacgattaagttttagatcgtcagcgaagaaaacagagctcttgggttttgactttgacgggcaccctcaaacctgttctgtcgttgactccgagaagggagaatattggtgggaagtgaaagaattagtgggcgggaatggaggagcatggctgaaagctcaagtgttctttgcttcctttgaccaacgaagcgaaagagccgctggggagagtgcctgcaccgctctggtcgccgtcatcgctcaccggctccattcaaaccatgcctccatgccaacgagacctggatttgataacctcataacacaaggttcctctgaatggctgtaagctctgctccaacacagcttacaccaatgcctttcccgataaacattttcgtcttgataccgttctaaaagccttttt

SEQ ID NO: 198400 - DNA, 465 bp, Gossypium hirsutum
ttagctcaagggaggaaaaagaacatggctccgaaatcacaaccggtcaacccaaatcccaacacgactatgaacgagatccgttaccgcggagtcagaaagcgtccatggggccgttacgcagctgagatccggaacccgagaaaaaaggcccgagtctggctcggtaccttcgacactgccgaggaagcagcgcgtgcttacgacgcggcggcacgagaattccgtggcgccaaggctaaaacaaatttcacctacactaacatcaatgacttcacgctaagccccagccagagcagcaccgtggagtcctcttctccgccgccgttggacctcacactcgctagcggatctatttcgctccccatgacggcgaatcatccggtgtttttgttggatgtctttgcttccgccggtaagcgtctctccgatgccggcggagcccagagcgattcagattcctcg

SEQ ID NO: 198401 - DNA, 770 bp, Gossypium hirsutum
aatatttgtttctattacaaggtaaatcttagaaaatttctcattttttttcgtctgtagataaattcgctttgtgggtaatttttgatccctcaaagttttaaatttttttttggttggattttaaagggttgtctatttttaaaaagaaaaacctcttttaatccgttctggatttaggacctgttcttcaagttttggtaagaaacaggttaatttttatttttaatttggtcctcatcttatttctagttttagtgtaatggcagctgcaatggatttcattagtagtggagtagatcaatcagatctatatgggggagaattgatggaagttcttgaaccttttatgaaaagtgtttcctcctcttcctgctccccttcccccttccccttccccttccccttcttctcttccttctacttcttacctttctttctcttcttccgaaacacagcctaatttttacccagatagctgttcttacccttaccctacaccaatggactcagtatcatgtccccaacagcctcaaactggttcaacaattgggcttaatagcttgacacaagctcagatccatcagatccagcttcatttccacctctcacaacaaccaaccaagctacctttgccaaagtccccaacccaacaccatcagcgccaatagtaacccgatggttagctttctttgccctaaacctgtcccaatgaaacacgtgggtgcgccattcaaacccaccaaactttacagaggagttaggcaacg

SEQ ID NO: 198402 - DNA, 736 bp, Gossypium hirsutum
gatctcttgagggctgtaattataggagctgtgggcactccctaccatgatggtctcttgttctttgatgttttcttccctgctagctatcctaaaggaccccctcaagtttattaccactctggtggactgcgccttaatccaaatttgtacagttgtgggaaagtatgccttagtcttctaaacacatggtctggtaataagaatgagaagtggatacctggtatgtctaccatgctccaagttctggtatctattcaggctctaatcttgaaccaggatccgtactttaatgagcctggttgggctcatcataaaggcacgccacaaggtgaattactgtctcgacaatacaacgaggatacattcatattgtcactgaagacaatgatctactcaatgaggaggccaccaaagcattttgaggattttgtagtgggccatttctaccgtcgtgctcaagatatacttgtggcatgtaaagcatacatggatggtgctcaggtaggttgcctggtaaaaggcggggttcaagatgttgatgaaggtgacaagagctgctcacagaagtttaagaactctgtctccggatgtgtaaatatgctggtgaaggaatttacggtacttggagtaaaggattgtgagaaattcctcattgtccctaaatgtcaaaacaatcgagttgatagtattcccaaggttccactatcgtgaactacttttaaaataaaaattc

SEQ ID NO: 198403 - DNA, 617 bp, Gossypium hirsutum
  unsure (1)..(617): unsure at all n locations
ggaannacccgggtgcgacgccacagccgtcccgtctctcttctctctttttctcattcagtaaatatgtcaagccacaataatttccccttttcctgttacgatgttgcgattttcgactttttcatattactttttcttcttaattacaattatcacttcctcgccgcttatttaaattccgccttttgtttaccctcnttaatttaattcaaacgaacaacgtcccttttctttctaaccgctcttgtctcccgttttatcttctctctggggtttttcgtttttcctagttctgctctgctctcttgttcctttttttccctctctttttggtattttggtttgattgaatcgattatgtcgaagaacattctggtgaccggaggagccggttatatagggagccacacagtgttgcagttgcttttaggcggatacaaagtggtcgtcgctgataatctggataattcctccgcggttgctatcaaaagagttgaagaactcgccggtcaattcggcagaaacctttcttttcgccaggtggaccttagggatagatcagtaatccaaaaactctttgctgagacaaagtttgatgctgtgattcactttgc

SEQ ID NO: 198404 - DNA, 516 bp, Gossypium hirsutum
cgcaaaccaaagaaaaaagctagcacacctgatttctgtccccggaaacctcaccgcaaaccaaagaaaaaagctagcacacctgaagtagctcagaatgtagcccgagaaggtcagggactcggactcggactcggactcggattcaagcgattcaacattcgagttgcctcccattgcttcgctcgagtttctagatgagtggagttcagcggagtctgataagcaatctgcttcgggaaagaagaagttagagaagaaccacgcttcatgtgaaggttgcagcagtggtaacatgggaaaggctaagatacagaagaagtaaatgagtagaagatggtgcgggtgcggttgcacgtgtagttgatcagcaagtttatgttctgcctttctcttattttgcaatggtgtggttttatttagggtttgaataaatgagttaaaacaaaactaagaacaatagatcttttctttttctagtgtggactgaatgacgaacttttaaggctgatcaat

SEQ ID NO: 198405 - DNA, 550 bp, Gossypium hirsutum
cccacgcgtccgcccacgcgtccggacggatggaaactaagagcagcggcgtagccggcggcggatcagtctcagagtcgtcgaccatgatactccacaacgcggtggtcgtcacaatggattctgattgccgagtctttcaaaacggagctgttttcatcgacaaagacaaaatcaaagccatcggtcaatctcccgatattcttcaacaattctcccatgtcgctcaccacatcctcgacctccacggtcaaatattgcttccaggattcgtcaacacacacgttcacacttcgcagcagctcgggagaggaatcgccgacgacgttgatctaatgacgtggcttcaccatcggatctggccgtacgagtccaacatgaccgaagaagactcttacatctctactttactttgcggagtcgaacttattcactccggtgtcacgtgcttcgctgaagctggagggcagcacgtgactggaatggccatagccgttctgtggctcggattgcgagcttagctaacgagtccagtcatggactccggtga

SEQ ID NO: 198406 - DNA, 845 bp, Gossypium hirsutum
atgcaatcgaatagaaataatatcctctcatttgatggagattatgggacgcagggaatggctacatcctcaagagcactgaggaccccaagagatagggcaagaacaatcacatcgttgcccgtatctccttgttcaagccccttaagatacggtccagtacacaggagttgttttctttctcctcctcatccagcttatcagtttgtaggacagagtggtcataacttaggcgacttctctgggaacacatcaagaccaaacccgagatacactcatgatccttggtttgaagcgccacaactaaaagtacaaacaacaggcacctcgccaagaacaagacctatttgagattattgtaaatagaagtaggatagagtatcatcaatgttccactccctattttggtaaatctggcaaattacattttaacttaaaaggattctcggaatggtgaatatatgggggacggtgggacttttgttgcatgggaaaagatgaagctggtagaatgtattttatattgtaacaacatatatattgttgattatttttggttgtatatggaaggtgatgactttcatttgtaacgttgacgatgttgtatactactagttcatcaaagtagtcaaataccattaccaatcatcagagtttagctacagattggaagcttcattttgaagcaggtatgaatcgaggggtgagggagtggggcatgtattgtgcctttgcacggagacatgcttcgtaaatgatggagaaaagaggggtgatcatgtctgcaaaaagatgatcaacaagaatgggatttgccttgtgtgacgtagagggggaaaacaggg

SEQ ID NO: 198407 - DNA, 612 bp, Gossypium hirsutum
cccacgcgtccgccttgttgcagtcagcagaattgcaaatttataccgactttttgagaagggtccttgaaatattaaatgcgattttgacatatgcactgccacggaatcctgaggttgtctatgccattatgcacagacaggaagtttttcagccattcaagagccatcctcgctttgctgagctgcttgagaatatttataatgtattagatttttttaacagtcgtatggatgcccaaagaatggatggtgaatggtctgtagaaaaagtcctcctgttcataattaatagttgtcgatcttggcgcggtgaagggatgaagatgttcactcagttgcacttctcgtatgaacaagagagtcatcccgaggagttctttattccatatgtttggcaacttgtcctatcccgctgtggattcagttttaacgcagatgctataactttgttccccgtcggtatgcatgccaataaagaaatttactatgatgaaatgaatacgaaccaaaacggggagttgaatgaacaaagggttctgtttgatccgtaaaaagaaaagaaaaaaaaggcattttataccattagcttgtgcttatgcatgtacgttt

SEQ ID NO: 198408 - DNA, 583 bp, Gossypium hirsutum
aatcctcgtacttatctgctgtttcgttgaccggaagcagttttctttggatatttcaacgaagttaggaagcagtttctctttggttccgttcattattgtggttgcattgtgcacaattttggctatggtagcgacgttaccgcttgcacagctattcttctttcacattctactcataaaaaagggaatcagcacatacgattatataatagctttacgggagcaagagcaagagctacaaggtgtcggcggccaacagagtccacaaatgtcccctgccagctcgcttactggattaagtagtgctagttcgttttctactttccaccggggtgcatggtgtacacccccacgcttgttcctcgaagatcagtttgacgttgttcctcctgataccggatctgtaagttcgttcgggaaaaaaatggtcagggaggaaccaattaagaagaagaatccaggtgcagttaagatcagtccgtggacattggcacggttaaatgcggaagatgtttcaaaagccgctgctgaagcaaggtaaaagtccatattcctgcaccccgtggtgagacgtgatgcc

SEQ ID NO: 198409 - DNA, 428 bp, Gossypium hirsutum
cccactcgtccgcccacgcgtccgcccactcgttcgcccacgcgtccggccagcagggagcttggtggcgtctccgtaagaacgcacgcttttgatatcgtcaggtcagagattcaatctcgtcttctccctctattatcatcagttgctggtcaagaacaagttttagatttacaagatgtatttagacgattttcattcgataatatctgcaaattctccttcgggttagaccctggttgcctcgatttatcactgctagtttcagaccttgctgtagcttctgattttgcatcaaatttttcagcacaaagagcgctggcatcttcatctttgatatggaaggtcaaaaggctattgaacttgtgcacggaaaagcagcttaaagaagccattaaagtagcagatgaatctgctgaagagatgat

SEQ ID NO: 198410 - DNA, 534 bp, Gossypium hirsutum
cccacgcgtccggttaaaactttccttctttgtatcgctctttagcttttgttttttgggaatggattcacaactttccttgtggttttgctccatgtccactgctttctgcttcgtcttcttctctttcaccctcttgttttctttgttttccttattgatcttcgttttgaggttgaagctctggtgtacttgtgaaacctgccaggcttatcttacttccagttggaccaaagatttcgataatctttgtgattggtatactcacctccttaaaaattctgccaccggaaccatccatatccatgttcttggcaatatcatcactgcaaatcctgccaacgtcgagcacatgcttaaaaccaggttaaaactacccaaaagggaaacctttctccactctcctgggtgatcttcttggtagaggtattttcaatgttgatggtgattcatggaagtttcaaaggaagatggccagccttgagcttggtggcgtctccgtaagaacgcacgcttttgatatcgtcgggtcag

SEQ ID NO: 198411 - DNA, 979 bp, Gossypium hirsutum
  unsure (1)..(979): unsure at all n locations
gttgaatccaatttaaagaaaacattttcaacaacaacaacaacaacaaccaatagtactattaaccaaaatcaccaaactcaaaagtcaattcagttctgcgacaatcgtagttccagtagtttaaccgagaatccgagttctattcctgctggaaatcatcaccagcagcagcagagtcatcagcaggggcaaagtttatgcttgaatttttccgattatggctttgatgagagtagcagtgtgaggaatgggaattcatcttctcatttattgaaacctgaatccggagagatattgaattttggtgagagtaagagaagtgggaatgggaatttgttcacagggaactctccgttcgccgtggagaacaagaagaggtcgcctaattcaagagggagcaacggagaagctatgctttcgtttaatttaggtgtaattttaccttcatctagtgtggtgaaatcaagtgggaagtgtaggaaaaaagtagttgaaagttttgggttttgctttgttgattntctntttgtttcacattttcctactgaccaaacaagggcaagatctgtttctagcccacagaatctacttgggaatgaacgaattcatgttgacatggaaacaggaagagcctggttgatgctattgaaaagggtattgatctacgcaaacaaatactagaactatataacgattattaccatgcggactgtgnagntnntggtattgtgggaagtctttgatatactcancacttgtgggatatatttctgacatcgacaggtctcaaganagcaaattaagtggagtcttgttgaaactgtaactttgcggtaaagagttaggtgctatcctgaataagtgcactgctgcttttcacgtctagaaacaaatattggtaattttgccaaaggacaccttttttttggtgtgcctttttttgggtatgtgagaatatttggtgtcccctgtgtgg

SEQ ID NO: 198412 - DNA, 569 bp, Gossypium hirsutum
ggcgaagcaagcgcaagtttttggtttgcaaactctgttttgtataccgtcggcaaatggggtgtggtgagttagggtcaacggaactcatcacgcaaagctcagagataatgaacaaggttcgggttttgtttaatttcaatatcgagatcgaagctggttcttggtgtatgagtaacaacactgctgatcaaggcgaaaatgatccctcttcgctttggattagtgacccacatgctggagtcgagtttaaggaaagcagcaacaccaccaccaccaccaatcatactagcaaccagaatcagcagactcagaagtcaattcagttctgcgacaatcgtagttccagtagtttaaccgagaatccgagttctattcctgctggaaatcatcaccagcagcagcagagtcatccgcaggggcaaagtttatgcttgaatttttccgattatggctttgatgagagtagcagtgtgaggaatgggaattcatcttctcatttgttgaaacctgaatccggagagatattgaattttggtgagagtaagagaagtgggaatgggaatttg

SEQ ID NO: 198413 - DNA, 637 bp, Gossypium hirsutum
aataattaagttatttattttctttctttgtgtttcaggatcactgcaagatcctcggaattccctctctctttgcttccataccttccttaccttttgtcactgaatttttgcaggccccgtcctcccaccccatccctgttcttcaactaatagggttttctctttataaacacccacattccactctcatacatatattaataatataaccctaagtgaatttttcatctttctgttgctgcatagtcttcctcattgggacaaaatagatcatttatcaaagggtttacaggaacctactcaaggggaataaagatcaaagaaaatggcatcttcaagctattcaaacccaccatgtgcagcctgcaaatgtttgagaaggaaatgcatgccagattgtatatttgcaccctatttcccaccagaagagcctcataaattcatcaacgttcacaagatattcggtgcaagcaatgttagcaaattgctaaatgatgttgccgccccatcaaagggaagaggcagtcaacttcctctcctatgatatctatgcaaggattaaagatctctgtttatggctgctttggagccaattttgtctctcaaaatcaatttttagacttcaaaatgattg

SEQ ID NO: 198414 - DNA, 606 bp, Gossypium hirsutum
  unsure (1)..(606): unsure at all n locations
ctcatttttctgtcatgtaatcggatgattgtaaattggaacggaaggaaaaaataaaaaatcatttcgtttctgcgagtttgtttgaattaatagctaaaaggaaaaacaaacaaaattctattgcaataggaaattactgtaaatcatcaaactttggaagcagaattagggtttctatttttgttgctctgtttctctatccattgtatttcgctaatggaagctgatgtatccatttccttctcaaaccctaacagaaacatatctctttctttcgactgagatttaggattatttttggatttaaaaaaataatttttggatgaagatgaatggtgttgggggattatggttatggtttctctgtttactgggtcgtttgtgggatgacatcagctagtgtggtgctgattgggaacaacactactctctcttcgacgatgttgagctaatttcgnttgttgtgggtggtacttttcagctccggcattgagggacaggaaatgtgggatatatattggcaaacctctgagcctgttcgattgagtataagtgaaaaggttccatttacttcccttggctgttataagaaggcatttgaga

SEQ ID NO: 198415 - DNA, 789 bp, Gossypium hirsutum
aactttttagtgcaaaacgccttgagtcatacgagtatatccgaagagaagaaatgagagttgtgctaaaagggttggacgaatcattccgtgtcccaatttgtttgaaagatcgtctttcagatttgagtcttaatgtaataagtaggatggtgttcgggaaaaagtatacagaggggactggtgaaaatgagattgtgaccccgaaggagttcaaggagatgcttgatgagttattcctacttaacggagtattggatattggggactcgattccctcgctaagggtcttggatttgcaaggcaatattaagagaatgaaggccttgagcaagaagttcgacaaattcttggagcatgttttggatgaacataacgctaggcgaagagatgttaaagattatgctgccaaggatatggtggatgtgcttttgcaacttgctgatgatcccaatcttgatgtcaagcttgaaaggcatggagtcaaggcatttagtcaggacttgatagctggagggaccgagagttcagcagtgactgtggaatgggcaatttcagagatgttgaagaagccagaaatatttgccaaggctacagaagaactagacagggtaattggcagggaaagatgggtagaagaaagggacattgtgaacctaccttacatcgactcaattgccaaagagactatgcgtttgcaccctgtggcacccatgctagtgcctcgcatgacccgtgaagattgtcaagtagatggttacgacattctcaagggcactagagctcttg

SEQ ID NO: 198416 - DNA, 605 bp, Gossypium hirsutum
gtgacagctatctttttcctgctagtgggaacagtagtttggattttggagcataggatgaatgatgagttcagaggccccccaagaagacaagtagttactattttatggtttagtttttcaacttggttcttcgcccacagagaaaatactgtcagtgtactgggtcgcataattcttatcatctggctatttgtggttctcataatcaactctagctacacggccagccttacctcaatccttacagtgcaacaacttagttctcccatcaagggcattgaaactttggtatcaagcaaggatcccattggctaccagcagggatcatttgcccgaaattatttaattgacgacctataaatcgatgcatcacggctggttgcacttaattccccggaagaatgtgctaaagctttgaaagatgggccccacatgggtggtgtggctgcaatggtggatgaccgtgcttatatagagctctttctctccaccagatgtgaattcagtatcgtaggccagagttaccataaatggtggggatttgctttcactggactctctctgcagtgacatgtaactgtcatcttaactttagagatggg

SEQ ID NO: 198417 - DNA, 441 bp, Gossypium hirsutum
tttatcgcgtgggcggacgcgtgggcttccttccatctcaaggaccaaactgcatcatctcctctcaccatcttttccggccaggggcggccacaaaacgtcgccctcaaaagagatcttaatgcctccgaactccagcagcgccgctatacactctcctaaaaaaacaaacagctcctccacctctctccatcttcaacctttttcatttctatggctgctccttttcatcgtctcacttcaggtaaccattctctttatggctcgcgccgcccctttctacaatcgccgaacccatttcccgaacccagtatccgacccgtgctcgtcgggtcgtatcttcgtttacaacttgccacctgttttcaacgaagagttgttggataattgccacgagctggacccatggaattcacgttgcgaagcattgtccaacggtgg

SEQ ID NO: 198418 - DNA, 424 bp, Gossypium hirsutum
caaaaatctctctcagtttcttctctatccccctaaaactcttcagcaatttccctttgttaaccaaaatgagagagtgcatttcagttcacattggtcaagctggcatccaagttggtaacgcctgttgggagctctactgtcttgaacatggcattcagcctgatggacaaatgccgggtgacaaaacagtcggaggtggggatgatgctttcaacacctttttcagtgaaaccggcgctggaaaacatgtccctcgtgctgtttttttggatcttgaaccgaccgtaattgatgaagttagaaccggggcttatcgtcaattattccaccctgaacagcttattagtggcaaagaagatgctgcaaataactttgtcagaggccacttcacaattgggaaggaaatagtggatctttgcct

SEQ ID NO: 198419 - DNA, 559 bp, Gossypium hirsutum
  unsure (1)..(559): unsure at all n locations
ntccgcccacgccctcctcccacgcgtctcgaacgaatcctacaaagccatctttgcatggagaggagatcttcaccaaaatcactttgtctttaatccttcctctatccttcatctaccttgttcacatggaagtatccaatctcttcttcaggaaaatcatccacaacgaaatagaactcgaccacactcgatcaggcactcccaaatgcgagaaactatctgacctcatctccgatgagtgggcttacttttggcttttcaaagctgcctacttcactctgtttttcatcttctcgctcctctcaacagccgcagttgtttacaccatcgcctgcatatacacagctcgggaacttaccttcaacaaagtcatcagcgtcgttcccaaggtctggaagcggctgatggttactttcttatgtattttcatcgccatgtttttataccacgtcgcagcattggctatcttgattggttgcgtggtttcaatcggaggaagcaatttgggcttcgcggtgttcgttgttctagcgattttgtactcagtggggttttt

SEQ ID NO: 198420 - DNA, 454 bp, Gossypium hirsutum
cccacgcgtccgcggacgcgtggggaaaaatgaagaaagtagagctgatattcgttccaacaccaggagccggccacttggccccaactgttgtattcgtaaagcgtctcatccatcacgatgatcgaattttggttactattctttccattgagtggcattcttcgggtttcgccgatgcctacaccgaatcgcttgctactttgcaatctgatcgaatccaggtaattcaggtttctcgggtagatcctcccccgttacatctttggaccttggcacccgaagcttttgtctatgcattaattcagagctacatccctcatgttagaaatgctgtcacaaatattttgtctatgaaatccacttcggattcaacccgagttgcaggcttagttcttgatctgttttgttcgcccatggttgatgtcgcaactgaactcggtctttcttctta

SEQ ID NO: 198421 - DNA, 862 bp, Gossypium hirsutum
  unsure (1)..(862): unsure at all n locations
ctgcaatttgcgataagttacatgagccggtcagaattgctatagtggggaagtacacaggcctttctgatacctatctctctatactgaaggctttgttgcatgcatctgttgctcgtggtaagaaacttattgtggattgggttcctgctagtgaccttgaagatatgactgaaatagagaatcttgatgcttacaaggctgcgtggaagttgctcaagagtgcagatggtgttctggttcccggagggtttggtgatagaggggtgcaaggaaaaattcttgcagcaaagcatgcacgggaaaacagaattccctttcttggaatatgtctaggaatgcagattgctgtcattgagtttgcacgatctgttctaggattgaaagatgcaaatagcactgagttcgatcctagcactcgaaatccttgtgttatatttatgcccgagggctcaaaaacgcataagggtggtacaatgcgtctnggatcaaggaggacatatttccaagtatcggactgcaaatctgtgaaattatatggaaatagaggattcatagatgagagacatatgcacagatatgaggtaaatcctgatatggagcacgccttgaaatgccggctatcttcactgcaaggccaactagttacgcttggagatatgaacaccggtcttctacaacattgtgtaatccttccaatttaatagacagaaaactccgcctgtctagttataggccctttggattaagcgctcaaaagtgtagcctaaaggactgaaatattgccttttaaaaaccaggtgggataccccttaaagtgctatttgatgggatatgtattagtatggtatgtcatattttg

SEQ ID NO: 198422 - DNA, 846 bp, Gossypium hirsutum
  unsure (1)..(846): unsure at all n locations
aaacagccttctctgttcagatttatttctcttttgatttcttcttgttcctctctctggtgatttgatatttgataaattataataatatataatcatatcaaagccgccccattaatatctatcttcttcttcaaagcttggctttttcagccaacccagatcagttttggactcaattctgcagaaatttccggttgagagttcttgatttggggataagttcatattgggtagggattagattttggaagatggctagtgtgcaagatcagctggagatcaagtttcgattgacagatggatccgatttcggtcccaaaactttccctgctgctactagtgttgcaactttgaaggaaagtgttgttgctcaatggcctaaagagaaggaaaatggtccgaggacagtgaaagatgtcaagttaatcagtgctggaaaaatattggagaacaacaaaactttgggagaagtgtcagagccctctttgtgatattcccggtnggggtaacaacttgcacgnnnnnnnttgttcaacctttctcctggtggaaaaagaaaagaaagcagtaatcgaaccaaagcaaacaaatgtgttntgtgtcatattataatccacagcttgaagaggggacaacattattttcagatgnnagagtgacggaactgatttacaatgaagttgaaactntntgatcgaagattcggtttgtagctgcacatttatattagaatgtggtatnttctgctttcttggcgattatgtagtcgatgattgtcatctatttgttactttgtcatttacattatagacttgtatcagcaataaatctagaatacgtcga

SEQ ID NO: 198423 - DNA, 508 bp, Gossypium hirsutum
cggacgcgtgggtttacgttgacaaatctgccttttccttctcaattccgcaagttttctagcagatcgccacaaagggaattttgaaccttgtggggggttgtttttaatagaaatggtgaaccatggggaccccggaaacgtcacgggagccatgccctgatcgaattctcgacgacattggtggtgcttttggcatgggtgctgttggaggtgcagccttccacttcttgaaaggcacatataactcccctagtggttctcggttgctcggaggaactcaagcagtgcgtatgaatgcccctcgtgtcggcggtagttttgccgtttggggcggtctgttttccacctttgattgcactatggtctacgttcgacagaaagaagatgcttggaactccattatagccggtgctgcaacaggaggttttcttttaatgcgttaaggaatttggtgctgttttctgatcagtcatgttcggtgagcattttgtttgctttgaatgaa

SEQ ID NO: 198424 - DNA, 599 bp, Gossypium hirsutum
  unsure (1)..(599): unsure at all n locations
caggaggatgcacttctcaaggctattgattttggattatcaatattctttaagccaggtgaaagattcactgatgtggttgggagcccatactatgttgcccctgaagtcttacgaaagcattatggtccagaagcagatgtctggagtgcaggagtaattctttacattctcttaagtggagttcctcccttttgggctgaaaacgagcaaggcatatttgaagaggtattgcatggtgaccttgattttgattctgatccttggcctagcatctctgaaagtgctaaagatttggtgaggaaaatgctcatccgagaccctaggaaacggttaactgcacatgaagttttgtgccacccttggatacagattgatggtgttgctcctgacaagcctcttgattctgctgttttaagtcgtatgaagcaattttctgcaatgaataagctcaagaaaatggctcttagagttattgcagagagcctatctgaagaaaaaatacctggcctganagaattgtttcagatgatagatgctgacaacagtggtccgattccattcgaagaccttaaaccgggactganaaaagtgggagn

SEQ ID NO: 198425 - DNA, 522 bp, Gossypium hirsutum
agaagctgcaaggaagcgagctgctaagtctggcaagatacttgaagtgcaagaaacatgagagcaacgtgttgtggaagctgccatgcctactgaagccttaagatttttgtttgcaacagaaactgaacctactgctgacggaggaaaggataagagcaattcctctagtgtgtcccctggcgagaagcgcaagcatgatgctgtggagtcaaaggcagaatctggggctacagatgaacaagtggttctttggcgtcctaatattgatgagtttatacggcatcttaggcataaggcttgcattgagaatgtgagggcgcgcttcgatgatggagctgttattgtctttggtgcaatgctggaagcaactagaagtgcagagaagaaagttaaaacagagaattcagttccagtgtcactcagttccatttacgaagaggtgataaagagtgaagaaggtcgtaatataacctttgatcgtgttagagccttccttgttcagttgagttgccacccttt

SEQ ID NO: 198426 - DNA, 426 bp, Gossypium hirsutum
tcgtttcctttcaaaacacacgcacctcttctcttaatttccaataccgctatcatcgtgttgttctttccaaatcaccatgggaaattacgtttcctgcactttggccacccctttaatcaaaagcggtaaagctgcaagggtgatccttcccggcggcgaaatccggcaattccgggaacccgtaaaggctgccgagcttatgttggagtgtcccaatttttttctcaccaattcccagtctcttcacataggcaagagatttttagctctgaccgccgatgaagaattggagctgggcaacgttttcctcatgttcccgatgaaaagactcaattccgtgatcaccgcagctcgatttggctatacttttcatggcggggaactcttcaatcaagaaaatttaaagtggaaaagttgggggtt

SEQ ID NO: 198427 - DNA, 319 bp, Gossypium hirsutum
tccactttcttggctatcgcatgatctggatataacgagccaacaaaggcgaaaatgggtgcagaaaaattacattgatttccaattactgcactgacaccaagcgattccctcagggacttcccaaagaatgcagtgttcattaacagggattctaaatttgttatagcagagattttattggttaaatttatgaatgttctttaaatctttgttcactagtaagtcatatacttaaagacagatttcgtgtgtaatttgttctatgttctgtaacgtgttatataagttcaatattaaatgttatcattctttttat

SEQ ID NO: 198428 - DNA, 337 bp, Gossypium hirsutum
gtcaagctcaagcctttctcttgggtccctcccccaaaacaaacactcttttcaactccaccaccatctttaaccctgaccaacctcatccccaaatcttcccattttttgttccctataaaattttgatcacttaaattgtttttttttccaaattttggggggttaaagatgagttcgagttccgatttggtgggttttggtgaatcggtattgggagtgtccgtagagggttcggtaacggattctatgatagtggtcgcgacgacgtcgttagccgggattctggggcttttgttgtttttctggaagaaatcgggttccgaaccgagccgtg

SEQ ID NO: 198429 - DNA, 511 bp, Gossypium hirsutum
cccacgcgtccgcccacgcgtccgcccacgcgtccgacccccagaacttgtactaacagctactccacgacaagtcggaaatgcacgccaggacagattcacaggtgacaagcctcgccccatcatccccaaccaggtctccgcggcgtccagtttactatgtgcagagcccttcacgtgattctcacgatggagaaaagacaacaacctccttccattccacgccggttatcagccctatggggtcacctccccattcccattcctccatgggccgccactctcgtgagtcttcatccagtcggttttcagggtcgcttaaacctggatcccgcaagatctcgcctaacgacgctccgttaaggggagctcatcggaaggggcataagcagtggaaagaatgtgatgtgatcgaagaagaaggcctccttgaagatgaagaacgtgagcaaggactccctcgaagatgctatgttctagcttttcttgtggcttctttcttctcttctct

SEQ ID NO: 198430 - DNA, 746 bp, Gossypium hirsutum
ctttcctgcatccgggttcccactgtggaaattgttgtgtttaatcatttgagagctatgaagtgttttacattccccaattggtataaaaaagatgaaccaaagacccccagatcactttcaaaccggtctctgaactccatgtgcactgatcgcgaaatagcgaggtctggatctgaattgaactctcagaatgtctcaggcgtgagcagtgagtcaatggggcggtcctattttcctagcatgtctcaaagacctagcaatctcagagtgttcacagtttctgagcttaaatctgcaaccaagaactttagccgctctttcatgctcggagagggtggatttggctgtgtttacaagggttctctcaagagtcctgaagatccgtctgaaaagattgaagtagcagtgaaacagcttggtaaaagggggttgcagggccacaaggagtgggtgactgaagtaaatgtccttggtgtggttgagcatccgaatcttgtgaagctagttggttactgtgctgaagacgatgaaagaggaatccaacggcttttgatatatgaatatatgcctaatagaagtgtggaaaaccatttatctgtgcggtcagaaacaactctttcctgggcaatgagatttgaaaatagcccaagatgctgctcgtgggttagcatacctacatgaaggaatggagttccagatcatctttagggattttaaatcatcaaatatccttctagatgagc

SEQ ID NO: 198431 - DNA, 422 bp, Gossypium hirsutum
agttttctgagcagcttatccatcaatggcttcctttaacccaagtgggtacgaaaagtattcaggttcagcagcagaagcaaccaagtttggccaagacgccgccacgactgggattccagttagctcctccaacgcctactactccgacacttctcaaaccaccaacactcgtcctcagactaaaacgagagtcccttggtcatctggcctctgtggctgcttctctgactggagaaactgttgcataacgtgttggtgcccttgcgtgacttttggccagattgctgagattgtagataaaggatcgtcatcgtgtggggtaaatggagcactttacacactgatagcatgcgtgacggggtgcgcatgttgctattcctgcttttaccgagccaaaatgaggcagcaatacatgttga

SEQ ID NO: 198432 - DNA, 490 bp, Gossypium hirsutum
cccacgcgtccgcctgttcttaagttttgataagaaacaggttactttttttgggcatattcaagtttcaatcttttctgtttgaaagaaatggcagctacaatggatttctataggagcagttcaggtatatatggtggagagttgatggaagcactcgaaccttttatgaaaagtgcttcttcctcatcctcttcttccccttccccttctccttccccttcatcttattctccctctccttctccttctccttctacttcatacctctctttctcttcttcccaaacacatcccaatttttacgcagttggttgttggtattccccagcacgtgatcaattttcaggtgttcaacagcctcaacttggttcaaccattgggctaaacaacttaacccaagctcagatcaaccaaattcaggctcaattcctcttccaaaacaatcaaccaagctacctttaccaaaatcctcaacttaaacgccaac

SEQ ID NO: 198433 - DNA, 533 bp, Gossypium hirsutum
gatcatcacacttacctttttcccatttcgtcaatcgcggcattcaagcaaaatcaacctttgtttagttacatggaaatcgggtctttcacatttctttctcccgaagatttttcttttaacaacaactacaacagcgatttctcttggtttctggatatggaaactgggttcatcaggaacaccaagaagaggggtagaagagactttgaggaatctcttgttagcgaaaagagtgggtttggtgatatactttcctcgattttgatgttggatgaggaagcaaagcaagagcagtatcaatgggtgactaactctgatcaagattgtgctttctttccaagccaattacaagggaaatgttcaggaaatgaatgggtattttgaaaaccagttttctgaaatgaaccagttggataattccagtaacaaacgcgcccgcaaatctggttcacccgctgcggctgcgacggtttcagccgggtccgataatgtgggtccatcgcaatcgggtagcggatccggtcagcaaa

SEQ ID NO: 198434 - DNA, 809 bp, Gossypium hirsutum
  unsure (1)..(809): unsure at all n locations
atctattgggtaaatgcctgaggaaaaagaatccactgctcgaggtgacaaaactgggattgatggttataggaacatttgctgtcgtctggtggccatatcttcagtcgaaagatgctgctttggctgttctatctcgtcttgcaccatttgagagagggatatacgaggattatgtggctaatttttggtgcaccagttcagtgcttgtgaaatggaaaaagttatattctacacaatcattgaggatttttagccttgctgcaactcttataacatgtctgccctcaatggttcaacaaatccttgctccgagcagtaagggttttctctatgcgttgcttaatagttctttctcgttctacttgttctcatttcaagtgcatgagaaatctattctgcttccgcttctgcctcttaccctattagccctggaagaaagtcgcttgatattgtggttaacacacttcgctatgttctctatgtttcctcttctacaccgggacaaactggttctagcgtatatggctctttaccccctctttatccttgtgtattttggcacctgttgggcaagttggaaaatcccncggcaccagaactctcnttattccccngaagaccggaaaaattgaggatttctnttcttcnnttactttccacccgctggtantgggctttctgggttggttctctctaatcctgcatgttatttacctagccatgcatcctccgaataagtatcttttccttttcgaggcattgatcatgcttatctgcttctcccactttgtcttgtgtacttttat

SEQ ID NO: 198435 - DNA, 406 bp, Gossypium hirsutum
gtatcattcaaatcacgttggggggctgctgtttgtgcccagacacaacagagtgaaaaggctacactgtggttaacagatggggctccggaaccccgtgatgtttattggccaaatctggcaataccatttgtctctttgaccattcggaagctaattatatcattatcagtatttgccttggcttttttctacatgatacccatcgcatttgtgcaatctcttgcaaatttagagggtcttgaaagagttgctcccttccttaggccagttatagaactgaacttcatcaaaatctttcttgcaaggttttctttcccggccttgctcttaagatctttttgtatgttcttcctacaattttgatgatcatgtcaaaaattgagggacatattaccatattaac

SEQ ID NO: 198436 - DNA, 1065 bp, Gossypium hirsutum
cccacgcgtccgcccacgcgtccgcccacgcgtccgggacattataaggactccagcatgtccatctcgggctttgcctaggatattacgtggaggagatttctatgaggaacctgaagaagatgatgcacgagaatcaaaagaagtggcaaaggaaatcactaggcatatgcgtgaaaatcttatgggtcacaggagggatgaaacattactttcttctgtgttttccaatggttacaccggtgatgataggtcatgcaatagatctgaaaatgagtatcctgtggaaaacctcagtgattcagaagtcatgtcaccaacttctagacattcatgggattacatcaataggtttgctagcccttattcttccacacccttcagtcgcgtatcatgttctcctgagtcctcggtttgtagggaagcaaagaagcggctctcagagagatgggccatgatgacttcaaatggtagttctcaagaacaaagacatggcaggagaagctcaagcacattgggtgagatgcttgctctttcagatacaaagaaattggtgagatctgaagaagagggaagtagtaaggaacaagaatgtaggggatcaacttcctgtgtagctagtaatttgtatgaagaagaaagtacaagtgattctcccaaaaatattctgaggtcaaaatctgtgcctgggtcttccacaatgtatggtgtcaggcttaacaatgaaattccagatcctgaatctagcaaagaacaagttatgaagacaaagagcatgaaatcatctttaaaggggaaggtttcaattttatttttctcaaagaataagaaaacgaataaagaaaaatatagtggatctcaatctacagatgaatctccatctgtgactcctggaacaccagggtcacccataattcaccctcgggaagattagcaatgatgcatctcagtgtgttaatgacagttacatccaagagtgtttgtctcctgttgtaggtggatcagcaagtaaaactcctttaccagatctgattggcataagacagaagctaggcatgatcacta

SEQ ID NO: 198437 - DNA, 1021 bp, Gossypium hirsutum
caagcaggactttatacagaagcaatccaccttaacaaaatctgaaaacttttatctcacgtgctgatgatcgtagatggttcgtcgccactgcctttgaagaggagaagattcactagcattgattccatggaggctgaatcggccaaggccaagctcgctgctgcaaaagagaaatttggacgggaaattcgtgtttttgaaactgctagtctgcttccaacacaagatggagtgcccaacactgaggagccagatgacttctatgatttcaccgcggaagattattatcgactaatggcaagtaaaaaagaagataagcacttgaaaacaagaaaaatccgagaagcagaagaggctgctcgaagatcaagaataacaaaggctgttgtaaggattcgctttccagataaccacacattagagcttacatttcatccatccgagacacttcagagcttggttgaccttatttctaaattgattgctcgaccagatttgccattctacttatatactacgcctcctaagaagcaaataaaggacatgacacaggatttcttctctgccggtttcattcctggtgcaatcgtgtatttttcatatgatctgccaaaaggtgaggatgctgcagctgcaaattcaggcccctttcttcaggaagagatcatgtctttgaaaggtttggaagtcattgctggagctgagcagccagagtcacttcaatctgcccctgagcctgcttctgccagtgcagtgccatcccctgctgtgcacgagagcaagcctaccgagaaaaaaacctgccaagccaaagtggttcaaaatgtgagcttcggcacatgatctcaacattaatagatttcgagaagcggttaacttgattgtcagatcaaatgataaagtttgttcaatggcagtgactaacaggtgactctatgtgaaggatattaacacttctacaaagtttgatgtgaatattttgctctgttgaacttctttttttacagtttgataattg

SEQ ID NO: 198438 - DNA, 684 bp, Gossypium hirsutum
aaacgaaattcccaaggacgtggaagaagtgtttttaacaggagctacttccaagctcggcagagctattgccctttacctttgtcgaaggagagtacgcgttcttatgttgactttatcaaccgagaggtttcaaaaaatacaaagggaagcccctgcggattgccagaattacctcgtccaggtcaccaagtaccaggctgctcaaaattgtaagacatggatcgtgggtaagtggataacaccaaggcagcaaagttgggctccatcggggacacactttcatcaatttgtggtgccacctatcttggccttcagaagagactgcgacttacggtgatctggctgccatgagattgcctgatgatgttgaaggccttggaagttgtgagtacaccatggaaagaggagtagtgcacgcatgccatgcagggggcgtggttcatcagctagaaggctggacccatcacgaagttggggcaattgatgtcgatagaatcgatattgtctggaaagctgctctcaagcatggtttaaggccagtgtcaagcatgtaaaccagcaatgttccttgtcataaattgtcatgaaacaaacaagaagcaaacaaaacaaagcagagaaaatgaatttcgaattttaaatattaatgttaatggccattttttacgattatcaagatac

SEQ ID NO: 198439 - DNA, 401 bp, Gossypium hirsutum
tccgcctaatgccaaggacctttctaccatttgggtgttctacaaactgagcatgctaaatcgggttgcgatgccttgttaagacaggagttcatggaagggtcttttcttcagacagtggaagagccattgcctgggttgatcacaatcaacggaataaattacacggctaaaactcgcgggacattagcagattatcatcggttactcgttccaggagagagatatgaagctatggctactgtgcctgggtctaaatcaaaggccacacatatttggttggaaaaagacgaagccacaaatgtagactttattcttgatccagaagtctcttctgatggaactttacttcgtagtatttgtgattgtggcagaaaaagccggctcctttcaaagggtat

SEQ ID NO: 198440 - DNA, 800 bp, Gossypium hirsutum
ctcgaaattatttctttcttccaccactcgccgccgggagcgccgccactgtcctctggggccgccgacattcttttcctctttctctcgccgtttcgctacgcccttttttcaactgaagccgctatcgctgccgtcctatcaattggttttcctttccattaaattagatggcagattcaagcgagccccaggatcccggaaaggaacttcggcaatctgaaacagaacctcaacaatctgaacaagtctgcaacttctttaggaagccaacgaagggcaaaaacataaggaaaaggacaataaatgaggatgaagatgaagactccagaaatggcacatctttgttgcacaatcaaaaaaaggcttcgaagcctgacaataagttgtacttttcaactggatcctccaagagtgctactgccactgaatcaagtactgaatctcacaagccggtttttcaatttgagtcttccaaggaaattcaagtccaaaatgatagcggagctacagcaatcttagaaactgagactgagtttacgaaagatgctcgagctatacgtgagaaagttcttaagcgagcagaggaggctttgaaggggaaaagcacaagctctgggggagaaaaattgtacactggaatgcatggctatgtggatcataaagctggatttcgaagagaacaaaccgttgccagtgagaaagcaggtggctctcatggacctcttagagcttctgcccacatcagggtttcagcaagatttgattatcaacccgacatctgtaaagactacaaagac

SEQ ID NO: 198441 - DNA, 680 bp, Gossypium hirsutum
tggaccacagccttccgatgaatcttcctttaatagttctctacttttattgaaaatcaagcgtttgttttggagatggatccaaccctcgattccaagcttatttcgaatgaagctgttgatatgaaaatcatgaagaaattaggtgatgatgatcggcggcaaggcttgaccaaggcgaaaaagcggtcgtatgctttggtgtcgtacaaggagttgccggactatatgaaggacaatgagttcatactgaattattatagggctaattggtctctcaaggaagctctttttagcgtctttcgttggcataatgaaacacttaatgtttggacgcatttacttgggtttcttctatttttgggattaaccatggcgaacttgttggaactcccacaagttgcggatctcattacattcttaaccaggtcttttctcattaatggccacaccaatgtttcttatgattctgaagaccttttcctgggaataacaaatctcgtcaatttgaggcaaataactaccccggaatcagacgttacacttccggtgacacccgttacacggtggccgttttacgtattcttaggcggctccttgttctgcctcctatccagcaccgtttgccatctcttttcttgtcattcacaccatctaaactttacattgctgcgactccc

SEQ ID NO: 198442 - DNA, 528 bp, Gossypium hirsutum
cccacgcgtccgcccacgcgtccgcttttctcttcactccacatctcatattccttcatttctttctaaatacttccatttttttgattttttttaagtgaaggaacagtgaaaagcaacaggaaatggcaaatatagatatcgatgggatcttgaaggagcttcccaatgatgggcgtatccctaaaaccaagatcgtttgtactttgggtccggcttcacggtccgtacctatgatagagaagctgttgagggctgggatgaacgttgctcgcttcaatttctctcatggcagtcatgagtatcatcaagagaccttggataatcttaggtctgctatgcacaacaccggcatcctttgcgcggtcatgcttgacaccaagggccctgagattcgaactggattcctgaaggatggaaaagctgttcagctgaaggaaggccaggaaattactgttacaacccattacgaaattaagggggatgagaagatgatctgcatgagcctcaaaaagctggctgttgatc

SEQ ID NO: 198443 - DNA, 372 bp, Gossypium hirsutum
tttaaacccaagaaaacattcaaattaatcctccgacaactgtccattaatggcgtaccttctataaatcccaacacctcgccgccgtgctcctcttattcttcatcttcaccacctctacatcgccatcttccgccaggctcttgagcgactcgccgccgtccaccacggagacaaccttggaccttgctttagccgatctcgtcgaagtcgaagaccacaaaaccgacgtcgttctcgacgtatcgaaacaagaccctgagcctcaacctcagccatgtgatattcatatggttcccatgaagaaaccccacgtcggaatccttaagtctccgactcaaagactcgcaagaaaatatggtccgatgatct

SEQ ID NO: 198444 - DNA, 410 bp, Gossypium hirsutum
cctccttctaaaacccattaatggcggcctccaacaaaacccacaattctcacctcatcacatccgtcttcttcttcttcatcttgttaactaattcatcactttcttcggctaggcttctttcagctgcacaacccaccttgaaccttgctcttccttccgacaaaccccatcaggctctgccatgtgaccatatggttccattcaagaacttccatgtcggggttatgaggaggtctccatctcaaaaagctgccggcatgtatggaccctcgttcctctccatgcttcccaagggcggacatgtaccgtcgtctggacctagcagaggaagcaacgacatcaagacctagtttaaccatggcagatcgattcaaaatcaaagcttcggtgtcccacatgctctctct

SEQ ID NO: 198445 - DNA, 702 bp, Gossypium hirsutum
  unsure (1)..(702): unsure at all n locations
cccacgcgtccgcccattctcttctcttaatcctttcctccatttttttccaactgaaaaaaagggtctctctttgttttcttatacagagattgcttgtaagggcttcttgctgatgtgcagtggttcaaagagtgaacttgttccttcaaatttcaccatggaaggtgaattacaaggatgtaaacccgatgctctatctaaatgctcggttttgcttgaattagccgcctctgatgatttggtagccttcaaaactgaagtagaagaaaagggtttggatcttggtgaggcaagctactggtatggtagaagaatagggtccaaaaagatggggttcgaagagaggatgcctttgatgatcgctgccatgttcggtagtatcgatgttttgaactacatcgttggtaccagaaaaattgatgtgaatagagcttgtggtgctgatggcgttactgctgttcattgtgccgttgccggtggtgcgagttcttcggttcaggtcattaagctcttgcttgatgcatctgcagatgcttattgtgttgatgctaatgggaacaaactcgtatgatctgattcttctttgttttaaggtgtttgatttattttcatatttatggnnnnnnnnnnnnnnnnnnnnnnnnnnnnnnnnnnnnnnnnnnnnnnnnnnnnnnnnnnnnnnnnnnnnnnnnnnnnnnn

SEQ ID NO: 198446 - DNA, 766 bp, Gossypium hirsutum
gcatcaaatgatgagcagggcagaacgagtcctcctggcagtggaagaatgtatgttaggagggcgcaggatgttgtttctagcatgttggcgaaaggttctgccatacgacaatatgcagttaacaaagctaaggcttttgatgagaaacatcaattgagagccagtgcatctgccaaggtcatgtcgtttgaccggagagtcgggctgactgagaaactgactgtaggaatctcagtggttaatgagaaagtaaaatcagtggatcaaaggttgcaggtgtcggataaaacaatggctgcaatatttgcagcagagaggaaaataaatgacacgggatcagccgtcaaatctagcaggtacgtaactgctgggacagcttggttaaatggtgcgttcagcaaagttgcaaaggctgggcaggttgccggaacaaaaaccaaagaaaagttcaacctagccatgtcaaacttgacagccaaggatggaattgcagtgtaagttggaaatttatggtgttaaggtcgcatcgcatcggatcgccttgttataatgtttcatcgggtggagattcttgtgatagagtgcacaaagttgtgttcagttttgggtattgtggtgtatttgatttgaggttttgtttacaatattattctttgattagtagagggtattgcgttgtaattttcaagccttttagatttggttttcagctcaggaaaaggaaaaagaagctgtaattcatgttagcattctgcacgctcac

SEQ ID NO: 198447 - DNA, 549 bp, Gossypium hirsutum
  unsure (1)..(549): unsure at all n locations
tgctatcagaaaggtttttgagtgtctgtcgaatatagaaaggattgaaggcggtataggttggatattgtcaacatacattaccatatctgagatacagtcttttctagtctctggaggcttgaatgctaatgattttgatgctttcatctgcaatagcggtatgtgatctcttctattcaactattaaccctgtagatggtccctttgtaatgcgacttctattttcactcacacatcgagcaccgctggggtggtgaagggtagataaagacttagccacggtgacctgtatcggtttccgttcggactggactacatggggagtgtatggggagacaagcatgatcattctggacttaatcagctggaacttaagtagttggttgaatccaaatgaggtttatcaaagtggagtgacggatggccaattcaaattgtgtaatgcttggagtatatgcttattggattgccgtactccattagaagattcactaagttgnggtctgtgattattcagagggggatatgcacctcttaatggatgac

SEQ ID NO: 198448 - DNA, 646 bp, Gossypium hirsutum
cggccgcgtcgacatgggcggcggcggtccgggttcgttggccccaccgaacggagacgtcgggttggacggcatgatcagtgtgatcgcccacgagttagccgagctctccacaaacccactggtgaacgcatggtacgccggagaggaccccaccgcaccgacggagataggagacctctgtgaagggttgtacggtaccggcggcggcggagggtacatcggtcaagtcatgagagaccagaaagggaaaacgtataacatgaacggcaacaaaggaaggaaattcatggtgcaatggatttggagccctgttttgaaagcttgtgctggtcccaatgctttggattaaatttaatattatttttctgggttttttttccattgaaatcatcagattcatttccatggaatcttgatttttgcatgtcaatttagggtttgagatagttatatgtattgtagagtcgtataaacaggtcgatgataaagtgcaaatttaatgctttgggttttagaagaatcctggtaaaaaaaatgcaaaacagtgcatagtctgagctttacagtgagtgtgttcccttttcactctctttgctttcaattatgcttgttaaagtgttatgacacttgccactttcagttt

SEQ ID NO: 198449 - DNA, 589 bp, Gossypium hirsutum
  unsure (1)..(589): unsure at all n locations
tgggagtaggtcaacgacaacaagcgctttcttcttcctctgcctttactcttcggtttatctcactgcttcaacaactcctctcttccccaaagacgccctccccaccaaatctggctaccttcctgtcaaccacgccactggttctgctattttttatgccttctatgaagctcaaacccccacttcccctctctccaaaaccccacttctcatttggctccaaggtggccctggatgctcctccatgattggcaacttgtttgagctcggaccatggcgtgttgtctcttctcacatgaaaaacgctcataatttgactcttgagcgcaatccaggttcttggaaccgcttatttggtcttctttttctcgataatcctattggaacaaggtttagcattgcatcgacgccgcaagaaattcccagagaccaatnttctgttgccaagcatttgtttgctgctatcactggttntacctcattaaaaccggtgttaaggatcgtcctatttatattactggtgagagttatgcangaaagtatgttcctgcaatcgggtactatantttgaaaataatcccaatgn

SEQ ID NO: 198450 - DNA, 418 bp, Gossypium hirsutum
  unsure (1)..(418): unsure at all n locations
aaacaccataaatatttgcctttcctctatccgggaaaaaatgccgccggtctgccggagtgaaggcgccactgctcccagggagcaccaaatcggcaccagcaaagcctccatcggtttctggcgcggtgtttaatgtgtccacaagcatcatcggagctggaataatgtcaatccctgcaacactcaaggtgttaggggtacgtccagcatttgtgatgattggggttatagcttgcttagcgggtatatcaggtgaatttttgatgagatacacacatgctggggacacaactacgtatgctggtgttatgagggaatcatttgggagggttggatccatccttgtccaaatatgtgtgatgatcactaatctnggctgcctcatcatttttttgattattataggtgatgttct

SEQ ID NO: 198451 - DNA, 424 bp, Gossypium hirsutum
tcagagttcactaagagattcatatcaagaacataatagaaagcaagcgaggtttgaatgatgttgacactgttctttcgaaaactactaaagggactctgggtcacagcatccagaggaccagctctcaaccaggaagattttgatgaagaactggaagcggcttcaccaacagtgccagatgatgttaaggaaggatattttacagtctttgcagtgaaggggaaggaagcgcagaggtatgttattgaactagacaacttaacaaaccctggattcctgagtctactggagctggctcgggaagaatacggattccaacaaaagggcgttctttgtcttccttgtagacctcaagaattacaggatattctacaactctggaaactagcctagaaagccaattggacaaataagttatttc

SEQ ID NO: 198452 - DNA, 525 bp, Gossypium hirsutum
caaaaggaaggatcatatcatcatcctccaccttttatcaaagcccaaaatcacccatttttaaaacgttttctcaactcttccaccctttacatcaaattcaactcatccttcaaagaaatttccttcctttttctttcctttctatacaagttagttcaagcttcaatcccaatctttgtttttttcttttttctatccttttctgtttacggggtataaataaagggtgcaaaaatcttgattttatttccctcttccgagaaacactaattttactgtttcgatctgtggaaagttttcagtttttctttttcaggagaatatggccatctgggttatcgggtcggggcaactcgagtggttccaaagggttcgattttgggtccgatgatattctttgctcgtatgaggactactggaaccaggaatcgtcaaatggtagccacgccgaagctgcactcggtaccagtaccaccagtcttttcacggattttcacaaaggcagagtggcacggtcaatat

SEQ ID NO: 198453 - DNA, 428 bp, Gossypium hirsutum
ccacgcgtccgttatattcaattttttcagcttcttccctaaaccacccaaagcttttgatcgcagctttggtggaaaacagacttctttttatatataaaaatgagacgaaactgcaacttggaacttcgtcttcttccttctagttatcccagcgacagtcacgacatgatggaagcaagaattgaaagcccagaaacccagcagcaacagctaacaattttctacaatggaagagtttgcgtatctgatgttacagagcttcaggcaaaagccattctaatattagcaaaccgggaaagagatgaaagaatgaaaagtccgacgggatgtgaaccggtgtcgccgacgttaaaatcccaggtgaatagcccaaacacatcactttccatgaagagatcgcttcaacggttcctccagaaacgaaa

SEQ ID NO: 198454 - DNA, 725 bp, Gossypium hirsutum
  unsure (1)..(725): unsure at all n locations
cccacgcgtccgctaagacaaagtttcaagtcattcacatgctttgtttaatttttgtctgaacatcaaatatttttcccaggttttcttcaatctgcatgcgaaaaagaaacatggggttctctaaactgtttgttataattcttgggttgctcttagctctcaccctggatcagtgcactgctcaagaattcagatgtagctccccgagttcatgccgtgcacttgtcgggtacatcaccgtcaacaacaccaaccttggcgctatccaatcgcttttcaacgtcacgagcttccagagtctcctcggagccaacgacttgcctctttccactccgcgcaaccgcaccatagctgcacgacatctcatcagagtccccatcaattgtgcttgttacaacggaaccgggacttccagcggcggtcccacatacacgattcaaccaggggacgggctttaccacatagcggccgaggtgttctcgcaattagtgctgttcccgcaaattgcagctgccaacaacatttcgaatccagatntgatagctgctggggacactctgcaaatcccgttgccgtgtagctgcgatgacattgacggtcagaaagtggtgcattacgcacacgttgtggaaccctacagtactttgcagagaangctcaggagtttggaaccaatgaagcaactttacttcgattaatgtatcacggccagatcaggtaaa

SEQ ID NO: 198455 - DNA, 622 bp, Gossypium hirsutum
  unsure (1)..(622): unsure at all n locations
agggaaaaaagttctctcttctaaagccggcctctcttgtttccctttcatcaacaataaataagaaaattcaaaggttgctttgaaccgaattgatatattgaaagggttcagggggctgatattaatgttaatagttcttttttttttctagctttctagtaatttattgttcataaattttttttttcaaaagccaggcttgtgaaatattagtaattaaaaagtttatatttgggtggaaattcgtcatgggtggttttggttgattcccaaaaggaagggtttggatcttcatggggtggtttaaagagtttggtaagaagaaaacaagtagattccgctcattccaagcgttctggtcatcatcagttggctaaagagttgacagttccacatctcatagcaattggtgtgggatcaacaattggactggagtttatattcttgtggaacagttgcgaagagcattcagggccactttgccattttctttctatagctggaattgctgtgcactctctgcttntgctatgccaacttgctatccttgcccgtctgaggccatgcccatcattatcatacattgtggtggtgaaagggtacccggttgaatggtggt

SEQ ID NO: 198456 - DNA, 652 bp, Gossypium hirsutum
ttttcctttttgtacagagagaaaaaaagtttggtctcttttttaaaaccggcctctcttgattccctttcatcaacaataaataagaaaattcaaaggtttctttgaaccaaatttatatattgaaagggttcagggggctgatattaatgttaatagttctttttttttctagctttctagaaatttattgttcataaatttgtttttttttcaaaagccaggtttgtgaaatactattaattaaaaagtttatatttgggggaaatttgataaagttggttggaaattcttcatgggtgttttggttgattcccaaaaggaagggtttggatcttcatggggtggtttaaagagtttggtaagaaaaaaacaagtagattctgctcattccaagcgttctggtcatcatcagttggctaaagagttgacagttccacatctcatagcaattggtgttggatcaacaattggagctggagtttatattcttgttggaacagttgcgagagagcattcagggccagctcttgccatttcctttctaatagctggaattgctgctgcactctctgctttttgctatgccgagcttgctattcgttgcccgtctgctggcagtgcctatcattattcatacatttgtgttggc

SEQ ID NO: 198457 - DNA, 1127 bp, Gossypium hirsutum
attaaaagtcagaatgagaaagacaaacttgctgaggcaaagagattggtgtacttgagaggttttacagagggaactatgattgttggagaatatgctggaagaagagtccaggaagctaagccgctgttgaggaccaaactgattgagacgggccaggcaataatttatagtgagcctgagaagaaggtcatgtcaaggtctggtgatgagtgtgttgtggctcttacagatcaatggtacatcacatacggggaaccagaatggaaaaaattgtctgaggagtgcttatccaacatgaatctatactctgatgagacacgtcatggctttgaacatacgttaggatggctgaaccaatgggcttgctcacgatcctttggccttgggactcgcattccttgggatgaagaattccttgttgagtcattatctgactcaaccatttacatggcttattacacagttgctcatcttttacaaaatggggacatgtatggaaaaagttctgatctggttcaacctgcccagatgacagatgaggtatgggaatttctcttctgtggtggtccctatcccaaatcttcaaatatcccagctgctactcttaataagatgaagcaggaatttgaatactggtaccctttcgatctacgagtgtctggaaaggaccttatccaaaaccatttgacattttgtatctacaaccacacagcaatcatgtccaaagatcactggcctcgtggattcaggtgcaatggacatattatgctcagattcagagaagatgtccaagtctactggaaatttcaggacattgcgccaggcaattgaggaattctctgctgatgctactagattctctctagctgatgctggggatggcgtggatgatgcaaactttgtgtttgagacggccaatactgcaattttgcgccttacaaaagagattgcatggatggaagagattctggctgcggaatcgtcgttgaggacaggtcccccatctacctatgctgatcgggtttttgaaaatgagataaacatcgctgtcaagatgactgagaagaattatcgagattatatgtttcgagaggctctcaaaactggcttttatgatcttcaat

SEQ ID NO: 198458 - DNA, 586 bp, Gossypium hirsutum
gtgaaaaaccggccggaccaacccgtccggaaagtcctcagtggaaaaaaaaattctctcacacacgcacacacacttccaatgagcccatgtccttccctattgcatgcctttcaatttgatttcatggatgtaacaagcacaccaaatagaaaagatatggttcggatcaaaggtccatggagccccgaagaagatgacttgctccagcagctggtacagaaacatggccccagaaactggtctttgatcagcaaatcaatccccggccgatccggtaaatcctgtcggctccgatggtgcaatcaactgtcaccgcaagttgagcaccgtgccttcaccccggaagaagacgagaccatcatccgagcacatgccaggttcggtaacaagtgggccaccatagcccgactcctcaacggccgtaccgacaacgccattaaaaaccactggaactccacgctaaaacgtaagtgcttgccggttggggaagagtgtaatttcgttgctaatggagggtatgatggtaatctgggaggagaggaacggcaaccgttgaaaagatcggtgagtgctggtctatacc

SEQ ID NO: 198459 - DNA, 437 bp, Gossypium hirsutum
ggaatggcccggggcgaccccacgccgtccgattacccccctcctacttgcaatttctctagcaaatacactatcaagagagagagaaaagagagatattttgtgagtaaaaaaaaaaaaggaaggactaaagttggatggttgtagggttttgcacgtaaaagttcgtgtttaatcatcataatgactagcattatgggcacggaggatgataagtttagcacgattaacttcgaagagacggagttgcgtttagggttgcccggcgccaatggaaacgacggtgaaactaccaaaaacaacggaaaacgagggttctcagagaccgttaatttgaagcttaacctttcatcaaaggagactgtagccgaggattccgataagatgaaggagaagagctcaactgacactgcaaagccacctgccaaggcacaagt

SEQ ID NO: 198460 - DNA, 514 bp, Gossypium hirsutum
cttccgagaacggtcacaaataatcattcaggcaaaagctccattccttttctccaaatggcaacgtttttttaatattaagcactagtttttaaccctttagaagaaagctttcaaatattattcaattgcttgtgcaaactaacaaaagccaaccaataacaaaaagaggaagaaaaccccagctgataaacataaaggagagctgttgtagcggacacctacttcacccagcaatagcagaagcaaggcatattttggccttttaattgattctttatcttggaacttgatgctgaagagaatttagtcaggcaagttagaggtttttgcagaaattttattttctatggattggttgtgctgctttaattcctctcagcatggaggggggcgttcatcatctacttctggcaaggggaaaagccatgagggtataatgcggtttggattcagcctagtaaaagggaaaggaagttatcctatggaggattattatgtcgcttagttcatg

SEQ ID NO: 198461 - DNA, 703 bp, Gossypium hirsutum
  unsure (1)..(703): unsure at all n locations
attctatatatgttctatttttttttctcattctctttgaaaaccacttcatatttagcaggatgataagaactcaaaacataaactaacttacaacaacaaaattccccaacttaggtatatttaaaaaaaaatcatgggaagaggtagggttcaattaaaaaggattgaaaacaagatcaacagacaagttactttttccaaaagaagagctggtttattgaaaaaagctcatgagatctctgttctttgtgatgctgaagttgctttaattgtcttttcccataaaggcaaactctttgagtactccactgattcctgtatggaaaagatacttgaacgctatgaaaggtattcctatgctgaaagacagcttgttgctactgaatctcaacctcagggcaactggtccatggagtataatagacttaaggcaaaggttgacctcttgcagaaaaatcacaggcactatatgggagaagatttggactcactgagtctcaaagagctacangaatttggaacaacagctngatactgctattaaacacattcgatctaaaaaaaaccatctcatctncgagtcaatctctgagcttcagagaaaggagaagggcatacangagcanaacgccatgctagcaaagcagatcaaggatagggagaaaacgtggcgcangcacagcagtcgcagtgggggcag

SEQ ID NO: 198462 - DNA, 755 bp, Gossypium hirsutum
  unsure (1)..(755): unsure at all n locations
ctcttcctcccttttctttcttatgctcttcccaatcgctttgtctcttttttggtctcggctaaattaaaatataattccataacatgaccaatcacaactactggatggttccttccttttgattttctttcttttacaattttccaactggacatagcaaaaaacagagagatctatagtttcactgaacttgcagcagatggcatcatcatcatcggaaaacttggccaacattgaatcgtgggcgtttcgtcccagctttgctgattcttggctctccgaagccgaagctcttaccagagcactccaagactccatctctacttccttctctaactctgattcgcattctctttccccgctcttcagccttgtcaactctaaccccttaccgacgcctactcctacccccagcgggtcaaacatttcaggctctgaccctgaaaccactgttaaacgtcagcggacactactcaagccccttcctactggaaaagtctcaaagtctaaacgcaagtcccgtgcctccaagttctctcaaaccactttcataaaggcggatccggccaatttcaggcagatggtgcaacaggtaactggagtccgcttttgtaacgcgcaaatgtctttgagtccgatcctgaagcccgagcctcaaagaaccggatgcctgcctacgctcgacacatcagcctatttgttggatcagcatcagccatcttcaggagctgtttccgggtccagcttanttc

SEQ ID NO: 198463 - DNA, 584 bp, Gossypium hirsutum
ggaaaacccgggcggataagtaaccaccaacgcttggcggatcaaaatcaaccgttccgaccgcttttttttttttctttgtgtttggggatgtttttccacgattttgcggtcagtggtgaaaggggggaattgggtgttcggacggtggaggaacaaggatgccgtctcagggagatctggatcgtcagatcgagcacctgatggagtgtaagccgctgtctgaggcggaggtgaaggcgttatgcgagcaggcacgagcaatactagtggaggaatggaacgtacagcctgtgaagtgtccggtaacggtatgtggagatattcatggacagttttacgatctaatagagctgtttccgatacgagggaatgcgcctgatacaaattatctcttcatgggagattatgtagatcgtgggtactactcagttgagactgtcacactcttggtggcactaaaagtccgttatagagatagaatcaccatccttagaggaaatcacgagagccgtccgattaccccagtgtatggtttttatgatgaatgcttgagaacatacggaaatgctaatgtatggaac

SEQ ID NO: 198464 - DNA, 691 bp, Gossypium hirsutum
gctagggtttactgagccactctcacattactttttgtgtgttctcttgtctccccaatttcttaccttcctaacatcaaccttagatcttttcctttttcctcattaattcgcttacatggcttcaaccttatcttaggggttctcttgattgctgtttcttttttaagttagaaaaaaaaagaaaaaaagctgaagttttcagtgtcatctcttaaacgttaacaatggcaaccaagaaccctttcgatctcttggatgatgatactgaagacccaagtttgcttattgctgctgttgagcagcaaaagcttgaaaagcctaagaaagctcctgcttcgactccagctgcggctcagcctgctaagtctgccaagcttcccaccaagccactacctccttctcaagctgtgagagaggctaaaaatgagcttggacgtggaggtggccgtggtactggaacaagccgtggccgtggaagcagtgggttcaaccgtgattccacagtcggcgataactccaatgggtattcaggagggtacagaccctctgaagaaggagatgggaagccgtatgaaaggcccggcggctatgatgggcctcgacgttctttcccatggggtcgccctggtgggttttacaatggagaatctggagaaagggaaccccctctcaggccatatgatctcct

SEQ ID NO: 198465 - DNA, 731 bp, Gossypium hirsutum
cggtccgaaaagagcttttaaaaaccagacccaaacaaaccaaaccaaagggggggactgctatgggctggttttctgatccatgttcatcttctccttctcggtttctcagcttttcttgtaaggatcacctcaacactttccggctgcttgcgtcagcttcccggcaaaccatttactcctgaggttttttttacatcatctatgcaaaacttagagctacataaaggaaacagtatctatttttgtgatagtgggtattgaattgtagagagaatgagtcaattttcctccatgttcaatggattagcaaggtcattttctataagaagagggaaaaatccagggaatggtgatggaagagaagctgcagaggtcatggcaaaggatggcaagaaaaatgacctgattttaaggtcgtctggttttgtaaacattgatggttccaacaactttgcctcggttttctccaaaaggggcagaaaaggagtgaatcaggattgtactattgtatgggaggaatttggatgtcaagcagacatgctgttttgcggcatcttcgatggtcacggtccgtggggtcattttgttgcgaaaaaggtccgagaatcgatgccgtcgtccttgctttgtaattggcaagagactctagcttaggcatcactcgacccgtagttcgatttggaattatataaaaagccttacaggtttcatatatggaagcattctta

SEQ ID NO: 198466 - DNA, 659 bp, Gossypium hirsutum
  unsure (1)..(659): unsure at all n locations
ggcattggcacgatatgcagatcttttaaaccctccacggaaggctgctttgattgccttggctgctcttgccactgaacccagtgaagcaggagggcttaagttcttatcgtcaccacaggggaaggatgagtactcacaatgggttgttgcaagtcagagaagtcttcttgaggttatggctgagttcccatcagcaaaacctcctcttggtgtattttttgctgcagtagctcctcgtttacagcctcgttattattctatctcatcctcccctaggtttgtacctgccagggttcatgtaacctgcgctttagtttatggtccaactccaacggggtggattcaccggggtgtgtgctcaacatggatgaagaatgcagttcctttaaagaaaagcaatgattgtagctgggctcctatttttattcggcaatccaattttaagctaccagcagatccttcagttccaatcatcatggttggacctgggactggattggcacctttcaaaagttttctacangaaagattggtcctcanaaaaaatggtgcagaacttggctcttctctactcttttttggatgtaggaatcngcgaatggatttcatttatgaagatgagctcnataactttgtggaacaaggtgccctttctc

SEQ ID NO: 198467 - DNA, 550 bp, Gossypium hirsutum
gtgatactaaacatttcctttcttggttacttgccaaaaaccccactctaataagactctctagcttttgaggacagacatggaagtggctgttgagcttgaagatgatctgttttttgcagactggagcaagcaaatctctttgctaatcatggatgatgaagacccagtttcaacatgtccttcagtttccttccagacattttctgcagcaaattatccaataacacaatctccatatctccaagaacaaatctgcagaagagaaagcaaaggcactggagtttttatcccaaaggcatcacatcctagaaggaagcataggcaaggcagatatagttcattcaacaggaagtctaacaggcaccatgataacactacaaaaatggcttctcagccatcttatgataattctttttacccaaggaaaggctaaggattcacatcttcatcaagtgtatgacttaataaaaggaaaatcactactaaaccccttgtcaacagctgctcaaggcaagacaaggcaaggcaggtttaaggatcttataat

SEQ ID NO: 198468 - DNA, 492 bp, Gossypium hirsutum
cccacgcgtccgaatttctcttttcttttcaaattatcattcaccatctttctcgtcggttttgagatctcaagctgatttattacgttttaatataggttgagatggcttcgaccactctaatctgcgatacccagccatggaaggacttgaaggctcatactgaggatatcaagaaaactcatcttcgtgatttgatgaacgacaaagaacgatgcgaatcgatgatggttgagtttgatggaatgtttttggactactcaaggcattgcgccactcttgagaccatggataagctctattaaattagcagaggctgcttctctcaaacaacaaattaaccgaatgtatagtggcgagcatataaatagcacagaaaataggtcagtgcttcatgtagctcttcgagcaccaagggatgctgttataaacagtgatggaaagaatgtggtgccagatgtttggaatgttttggataagatcaaggatttt

SEQ ID NO: 198469 - DNA, 497 bp, Gossypium hirsutum
tttattttaaaaaaagaaaaacaatagaagagatgctatataatatgttttggcccatttccgtcctgcagttcatttcaagcactcacatcacaggttaggtttggcgccagcttctctcctcgcagggtgttggtttacacttctgtagtagcaagaaaagagcaagtccaatatgaagtttaaggcatttctcaccgaacatggggtgaatctcttagaaaggcggtttctacctgccttggacaaaatgggcaagatatgccacttatttctcacccgagaccatgctatcttccttcacaaccttctcaatggcgatggggttcagtgcattgcacagtttcgaaaggaagctctctttgatgactatcgcatctcaagtcagaatgaggaccgcattgcttttgcaattgatgtatcccttctgcttcgtgctgttcggagtagtgtaagcatatgtactgaatttggtaatggaccttctgccaaccgcc

SEQ ID NO: 198470 - DNA, 445 bp, Gossypium hirsutum
cccacgcgtccgcggacgcgtgggttccattcttcacttcgccaaagaacccaggatgaggaaacgtttacttaccattcttctggcagcgattatttccgccggagcaacggcggtaaaggctcaaaactgtggttgtgcagaaggtttatgttgtagccgttgggggtattgcggaaccggcgatgattattgcggcacagggtgtcaacagggtccttgtaatccgccgccagctctgaacaatgttttggtggcggatattgttacaccggagttctttaatgggatattggatgttgcagaagacagttgtgaagggaagaatttttacacgagatcggcgtttcttgaagcattgggtccttatcctcagttcggaaggattgggactgttgatgattctaatcgggaaattgcagctttctttgcgcatagtcacgca

SEQ ID NO: 198471 - DNA, 574 bp, Gossypium hirsutum
gtttctctgtttctcgagtgttttctggatgacttctgccagtgtggttttgattggtaacaacgttaccctctctttcgatgatattgaagctaattttgctccggcaatcaaagggtcaggggaatgcggagtattatatttggcaaatcctcttgatgcctgttcagacttgagtattaaagttgatgaactttcaaatggttcgtccccatttgcattggttattagaggagggtgtagttttgaagagaaagtaaggagagtgcaaaaggcaggatttgaagccgctattgtctatgacaatgatgatgatggtgtcttggttgcaatggcagggaatgcagctggcattaagatacatgctgtctttgtttccaaagcttctggtgaaatactcaaaaagtttgctgggtctactgatatggaactgtggctaatccctagctttgaaaactcagcatggtcgatcatggccatctcctttatttctctacttgccatgtcagcagtgctggcaacttgtttctttgtacgcagacatcgcattaggcgaagaactccacagtcctct

SEQ ID NO: 198472 - DNA, 524 bp, Gossypium hirsutum
tcgggtttggaattcattattggaagcctttatgaccgttgtgaatgccccttgtggggcggttggagttactgctttgcattctgctgttgctggtggttcggattcttcggttgagattgtcaagttgttgcttgatgcatctgctgatgctaatcgtgttgatgctaatgggagcaagcccatcgatctggttgtgccggctttaaaatccttgagtagttccaaaagaaaggtgatcgagttgttgctgaaaggtgttagtggctgtgttcttaacgagaaggctgaatctgaaaagacggtgttgcctcagttgttcaaagaagggtctgagaagaaagagtatcctattgatgtatcgttgcctgatatcaacaatggtatctatggaactgatgatttcaggatgtatacctttaaggtgaagccttgctcaagggcatactcccatgattggaccgagtgtccttttgttcatcccggtgagaatgcgaggaggagggacccaaggaagtaccctt

SEQ ID NO: 198473 - DNA, 619 bp, Gossypium hirsutum
tctacgcgtccgcatggatggcgatggacatggaagtcatacagcagctattgccgctgggaataatggtattcctgttagattgcatgggcatgaatttggaaaagcaagtggaatggctccttgtgccaggattgctgtctacaaggcaatatacaggctttttggagggtttgtcgcagatgtggtagctgcaattgaccaggctgttcatgatggtgtggatattctcagtctctctgtgggaccaaatagtcctccaacaaacacgaagaccacatttttaaatccttttgatgctacacttcttgcagctgtcaaagctggtgtttttgtagcacaggcagctggaaatggaggtcctttccctaaaactttggtttcttatagcccgtggatagcatctgttgcagctgcaattgatgatcgtagatacaaaaaccatctgaacttgggaaatggaaaagctttagctggacttggattgtccccttctactcattcaaatcaaacctacaccatggttgctgcttatagatgtgctactagattccttagcgacaaagtttagtccctcggactgccaaaggccagaagttttaaacaagaaatttggtga

SEQ ID NO: 198474 - DNA, 818 bp, Gossypium hirsutum
  unsure (1)..(818): unsure at all n locations
aagtgaaaggcataaggggaaaacaatggggtgtacattttcagggtttaatgcaatgtacgatgctgctaatgggggaggagacgtttggatcaatgacatcaggttcaagatcgtgaggcagttgggtgaaggtggcttcgcctatgtttatctggttaaggaagtcacctccgattcttcttcaatttcagctggtggcttagccaagaaagtcaaggacccttctcatctttccgatgatggaacttatgcaatgaagaaagttctcgttcagaataatgagcagttggaattggttcgggaggagatccgtgtttcatccttgtttagtcaccctaatctgcttccccttcttgatcatgctatcattgccgttaagcctacacaagaaggatcatggaatcacgaagcatatttgctatttcccgttcatttggatggaacattactggacagttccaatgctatgagtgctaaaaatgaattcttttctacctcggatgttcttcaaatatttcggcagctgtgtgccggacttgaacatatgcacagtcttgagcctccatatgcccataatgatgtcaaccctggaaatgttattttaacccgaagaaaagggcaagcaccacttgctatattgatggatttcggtagtgctcgtcctgcaaggaaacaaatccgctctcgttctgaggcactccancttcaggaatgggcatctgagcattgttcagcacctttccgagctcctgagttgtgggattgcccaagcgatgctgatattgatgagagaactgatatttggtcgttgggat

SEQ ID NO: 198475 - DNA, 673 bp, Gossypium hirsutum
  unsure (1)..(673): unsure at all n locations
tggattttcattttatcctaacgctttcattcattgctttcacactaatggtgtttcagtacaaagctcgaacaagaaggcttcctcctggtccatggaagctccctattataggcaacctacaccaactcggtgactcatcccataaatccattcaaagactctcccaacaatatgggccgatgatgtttctgcaactcggtgccgttccaacactggttatctcttccgcagatgctgcacatggcgatcttcaaaggccccggcggcggcccatgatcttgccttctctggtcgacctactaatttatacgttgcgaagaagctaagttatgaatataacggtttacctttcgctccttatggggaattattgggggaaatggggaaatatcgataccgacatttttgattaaaaaaggcccaatcgttttgactcttgaaaaaaagaagttccgcaatgttggaactattgtattacttcccggtattaagccctgtaaatctaaaaactatacttntgtagcgaccacgtgtatgnccgtncattggtaaaaatacggtgcgaagtgacggggtcgacagatccacaggtgtgctgaagtcagcattggtggagaatgtgngtcgatacttcccggatgngtggtgatagtgatttatgaaacagatt

SEQ ID NO: 198476 - DNA, 419 bp, Gossypium hirsutum
ctgaacagtactcttctttgcttgcttaaatacttgaacaaaattcatttaaagaaccaaaaatatggggaagaagatgctgaattttgaagaacagtgtaagatagtcaacttattgaaatcttcatctgagcagaaatcaatcgaagagacgctcactgaattcttcaccaatcccaagctccggcatttcaatgtctgctattctctttcactcttattgcaggacaaaatgatgctcagttctactgaacgattggttgcatttgctattcttcatcgaagctattcctctcaaaagtctgctgcaaacccatttatatcttttcttgtaaatgctgcatgtgatgagggagctgaaaattatgaaagggcatttatcctccatttgctaggctttggcaactccaaaagcaata

SEQ ID NO: 198477 - DNA, 461 bp, Gossypium hirsutum
gtggattccttgtcttgaatttgatgaggtggtggctgtccacagggagaatagcagcggtccagggtactatgatgggaggtattggactctatggaagctgccgatgtttgggtgcaacgactcttctcaagtcctgaaagaaattcacgagtgcaaaaaggcataccccaatgcttatatccgttgcctggcatttgacaacaagcaccaaggtcagtgcatgtcctttgtcattcacaaacctaattgaaaccaccaccaccgactgatcagcagctagctgcctactgggttttccccaatctattcctattcctttttattagtagaataatgctatatgatctctctttcttctgtcttctcgatggatgacaataggacagccggtggatgattataagtgtgtgggttgttttgtttcggacacttgtttgcttttattaaaacaactatga

SEQ ID NO: 198478 - DNA, 469 bp, Gossypium hirsutum
cccacgcgtccgaagggccctcggcggcagtacccactaggccaacggccactggtagaggccggtgcattaggttgatagatttagatcccgaaccgtgtcaggttcttcctcaggctgaacctttggctgccgctggacctgctttcaaccgagtagaagtagtggcagataaagatattgcgatggagggtcggagtgctgataaaatagtcggagttgaagaagaagctagcaccacccctgttcctgaaacggtacaagtgggtaattctcctgtatataggttagaaaggaaattgggtaagggcggttttggccaagtttatgttggccgaaggacaagtggtggtagtgatagaattggacccgatgcaattgaggtggccttgaagcttgagcatcggaacagtaaaggttgcaattatggtccgccttatgagtggcaagtgtaccaattccctaaatg

SEQ ID NO: 198479 - DNA, 435 bp, Gossypium hirsutum
cggggcgaccgacgcgtgatctcaaagactgcttttaggtttgttggggaatgtgccgtggttcaaaatctgaacttgggccttcaaatttcaccatggaaggtgagctacaagagcataaaattggtgctctatgtaaatgttcacttttgcttgaattggctgcttctaatgatctagtggcctttaaaaatgaagtagaagagaaaggtttggatcttggcgaagcaagtttgtggtatggtagaagaatttggtctagaaagatgggatttgaagaaaggacgcctttgataattgcttccatgttcggtagcgtggatgttttgaaatacatcattggaagcggcaagatcgatgtgaatgacgcttgtggtaccgatggagctactgctttgcattgtgctgttgctggaggttcggattctttggttg

SEQ ID NO: 198480 - DNA, 610 bp, Gossypium hirsutum
  unsure (1)..(610): unsure at all n locations
caaaaaaaaaaagaacaatttagctagattctccacgtagttgctgtgatctcacaatgggttcagcagctcctgagtatcaaccattgctgctgggtctcgactcccattctcggatacccgatttgtcatccgttgcaatcgaagagttcttgcagcacagaccgattgcccttcgatggtggccaaggcttgtagcatgggagtccaggcttctttggcttctatctggttcttctattgttctttccattttcaattacatgctcagctttgtcaccttaatgttcactggacatctaggggctttagaacttgccggtgcttctattgctattgttggtattcaaggtcttgcctatgggattatgttangcatggcgagtgcagtacaaacagtatgtggacaggcctatggggcaaagcaatattcagcaatgggaatcatttgccaaagagcaatcatattgcacttaggagctgcagttcttttaacatttctgtattggttctctggtgacgttcttcaagcaataggtcaaaccgaaagcatagcgcaacaaggtcaagtcttttctcgaggtctcatccctcaaatttatgcattccc

SEQ ID NO: 198481 - DNA, 593 bp, Gossypium hirsutum
gtttgaatgtgatactacttataccttatttttactttccctttatcagggtatagatacttcaactgtaacttattcttgtctttgaatgtgttaaagtttttgtggatgattgaagagctttgtagcaatctttttcgccatcctgctgtttttggcaaccatggaagctgatggaaaacgaatgaccctggagaaggagcgcgagccaagtaatcatcagctgggtcgaaaggccgacatcggagctaaagacgatatagatctaacgggagaagatggttctgctatagaattgatcgcttccaagaatagacttatcgattcacgtcaccatatctacatgaacgataccagccctatcccccgcaagcatccgtgacactgataagcttgctagttgtttacagcttggtttgagctttacggaatatggtgtgcctaagaataaaactggaaattaacatgttagtaaaaccctaagcatatatatacacatatatgcatatgaagttatgaacatgtcaagtttccatctccataacaaaatcagtgtgctcagttcagttatataaacaatatctggtcaaaat

SEQ ID NO: 198482 - DNA, 660 bp, Gossypium hirsutum
attattggataacatccaatattgttggtcgatcagcacccaatactcctcctggtctcggcgttttcgtttactatccaaatcatccaaggagatctcctcccacaactcctccacctcctcctctatggaataacactgaccctcgattagctcagagtcacgccattaaagctcgccaaggttacattcacactccaccttcacgttcagacagggtcattgtgttcctcaacacacaaaacacgatcaatgggaatgttcggtggtcggtcaacaatgtctctttcgcacttcctcatacaccttacttgatcgcactcaaggaaaatctaacccatgggtttcgatcaaaccccacctcccgatgggtaccgatttccagatttgtgatttccgtatagtccaagaacacagatgtgctccctcaactgggtgttaccgggtacactaccctctgcggggatattactctaaggagacactcgaagagttgggcccccgtgagactcctcttggcatcactgcacaatatgcgagttggtgttggagaggagaatcgattgtctttaaggctcaaaaaagtatattggggaccccttttaagacacaggccgtccatctagggaggccgtgtaggttagctgtaaccggactggg

SEQ ID NO: 198483 - DNA, 628 bp, Gossypium hirsutum
aaaactttaagaagagtggagaagttgatttctactaaaccaaataaaccagagaccataacagagaaggcgatgttgctcatcatttcattgtccaaatactccccgcactgttgaaagatatggcagctgttttcttcttcactatcgcatcttggacatcgagtattcaccactacccattttattttgaggttgaaaaaggatgggataaaattccatgaaatcctctatattatcattttgatcttcgatgggatatgtagtttccatagctttctatagaaatttatagctttggtatgtaatattaaatcattaggatccaatgtagattcatgtaatagtttataggcgctcctaattgaaaactcgccggtcgactcccctctccaaacttgaaagtcttcatgttccatctccgccagtgggatcttcaaaattttttctgctacaatcggttggaagatcatctcgtattgaaattttatcaccttttcccaccctccagcaaagacctttttcgagcagacccttagtcgtccaaacactttttcaggtaagcgaaggatttcttcatcttcatcttcaagggatagaccagcaaattctgattccatgggcgtta

SEQ ID NO: 198484 - DNA, 404 bp, Gossypium hirsutum
ggaatacccggggggacgcgcacgcgtccgaccaaggcgaggttatccgcaatggaggctgctggctccgactccgacggcagagaagtcagaaacgcacaagagatgtggagggaacaaatcggagatgaaggtgatgatcctaagaagattcaatggtaccgtgaaggcgttgcttattgggaaggtgtggaggcgtctgtggatggagtattgggtggatttgggcaagttaatgatgctgatattaaaggtagtgaagcttttctcaattcccttattgcatgaaagatttggtgatggtggaagaaatcagcaccttgttgcccttgattgtggttctggcatagggaggataaccaagaatctactcataagatattttaatgaggttgatcttcttg

SEQ ID NO: 198485 - DNA, 419 bp, Gossypium hirsutum
cgtccacgcatccttccaaattgagagagcacacttttcttgccctccccggcttcctgtgggggcagagtccttgattcatagaagtctacacccaaatcctcaaactcgtattacaattgagcaaatcaggagcgatgagtggtttaacaagggctatgttcctgtcagactccttgagtatgaagatattaacttggatgaagtaaatgctgtttttgatgatccagaggttgataaggaagaaaggggttatgagccttcacgaaatgaggatatgggtcctttgagtcttaatgcatttgacttgatcattctttctcaaggcttgaaccttgcaacgctttttgaccgtgggaaggacaatatgaagtaccagacacgatttgtttcacaaaagccagcaagggtggttcttt

SEQ ID NO: 198486 - DNA, 351 bp, Gossypium hirsutum
taactgtcacaaagattccgaatcatgtagcaattaatatcgctcttgagctcaagaagctgcggatagacaacagccttttggatgtctcacagtctgatttggaagttaatctttttaagctaatggagcggcgtggttatggggaagagtatataaatcggctcaagatgattaccagatttcaccatcaaagggttcctttggtgattcttgtttgtggaactgcctgtgctgggaagcctacaatagccacacaacttgcacagaggctgtacttgccttatgtatcacagacagctatggtttatgaatcgctatgcacatcaactacatgcaacattggcatcc

SEQ ID NO: 198487 - DNA, 698 bp, Gossypium hirsutum
gattggaattccgatggcggcttctattatgatggggtgtggatcaacaagcatggtttatggttatgtttcggcttttgattttctcagatgcttggggcattccaatgttgaggttgttccccatgaagttttcatcaagctacctttcctcaaatatttcctctatacccccacgtaccatagcctgcaccacacagagatggggaccaacttctgtctcttcatgccgctgtttgacgctatggggaatacgcttaaccgcaactcctggcagctacacaagaaaattagttcagattcagcaaagaatgggagggtgccagattttgtgttcctagcacatggggtggacttaacctcatcgatgcatgccccattcgttttcagatcattcgcatccgtaccattctccaccaggatctttcttctgcctttgttgcctgtggcgtttttggttatgttaataatgtgggcttggtctaagaccttcctcatcagtttctacaatcttagaggccatttgcaccagacatgggttgttcctaaattcggctttcagtatttcttaccatttgcaatggagggcatcaataagcgcatagaggaggccattctaagggctgataggataggggtgaggtcatcagccttgctgcattaaataagaacgaggctctgaatggaggagggacact

SEQ ID NO: 198488 - DNA, 492 bp, Gossypium hirsutum
cggacgcgtgggtttttgtggagacacaagctcatttaattggcaacatgggtgtgaaatcggtgatccctggagcttggagcatttcacttcaactagagcagtcgacatggctgcccctgaaagcagtatccatcacgctcaagtaatgattgaccaatgtcaatcagacaattttcattcagatgcctttgttccttctgaagcaaactttaagcattataccacttgttcatctactagttatggggttgacctacaatcttatagcaccagtatggatgcaatgggtttaatattgtttctatgcaagcatgtggaagatcacaattttatgcgctgtgaaatttctgacgctcttcaattggccccggatcctgctagacttgttttggatgcaatatcaacctttaatataccagagtcatcgaatactcacgaaaagaagtggaatgggtctaattctggaaacttatgccatgtgagaaaaag

SEQ ID NO: 198489 - DNA, 452 bp, Gossypium hirsutum
cacagcttctatcaacaccgctgacgtcgcgtcgttatattctacctcaccgccatcggccgacgtcctcccttcttctttcataattcatatcacatctcaaatcctgattattttccctttaatttatacccttttcgtgtttatatacttgcaagttcgtatttgggtaaattcaatttcaagctaattctttttaaataaaaggaggaaaaacagattttatagtgaaaatcatgaaggtcgtacaccgagacctagttcccaatggccctggcagcgtcaagatgataccagtggattcagaggatctctggtttgcttacaatttgatagctactggggattgggttatggctcgaactgtcaggaaagttctaagggagacagccggtggaagagatgcagagcgtgttgccctgaagttggaaataaaagtcgaggccatagat

SEQ ID NO: 198490 - DNA, 522 bp, Gossypium hirsutum
cggacgcgtgggctttttattctttcttttagaacaaaaagcatcgcaattttcagttttacctgaaatttcagcttacgaacttgttttacctgaaaatttgaatttttagcatcggaaaagctttcaattttcgttatggaaatgtacccaagtacgattgattccgatttaatgatgctggactcaattcggagaccacttactcggcgaatcatccgacttgcggttcacttcttcaaatgactgtaccaacgtgggcgcggctccccctatgttttgcaggagctccagctttagccgcttgtacccttgtttgactgacacctggggtgacctcccactcaaagagaacgattctgaagacatgctagttttcgggtaccttagagatgctttaaccgtcggttgggccccctccgatcactcttccccgacttttccgccaattaaaccgaacctcaagagattccgaccgagacagcggtgaaagaggttcctacggtggctaatgcggcggtt

SEQ ID NO: 198491 - DNA, 334 bp, Gossypium hirsutum
cccacgcgtccgccaaatctctcgttcccttaactcttcccaattccacggtcatctcgagagaggtcattttcattgcttttggttggagttagaggaagcagctatgttggacttcagatggagatatggtgctgtctgtaatgatttttggactatgtatttgtgagatttgaacctcgttcctaatggcctcaaaggtttccaagacaagcaaatccgagctggctactctcgaatcggtagggactacatcgaaacaagttgtgggagaggcttccgaaaagaaaaggtcactgattttagatcaaaatggttctgttgaatctttaac

SEQ ID NO: 198492 - DNA, 560 bp, Gossypium hirsutum
ctggaccccctggccctcccggtcctcctagctgtggttatgacttcagcttcctgccggagccaccttaagagaagtctcaagacggtggccgctactaccgcgccgatgatgccaacgtggtccgtgaccgtgaccttgaggtggacactaccctcaagagcctgagccagcagattgagaacatccgcagccctgagggcagccgcaagtaccccgcccgcacatcccgtgacctcgggatgtgccactctgactggaagagcgcagagtcctggatcgaccctaaccaaggctgcaacctggatgccatcaaggtctactgcaacatggagacaggtcagacctgtgtgttccccactcagccctctgtgcctcagaagaactggtacatcagcccaaaccccaaggagaagaagcatgtctggtttggagagagcatgaccgatggattccagttcgagtatggaagcgaaagttccgatcctgccgatgtcgctatccagctgaccttcctgcgcctgatgtccaccgaggcctcccaaaacatcacctatcac

SEQ ID NO: 198493 - DNA, 420 bp, Gossypium hirsutum
tccgaccagcatccaataaaccgagtcatgaccttctcgtgtcctggacaatgatcttatgaggtactcagcctttcagactttggatggcgacattgacctgaagctcctcaccaaagtgctggccccagagcatgaagtgcgagaggatgatgtggcctgggactgggaccatctatacactgaggtgtcctcagagctcctcacacagtgggacctgctgccggcagagaaggaggaccccgttggaccatcgaggcacatctgacccaggaacgccactgtgcatttggacaaatgcatgaagtctaaaaccatgggagcttgtgagcagcttacaatttttatacagaatattttgtaatagaatatttattttcagtaggacacattggagcattccaattcaataaatgactt

SEQ ID NO: 198494 - DNA, 331 bp, Gossypium hirsutum
accggatcggacagcccgaccgacgcgtccgggagattacgttctggctgtgaagtggggggtttagctcatccccggtagcccctggcggtgtcactgtgccttaaaacaccctgtatcctgtcctggacgtgtcccttccagttgcttttgttgctagttggtaattcatttttttacaatgtccgcaccctgctggggggccagaaaaccccgtcccataaaaaaaaccttgccactcattccaagtgcctttagtgcccttagactcttgaggacatgtgggacatctttcggaaagcaaagcttcggccaaaaacgtgcagagcac

SEQ ID NO: 198495 - DNA, 1084 bp, Gossypium hirsutum
atcgggtttgccgccagaacacaggtgtcgtgaaaactacccctaaaagccaaaatgggaaaggaaaagactcatatcaacattgtcgtcattggacacgtagattcgggcaagtccaccactactggccatctgatctacaaatgcggtggcatcgacaaaagaaccattgaaaaatttgagaaggaggctgctgagatgggaaagggctccttcaagtatgcctgggtcttggataaactgaaagctgagcgggaacgtggtatcaccattgatatctccttgtggaaatttgagaccagcaagtattatgtgactatcattgatgccccaggacacagagacttcatcaaaaacatgattacagggacatctcaggctgactgtgctgtcctgattgttgctgctggtgttggtgaatttgaagctggtatctccaagaatgggcagacccgagagcatgctcttctggcttacacactgggtgtgaaacaactaattgttggtgttaacaaaatggattccactgagccaccctacagccagaagagatacgaggaaattgttaaggaagtcagcacttacattaagaaaattggctacaaccccgacacagtagcatttgtgccaatttctggttggaatggtgacaacatgctggagccaagtgctaacatgccttggttcaagggatggaaggtcacccgtaaggatggcaatgccagtggaaccacgctgcttgaggctctggactgcatcctaccaccaactcgtccaactgacaagcccttgcgcctgcctctccaggatgtctacaaaattggtggtattggtactgttcctgttggccgagtggagactggtgttctcaaacccggtatggtggtcacctttgctccagtcaacgttacaactgaagtaaaatctgtcgaaatgcaccatgaagctttgagtgaagctcttcctggggacaaggggggcttcaatgtcaaaaatgtttctgtcaaggatgttcgttggggcacctttgctggtgccagcaaaaatgacccaccaatggaagcagctgccttaactgctaagg

SEQ ID NO: 198496 - DNA, 1345 bp, Gossypium hirsutum
cgacactatagtaacaagctttgtacaaacaaagcaggcttggtacccggtcacggaatgtcccgggtatcagcgtatccgtcctccgcgagcacagagcctcgcctttgccgctccgccgcccgttcacacccgccgccagctcgccatggatgatgatatcgccgcgctcgttgtcgacaacggctccggcatgtgcaaggccggcttcgcgggcgacgatgccccccgggccgtcttcccctccatcgtggggcgccccaggcaccagggcgtgatggtgggcatgggtcagaaggattcatatgtgggcgacgaggcccagagcaagagaggcattctcaccctgaagtaccccatcgagcacggcatcgtcaccaactgggacgacatggagaagatctggcaccacaccttctacaatgagctgcgtgtggctcctgaggagcaccccgtgctgctgaccgaggcccccctgaaccccaaggccaaccgcgagaagatgacccagatcatgtttgagaccttcaacaccccagccatgtacgtggccatccaggctgtgctgtccctgtacgcctctggccgtaccactggcatcgtgatggactccggtgacggggtcacccacactgtgcccatctacgaggggtatgccctcccccatgccatcctgcgtctggacctggctggccgggacctgactgactacctcatgaagatcctcactgagcgcggctacagcttcaccaccacggccgagcgggaaatcgtgcgtgacattaaggagaagctgtgctatgtcgccctagacttcgagcaggagatggccaccggcggcttccagctcctccctggagaagagctacgagctgcccgatggccaggtcatcaccatcggcaacgagcggttccgctgtccggaggcgctcttccagccgtcctttcctgggcatggagtcctgtggcatccacgagaccaccttcaactccatcatgaagtgtgacgtggacatccgcaaagacctgtatgccaacacggtgctgtctggtggcaccaccatgtacccaggcattgccgacaggatgcagaaggagatcaccgccctggcacccagcaccatgaagatcaagatcatcgcacccccagagcgcaagtactcggtgtggatcggcggctccatcctggcctcgctgtccaccttccagcagatgtggatcaccaagcaggagtacgacgaggccggcccttccatcgtccaccgcaaatgcttctaggcgcactccgccttcggcgcgagacttctcaggacgacgaatttgctcaatcggctggcgactgacc

SEQ ID NO: 198497 - DNA, 408 bp, Gossypium hirsutum
attgccagtgctgagccaggccctcgctggccgggacctggcggactacctcatgaagatcctcactgagcgcggctacagcttcaccaccacggccgagcgggaaatcgtgcgtgacattaaggagaagctgtgctatgtcgccctagacttccagcaggagatggccacggcggcttccagctcctccctggagaagagctacgagctgcccgatggccaggtcatcaccattggcaacgagcggttccgctgccctgaggctctcttccaaccttccttcctgggggaggggagacccgcctcccggccctgcctgacctgggggtcacccttggggctgggctttggaagctaagtccgccctcatttcttcctcaggcatggagtcctgtggcatccacgaaa

SEQ ID NO: 198498 - DNA, 437 bp, Gossypium hirsutum
  unsure (1)..(437): unsure at all n locations
atcctgtgcatggcatcctgttggattcacgaaaccaccttgggctgtattctgaattgtgaccatcacatccacaaagacctgtacgccaacacagtgctgtctggtggcaccaccatgtaccctggcatggctgacaggatgcagaaggagattcactgccctggctcccagcacaatgaagattaagatcattgctcctcctgaacgcaagtactcagtctggattggcggctccatcctggcctcactgtccaccttccagcagatgtggatcagcaagcaggagtatgacgagtcaggcccctccattgtccaccgcanatgcttctagatggactgagcaggtgccaggcatctgctgcatgagctgattctgaagtatcgatttgcccctgcaaatgtacacacctcatgctagcctcatgaaactggaa

SEQ ID NO: 198499 - DNA, 926 bp, Gossypium hirsutum
  unsure (1)..(926): unsure at all n locations
acgcgtgcggcttactgcaaaactccccctactttctactccgccatccgacccctcgactccctttggctctgcgtgcatcttctctcctcatccgccacgggctcagccccacgaggaactcgattacagataagtaaaaactctatttttaagaccgtcagtcgctattatatgggcaacactattagagaacctgttgataaaacgaaacccacaatagtcaaagtttaaactccgaacctttgaatctctaattattgcagctatttcagatctattctcgtttacatttgcagtttacgaatcaccggccgagagtccccttccacttccacctcctggagtccaagttgaacacccagatcaagagcctgaaagcatgccaatgcttcagccgcaaccgcagacggtacgttcacatgtaaaactgatttagagcaaacaacttctgccttttcattccttaccactaacccagaacacgattcttttcgttgtctgtngcaagcggcatcaaaattaattttgattcgcgggcaaatcggagcgacccatctgacattattgacacttctctcaggtaaaggcgctttcgccccatctaactccttaatgtagttaagcacaaactcagcaacttgagcgcccgatttcatttccccctcatgtagaaatctatttttagatgtccaaatcgcccatagtgcacaagagatcaatctgcacttggaaatagactgagaaacaaaaaaattcattagatctgcatgaaaatcagaatccactgtcggactaggccaagataaatttaacttctcccatgtttcttttgcgacaggacagtccctgaacaagtgcatccccgtttctgctcccgaatgacacctccagcacatggtagaatcaatcagccttctgtagtg

SEQ ID NO: 198500 - DNA, 1124 bp, Gossypium hirsutum
  unsure (1)..(1124): unsure at all n locations
ctcgaaaattattctggatagatccccaagtcttatcctttgatacaacctcttttgaaatacagcaataattgagatatttttcaagctctttttggagtctagcatggctaccgttttcaaaattcaatataactgaagttgctctactgaaactccttcactttggttttgcaatttcgaggtcccctgttactaaatttcaaaaaatggtgtcccaaaccattgatgtgttgaagaacgagctgcctcttgagcaggagcttgttgttttgcctgaagatgttgtcactggccttgttcttgtcgatatcatcaatggcttctgcactgtcggtgctggaaacctggccccaagagaacccaacagacaaatatcaagaacgatcagcgaatcagtgaggctggcaagacttttctgcgacaagaaattgcctgttatggcgtttcttgattctcatcatcctgacaagcccgaggatccttatcctcctcactgcattcaaggcaccgatgaatctaatttggttccagctttgcaatggatacaaaacgaaacaaacgtgacaatcaggcggaaagattgctatgatgggtatctgggttccatggaagctgatggttcaaatgtttttgcggattgggtgaagaacaatcacattgaagctatattggtaganggggtgtgcacagatatatgtgtgctggatttcgtgtgttcgacattatcagtgaggaatcgaggatttctggctccgctcaaggatgttatcgtgtattcgcgtgcctgcgcaacctttgacgttcctcttcacatcgccacgaacactaaaggagctctgcctcaccctcaggaattgatgcaccatatagggctttacatggcaaaagaaaggggagccaagaattgcaaatgaagtcttgtttggtgctttaaaataagttcataagctagtaggaggccctgaaatagcggtatcttgaatttagaagctcgagtttcttttggatagagatcaagtatgtatgaactgttaagttgaacatttactcttacatagtgggccttcaaaattataatgccgtgtatttgttgttaataagcacaattatctctctttctc

SEQ ID NO: 198501 - DNA, 786 bp, Gossypium hirsutum
  unsure (1)..(786): unsure at all n locations
cacagttcctcaagaaaatgaatcactctgacaacagtgaccaccctcagcttccatccatcaagatccggcatccctcctcccctcaccacccctcctccgccgctacccctactcccaccgccggcgcccgccgtaggatcggtgtagccgtcgacctctccgacgaatcagctttcgccgtccgctgggctgtccaaaactacctccgacccggtgacgccgtcatcgttctccacgtctcacctacctccgtactctatggagccgactggggcccactcccccacaccccacaaagcgcggaaaccccggagtcccagaagcaaatagaagacgaattcgatgccttcacggcttcaaaagtggcggatttggccagacccttgaaagaatccggggttccctttaagattcacatantgaaagatcatgatatgagggaaaggttgtgccttgaattggaaaggttagggttgagcgccgttataatggggagtaaagggtttggagccganaaaacagggagtgatgggaagttgggcagtgttagtgattattgtgtccatcactgtgtttgccctgttgttgttgttaggtaccctgatgataaagatggcgggagtggtgagcctgtgattaccattaaggaggctgaagtggangaggaancttccaaagatgcttagcaagtccttggtaattgcagcttctttattgcgtcagtagcagcatagtagaaggcttccagttgtgaagagaactcacgtaaagtggattgtaggg

SEQ ID NO: 198502 - DNA, 540 bp, Gossypium hirsutum
cccacgcgtccgagcaaacaaacaagccgccagtcatgagtaacatctcatcctctttcactctctcccaatgtcaacaacaacatctcttggaaaaactcgatgtcttcaacgtcaaaggcagagataaacgcggtcgtaatgttcttctcatcatcggcaaatactttcctgctcgcatggttagtagtgaggttctgaagaagtatttagaagaaacgatttaccccaaattaggggcaaaaccgttctcggtggtgtatgtacatacagatgttcaaaagagtgaaaattttcctggaatatcagttcttcgatcagtctccgatgctattccgatgaacctcaagaacaatctcgagtttgtttatttcttgcatcctggattacaggccagacttttccttgccacctttggccggttgtttttcgacggagggttgtattctaaacttaaatacgtgagtcggcttgactttctatgggaccatgtgaggaggttggagatgaaaataccagactttgtgcatgatcatgatg

SEQ ID NO: 198503 - DNA, 451 bp, Gossypium hirsutum
cggacgcgtgggcggacgcgtgggcccggatttcctaccaaacccggagaaacaaaggatcaacgattcactgttccaattttttgcttaccccttttgatttctatcaaaaagggaatgacagatcccaacaacaaacctagaactgtaatctgcgtaggggacatccatggctacctcaccaaactcctcaatctttggtccaacctccgatcccaaatcgaccctgactccttcaacacctccaccgttatcttcctaggcgattactgtgaccgtggacccgacacgcgcaaagtgatggattttttaatcaccttgcccaagcgatatccaaatcagaagcatgtttttttatcgggaaaccatgactttgctttcggcgggtttgtgggggcgttggcaggtgagtttgaagcgaaggagacatggcaggagtatgctgataatg

SEQ ID NO: 198504 - DNA, 426 bp, Gossypium hirsutum
cttaattaaaactctgcagctttcttcagcgcaaatccaggggctttttcagaccagttttccctattaccttcctctcttgtttggctgcttcctgtccttcgattcactttttttgtttctctgtgtttttttttattgcaaaagacttggatttgttcttcaataatcacttcggggttgaatcaaagtctaacaaaatgccgtggtctttcgtcaactgcgtgcgcttagttgttttctttcttgtcatactgtaattttatttgtttctggtgaatttcgattgaatttgaaaggggatagggttccttcaactttcgttcgcaattggaaaattttgggttggaggtgtgagaatgtacatttcggtaaccataaagagatatcgagcaattaaggaagttgggaaaattaaaatgagcg

SEQ ID NO: 198505 - DNA, 554 bp, Gossypium hirsutum
gaagctgaagaagcattttatgaaagggaggcttgacattgctcgccaaaaactaatagatgaacttataacttttagtatgctaagaggggttaaagtggttgttgtatttgacgctatgatgtctggacttcctacacacggggaaacttttgccggcattgatatagtttactcaggagagtcttgtgctgatgcatggatcgaaaaggaggttgtagctctgagggaggatgggtgccccaaagtctgggttgtgacttctgatcattgtcagcagcatgcagcacatggagcgggagcctttatttggagctccaaggcattggtttctgagattaaagcttcacagaaggaggttgagaggatgcttctagaacaaagatctacgtcttttccaggtaaactattgaagcacaatctcgatactgaaggtgttgatgctcttaagggtctaagaagacagctttctgagaatgagtcctgctagctatttggatctggtttgttgttattgttctcagctgaatattgcataatcaaaatgctaatcc

SEQ ID NO: 198506 - DNA, 440 bp, Gossypium hirsutum
attttgacttcgaaaaacatcgggtacagtatatacatcccagttcagttcagttcaattctctccgattctattctccccagtcaagaagaacaagaagatggagagaactctaacccactcattaatcgctgttgtaatctcttcctttgtcgccattcgatcctacagaaggaagtctctcgatttatctggagctcttgccggatttctcgtcatgactattcatttcgttgccggatacaggttcggggcaatgttacttgtctttttcttcacttcatcgatgcttaccaaagttggagaagacaagaagcggcgagttgatgctgattttaaggaaggtggacaaagaaactggatacaagttttatacaatagtggtattgcagcagttttgtctgttcttattgggaacctgactggatgggaggacaagt

SEQ ID NO: 198507 - DNA, 434 bp, Gossypium hirsutum
cgaaacccggcgaccacgcttcgctttactgtaatttttcttttctccggttatttttatccggaaccgttaaccgcattggcggtcactgcattagcaactgcaccaccgtcagccactggatcgttccgtaccaggcgatccacgaacggggtttctcggttcaggatgtccgtccgatctggctccgtttcaatggctgcggctcccatgttaaccaagcttcagcaagactgcgccactccttttgccggtccttcgcaacgtggccgcctccatgtctgatgatatccgtgcaggccttgccgttgatggcggcagcgatctcaagatgatcctcagctacgtcgatagtttgcctactggggatgaaaaaggattgttttacgctttggatctgggaggaacaaattttcgtgttttgagggttgaat

SEQ ID NO: 198508 - DNA, 942 bp, Gossypium hirsutum
ggtctttaagattgtcacgggaccatctgaccatcaacaaattgatacagtaaaggtacacaagggcagtcagcactctacgaaatctcatgtcaaggagttgggtgtagataaagagaaatctaagagatatacagagccaaaccaagaagaaaagaagaggaagattttagaaagacttgattctgatgctcaaaagttggctaatcttcagataactgtgcaggacctgaagaggaaggtagagatatctgagaagggcaaaaaggggaaaggaattgaatatggtacggtaaaagagcagctagaagaagctgaggaagctatcacgaaactatctgattttaatcgcaaattgatagtgcatgctggagacccttcacggtcccttcttgatgggaaacctgcaatagattcggatgggagcggaagtggtaggaggcagcgaatatcagaacaagctcgaaaagggtcagaaaagattgggcgcttgcagttggaggtgcagaaaattcaatttctcttattgaagcttgacgatgaaaaagaaagtagaggtcgaaccaaaatcaccgaacacaaaacaactgttttattgcgagactatctttacggtggtgtaagaaacatcaagaagaggaagaactcactcttttgtgcatgcgtgcgaccccaaactaaatgagatcgaggcaattaatcatgggcacataatcagtgtagtttaccgataatgagactagttgcattgtcaataaagttcaccttcctagttttgcatttcacatatttaatgtcttagagaagctttcatcttctttagtttcgagatcctgctgtatatttcaggcacatcaaagtgaaaagaagctgcacttttatagcctaaaaacttccttttatttataaatttaccttggtataaattcttggattcattag

SEQ ID NO: 198509 - DNA, 468 bp, Gossypium hirsutum
agcgtttctcaccaaccaaacgctgttaaggaaaaaaacaatgagaaaagcagggccaagaaaggatgggaactacacgaatccatgtttaacgatgcatcagccatgggcttcattgttagtttatgggatcaaacgtatagaaggcaggtcttggcctgctccaatcagaggccgcctttggatacatgctgccggtaaagtcccggatgaatctacgatcaaagcaatggaggatttctatagggaaatttacgcattgaatggaattaccgatattaaatttccagaacattaccctatctcaagactgctagggtgcgtcgaagtggttggctgtttgacatgtgaagaattggttcaatgggaggcactacctgaagcggttaggctagaaggacaaactgatttttgctggctctgtgaacaaccaaagaaattgttagttccattcgagatgcgaggata

SEQ ID NO: 198510 - DNA, 484 bp, Gossypium hirsutum
cccactcgtccgcccacgcgtccgcccacgcgtccgcttcagggtggagtgagcaaataagggtttgctccgcgacgtcattagaggggcctctggatgatggatattgctggcgaaaatatgggcagaaagatattcttggatccaattttccaagggcatattatcgatgcactcatcgtttctcgcaaggctgcttagccggtaagcaagttcaaagatcagacgaggacccaacaatcttcgaggtgaaatatcgtggaagacatgcctgtaaccaagtccctcacttggttgctacgcccaaagagaaaggcaatcattatcgggaaaagcagcaagttgaagagaaacaaaagcaatccggggaattgtggttgagtttggaaccagggcttaaggttaatacagaggacttggacaacagagagaacatatttccttcattttctttccccattgagtcagaggaagttcaaaatgg

SEQ ID NO: 198511 - DNA, 439 bp, Gossypium hirsutum
  unsure (1)..(439): unsure at all n locations
gcaaaatcataaagctctcacaagtttcgaattttgctctttagtccctcaatttatatttgaaattcactaaggtcctaaaatgggcactgctcaaagcagggaagatcggatcaccgattcagaatccgatgaaggctatgaagaagaagaagaagaggaggaggagcaatacgacgacgctttaagcgatcatcaaaacactcaatcttcatcttcaacttcaacttcttcaggtactcaaaaaagcctcgacgatatcgatgctaagctcaaatccttgaaattgaaatacaattctcagcaatcaagccctaatctcaaaaacccagtgaagctttaccttcatataggcgggaacacacccaaagcgaaatgggtaatctctgaaaagctcacttcttatagtttcactaanggaaatgggtgatatgatgag

SEQ ID NO: 198512 - DNA, 713 bp, Gossypium hirsutum
cccacgcgtccgggcaaagaaaataaaatagtataaaaatttacagaaatcagacggaaagaagagagagggcgtggtcactcactggcgagagagatccaaaggccaaaaggaacgcagagaaccatgggagctgctgcactcccaattcaacagcaaataaactcttaacctgctgcaggtcagggattagagatgggaaggagtaaaacagaagtgaattttcaaaggttacttgcagctgcacctcaacaaaggaatcattctaaactcatgcattatgttgcgactttacgagaacttttagaacagttagctgaagagagaacacctgaaggtttacctagagtttcaagtgctgtggtcagtgattattcaaaaaagattgaggaaattgcttcagaattaactgccccactgcccgagattaaggtatcccaggagcccatcacaagaaactcttttaagcagagtcctaaatcggattcagaaaaccacatgccttcctctccaggattaagaaggagagttgtgcctgcctcgaacatcaaagatagaactcatgaaatcactgaggctgatgcatctgcacctatcaaactagatgctgcagcagaagcacacatacagaagcacagaaagcttcaagaggatttaactgatgagatggttggattggcacagcaacttaaagagcgtagtctcatgatgag

SEQ ID NO: 198513 - DNA, 404 bp, Gossypium hirsutum
ctttgaagcaagtattgggagaagaagcagggattaggaacaagagagcagatctggaagtgataacattgatggagtttcaggcgacgatcaagatgccgccaacaaccgtcctaggaagaagagataccaccgccacactcctcaacaaatccaagagcttgaagctctctttaaggagtgccctcatcccgatgagaaacagagattggagcttagcaaaaggctttgcttagaaaccaggcaggtgaagttttggttccaaaaccgccgtacgcaaatgaagactcaattggaacgccatgagaactctttgctgaggcaagagaacgacaagcttcgagctgagaacatgtctattagggaagctatgaggaaccccatttgcaccaactgtgggggtc

SEQ ID NO: 198514 - DNA, 401 bp, Gossypium hirsutum
gacatatcattcaatgcagagggaggaagaagaactagaagctcaaactaattcagtgagagttgaggaatttaaaagaagttcaaccagaatcggaagtgatgagcagcaccaggatgtcaaaatatcagcctgcaggaacactggaaatgggccaaacagaacaggaaaaagaaagatctcatggcaagatcaggtggcattgagggcttaactctcttgcctgtcatagaggtgctcactggttaggttgagggatttggaataattgtcagtttagcttggctccctccttttcttcttaattgctccatgttctttactttctggctttttatctcttatgtaaagaaaatatagttgcatctgttggatttataaagataaatataataattgct

SEQ ID NO: 198515 - DNA, 959 bp, Gossypium hirsutum
cccacgcgtccgttttttttcccatcactcgcttttaaaggcaaactacttgaatatgaggtgttggtttgctaaattaagagaggccagaccactacccgccaccacaggagggcgtcgccggcgacggtggtgaagggtcgtaggaagtgtaaagcccgttttgttatcttaaaagatgggtcaagggctgagttgtggagcgagtcaagagaatgtattgttgagtgcagttcaagttggagaccttgaaactgtggaagcttatgtaaagagagaatccaatcttttacatcatacgactgtttatgatcgccactctgctcttcatatagctgctgcttatggccagatcgagattttggccatgcttttggataaatccatgaacccagatgcggtgaatcgtaacaagcagactccacttatgttggctgcaatgcatgggaagatctcctgtgtgaagaagctcattgaagcgggggccaatatcttaatgtttgattccctccatggaagaacttgcttgcactatgcagcctattatggccactttgactgccttcaagccatcctctctgctgctcaatctagccctgttgctgtttcatggggatatgcacggtttgtgaatataagagacgctaggggagccactcctttgcacttagcagctcgtcaaagacggcccgaatgcgttcatatcctgttagataacggtgctcttgttttgtgcttcaaccggtggatccgggttgtccaggaagcacccctcttcatttggctgctagaggtggatctctcgattgatacgtaaattgttggcgtggggtgcggatcgtcttcaaagagatgccacagggaaaataccgatattgtgctcttagttcaaactggagcatgtgccctctgttaatccctatctgcgaacccttgtctggccgtaccttaagtcatag

SEQ ID NO: 198516 - DNA, 593 bp, Gossypium hirsutum
ccattatagatgctttctttcttatacgcttggtcctccagtttcgtacagcttacgggggtgccatcatctcgggtttttggacgaggtgaacttgtgatagatcctgcacaaatagccaagcggtacttgcagcgatatttcatcattgattttcttgcggtggctccattaccacagattgttgtttggcgatttcttcaaagttccaatggttcagatgtactagcaacaaaacaggccttgttttttgttgtcttgcttcagtacatcccgaggtttcttagagttctacccttgacatcagaaatgaaaagaacagcaggtgtctttgctgaaactgcatgggctggagctgcatattatttgctattatatatgctttgcagtcatatagtaggggcattctggtacttggtagctgtagagcgaaatgatacatgctggcagaatgcatgcaaggatattggtagtgactgcaataaagatttcttgtattgtgggaatcagcaaatgaaaggttacaacatatggaagggcatgcgagattctgttcttaatgaaaagtgcccagctgatgaaaatgatgataa

SEQ ID NO: 198517 - DNA, 387 bp, Gossypium hirsutum
cccacgcgtccgcagctttggaggtcggtgtccttggccaggaaattggagccaaccggaacgacgacgtttaggatggcggtgaattgccgccacaggttggacccaaagctggagccgtactacttcggaaacgctattcagagtattccgactttcgcctcagcaggtgagttgcttggaaaggacttgagctgggccgccgatatactgcataaaaacgtggtggcgcataacaatgatacggtgcggaaaggtgtagcggattgggagaagcagccgaggttgttcccattgggtaacgctgacggtgcatcaatcaccatggggagctctcccagattcccaatagtacaataatgattttgggtggtggcgacctttggc

SEQ ID NO: 198518 - DNA, 399 bp, Gossypium hirsutum
gcaaaatagtggaagttctttgcgctacttggattatttcccctgtcaatgggagagtatagatcaggtagatttaagaatctgcaacctctaaggaacaatatggaataggggaagtttgatggtggatctaatagggctttaagagaacgaatcatgcttgttcttctattccaagatattggatgccgtgatgtgcctttaatgaatggttcttcaacatgcataaactcttcgtttgcttcttccttcttgcatataattttctttctcttatgcccttcaagtggcttgctacaacttgtgtttgagtgggagtcatgtatgttttgtacttatgaattttcgatgctaacattttttctgttaataaactgctataaatcaaaattgaatagg

SEQ ID NO: 198519 - DNA, 445 bp, Gossypium hirsutum
aataataatagcatcttcctgttaattttatctatcttcttcgtcttcttcatttcaccacatttgttttagcaaagacaagtggttgatggaaaagttagagaagcgtcggcagtaggcttggattcttgtgggaaaaaaaatatagctaaaggggacctttatgtttttgtctttacaatattgttgtgtgttataataacagtggaaggttggcggaggttttttgcaggattgaaaatcaatgtcaagttcatctccttttcttctttttcattgccttaacctctagggaactagcttgaaccttttttttttctttttccatttagttttgggggggggtttaatggctatggagatgcaaagcggggggaagatggtggggttcttgggtattcttgtggttttggttatagagatggcagcacccactagtgctagc

SEQ ID NO: 198520 - DNA, 428 bp, Gossypium hirsutum
caaaagttgttagcagctatttccacgggaacattagttgaagaggcaattgatgagtgtaggtccttaagcaagagtgtggctaaagatgaaccagtactcttagagggagaatggcagatgatatggagctcacaggtagaaacagatagttggctagaaaatgccggcaacggtcttatgggcagtcagattgtcaagaatgaacaaatgaagtttctagtgagcatcttacctgggatcagattctccatgattggcaagtttgtcaaatcaggcacaaaaacatatgatgttacaatgaacgatgcagccctgattgttggtccatttgggtaccctttggaaatggagaacaagatcaatatggagcttctatataatgatgacaagatcaggatttccaaggggtacaataatattttgtt

SEQ ID NO: 198521 - DNA, 498 bp, Gossypium hirsutum
cgcatagataatcattcagaggattcaaggagaaaggattcagagaattggagagttgtggagagtatggatggagggagatccacgaagatttctagaccggaaaaaattcttcttgagattgtgtctgagtcgattcctgccatggctcaaataatgcaggagctgcctgaagaaaccctcgaatcgaccaaagaatacttgaggaatcttattggaaacccagagtggaaggaagaattagttggacttcaaaatcgacttgacaggagatctgatcttagcaaggagactctctcaaagtgccataaggatcagctagcaatcttagttgcagtgaaaatgggcctgaaaagcttcttgtccgggaaagtaggactttccatgaccgagctgctggagattttcttgtttatgagatgtaggaatctgacttgcaagagtgtactacctgttgatgactgtgattgcaggatatgctcaggaaataaagggttt

SEQ ID NO: 198522 - DNA, 447 bp, Gossypium hirsutum
gtaccggaattgacgggccgggccgacccgtccggccatgtcctgctcccttgccctatccaactctctcgttctttccccgcccatgtctctttggcgtgacaataccccgagcgtctctccgtcgcccgaagctgtgaatttatcgttgactcacctcaaaccttcgtcgtctccttcttccccttgttcgccttttaggcttcgccttcaaaaacctccgtccgggtctctattatcttcttctgtttcaacgtcagcgtcttcatcggattcgggttcaactgcgggtcttggtccgcgatcggcgtcggcgatattgaagaggaagaggccaacgaggctggatataccaatgggccacgacggcgttgcatttttggtgccggcgacgccgtgtgaagttatgagagaggtggaaagaagagggatgtggatattctgttt

SEQ ID NO: 198523 - DNA, 395 bp, Gossypium hirsutum
tcggttgatttgagctttttgcgtttcttgtgcgggttagcaatttgcaaagatgcagaacgaacgagggcaaaatatggatcttgacattccccgaaaatgctcggccactaacaggctcatcacctcaaaggatcacgcatccgtgcagatcaatgtcggccatttggatgagcttggccgatacactggcacattctccacctttgctctttgcggctttgtccgtgctcagggcgatgccgatagcgctcttgacaggctttggcagaagaagaaagccgaagtcaaacagcagtagtcggatacctttttattaccggtctctgaactcgggagggaaaattcttggcaatgactgttaaattcaagtttgtttaggtagataaagtttg

SEQ ID NO: 198524 - DNA, 724 bp, Gossypium hirsutum
ctcggaccggaattgacaggccgggccgaccgacgcgtacagaggaactagaagcacaaacagagagatttacttataacggcagcaatcacgtagggtgggggcgggacaacgaaaccctgcaaaatcgatgtcgtcttttgatgacgatggctacttaggctacgaccctcgcctcgcttcccaccagttccagtccttcgacgcccactcggttaaggactcagtagctgattcccctccgatgttctcctacggtaccggagatgatgtcttctcatctcaatcaatacctgaaacacctccgatctacaatgggcggtggtggaaactctgctttctcatcggagcagaacgaaaaaggattgaacggagagttcggaggatcggatggaccaatcttgccaccacgcctgctgagatggggccagaagaaggctctctttgagagagtggccaggaaaacgtgattcgactggaggagaagggaaagaaagagaaggaagaacgttggagcaaataataaaggaagcagaggagtacaaagttgaattctatagggaagataagtatagctgtgaaataaaagcctccaacagagacaaggagaagcaatgcttggaaaaccgagagaagttcacgctgttagtgagaaaaattactggaaggcaattgcaggttatcccgcatgaggtgccaactatagagaagcgggaagaaggat

SEQ ID NO: 198525 - DNA, 554 bp, Gossypium hirsutum
cgaagaatagggcatgtttccgcagtctctttatcgtagcagctttggtctgcggtgcttatttcattagtaatgcatttatcactaacgaatacaaagatagattatcgagatgggaagtgattaatatgcttcggaattcaaaatctgttacgtgcaagaatcaatgcaggccacctgggagtgaagcattacctcaaggaatcgtggtcaaaacatcgaacttgcaaatgcaaccattatggtgcgtcagtgtgaaaaacgtcaatcctgcgacagcttcaatcttgttagccagtgctgtcgggattaagcaaaaggaaatcgtggaccaaattggtaaaaagtttcccgtaagtgatttcgtcgttatgcttttccactacgatggtatcgcggatgaatggaaagattttgagtggagtgatcgtgccatacacgtgtctgcagtgaatcaaacaaaatggtggtttgccaaacgtttcttgcatcctgatatagattccaaatacacgtatatattcctttgggatgaggatcttcgagtggattac

SEQ ID NO: 198526 - DNA, 441 bp, Gossypium hirsutum
tttttaataaaaaaatataattttgagctcaatgatctttctttctgtcctttaatatgttcgcattcatcgaagctatacagaaggaatctgaacataaagaagattacatatagctgagaaaggttatttgagaaaagtttaaaaaaatgggtgtaacggagaatcatcagcaccaccaccacccaccgccgccacaagtggttgctccgccggctgctcctcctcctaatttcgctctttcaaggggacctacttggactccagctgaacaacttcatcaacttcaatactgcatccactccaatccttcttggcctcaagcacttttattggcattccaacacttcattgtgaatcttggtacaacggtgttaattgcaagtactatggtgcctcgtatgggtggtaatcatggtgataaagctcgggttattcaag

SEQ ID NO: 198527 - DNA, 590 bp, Gossypium hirsutum
gtcactctctgttactctctgttattactctctctttataaatgtactctcttgccttgagataaggataaacatactgtcacacatcacagcaaaaaagaaagaaaagtagagagatctaggtgggggcgactgtgaccagagaacacgccagtttttcagagaaaaaaatgggtgggaaaagcaccatggctgcgcttttagtaattttagctgcaaatctgttgcagagtacttatggcagaacctacacagtgggagactccaccggttggggaatccctgctaataataacgatgatttttatgatgattgggctgacaataaagatttccttgttggggatgttctagtgttcaactttactaatgggcaacataatgttgtcgaagtgaccgaaggtggttacgatgcttgcaacgctgcaaatcctgtatctacggtgagcaccggaccggcgaggattacgcttaacaggacaggggagtactactttatttgtggtatccctggtcactgttctgccggccagaaactaaacgtggaagtacgaaaatggtaccccaccggcggtgttactccgtcaacc

SEQ ID NO: 198528 - DNA, 1048 bp, Gossypium hirsutum
  unsure (1)..(1048): unsure at all n locations
tgctgactgtggtcataaaattggtttaaatggtgtttataacggtagaatctggtttgacggtgttcgagtgccgagagagaacttattaaattcagttgctgatgtttcacctgatggaaaatatctaagtgctataaaagacccagatcagagatttgctgcattcctggcccctctaacagcaggccgtgttaatattgcagttaatgcagtttaccagtcaaaggttggtttagctattgccattagatatgctttaacaaggcgggctttttctcttaaaccaaaggaacctgaggtcttattgcttgattacccaagtcatcaacgacgactcttgcctctccttgcaaagacgtntgctatgagttttggagcaaattactnngaaatgctgtatgtgaagaggacaccccagtcaaacaaaatcattcatgtagtttcaagttcattcaaggctacttttacatggagtaacatgcaaatacttcaggaatgtcgcgaagcttgtggaggacaaggactaaagacagagaatcgtgttggtcatctaaaagctgaacatgatgtgcaatccacttttgagggggacaataatattttaatgctgcaggtaaatttgctttcttctttccttacgaatttactttgacaaggacagttggttacaacttacaactaaaccggctgagaatatatgacctcaatgtaaaatgaaagtagcagatgcagaattggggaatgagttctctgtgtatgggtttttactggattttgttttccttgaaatgacccatatgatgcatgtagtcccctgaccatggcctgttagatgtgtaggtcattntaataggcttcatggattttgggttcacaacatcctaatgtattgacaactaaacagtggaacttatgattgaacatgacaactcaggtcagcaaagctctgtttgctgaatacatggcagctcagaagccaaacaaggctttcaaggggtctgggttagaacacatgaaaataacctgccctgtcattcatcacagt

SEQ ID NO: 198529 - DNA, 1361 bp, Gossypium hirsutum
  unsure (1)..(1361): unsure at all n locations
ncgtccgttcatcgggtacgcgcgtcccttcaagtcgacggtatcccagacttgatatcaaattctgcatgaggatcaaatgttggactgcaaaattctctcaatttccgcatccaaaaccacaggttgacgttggttgaattggagggaacacacaccctgcaaacgacctattcttccatcgaccttcacctaggccaatcgtgctccgttttattcacagctgatcagcctgcacaagactattacattgttgcctctactcgcttcaccaaccccgttctcaccactactgcgacccttcgttacagtaattctgctggtcctgtctctggtcctcctcctggtggacccaccatccaaatcgactggtctttgaaccaggcacgctctatcaggactaaccttacagcgagtggaccaaggcctaaccctcagggctcctaccactatggtctcattaatacaaccagaaccatcaggcttgcaaactctgcgggacaagttaatgggaagcaaagatatgcagttaacagtgtttcctttgttctgccagacactcctttgaaacttgccgactatttcaaaattggaggagtcttccggcctgggagcatatcagataatccttatggtggagggatataccttgacacttcagttctgaatgctgattatagggcttttgttgagattgtatttgagaacactgagaacatcatacagagctggcatctcaatggctactctttctttgtcgttggtatggacggagggcaatggacagcagctagtaggaacggatacaatctacgtgatgcagttgcacgttgtactactcaggtgtatccaaaatcatggacagccatatatgtggcacttgacaacgtggggatctggaacttgaggtctgagtactgggcaagacagtaccttgggcaacagctttacttgcgtgtatacacagattcaacatctctcagggatgaataccccatccccaagaatgctctcctctgcggtagggcagctggccgaagcacccgaccgctctaagccaccatatgataaagaacgttgggtggtggatggatgaagatgattgaagagagtagagttttgcctctaatcttgatatgtatatctttaattatataatatagctcattatattgtgcttagcatctaatatttaagtctaaaattaatggacctcagctcgaggtcgcattctttgttactttagattagatctgtattccctttgtattgttcaggtttccaaccataaattattggtactatcttattgttatcataattgacgtgttgtttaagtgcaagtactgcattcacatgcc

SEQ ID NO: 198530 - DNA, 401 bp, Gossypium hirsutum
ttggggtgcaatggcttatgtccatattatagtaagccaaaacacgagtttcaatgttcttatggaccatatggctgcccctatgctgcgtcataacgcacagccattggtgatattcctcatctagtggcccacctaaaagatgatcacaaagtcgatatgcacaatggttgcacctttaaccaccgctatgtcaaatcaaatccacatgaggttgagaatgctacatggatgctaacggttttcaggtgctttggtcagtacttttgcctgcattttgaagcattccatatcggagtagctcctgtttatatagcattcttgcggcttatgggtgacaataatgaggcaaagaactatagcttcagcctcgagggtgggtgggaacgggaggaagctgc

SEQ ID NO: 198531 - DNA, 709 bp, Gossypium hirsutum
  unsure (1)..(709): unsure at all n locations
tccacgcgtccgcactcaccaaagctaatctaaaagctaatctattctttctttctttctcttcatttattttaatttcttgtttacatcaccaaagctaaatctattctttctccgtaaactaccaaagctaatttattttctttatagaaaaaaaaatggtggccatatctaagattgcaactggtaatggtcatggtgaagactcaccttatttcgatggatggaaggcatatgagaccaacccttttcatcccattgatagacctgatggtgtcattcagatgggtctagctgagaatcagctttgctttaactttataaaaaagtgggtcatggaacacccagaagcgtctctgtgcagtgcagaaggtgtgaacaaattcgaggagacggctctgttccaagactatcatgggatgcctgagttcagagaggctgttgcaaaatttatggggaaagtgaggggtgatcgagttgaaatttgacccaaaccgcattgttatgagcggtggagccaccggagctcatgagatggttgctttttgcttggctgatcccggtgaagcttttctggttcccactccttattatccaggatttgatcgtgacttgaggtggagaacacgggttgaacttgttcctgtcgtttaggtccattattcagatcctanactgccttgagctgtatgaaggcaaagaactactt

SEQ ID NO: 198532 - DNA, 675 bp, Gossypium hirsutum
gctaatttagcgctcacagaacagccaccattttttgaattttatgatccaaagacacggttctatacatctccaagattcttgcctcctaccaaagttgatgaatgcaagattgttgactccataatttcacatgggtgtttcttgcgagaatgtagtgttcaacactctatagtcggtgtgcgctcacgtttggagtccggcgttgttcttcaggataccatgatgatgggagcagactactaccaaaccgagtccgaaatagcatctctgctagcagaagggaaggttcctatcggtgtcggacagaataccaagatcaagaattgcataattgacaagaatgccaagataggaaaagatgtaatcatatcaaacactgatgctgttgaagaagctgagagaccagaagatgggttttacattaggtctgggatcacagtgataatgaagaatgcaaccatccgagatggaactgtcatataaaacattttaactttgaatccttccagaggctgattctgttctgtgctgaacgggtgatggaaagccgagcgcccatagtctgttgccctttgcaagtgaaaaatatatttaggacttatgctttgcatatgtaaaattctgaagttcctaagtacttttcaaataagttcaaaaaaaaaaaaaaaaaat

SEQ ID NO: 198533 - DNA, 788 bp, Gossypium hirsutum
  unsure (1)..(788): unsure at all n locations
cttattattgcttcagatggtatttgggatgttttatcttcagacatggctgccaaggggggtcggggattaccagcagaccttggagcaaagatggttgttaaggaagctttgaggtcgaggggcctaaaggatgatacaacctgtctggttgttgatattatcccgtctgaccaaccggtcctaccttcaactccaaggaagaagcagaatatgctcagttcaattcttttcaggaagaaatctctaaatttcacaaacaagactacaaataaactttctgccattggagttgttgaggagctctttgaagagggttctgctgtgcttgccgaaaggttgggtaaggatttccccacgaatgcaaactccgggattttccgatgtgcagtctgtcaagtagatcaacctccagctgagggtttaacaatgagctctgggccatttttctcacacagttcgaaccgctgggaaggaccgtttctctgcactaactgtcggaaaaagaaagatgccatggaaggaaaaaggccaaccaggcccacggtggtcgcataacatctaatttggtaacaaaagtaaatatggtgtgatattttttttctcttgctatggttttgcattacctgttgattgcaataaatgtggctaagaatcaaggtaaaaataaagttangtgttgtnttgccaattattgtttgagtttacgttggctgttttaccaaccaaactccgggcaaagatnttatgctatccgataaagttangtgttgttttgccaattatta

SEQ ID NO: 198534 - DNA, 898 bp, Gossypium hirsutum
  unsure (1)..(898): unsure at all n locations
cggtcgcgtgggcggacgcgtgggcaacatctttcccattttctctctctctccttaaaaccctaccgccaccatggcaatagcatgcctgccaaaactccgacttgccaccgccacagccgtctccgtttccaccttccttaagccactcagacatgggctccgatcattcggatcagcagctgcgttggagcttcctgacgaggatgtatactacgagtacgaacaagctcaccgggatcggcgctcagctcagccgaagattgacgtggatgggtcagcgacagacaggggagtccaatgggtacttataggagagcctggggtcaaacgacatgcttatgctgaaaggctttcgaagcttctagaagttccacatatttcaatgggtaccctcgttagacaagagcttaatccccactcttctctttacaaacagattgcaaatgctgtgaatgaagggaagcttgttccagaggatgttatttttgctttattgtctaagaggcttgaagaaggttactatggtggtgaaaatggtttcattcttgatgggattccacgaaccaggatccaggctgagattcttgatcaaattaccgatattgatctggttgtcaactttaaatgtactgaagagcaaatgttgaagagctcagaaagtgaggttcttcacattggcagttctaaagatgtaggaacttcctgnaaagaaaaatgtccatgtatactcagagcaggccaagtcagtggaggattattacagtaagcaaaagaagcttctcaattttcaggtgtctggtgcaccancagatgcatggcaaagtcttttggctgcattacatcttccacatattaatgctcttacttcttccccaaagctgacggcataaaaccc

SEQ ID NO: 198535 - DNA, 852 bp, Gossypium hirsutum
  unsure (1)..(852): unsure at all n locations
gtccctatggtggaaactctgtgcagatcccgttctctggttcgtctagcacaatacccgaagcgacaagcaaatccttctccatttcaatcgccaacaccttcctcatctaataatcctcctcaagctccgcatggtgccttagcagcttcaagtcacatgagttctgcaaattctccagcaatgaacatgcctatacagcagccagctctttccagtgaggcggatcccaatgaatcccaaagctctgttcagaaaatcattcatgaaataatgtctagccaacttaataacactggcggcatggttggtgctggcactctaggcaatgatgtgaagagcgtaaatgggatgctgccaccgagtaacaacacggttctcagcggtggcaacactttggtcgctaatggaaccatcagcaataattcanttattggtggtgtggggtttggttcaatgattggtggactanggcagtctgctatggtgaatggaatcagagccacaatgggaaataaccctgtcatgaatggaaggatgggaatggcacaaatggctcgggatcagctaatgaatcaccaacaacaggatatggggaaccagctactgaatggacttggagcagttaatggttttaataattatcaatttgattggaaaccttccccatgaaagagtgcaaaaagctgatggttctttgattacagctgtgctgttgtgtgcagcatgggaatcggctgacttgcctgtggccctgccagattcgtggtacnaacactataatgataaatcaaggtcttcccctcccactgtgtactaatttcaggaaaaaagtgaaaaacaacatatata

SEQ ID NO: 198536 - DNA, 393 bp, Gossypium hirsutum
caaaaccttaaaatcacaaataattaattttctaaaaatttccattttttgttcgtttgaggaaaatggttgatttagattggaaagcaaagatggtttcttcagatattagcaacaaatcctcgaaattgtccattccgacgccgcttcggttgttgaatatgtcgtctccgctttcgacttcggcttcggcttcatcggcttatgagtactatcttcgtttaccggagctgaggatgttatgggaggcaaaggagtttccagcttggcagaacgaggtcgttttgaaaccggctttgcatgctttggagattaccttccggttcatttcgatcgttttatcggatcctagaccgtattcgaatcgccgggagtggacgcgtcgacttgagt

SEQ ID NO: 198537 - DNA, 553 bp, Gossypium hirsutum
  unsure (1)..(553): unsure at all n locations
gaagtgttaaggtctgggttttagctgtggaagatgctttgtcttaaaggttattggaggtgaatgcatggatcgaagggatgccatggcattatcagggtctgcatcttactatatgcaacaaagaggaataaccgggtcagggtccgaaccggagcctcgcgtccgcggatctcctggcattcatccgttctctagtccaagtgggcaataccaatcaagtattccagtcactactgtgggatcaaccttagctatggagtctccatcaggaatcgcccctcatagtgtcaatgtaggcacaccttcagcacagccatctagtgagacagtgaaacggaaaagaggcaggccccgaaagtacggtcctgatgggactgtttcgttggcgctgactcctgcatcagctcctcatcccgtgaccacaacgccgggccaaaaacgaggaagagggcggccaccgggtaccggaaggaagcaacagttagcttcccttggtgactggctgtccggttcagctgggatgggttntactccacacgtcatcaccggt

SEQ ID NO: 198538 - DNA, 805 bp, Gossypium hirsutum
tcatatatgcatattctggaattatggtatcatttcttaagtatgagaactgaagtgagagcgagaagctctcaatggatttgatgcgagaattgtgctgcaatcttgggacaattagagctcctggcattggtttggtttacaatgaagctgccaaaaggagtaccagctatatttggccattttctagctacactccctgcaatccactccatgatcatctttgtctgcataaaatatgtccctgttcctatggtgcctcagagtgaaagattcctgttcaagcgagtcttgcctaagaagtaccatatctttcggtgcattggcaagtattgttataaggatgtccgtaaagaaaatcaccagacatttgagccactggtgattgagaagtttgagaagttcaatcgtcgagaaacttacggaaagccattggaaagcgatagcgattaaaacactgattatgaagaggatacctctctctcaaaggttctcatagctccccatggaaagtttactcacttgctggtgcactgttggctgagttctggagctgtagtaataataccatttctgaacaagcacctcataagaggtgattggagaatttcctgtagaaacctcaatttttgatgccgagcatggtttatataaggagctatttttatactcacaattatggaatctgaggtgtttatattcttggcatgagaaattatgccagaaagaattctgggtattaaaaaccaatttcaatactctattcctcctttaaaaaataatgggggggttcaaattatttgcg

SEQ ID NO: 198539 - DNA, 492 bp, Gossypium hirsutum
gccgtccgttcctttctacaatgtaagaacctaaaaacaaattataaatgcaactttgcactttgaatggcggatatccatcacagcactaatcatgttccttctgaagacttggcgggcatctgcatttggagtttatggttacttgaatttcaccagaaatggcttcttgggacactccaagaaattcaaacccgaagatatggaaatacgaatagaggggaagaactgcgtggtcacaggagcaaatgctggcattggttttgctactgctgaggctcttgcatcatgtggagcaactgtctatatggtgtgtcgtaacaaggagaagggagaaaccgctctttctaaaattcagtcttcaactggcaatccaaatgttcatttggaagtttgtgatctttcgtccatcagcgagatcaagtcatttgcatccaggttctcttcaaaggatgttccggttcatgttcttgtcaacaatgctggactgat

SEQ ID NO: 198540 - DNA, 443 bp, Gossypium hirsutum
gcggtttcttttctctctgagagcactctatcctttaggccttttgcttctctgcatgtttctgtcttaactttacataataaagagaaaaaaaagaatggtgcccaacagcctgcttcgatcaactctcaaaacccagcttggttcatatataaaaaatgctgctgcgtacagaagttctatggaccacccacttaagggtgcattactggcaagattatatagtaccgagccatctttgcagagagatgattcagatttaaaggatggcaatgggtttaaggggcatgatatgctggctccattcacagctgggtggcagaccactgacttacatcccctggttattgaaaagtctgagggaagctatgtttatgatacccatgggaaaaagtatctggattctctcgctgggctatggtgtacagcattaggaggaagtg

SEQ ID NO: 198541 - DNA, 396 bp, Gossypium hirsutum
aaggggcttatgaaataaaggcacacccttggttcaaagacattgaatggggcagattatgtcaaatagaagctgcgtttatgccacaggttaacagtgacctggacacacaaaactttgaaaagtttgaagagttgggggctcaagtacaatcttcgaccagatcaggtccctggagaaagatgctttcttcgaaggatgcaaattttgtaggttatacgtacaagaatgttgagattgtcaaggaacatcatcttccaggcattgctgaggtgaagaagaaaagcaatgcacctaagagaccttctgtgaaatcattgttcgacactcctggacctcctgatcccccaacaaaggggagctttctcaaccttttgccaacttaattagaggaac

SEQ ID NO: 198542 - DNA, 412 bp, Gossypium hirsutum
gagaatgtttccatcattccaattgtggggttaggagggttaggaaagactgctttggcgcaatttgtctataatgatgaaatggtcaaaaatcattttgagttgatgatgtttgtgtgcgtttcagatgtttttgatgtcaaaataattgtagaaaatatgatcaaatctgcaactggtgaagcaccaaatcaaaaactcgaaatggatcaattgcaaacccaacttcgaggaaaaattggtgggaaaaaatatttgcttgttttggatgacatttggaatgaggagtgggaagaatgggttagtttaaaagagttattagtaggtggggctaaaggaagtaggataatagtaactactcgctctttgagagtagcaaagattacaagtaaatgtcaacctaatgttctga

SEQ ID NO: 198543 - DNA, 1017 bp, Gossypium hirsutum
catcattaaagaagtcaaacaactctggaccactgaatagacatggagatcctgtaaagaaatcatcgggtccacaatccggtggagtgagggcgagtggacctcaaaattctggtcctattcctcctgttctccctgcaacaggccttattacgtctggaccaatctcctctggcccactgaattcctccggggctcctcggaaagtgtctggtcccctggaatctttgggatcaatgaaagtccaagggtctgccgtagttcataatcaggctgtcaatgttcttggccaagatgatgacttttctttcaggaggaacttcccgaaaccaatattttgggcactgatactgcttttcgtaatgggtttcattgctggtggttttatttttgcggcagttcacaacgtcattctccttcttgttgttgtggttcttttcggtactgttgctgcattatttgcttggaactcttgctatgggagaacagctattatgggtttcattgctggttatccaaatgcagagcttagaaatgcaaagaatgggcaattcgtgaaaatctctggggtggtaacatgtgggaacgtgcctcttgagtcatccttccagaaagttcccagatgtgtttatacatctactagtttatatgagtatcgaggatgggattccaaagctgccaatcctaaacatcgtcgttttacctggggactccgattgttggaaaggcgtgctgttgacttctacatctccgatttccagtctgggttgagagcattagtaaaaacaggcaatggagcagttgtgactccttatgtggacgactcaattgttatagatgtcaacccagccaacgaaacattatctccagagttcatcaggtggttgggagaaaggaatctttcaagtgatgaccgattaatgcgactgaaagaaaggtatatcaaggaaggaagcacggttagtgtaatgggagttgttcaaagaaacgacaatgtccttatgattgttcctccgc

SEQ ID NO: 198544 - DNA, 618 bp, Gossypium hirsutum
gtgatgttctttttgatcctcatagtggtgaaatctatgatcgagatgaggatcacttggcgattgatgatggagcttcttggaataatgccacgcaagattgcattaggtgggcgttattcccgagactttttcaacagatatggagacttgaggcatatccgcaggttacgtttttggcctctcgataaggtgcttatggagaagtataatttcagcgagcaagatgctaaagacatggcggacttcctcattccaatccttgattttgcccccgaaaagagacccacagcagctcaatgcctgaaccatccgtggatcagttctggccctccgctcctacaactttccccaactgctcccaaacagcacggagatgatggtacatctaaaagggaaaggaaagaaaacgatcaacgggaaggccttggaacttgaatttgggaatttcaaatttgatggaggatcttctggccctttgatgaaacacttccaaagttgaactgagccttcccccaaccggttttagtcggatggtgatttccttctcccgccgttggcctccccaatagggcggttgttttgtcctgggccctgtcctgcggtttcgccgctttc

SEQ ID NO: 198545 - DNA, 1001 bp, Gossypium hirsutum
  unsure (1)..(1001): unsure at all n locations
ccctatccaacgaaacttaaggatgtcgccagctgctgtggttgaagccgccaatcctgagactgagcaggttccttctactgaggaatccaagatagagcttcagagcgaggaggctgtggttgaagatgttaaagaagatgagaaagaacatgacgacgacgacgacgaggatgacgacgacgacgacgacgatgataaggaagatggtgcccaaggtgctaatggaagttcaaagcaaagcagaagtgagaagaagagtaggaaggccatgttaaagttaggcatgaagcctgttactggtgtaagcagggtcaccattaagagaacaaaaaatgtgctatttttcatctcgaaacctgatgtctttaagagcccgaattcagagacctatgtcattttcggtgaggctaagatagaggatttgagctctcagctccagacacaagctgcccagcagttcaggatgccagacattggttctttggcagctaagccagacacttctactgcagctgctgcaccggctgatgaggaagaggaagaagttgatgagactggtgtagagcctagggacattgacttggtcatgacacaggctggggtttcgagggccaaggctgtcaaggctctcaagagtaacaatggtgacattgtgagtgctattatggagcttaccacttaggcagtctctatcgtataagtcggccctggtcgactgtcaatgagtgtttcggaattagtatcaatgttttagttgttatagtcaaggtggctagatttttaccctcccatttgtttcgcttgtcattgagacagttttcttggaacttatgatcagtgtcactacgactgattgtttcctttgcccatttctataagcaaattttgcaactcnnnnnnnnnnnnnnnnnnnnnnnnnnnnnnnnnnnnnnnnnnnnnnnnnnnnnnnnnnnnnnnnnnnnnnnnnnnnnnnnnnnnnnnnnnnnnnnnnnnnnnnn

SEQ ID NO: 198546 - DNA, 585 bp, Gossypium hirsutum
cccacgcgtccgcccacgcgtccggtgatctcggtgttgttggggcggctgatggaccgtcgtactctgatgatacgggggaggatatgttctctatgttcattgatatggataagttcaattcttcttctgcaacatcgacttttcaggttggtgagtcgtcagcccccgccgctgctccggcaactgctcatatggctgctgctgcatggactgggatgaatggtgagaaccagagtgttactgttgggtctgccgtgaaaccgtgggttaggcaccagacatagccagtcgatggatgggtcgaccagtattaagccggaaatgcttatgtccggtgcggaggaagtttcacctgctgaggctaagaaagctctgtctgctactaagcttgctgagcttgctattattgatcccaagcgtgctaagaggatctgggcaaataggcagtctgctgctaggtcaaaggaaagaaagatgcgatatatagctgaactcgaaaggaaagttcagacgttgcaaactgaagcaacatcactcaatgcccagctgtctctgttacagagagacaccggtactctgact

SEQ ID NO: 198547 - DNA, 488 bp, Gossypium hirsutum
agtatgcaacaacatcgaaaaccctcctcatgttttggctactcgtcacctgcattgctgcagtttcattgggatcagcagtggaaacccaaggttttgggggatgcctcatgtcgttcgcaagtgtaaaaggttgcgttgaggcaatccacgaggttgtttcgcacgagaagttcgatgcactccaacctaaatgctgcaaagcaatcatcaagctgggcgacaattgttggccaattgtttttcccaatcaaccttgccttcctgtcttactcaagaccgtttgtaaggttttagggatggttgtgaaagttgagaatgttgcagcagcaccttgatagtttgcgctgttgagattttaacttccttggattaagagataacacagctctattcgttcttttagtctttcaaatcttaaagaacaagtattctttttactagtttgccacatcgccatttttctattatcccaatacattagtata

SEQ ID NO: 198548 - DNA, 726 bp, Gossypium hirsutum
aaaaaaaaaacatagcgaagaaaaagagactttttctgtcagattaggtttctctttctctctctctaagagtcctatactcttaactcttatcctttttgcggctagggtttttctttctacagtacctcttctaacttttttttttaatttattagaagattggtttggtttcataatataaaaatctaatggaagttttgtaagagtaagggattttgtggttattataaaagaaagattctaaggggtttggaagtggttagtgtggattgttcattaaaaaaaaagaaatggctggtttgaacccttttgatttgttgggggatgacgacactggggaactatcattgctgatcgctgctcagcaaaaggccgtcgcagcggccactgccactgctgctgctccaaagaagggcccagcaaagcctcaagctaagacgctgcctgcaactcaggctaagcttccctccaagcctctccctcctgcacaggctgtgagggaggcaaaaaatgaaggtgctcgtggcggaagccgtggtgggcgaagatatggacgtggtcgtgttggtagcagtggatacagacgtgattttgcaaatgatgagaattccttcagcaatagtgctgtacgtggagatgaagaaagaaagaaaacacgaggataaagaggtggtagaagaagatgaagagaaagaagagaagaagaagaaaaaaggaaagaag

SEQ ID NO: 198549 - DNA, 603 bp, Gossypium hirsutum
gcggagcatgaagattctgtgttttccacggtattacttgagaaaacgcagtctctcaactgaagctctcgttcttctctgtgataaaattaagatcttaaaaaaatagaaaagcaaatggccgcgtcgggggcaggtgtgccgatgagaagagaggttcttcgcctccgccctcccctgcggcgagtggcgcgtcagttcggcgactacaacataagggagtactctaaacgtcggaccatggatgcgtttcgagacaacaagaacttacgcgacccttctcagctgtccgccgctttctccaacggtaaagctcagttggaagttgccaaaagacaatctctcctctattccctctatgctccaaaggtcaaaagcatcatggatttttaaaccctcttcttaaccatatacatacttatatcactatttctagctccttcagaaaagaataaactttgatttattgagagaataaattgagttcttttagcgcatgattttatttatttatttttgtagttatgtaataaacagtctgggatggcatgtgggaatttgctaatggggttcttttttattttatgcttttccttcttcttg

SEQ ID NO: 198550 - DNA, 1253 bp, Gossypium hirsutum
  unsure (1)..(1253): unsure at all n locations
gcagcgtaagataagaaagcatggagaaagattttgggaaggagattatggagatgagggagtgttataggaagggaaacaccaaacatgtaacatggaggagggctcagctcaaaggcttgctatcttttcttgcggaaaaagaggtggaaattttcacggctttaaacctggatttagggaagaattatgttgaagcatttcgtgatgaggtaggacttttaaagaaatcactgaatcttgcattgaaggatttgagaacatggatggcaagcaaagaggctaaacttccttcaattgcactgctttcatatgctgaattggttcctgagcctcttggccttatcctcgttatctcttcttggaactttcccatgggattatccttggagcctttgataggagccatagctgcaggaaatgctgtggttataaaaccatcagagttggccgctgcaagttcttctcttcttgctaataccctccccaattaccttgatactcaagctatcaaggtcattgagggtggccctgctgttggtcaacaactgcttcaacacaaatgggacaagattttcttcacaggaagtacaaaagtgggacggataatagtgtccgaagcagcaaagaatctaacgccagttactctaaagctgggtgggaaatgccctgctattcttgattccctttcctggtcttgggacaaggaggtggctataaatcgaatcattggggcaaaatatggatcttgtgcgggtcaagcatgtatatcaattgactatctattagtggaaaagccattttcatctaccgtggtggaactgatgaaggccatgatcaagaaaatgtatggagataaccctagagaatcacacagtatttcgaggataattaacaaacatcatttcttgagactgaaagaccttttaactgatcaaaaggttaaagactgtattgtctatggcggttcaatggatgaaggcagcttgttcattgagccaacaatattagtggatcccccactaaaatcagcaatgatgacagaagagatctttggtccattgcttccaataatcacgttggataagattgaagacagtattgattttatcaattcaaggcctaaaccattaccactatatgctttcaccaaaaatgaggtgttgaangagagattggtatctgaaacatcatctggaagtgtggtttttaatgatgcaatcattcagttcgcagctgacacccttccatta

SEQ ID NO: 198551 - DNA, 439 bp, Gossypium hirsutum
  unsure (1)..(439): unsure at all n locations
tccgggncgggaatcccggggcgagccacacgcgtccgacaaaacagagagctttggctctctccctctctctttctcttttcagctagggtttggggggcctatcatcgccaccgttgtcacggcgccaccacagcggtggttggggcggtgcgagtcgcgccttctatccccggttaaagaccccctcgaaggccgttctttctcggcctaaaaacgcaaaagagaagggttcactttcctctttcaaattcgactacggcgacggagaggagaactccgacgttgtggccacggggtggtctcggtaagacccctttctcttttcttctatttatcttagtttataaaaaaattaaaaaaagcagaatgaatgaaattagaacttaaaacgaaaatggaaataaaaatcaacctttcttagattcttgctattttg

SEQ ID NO: 198552 - DNA, 419 bp, Gossypium hirsutum
tttaactcatccatttttctctcatccaaacaactataaaaaggcttttttttttttgagaattgtcccgagaaaattaaatccttgtccttaacccagatccgtagatcatcacctccaaattcttgccgataaattagttccttttagattcttttttttttgtgcatattccctttgttgggcaatcaaaatatattctttttttttcttcattaatactgctaagtttttatctctcataacaacctaactttttctcttttctctcccacctagtaaatgcagcctgatgatcccaaaaacgcttggtttggttcactgattaatgggtatttagtagatgttcaatagactttatccctttgcttctccttgtagtcactagaagtagcggttttttttttggaatttggagg

SEQ ID NO: 198553 - DNA, 600 bp, Gossypium hirsutum
aggggacccccttacaatattagaatcggcctcttttatccgaaataaaaaagaaaaataaaacggaattctccctttttttcatattttcgtcctttttttgctgttattctctgctattctcgagtcttctctgttgttgctgcgttttttgtccgtctctgtttgttttctgtgcaggtacaggtactgagaccgtacggtgacgtggcgcggtgcaacgcgtgaaggcgtggtccctggtggcggcgtggctcgcctcggaggcgtggctttggcgcggaggcactacatgcgcgcgggcataacacgtgcgagggggaaggctggctctgttgcggcgctggaggctcaccctagctgctaggctttcgcttatggctttgggcttaggtgatttgggccattgggtttagtgggtcaggctggtattgggttaacagtttaggcttgggactttggattttgtaatcgggtttgggcttaatctacttggtttgtaatttggactgttaataatttaattttttatattattattttttcactccgcttaaaaaaaaacccacgcgtcaacgaacgcgtgggcggacgcgtggg

SEQ ID NO: 198554 - DNA, 415 bp, Gossypium hirsutum
ttttccttcaccttgataatgggccggttaatctctcccatttctttcttcaacaatacgttcgaaactcggctaactcactgaacccaactcaccatggcttcgattctcaaccccccgccgccgccttactttcaccgtacctctttgcctacctccgtttcttcctcaccggtgatcttatcttatcctttcctcaaaacgacgtctcttcaagttcggtttaaagcgttgaggacctggtccgacggcgggaaaatcgggagccaggaagcttacggcgccgatttcttgaggaagccgagtacagtgccgaagaaggacagtgatggaattttggaagaagaggaaggtagtgagggaaaaagaaacagaggtgaatggactgattgggaagataggattttagaggaca

SEQ ID NO: 198555 - DNA, 425 bp, Gossypium hirsutum
  unsure (1)..(425): unsure at all n locations
agnggacgcgtgttatttatccacctatttgatgttaataagaatgtaatagtggggggtactctttctccttggcctgaaacgctgtcaaataacaagaaaagggttattcaacaactggttcatgggcaagagtgtgctactcagcttcagattcttttccataatccctctgaagaaggtgggcgtttgtcggctgaggaaatacttgtgcagaacatcttgacatctttcaatcacacactttctgctctgagttgcatcgactcttctgaggtttctcagaaccagacaacctgtaatgatgattccccatggtgtgaagatcggagatccgagggttgtagtgagagcagcaagagacctggctctaaggataagaggggctgttacaagagaaagtatgatttcttcattctacatgt

SEQ ID NO: 198556 - DNA, 476 bp, Gossypium hirsutum
ttttcctttaactacaaaggattatgtacaccgaatagggaggactggaagagctggtaggatgggaggtgctcacacattcttcacacagcaaaataagggacttgctggagaactggtaaatgatgtaaacgaagctgggcaggttgtaccacctgcactattgaaatttggaactcatgtaaagaaaaaggagtccaagctatatggggctcacttctaggaaatagctgctgatgctccaaaggctaaaaaaataacatttgatgactcggatgatgaaaactgacgcacatggcctgcagtaaaatatgtagaattggttaatagaaactggtacacactatttttaattctatgacgttccgccatatttatttactttttttaaaccagttttgttaaagcattaattgatctgaatattcatcattctgttgttactataaaacctagatttgattattttcattgat

SEQ ID NO: 198557 - DNA, 455 bp, Gossypium hirsutum
ctctcgcgtccgcctcaacctacttcagccaaagcggtgggccctcgactccatcgtccccaaccgcacgcgcggtcgccttttgaaaacaattttcagcctcgagatccctccttcaccctcaatttcgacgaagcaaggaggagtcaatggaagattcgcgagggaagccttttattctcttctctttttttttgaatatcagaatcacaaatccaaaaaaaaaagagaaactaaagaaaataaagtgtttagggattttttgaatcgaaaatcaccttgctctgttttatcgattgctttttattgcgttctctttgtgtgcgtaaaaaatatacaatggctattacatggcttttatagccggaaatagaggaaaatgaaaaagaaaatacaaatttcttggcggtttctttctttctctttgctgtgctggtgtttttgtatttgcttgc

SEQ ID NO: 198558 - DNA, 1443 bp, Gossypium hirsutum
  unsure (1)..(1443): unsure at all n locations
ctttcttacaggaaatggtgtgtcctgagttttctcatcctcaatcttcttctcccatggcgaaacctcggaaccggtcgttttggtgtcttcccgatgcctttcttgtctttggtgttgcatttttagctcttttattagtagcgtcattttggtcttttttcactccaacaccaaactttgaacccactgtaaccgacccaccctccaagttgagcatgaatccagtcgattgctcggaaagtgggttcggagttaacttaaaatccgatcccaaagaccccaccttttacgacgacccggagatgggttactcccttgaaaagccggtgaaagattgggatcaaaaacgcgcagagtggttgaagcaccatccttctttcgccgccggagcacgtgaaagaatcgttcttgtaactgggtcccaacccaagccatgtaagaatcccattggtgatcatttactcttgcgtttctttaagaacaaggttgattactgtagaatccatggctacgatattttttacaataacttgttattgcaccccaaaatgggttcctattgggcaaagttacctgtggttaaagcagccatgttagctcaccctgaagctgagtggatctggtgggttgactcggacgccttgtttacagacatggagtttaagttacccttagaaaggtacaaaaaccataacttggttgttcatggttggcctaagttgatttatgagaagaaaagttggaccagtttaaatgctggggtctttctgattaggaattgccaatggtctatggatttgattaacacttggtctggcatgggtccaatgagtaaagattatgagaagtggggtcagattcaacgatcaacgttcaaagataagcttttccctgaatcagatgatcagtcggctctggtttacttgctttatacagaaaaagagaaatattatgatcatatttatttggaaggagagttttattttgaagggtattgggttgagattgttggagggtacgagaacacaacggagaggtacttggagattgagagaggggcgccaaagttaaggaggagacatgctgagaaagtgagtgagcaatacgcagcgtttagggaagaattcctgaaggaagctgggaatgggaaagggagttggagganaccattgatcactcctttcacgggttgtcanccttgttttggcgaccataatccgatgtttgctggggagtcttgttgggatgggatgctcaaagctttcaacttcgctgataatccggtgttgcgcaggttatgggtttgtgcccccggatctacatgattcctccactgttactgaaattccctttgattaccctgcggatgagggtccatggtgaaaaccantacnaaacataccaaaagagaagagaatagctagagtgaggcggtgcgcc

SEQ ID NO: 198559 - DNA, 377 bp, Gossypium hirsutum
cttccgttttccttaacttaactctcccaaaaaaaaaaaattcagttttagggtttaagactagaagacgtaaaatctagggtttagggttttcatttttctgtttggtgtaagtgagaagggcaaaaatggtggctgacagaggaaagaaggcgaaactagaagagaagggagtcgaagagaactctgaacagattgatggcgcactcgtcttttccatcgagaaacttcaagagatccaagacgagcttgagaagatcaatgaggaggctagtgagaaagtgttggaagtggagcagaaatacaatgagttacgcaagccagtctatgataagcggcacgacataatcaaatcaattcctgatttctggttgacg

SEQ ID NO: 198560 - DNA, 963 bp, Gossypium hirsutum
cggacccgtggggtcagcgaagagttggtatatttggggatgttttccatttcaattggcggtgaattcaattccaacattaacccatttagctccattgagtattttcgctgatattgtggatcttggggcgatgggagcggtgtttgttgaggatgtgtcacttatcatgaagcaaagcaacgagattatcgcttttgggggtctctccgtgttcttctacggtatgggcgttgctgtttatgcgtttgaaggtattggtatggtttttccaattgaatctgagatgaaggaatccgggcgctttggcaaaatattggccctgagcatgggattgatttctttaatgtatggagcatttggcgcacttggttactttgcatttggtccaaatacaaaagacatcattactgcgaatcttggtgccggctggatcagcgctatggttcaaataggtctttgcgttaacttatttatttctttcccattgatgatgaatcccgtttatgagatcgtaaagaggcgatttggaggagggaggtactgtttgtggctgaaatggctgctggttttgattgttagcttggtcgctttgttcgtcccaaattttgccgatttcttgtccttgatcggaagcagtgtgtgctgtggtttggggtttgtattgcctgctttattccatttgttggtgttcaaggaagagttggagtggaaaggatggactgtggatgtcggaattgtgaccttgggccttgttcttggagtttcaggaacatggtctgctcttgtggagatgttctccgtaaaggtgtagggatacagcgtcacaaatatcgtgaccttgggctttgttcttggtgttttaggaacttggtctgctctcatggagatttttatctgtgaaagcgtattggtacagtgttgaaatgaaggttaagtttctgaactgcttcatgatatact

SEQ ID NO: 198561 - DNA, 658 bp, Gossypium hirsutum
gacgcaagaaaaaaataaaaagggaaatcccctttctctgctagggttccagtgcttagcatgggaaccccgccgccggcccgccttcccacgttctccgagcgggccgccgtaatagttgacgggcacagacgcaagacgggcttttaatcccgcttttaagtgtggtgaatgacaccagtgagggggagcctaaagagaaaaaggagaagtctaaccccctttagcccaaccccgacgacgacgaaaggatctccgtcgacggagccacgcggcgggttcaggcgtgagacgcgtggacgaccggtggttggcgagccttgggcggtggcggcgtgcgaggaggtggaacggcgcgcattgttggagcctggcatgcggcgctggggcttagggtttgctcctttctgtcgaaattgttaaagtcatttgggccaggttttttattttgggcccgttgggtgtatttaattttggctttgggctactactgtaatagactgtcttattttggattttgggtttctatttagggcccgggtaaaaatgggctcttacaaatatgtctcctcaaaggtcttaagaatgccatttttgccaaacatatgcctaacatgaaccatccaggaatgtttgcaaaggtccttaatggcacgcc

SEQ ID NO: 198562 - DNA, 417 bp, Gossypium hirsutum
  unsure (1)..(417): unsure at all n locations
cggaagaagtccatgtntgctccaaggaaggactcattatttgagcttggactgctttagaagataaagtacttacatcatatattcatgttcatggtgaaggcaaatggagaaacctccccaagagagctggtttgaagagatgtggcaaaagttgcagacttagatggctgaattatcttagaccagatattaaaagaggcaacatctctcatgatgaagaagaactcattataagactccataatcttcttggcaacagatgggcttttaatagctggaaggctaccccggcgaacagacaatgaaatcaagaactactggaacactactttaggtaagagagctaaagctcaagcatccattgaagctaaaacaataccaaccgagtctagactcaatgaaccctcgaaaagt

SEQ ID NO: 198563 - DNA, 757 bp, Gossypium hirsutum
cccacgcgtccgccgtgaaacacatatggttcactgagtccaacagccggagaaagacccggggtagtgccccgatgttaaccaaacatgacggtaaggcaaaagaatttgaagccgaggtccggacattgagctcaataagacatgtcaatgtggttaagctttattgcagcattactagtgaagactcaagcttgttggtgtatgaatacttgccaaacggcagcttatgggatcggttacatacgagtaagaaaatggagcttgattgggatacaaggtacgagattgcaatcggagctgctaaaggactcgaataccttcatcatggatgcaaaaagccggtgcttcaccgagatgtaaaatcaagtaacatattgttagatgaatatttgaagccaaagatttcggatttcggacttgccaagattgttcaagccaatagtagcattggtaatgactccacccatgtcattgcaggaacccatggttacatagcgcccgaatacggctacacctgcaaagtcgacgagaagagcgatgtatatagtttcggggtggtattactggagttagtgaccggaaaaaagccaatagagccggaatatggagaaaataaggacattgtgagttgggttggcagcaacttaaagggcaaagagagtgatttaagcatagtggacccaaagataccacatgcattcaaagaggatgcaatgaaggtgttgaagattgccatattgtgcaccactacact

SEQ ID NO: 198564 - DNA, 927 bp, Gossypium hirsutum
catcatagaggaattttattttaaggaaataaaatttccttcccatttcacaaacttcacgccattcttcccttttctaagatctaaaaaaataaaatcatggctggggccgtagagatcaaaactgcttcaccgaacgttaccaaggaggaactttcgatcccactgctgtagtaccggaaccgttgcctccggttgttacggccgcaaacggtgaagatgcaggcgtggataagctggataagaagagcagggagattgtgttggggaagaacgtacacaccacgtgcttcgctgtcacggaaccggaagcgaacgatgagtttaccggtgacaaggaggcttacatggctggtgtcttggctcgatatcgcaaaagcctcatggagcggaccaaacatcatttaggctacccgtataatctggactttgattatggtgcactagcccaattacagcatttctcaatcaacaatcttgtagatccgtttatcgagaggcacttaggagttcaatcaaggctgtttggatatggttgtgcttaattgatttgttcgtttgtgggaatttaataattaatggtttcctgtggtcgtatttcatacttgtgtcacactgagacattcttacgtatattctttatctctgtaatgctatcgctgtggatcttcatattatcatggtctacgtattctattctctatttatcgctattattctctatctcgtacgcgtgctgcactctttcttgtcttattttctctcattttgtattctctattcgttctacttcttgcttgtagtataatgaacgtagtcatgtcatattatatcttattgtcgtcttcttgctatatatgtatctctgtcttagtccttgaagatatacttatattctcatgtagctcattcattctatctattgcc

SEQ ID NO: 198565 - DNA, 706 bp, Gossypium hirsutum
gccggcgccgaatctcaggctcaccgttgttttttttaatttcttttaattccattgagaagacaaaaacctaaattcaaaaccctaatttgacaaactttcactctcaacacccaaaagagtgagagcatggagcaatatgaagagcatgggcacgaggtgtgcggaggggagattcccgatgaggaaggagaggtggacgctgacatgtctggtggagctgaagactacgaaggcaacgaacatgatcttgagcacgatcctaattccaactccaaggatttggaggacatgaaaaagagacttaaagagatcgaggatgaggccggagctttacgtgaaatgcaagctaaagtcgagaaggaaatgggcgctgtccaagattcctcaggtgcttctgcaactcaagctgaaaaggaggaagtcgattcgcgctcgatttatgttggtaatgtagactactcatgtacacccgaggaagttcagcagcatttccaatcctgtggaacagttaacagagtgacaattttgaccgacaagtttggtcaacctaaaggattcgcctacgttgaatttgttgaaatgacgctgttcaaaagctctgttgttaaatgaaacagattgcatggtcggcagttgaagggtgctgtgagagagtgaaggtgctggagtgaggcatttggaagaaggcgaccaaagcatattt

SEQ ID NO: 198566 - DNA, 447 bp, Gossypium hirsutum
cccacgcgtccgaaacccataaattccatttatttatcatattcagaatctctttctcataaattctggtattttaactataattatatcacctttactttccctttagttgattcgcagtggtgaagatgatcataaagcacgtgcacactcgtagtgacatcaaaccaggatccacttgatcatcccaatatcatcgtttaattagttcccgttgcggctataatttatcagactagcaagttcttaaatgggttgattcaaagtttgatgattgattgtgaagaataagtgaagtgaaagcacagaaaataacagcaaacacaacagaaactgcatccgaggccgacgtactttcatgggaaccctgaaatccaagcacctgatggtcttcaaaccctcgtactcatgaaccctgcttatgttcagtactccgacaccactccg

SEQ ID NO: 198567 - DNA, 414 bp, Gossypium hirsutum
cccacgcgtccgcccacgcgtccgcccactcgttcgcccacgcgtccggtaaatgggggaagtgaaaatgactgccctgagcagtctgtcattcgtcgtgtctctagtgctgataagataactcttcgagacatcgctagagaaagagttgatgttatctctgaaaagatgcatcgcctacctgatgagtttctagatgagctaaagaatcaactcaaggctattctggaaggcaatggggggttcgcaaaaccgggaggagtttttgattctgcagaagcttgttcaaagcagatctgatttgacagcaaagactttgattagagctcaccgggcacagctcgaaatcctcgttgcaataaatacgggaatccaggccttcctgcatcctaacatcagtttatcccaaacttc

SEQ ID NO: 198568 - DNA, 556 bp, Gossypium hirsutum
gcgaatacagatttgatatattcttttcttttgtgtcgggcacggccaccggcggcgggggggtctttgttagccaattatgcttcctccgacgacgatgaaccccaacaaatcactcaccctcctcctcctcctcctcctaaagtttcctctctccctcaacccaaatcttcttcccttttcactaatcttccgcagcctaaacaatccctcaaatcctccacaaaacaccacgacgaagaccgaaacggcggcggaggaggtgaagtagctgttcgtgttcccaaacccgctcttcctcatccccaaaacccatccaatcttttctctcatcttccccaacccaaaccacaacagccacccaatcctcctgtcgccaaaagaatcgttcaattcaagcctcctataaaccccaatacccacgtggattccgacgatgacgacgaggaggagaacgaaaggccaaagcggggagaatccgaaaccctagctcaaggtccttccgtgaaatcctttctatcaagcatacctgctcccaggaactccactacattag

SEQ ID NO: 198569 - DNA, 553 bp, Gossypium hirsutum
ttctttcgtccgactttcccgactttcttttctcttaatttactgaaagcttctttttagtggaaatggagattcttccacagcgatcatcattatcctcaactttgaatcccaacgctccattgttcattccattagcatatcggatggtcaaggatttctctgatcaatggtgggctctcgtccaatcatccccttgcttccgcgactactggcttcaagaacgcttccacgatcccgaaaacgacgacgtttccgacgacgacgatgatcctctcttccccggcgacctcgatgacatatttgagcaatacgacgacgttttactcgacccaagaccggaggaaaaggaaaagaaattggtaccgtttgggacatcgaagtggcggaaggaccgagttgtgactgagtcaccgaggtttatcgaaaaagcacccaagattgtgaatgttaaagtgagtccaaggactattcaccaaccaaggtaaatcaactcgtactgagttgacatgggaggtctcattttaagctttttaacttcttttttcttatt

SEQ ID NO: 198570 - DNA, 413 bp, Gossypium hirsutum
cccacgcgtccgcccacgcgtccgctatgattgttctcggttcctcaaggatcaccctgggggcagcgacagtattcttatcaacgccgcaaccgactgcaccgaggagttcgacgccattcactccgacaaagccaagaaaatgctagaagattatcgaatcggtgagttgttaacgtcgggatatgtttccgactcggcggggtcctcgcctaatacttccgtgcatggagcgtccaacatgagctttttagctcctattaaagaagttgcgcccacaagacctgtggcgcttattccacgtgagaaaatcccatgcaaactcgtcgaaaaaacatccatctcccatgacgttcgtcggttccgattcgcgttgccgtcggaagatcaagtgctcgggttacctgtaggga

SEQ ID NO: 198571 - DNA, 422 bp, Gossypium hirsutum
cggaaaaaccgggccgaccgacgcgcccgggggaaactgaacccaaagctatacaaataggttctaaagatagatcaaagaaaacgcccgccgcatgttgttttgtttcaacgcaagttggtccaaaaatggctaacatgcttggaaccgaccatgatttgaacttcaaagagaccgaactgtgtcttggtttgcccggtggaatcgctgttgttgctgcaggtaatgaaacggaaagttcttcttccccaaagactaatggcaagagaggcttctctgagactgttgatttgaagcttaatcttcaatccaaagaatctaccatggatctaaacaagaaccttgatgacaacggttctaaggaaaaatcaggttctgccaaaaatcctgcaaaacctccttccaaggcacaagttgtgggt

SEQ ID NO: 198572 - DNA, 718 bp, Gossypium hirsutum
cggccgcgtcgacgaaattttaacacctgccaccaagtggtgggatttagcgtttacataatagagcgggtagtacttgatttccccaagtcaaagctttcccattttaaaagtctcgaagctccgtgtactttaaatatagcaaccaagcttcaattgctctctccccccgcacaggcatagccactcttccttgtttttcctttgtgttgatagcagcgagtcatgtcgggttattattattacgatggtcaggcggatcagtacgaggcgcactatctcgatgcctgctctctttgtcgcaaaccgcttcgcgattccgatattttcatgtacagagggaatacgccgttttgcagcaaagagtgtagacaagaacagatggagatggatgaagcaagagaaaagaactggaaatcgggtagatctcttagaaaatcagatgcccagaactccactcctaacaaagctgtacggaccggcacggttgctgtggcctaatcccatcatcttgctttttgagtgaaaaaaaaagatgtttaaaagatttatcatgtgttaatgctgaagtgttgatggagtgaagtttccaaggcacttctttcggtacccgtgcctgttttctaagatcaaaaagggggaaagggcaaagtacttgaacgattgattagagtgtggaactaatacataacaatatatgctaaacctaatcaggatg

SEQ ID NO: 198573 - DNA, 520 bp, Gossypium hirsutum
cccacgcgtccgcctttttcattttttgccactctaaacaagcgactaagggggggggttattattattactcagggtgcccagatcactacgaggctcattatctggatgcctgctccgtttgcggcaaatcgcttcataattccgatattttcatgtacagagggaatacaccgttttgcagcaaagagtgtagacaagaacagatggagatcgatgaagccagagaaaagaaattgaaatctggccgatctcttagaaaatcggattcaaagagctctacacccaacaaaactgttcggacgggcattgttacggtgtcgtaattacatcttcgcttcttctttttttttctttttatatatgataattgtatcatcatcaattttgaaaaaaaaaacgaaaaaacaagatcgggacaagaagggaaaaagaaaaaggaaaccttcaatggaattttgtattttcgttttattattgggtatgatgtttgagaggagtggatgtttataaggggggg

SEQ ID NO: 198574 - DNA, 872 bp, Gossypium hirsutum
atctgattccatggtgccactagtttatggttgttatgtgagtaattcaagtggtggggcggttttcatggccggaagtttgattccagaaaaagttgccaggaagatagtggtatgtgatcgaggaggtagtgcgagggtccaaaagggtgttgtggtgaaggatgcttgtggcatagggatgattttgacaaacacagatacttttggagaagagttagtcgctgatgcgcatctcttaccttcagcagctgttggacagaagaccggggatgcaatcaagaaatatatatcttctactcgtaatccaacagccaaaattggtcctggaaccacaaagttgggcgttcaaccatcaccagtggttgcagcattcagttctagaggtccaaacccagtcactccagcaatacttaaaccagacattattgcaccaggggtcaatatcctagctgggtggactgctgctgttggtccgaccggattacagagtgacccaaggcatgtaaacttcaacatcatttcaggcacatcaatgtcttgcccccgtgttagtggcttagctgcaattgtcaaggctgctcatcctgaatggagtccagcagccattaaatctgccctcatgaccacagcttatacagcttataaaactggtcaaaagatcgaagatgttgccactggaggaccagcaacgccgtttgattatggtgccggacatgccgacccagttgcagcccttgatcccggccttgtatacgatgccactatcgatgactacctcggttttctttgtgctttgaactacacaccaaatcaaattaagagcactacccacagagacttcacttgccagacaagtaaaaagtacacct

SEQ ID NO: 198575 - DNA, 783 bp, Gossypium hirsutum
gctgtttccagttataacttatgtcatagaaataatcgatttctagattattagcttacttatttctcaatttttttctgggttttttatctttataggtgtcagaaacgatgtggtttatgaatctagtcaagctcttatggagaagggggcggtcgaggcttttgaggttgccatggtgaggactcaagctcgaatagtcgaaggggatgcgggtaaggtaatttgcaaggaagcagagaggttgaagccagcagcagtggttatgggaactcgtggtagaagcttaagtcaaagtgtatttcaaggaagtgtaagcgagtattgcttccacaactgcaaatccgcacccgtcataatcgtacctgggaaagaagctggagatgaatcactgatatagtggcaaaggcaatggttaacttgagaaaccattagtcatggaatcgatattgtttgcttgtagcactgtatgtaaagattgattgcttggttgtttatctgaatggttgcattgtatgggctgtgttgcttcagagcctcttatctagtggtaccatacgatatattgggtgtaatatattcggtttggtatttcgattttatttgccgattatgcatccgaagtgcatcagattaccgcccgctgaccgcctcaaaggactctacttcacagcaatctttcttcatggcattaaacaagtgcttgctaataaaatagatattattaattaagactcgggggcggactaatccttggggttaatctgggtgttactggagaag

SEQ ID NO: 198576 - DNA, 685 bp, Gossypium hirsutum
  unsure (1)..(685): unsure at all n locations
acgcgtacgcaacccgggcagccacgcgtccgcccacgcgtccggaaactgaggacaaagatgttgtatcagagggccttggttcgattgttgtatatgataaatggatttcacccccagtaattggccaacatcccaaagcccgctaccagcatggagctgcagtttttcaggataaaatgtatatatatggtggaaaccacaatggacgttatctaaatgacctccatgttctagatttgagaagctggacttggtcaaaggtcgaagctaaggttgtacctaagtcagtggaatcaccatccccagtgaatatagccccgtgtgctggtcattcattgatcccttgggagaacaagcttctttcaattgctggccatacaaaagtgccttctgaaactatccaggtgaaggcatttgatctgcaaactggtacatggtcagtgttgagtacttatggcaaagcaccggtcactcgtgctggtcaatctgtgacccttgttggaacaaccctagtgatatttggtggacaggatgcaaaaagaacactcttgaatgatctacatatacttaacctagaaacgatgacctggaatgaaattgatgctgtgggggctcctncatcaccacgagctgatcatgctgctgctatacatgcagagcgttaccttcttggttttggtgg

SEQ ID NO: 198577 - DNA, 431 bp, Gossypium hirsutum
gcgcccacgcgtccgattttctttccttttcttttctttttttccttcttctttgtgtagacagatacaatgatgtcaattaacaaagggaaagaaatagctgaaggttcttcgggaccggctgctgttgctgttggtgctgttgttggtggtgttggtgggggtgatccagcggaatccaccgccgttgagcaggtacgagtcgcagaagagacgggattggaacacgtttggtcagtacttaaggaaccaaaggccaccggttgcactttctcagtgtaacgctaatcatgtccttgaattccttcgttatctcgatcagttcggtaagactaacgtgcacttacaaggttgcgtgttcttcggacaaccggagccgccgagaccatgtacgtgccctcttagacaagcttggggtagtctcgacgctc

SEQ ID NO: 198578 - DNA, 386 bp, Gossypium hirsutum
attgaaacctctgaaactcagaggaaaatgaatacctgaaaaagcgaagccaaatcctcaaaggacaaatctcagtacaagtccctaccaagcttatgcagaagcccatgaaaagacagagacttaccccagtaccgccgccatcggttcatcgtctgtctcctgaacacgaaatctccatcatggtcgccgccttaaaaaacgtcgtcgctggttatacccccacctccacctccgcagtctccgtctccgccgttgatattccttccgatttcgttcccctggtgacttccactgttagtactgctgggatcagccgtgattttgacgacgcgttgtttcaagcgaacgaagttatggataagtgccacgtgtgcagatttgac

SEQ ID NO: 198579 - DNA, 437 bp, Gossypium hirsutum
gaaagggatgtccgggctctatgggatcatctcttggccttctgggaaaattaagagggtaggccactctttaaggaacctccaacttgtgatggattcggtccaaggtgctgagggtgccattcaaatggggtcgttctactcaggcttcccggaccttagctcaccaaccctttctggtaatggccgttcttcgtctttgaagatcagggggcattcaaagccatctgaacctcaacttgagaactgcatgttcagccaaggagctgctgctccgaagtctccatcttcttcatgcagccggagctctggttcaagtacctgtggtgccactgccggggcccagcatagtacgagtatcagtgctttatgtagtgcagatgggttgatggtggaagaccctggtggagcactaaagagagctcgtagtgatgctg

SEQ ID NO: 198580 - DNA, 492 bp, Gossypium hirsutum
tttccctccaaatagggaaataccatcgctttgcatttgcaaagcctttcactgactcaaaaataacaatgacgtcctcttcatcgtccaccgccggcggttacgacgtgccttgggtagaaaaatacaggccgagcaaagtctcggtcatcgtcggcaacgaagatgccgtgtctcgactccaagtcattgctcgcgacggcaacatgcccaatctcatcttatccggtcctcctggaactggtaaaacaactagtattttggctcttgcacatgagcttttggggccagtctataaggaggctgttttggagcttaatgcatcagatgacaggggtatagatgtcgttcggaacaagattaagatgtttgctcaaaagaaagtaactttacctcctggacggcacaagataattattttggatgaagctgacagcatgacatctggtgcacaacaaggccttgaggaggacgatggaaatatactcaaac

SEQ ID NO: 198581 - DNA, 580 bp, Gossypium hirsutum
cccatcggttcatctcactactgttcaagcgaagttacttaaagaaaggaaaacccatggctcctagatcaaaacccagcccgattagcccgaatcccgacccgagttctaaggagatccgctaccgcggcgttaggaagcgcccatggggccgttacgcagccgagatccgagacccgaggaaaaagactcgagtctggctcggcaccttcgacaccgccgaggaagcagcgcgtgcttacgatgcgaaggcgcgagagttccgcggcgctaaggcgaaaacaaatttcgccgacaacaacgccaacgacttcacgcgcagccctagccagagcagcaccgtggagtcttcttctccgccgccacttgaccttactctggccagcccgtgttcttccctccctgtgacggcgcagcgtccggtttacttcttcgatgccttcgctactggcggttcgggttgccccgcatccggattcgctcaaagcgactccgattcgtcgtcgtctgttgtagattttgaaggaagagtgcggcggatagtgtttgatcttgatcttaaccagttgccagctgaaat

SEQ ID NO: 198582 - DNA, 551 bp, Gossypium hirsutum
tcgtcacgcgtccgcgtccgcatattcctcacttttgcaacaaaatccaccaagagactacaccaacaaatggaggcattgaggataagactatttttggctatgatggtggtgttgatggccatctcagcggtccaatatgttgcggcagctgatgcaccggcccctactcctacctcagatgccaccgcattcgtgccgacggcatttgcttcccttgtcgctcttgcgtttggtctcctcttttaaaatggatgaattgtattggttgttgatatttcaatattgggggttatgtagagttcttttgtcttcttttattctttctctctaaaggccatacaattcttatgagtccttcgtttatggagatggaaaaaagatagagaaaaggtggagattttttttctttttctactttaatttttccttatgacaattggttgatgtattcgttgttttgattttaatgtatatttgatgtgatttgtttgttggtgacctaatgaattttttgtttgcttataatttctaaaaaaaaaaaaaaaaaa

SEQ ID NO: 198583 - DNA, 405 bp, Gossypium hirsutum
gcttatacgagtgtgtaaactctttggttttgtctgggtacataacataatcaacgaacatgtttaagaacaggatgaagaacatgaacgaggaggccttcctggatcacaagacaaaggtatgtttcaaatctttaacttaccaatctaacaaaaaattcacaaacaaaatattttgttatcatgcagaaaacctgggaagatgcaaagactggtaaaaaatgcttcatgttgtacgcaaggtcactctacgtgacatggggtggccgtgagtactggatctggaacagttttaaagacacaaggttggattttatttttttctctcttcttcttttcatggattttttttttggtgtttggtttcagtgatccattaatacatgatttgcagcggtgaaaaca

SEQ ID NO: 198584 - DNA, 586 bp, Gossypium hirsutum
cccacgcgtccggaggacaccattttttttggtggcctttgctctcatcactcgtaagtccacataaaactccttgtaaagccaccttttttgatccaataattcaaatcccttcacccacctcacttcctataataactcccccatttgaatcagattccatttcctaaaaaatatgattcaccaagagatggatattgatcatgaatgggtcttcctccctgataatagattcctggatatcaatcaagaccatggaggaaaacgagtttctgattcaaaccttgttttcttcacagactacttcgatgaagaacagtctccgccatcagggaattcagggaaggtagctaaacaagttgtcccagttccatttccattggaaccaagaatccttaaggttccagaaaatgaaatagggaaggaaatcaccataggggtacctcttgatttcagttctacaccatccatgattcttgagaagatcaaagaaggtggtagggaatcagttggaggtgataaagaagtgaagacacaagttgtcgtttaggaaaccaagttacacaacatgaattgtcgactgaca

SEQ ID NO: 198585 - DNA, 921 bp, Gossypium hirsutum
aaagagggaaaaagaaattacagttttcgtgttgggtttggcattttagagagagtcgttggctgagatccgagttttgcgagaaaattaaagggaagtactagtagttgaggcgaagctgaagctaatacaaaacagcggcaatttctgatttcagccctccgacacttcatccagattctgctcaatttctccgtttgattgaggattgggccaatcaaaacatcctataggtatctaaatcttctttatttacatttttggatctgcgccattgctattgcaatgtcccttttatccagattgcgatgtatcactgtggatgttactgggactctcatagcttataaaggggagcttggtgattactactgcatggcagccaaatctgttgggttgccatgccccgactataaacgcgtgcatcaaggtttcaagcttgcgtatacagagatggtgaacaagtatccgtgttttgggtttgcagcaaaaatgcctaacattgtttggtggaaaacttgtgttagagattcatttgtcagagcaggatacgagtacgatgaggagtcatttgagaagatatttagacgcatatatgcttcctttggctcatccgcaccctatacggtatttccggactcacaacccttcctgagatgggctcgtgaaaagggtattaaagtggggattataagcaatgctgaatatcggtaccaagatgtgattcttccagccttgggtttgaaccagggaacagagtgggactttggtgtgttctctggtcttgaaggtgtagagaaaccagacccccggatctacgagattgctcttcaaagggctggaaatattgctccagaagagactctgcacgtcggtgacagcatgcgcaaagattatgtaccagcaaggagtgtggggatg

SEQ ID NO: 198586 - DNA, 404 bp, Gossypium hirsutum
gggagtttttgtttctgagtgtaattccggccggttcttgtttatgttgggagtttttggttcttcgcctttgcgcaaaactacagttaccccttccatgatctagtgttgctccattttttgtttccttttgtagttgtaaaacctcaaaccaggtaaaactatcaccgttgggagttgagagccgcctatagtttaccacatatttgggtacatttgttttaatggagcaagaggctcctttgaatgagctgaaagaggggagggaggtgacgaatctgcttatgaagcatcttcatcttccttcgtctcaccaaacacgcctagtcttgattgagaaaatactcggttcctatgagaacgcactttcaattctgaactgcaatggtcttgtggttgaaact

SEQ ID NO: 198587 - DNA, 701 bp, Gossypium hirsutum
ggggtaatgatagtcaaggctttgatggatttaaacactattacactcctggtaaaagagggactgggtctcgttcttctgatcaagaaaggaagaaaggggtgccatggactgaagaacaacacaggctattcttaatgggtcttaaaaagtacggtaaaggggattggagaaatatttcacgcaatttcgtgactacccgaacaccgactcaagtggcaagtcatgctcacaaatacttcatcaggcaggtcaccggggggaaagacaacaggaggtccagtatccatgatatcactacggttaacgtccctgatactccctcttcgtcaccggatcgctgcaagcattcgtcttcaagtgattcttctgcagtcatacaggcacatcagcaagcttaactacccactactaaagatatcgactttgaatggaagccacccaatggatactctatcgttttccaccggatgaattatttgcctgccttcctgttccccttccgttggatttcacccacccgaccccctctgaagaatcacacttgccttggaaaaacccctccccctatccccttccgtattcttcacccctctttccctatatccttccttgcctcaccttcttttcacctcgttcagatcgttgggaatacttccctccgcggttctcttctctcctctgccctatattaactattc

SEQ ID NO: 198588 - DNA, 401 bp, Gossypium hirsutum
ttaaaactctgcaaaaccacaacgaaagaaacccattttcaaattttttttctattgcaaaattttctgctttttgttttgtctgaaactgaagccatgggagggatatcggggttgcttatgaagtttccctcattgatccactttttgttgtctctcctggagaaaatccctgcgagattgcctatgccaattgagaaattggtttctcgtgtttcatatcctcgcaccggcaggcacttgcagcgctataataacagaggcttccgcttagttgttgggtgcattccctacaggtacagggaaagcgaagatgccaagtcaattgaggaagcgattgaagttcttgtaataaatgcacaaaatgggaaagggatattattccccaaagggggttggga

SEQ ID NO: 198589 - DNA, 780 bp, Gossypium hirsutum
  unsure (1)..(780): unsure at all n locations
ccaagaccaaaacctttttttattacgttttccctgacaagttttagatccatctcttggaatcaaaaagaaatggccaacaacaacaatctagaggaatccagccctcttttgagcaaacaagttagtgttgaagaagatgagaagaagaatctaaatgttaacaactccaccgacgtggcagcttcgccggcagctaggaccggagctgggttcgggtggaccgccaatggtctgcccttggtccacgggagtgtcgtcggagaacctatgggccggtctcagtgggattcctccctcctcgcttgtcttggccgtaacgatgagttttgcagcagtgacgttgaagtttgtctactaggaagcgtggccccttgtgtgctgtacggaagcaatgttgaaagacttggatctgcacctgggacctttgcaaatcattgcttgccttattctggtctttacctgattggaaattccttttttggctggaattgtcttgctccatggttttcataccctacccgaactgcaattcggcgcaagtttaatctggagggtacctgtgaggcacttaacaggtcacgtggatgctgtttggaagatcaagtgcaacgtgaacggtgcgagtccgcctgtgactttgccacccatgtgttctgccgtgcatgtgctctttgccancaatgccgtgagcttcgtcgaaggttgcctcacccagggttctatgctcancctgtgctggtcataatccctcctgtcgagcagaccatgggccgtggg

SEQ ID NO: 198590 - DNA, 527 bp, Gossypium hirsutum
aatggctcttcttttctatcatctccctttccttccctttctcttcctcttccttcacttcatcgcttccctttcctctccaacacaaaacctgaacgacaccctttccttctcttttcctcttacttctctccgtatctctcctgatgttaaagttcagaccctgtcttcttctttagttgcaggggccaacaagcatgggacaaggcgtttggcaaggccaaactcgggttcttataattataaaaccacgttcaagtattcaatggcgttgatcgtggctttgccgattggtactccgccgcagactcagcagatggtgttggacactgggagtcaactgtcgtggattcagtgtcataagaagcttgctaaaaagccgcctcctacggcgtcgtttgatccttctctttcttcttctttcagtgttttgccatgtaaccatcctctttgcaagccacggattcccgattttaccctccctacttcctgcgaccagaaccgtttgtgtcactattcgtactttt

SEQ ID NO: 198591 - DNA, 628 bp, Gossypium hirsutum
aaccgtacggccacccttccgaaaagagctgctgaatctgtctctcatgagggaggatcccctactggtgtcagtggaagcagtcaagttgtgggatggccacccataagagcttataggatgaacagcttggtgaaccaagcaaagtctcaaagagctgatgaaggagacagtggaattggtgaaaaagataaacccaaagatgctttgaagaagaaacttaattacaatggtaacaaaatcagttcaacaactactgttaatgaaaaaggacatcttgggtttgttaaggtgaatatggatggaaccccaataggaaggaaagttgatttgaatgctcattcttgctatcagagtttggctcaagcacttgaggatatgttcctcagatctactaactcagttggtgcagagaaggaacaattaaccaaggcttctaagcttttggatggatcatctgaatttgttttgacttatgaagacaaagagggagactggatgcttgttggagatgtcccatggaggatgtttgtgagctcggtccgaaggctccgaatcatgaggacctctgaggctaatggacttgccccaagattccatgatagcaatgaaaggcaaagaagcaagc

SEQ ID NO: 198592 - DNA, 394 bp, Gossypium hirsutum
ctttatttctttcgatgaaaatttgattggctgcaagaacgagagagagatggtaagcgcgaggcaggggtttccttcatggataagcgctgcctccgccaccagagttgattttgaaggaaacgctgataacatgttgaaaactgcccacgacgattctacaacccaaaagcctatagctgtagccgacgtcaatttgagcttcgaagagagggctttctctgccgccggtgccgcttttatttccgccatcatcgttaatcctctcgatgtcgccaagacaaggttgcaagcacaggctgctggagttccttacaagacctgctttgaaacaaatacgatgttcccagatatgagaagctctcaatcatgttcgcgtttggttgttggctct

SEQ ID NO: 198593 - DNA, 396 bp, Gossypium hirsutum
cggacccgtgggcgaagaactcgtttcttgggccgaacagagtacttacaagaggcggtgggtttccccagaagaagcatataaactgtgccggtacgattggatgagcgaagctcttgagaaacatttgagaagaatggagaggaacagcaatattgagaaggcagaaaagttggtggaacatcaaatgttatcagctggttgctctacaaaaccatccaaccttgaagagtcttttagtaagtgtattgtgcagggttaaccagtccttgtcctagtccttttgtgaaactgttatcagttaagctgtttgccattattaactgttgtatactggatatatcacatcaatcttctaatttatttgaatggatagaaaggcaccagccaaccaag

SEQ ID NO: 198594 - DNA, 611 bp, Gossypium hirsutum
  unsure (1)..(611): unsure at all n locations
cttctctttggaaaactcaaggtttactaaagatgcgcagaattacaagctccaacaccgccaaaggcgttgctgccaatgtgggcgtcggccctcaacttggactatctattgcccgaaagtttgctcatgaaggatacacagtcgccatcctcgcccgggacttaggaaggttgtcaagatttgcagatgagatagcaagggaagagaaagcgcaagtgtttgcaatcagaatagactgctcggattatagaagcgttagggaagcgtttgaaggggttctttccttaggatttgtcgaagttttggtgtacaatgcatattaccagccggtttcttcgcaccccactaccttctccgacattaaaattgattcctttgagaaatctcttgctgtttcctcccttggtgctttcctttgcgctcaacaggtgcttcctgggatggtggaaangaaaaaaagaaccgttctttttactggtcgctcagcttcacttaatggcatccctggtttctctgaactatgctgtggaaagttcgccctgagagctttatcccaatgcctgtcaagagagttccagtctgttggtgtccatgtcgcccatattatt

SEQ ID NO: 198595 - DNA, 502 bp, Gossypium hirsutum
cccacgcgtccgtccaaacacctttccatttccccccatcttttttttcggtaggttccttttatcttttccatctttctatgcaaattcgaatatcatccatggcagttcccagctgtaccataaaatccagaccctattcaacaaaacaacacctttattccttcttcttcataatcatattttccttcctctttttaccctcttctttttcatcctcttctccttcaatccacgatcttctcgtttccagagggttaccggcaggtttgctcccaaaagaagtgaaatcttataccctttcagacaatggaaccctggaagtgttgttggacgaaccctgcttgacaaagtacgagaatagggtgttcttcgacagtgtagtgagggctaaccttagctatggaagcttgatcggggttgtcgggttaagccaagaagaactgttcctctggttgcctgttaaagacatcatcgttaatgacccgacatctggtctcat

SEQ ID NO: 198596 - DNA, 385 bp, Gossypium hirsutum
gacaaaactaaacccaaaaaatctcttgttgttgtcttcaatggtactcttggggcaaaggcttagtaaattataccacaagctggaaaatcactaccaccaccaccaccaccaagcagaggttgatgctttgtcagcttctctacaggcttttcggtctgatgtttcgaattgtgtgaatcagctgttgcatccaaaacctggttcagaaatcttgtctttttcatggattcagcgatgttttgagttacttcctgttatcaacaaggcgtttctgaagctggttggggatatagactaccccttgagcttctgggatgttgcttccctcgatgagtattcttaactacggcttgcatttactggagcttctcaactgtgttac

SEQ ID NO: 198597 - DNA, 1011 bp, Gossypium hirsutum
  unsure (1)..(1011): unsure at all n locations
cttcttccctcctatttcccttaaaaaccacacaccaccaactcaaatttcacctcttaattctaaaatcaacacagccccatcacatcccctcagatccatcaaacaaagagcagcgaaaaatggatcttaagttgcttgtgattaagagaagatgacttgtgataagagagggcagttcggtgataccactttcaccaaagtgtttgttggtggtttagcttgggaaacccagaaagatacaatgaagaagtattttgaacaattcggtgatatcttggaagctgtcgtcattactgataaagctactggcagatctaaaggctatggatttgtcacgtttcgtgaaccagaagcagccatgagagcttgtgttgatgctgctcctgtgattgatgggagaagggctaattgcaatcttgggtttttgggtgctcaaagatctaaaccctctactccaaagcatggaggaaggaatttgaggggaatgaggtgttttcccacagcaatagctttttcttcagcagcaaccttccctcctcattattatggcatcccacaaggacttccttttaatctttatgggtactctccatgctcacctgattactctaattatgccacgaactactatagtctgtatggaggggccactggccagtatccagtgtatggtggtggcttgatgactggtgcaggaacagcattctatccctatcttcaattcggagaaggaatggccggacccgtctactcttccggccaaggatacggtgtccagtttccacaccacctgtttccttactcaactgggagctatccacagcactatggtgcacctatggctcttgcacctactccacccttgcaataaggtgtgacattggctcttcatgctaggagacttgattccaagcttatgatatcacatttcttcagctgctctaaagtctgcaaccttgggcctaaccatggntcttttttctacctctatctatatctaacttgaag

SEQ ID NO: 198598 - DNA, 454 bp, Gossypium hirsutum
aaagaattcaggaatgctctgaagccctcagagctctggtcatcggaccgccgcaagcgcccacgcgacaccgtcgactttgccatttacggcaactggaagctgaaaagcttcgttttttcgcctataccgaagggtaagcgagaatctcggcgatgagtgctagcgttgattcgtgcattgactatggcgtgatactagtgcaggagtcatggcgctgatgaagcccactgaaacggcgcgagacgaaagggcgtggcgcttgggatggttgcggcgcctagggtttctgaaaccctaggcctttccgtattttgttaacaatttgggcctcttgggccccgttcgttttttgggctaagggtgtaatgggtaaataggttttgggccaagggtttaagctaatcgggtcttgggtgtaaccgggcatagggcttttgggctaaccgagttt

SEQ ID NO: 198599 - DNA, 797 bp, Gossypium hirsutum
  unsure (1)..(797): unsure at all n locations
gaataaataaacttaaaaaggtgatggctggtgggttcgattaaaacccgttcgctgtagaaggagaagaagaagttaatcctttctcggatccagctgtgagagggaaggcatctggccagcctaaatttggtggaggtctattttcaaagaatgttccaagtgctccacctgcatcaaactcaagactttcaccactacctcctgaacctgctggtttcaattatggtcatgaggcaacaattgacatccctcttgatacagcttcaggaggatcacgttatcaggatttgaagaagaaggagaaggaacttcaggctaaggaggctgaactgagaaggcgggagcaggaagtgagacggaaagaagaggcagcagcaagagctggaattactttggaagagaaaaattggcccccattttttccaatcattcatcatgatattgcaaatgacataccagttcatctacaaagattgcagtatgttgcattttcaacgtttttaagggtggttctgtgcctgcttgggaaacatggaacctggaactacagcatggatcaaaggagaaggtgtgaggatctggttcttgctatcatctactcctatagtttttagagggaaatcacttactggaatcctacctgcagtagatcttatcagtgaccatgcgttggttgggatcttctacttcattgggtntggattattttgggttgaatcaatagtaagcatttgggtttccagcaagtatacatgtatttacccggcagtggtaagcctgtgaaatgaacgcga

SEQ ID NO: 198600 - DNA, 383 bp, Gossypium hirsutum
gcgccctctcttccgctttaactgtccatgaaccgaagctaaaggtggacttgacagcgtatgtagaaaaacatgagttctgttttgatgctgttctggatgagcatgttacaaatgacgaggtttatcgggaaactgttgagccgattattcccataatctttcagcgaacaaaagccacttgttttgcatatgggcaaacagggtagtggtaagacgttcaacaatgcaaccgttgcctctcagagctgcacaagacctcgttagattcttgcatcagcctgtttatcgcagtcagagatttaaattgtggcttagctattttgagatatatggtggaaaactcttcgaccttctgagtgatagaaagaaactttgtatga

SEQ ID NO: 198601 - DNA, 698 bp, Gossypium hirsutum
cccacgcgtccgaccacgcgtccttccactcgtgcggattaaaggtgaccgggggtggggattttaatggctgcgaggctctataaactggacagttcttgctttgtcagctaatatcttcacaagtctagagttgtatcattagttccttctttgctcatagtaaagatttgttggtttcatgatgtgggtcttcattattttgagctctggttgagtgactcctttaaggtatacctgcaacttcccatctttgcctggttttaaataaccattagctccttttcatttgttttccacctttgtttttatggtccttggcttctaaacctgcaacacttaaaaacatatattttcagattattgcttattgttggtcttcaaaggagttgaagaaaggtgatcatattggtgtggttggagatcatatctggtgtgtgaaggagatggagagtggttgctctaagaatggtggatcatgtcctaaacttcttgatttaatacctcaagaaagagagtggcatttgaagggagaagaggagagaagggatggatcctcacaggagaagaagctggaactgaggcttggtcccccaggtgagaacaactggtccaacaaaaacaatactgagagagatgagtctttactctcactagggtacttctcttccatgaagagcaatggaaaacagacacac

SEQ ID NO: 198602 - DNA, 789 bp, Gossypium hirsutum
ggatgttggtcgcagatcaccctcaaaacggggaaaacaaaggcatgacaggcagtggtgacgttaatggagaggactttagctttgctggaagagatggggaagaggagagagaaaaggaaggacccaatggtctcaataagttggggtctagttcaacggccgagttgcaccctaaagccgccggagggccggagtctggcgtaggcaaacaaatgccgccggcgagtgtaatgacccgcttaatcttgatcatggtctggcgcaagcttatacgaaaccccaacacatattccagtctcatcgggctggtttggtccctaattgctttcaggtggcatgtgagtatgccgaaaataatagagaagtctatctccatcctgtcagatgctggactaggaatggccatgtttagcttaggtctgtttatggcactgcaacccaagatcatcgcttgtgggaactctgtagctacatttgccatggccgttaggttcttaactggtccggctgtcatggctgccgcttcgattgcagtagggttgcgcggcacactcctccgtgtcgccatcgttcaggcggctctgccacaaggaattgtaccatttgtgttcgccaaggaatacaatgtccaccctgcgattcttagcactgcggttatctttgggatgttgatagcattaccaataacgcttggtgtactatattcttctaggattgtgagggtactttcatagtaagccagagatatgaacgggagttttccaggggttgatagaattgatcaaa

SEQ ID NO: 198603 - DNA, 565 bp, Gossypium hirsutum
cccacgcgtccggttttctctatcgatttgcggagtctctctctttttcttttttttcctttttctttcttgtatttctcagtgtatgaagtgacgatctttaaggttttcttttggattttacatcaatggaagccatttagataaggcgggaaaatctgaaccagaccgttctttcataaaaggggaattttttttcccattcgatcatggcggttgctgagaatgacgggtcgaaaatcgggtcatcgggtcaaaatttggtgccggttgacaccgatacggtcagcgattccggtaaaccgaaaaccaactccgattccatgactgttactaagactaccgaggaaccacgagcagcagcaggagaagccatcaacggcgatgggttcaacgaaaacaaccaccaccaccagcagatggctacaatgaccgataagcttaatgggtttaccagtgttcaaaatgggggtaataatggtgaaattctcaagaaaaacatcactgatttggttgaaactttgtctaagcttaaccccatggctgaagaatttatacccccttt

SEQ ID NO: 198604 - DNA, 507 bp, Gossypium hirsutum
cttaaattcttaactaaaatattaggacctagaagatcgtcgctccgcttacacgcttcttctattatttccaaattcccaatgctctctcacaagccgaagcttcaaaattcttagatctccgcttcaatttgagttgtttcctggaaattttttaaaaatttccatcttattcatttttacagtatcaggctgcctttgaagttaattcataatggttgatagcaacaaatcttctggtccacctgaagaaaccccaagccataatcccaatggaaatgtaccttcagaaagtgaccttgcactcgatgagataactgagaaagttcaagagtcccttggcctcgaaaagagacacaagttttgggaatcccagcctgttgggcaattcaaagacttgggagacactagtttgcctgaggaccctattgaagctcccactcctttatcggaagtcaagcaggaaccgtacaatcttccaaccatgtatgaatggattacatgtga

SEQ ID NO: 198605 - DNA, 643 bp, Gossypium hirsutum
ttctttcacgcgtccgcccacgcgtccgctcactgctcactctctttaactttcgttcatctccattattgtttcagatcgtaaaatcaaaaccaaattttcgtttaatttatacatataaacacccaaaaacaaaaagggcataaaaaaaggagattcaatggggatcttctccttcaatgccatagctttggccttcttattagccattatctctggcgccgtcaatgcttgcccttcttccgaccgagaagcattgctagctttaagttcatcgttaaaggagccttatttaggcatcttcgattcatggaaaggcaccgattgttgttccaactggtacggtattagctgtgaccccaccactcaccgagtcaccgacgtttccctacgcggtgagtccgaagaccccattcttcaaaaaaccggccactcatcttccggttacatgaccggtaccattaacccttctatttgtcagctcgaccgggtcactactttaatcattgctgattggaaaggtatcgccggagagatcccatcatgcttggcgtcgttgcccaacttgagagtcttggatcttatcggaaattccttatcgggaaaaatgccagaccagatagggaaccttcaaaagctcacc

SEQ ID NO: 198606 - DNA, 400 bp, Gossypium hirsutum
cttaaaacgttaaacgcggctttctctctatttcttttctgcagcgagttactgagtcaacaccacgatggccgaacgaatccaccccggcgactcaccaccgtcttccggcgaacactcgaatcccaagccagctcctccttcttcagataaacctattccacaacccggaacttacgtcgtccagatcccgaaggaccaagtctaccgcgttcctccgccggagaacgcccgccgctacgctcatctgtcgaaacgtaagtcgagtcgcagcacctgttgccgctgctgctgctgcttgttaacaactatcctctctctcctccttgccgccgccattgccgctgctgtgatctacttcgttctcaagcccgaagctccaaactactccgtcgagagc

SEQ ID NO: 198607 - DNA, 483 bp, Gossypium hirsutum
agaaattgcagaaatcaaaacagagtttactttttcaaaaatggctttcgaatctttcttattcgatctgcatgtatagtatgcgttcgtagtttttacaaaaggaaaggttcttggctttataaccgaaccaaagaaaatgaaaaagaaaaatacaattccttttctttttttctaattgctctgcctgttttttgctattgctgttgtggtcgtcctttgcttgtcttcatttgcaggtacggaggcaacgtggtgggggtagctgacgcgtacagaggctgctggtggtgtcgacgtggaggcgcgagccatggtagtgctggaggctactgcggcgctgagcgaatggggctagggttagggccagtgtatttgggccgtgtaattggattttggaactggacccgtactattgattggttcttatgtatatttgttgggaaatttttttgagattattttttttcttttttatttttc

SEQ ID NO: 198608 - DNA, 1371 bp, Gossypium hirsutum
agccgttttattgcttcccgctccgccgttcacagccatatttttgggcgctaagattctcatcaagctctgctcgtctttggtttgtactcagcacattacatatctgtgaaaatgaagaagaaaatgatagctattggtttcgaaggatcggccaacaagatcggtatcggtgttgtaacattagacggcaccattttatcgaacccacgtcacacctacattactccacccggccaaggtttccttccacgtgaaactgctcaacaccatctccaacatgtgctcccattggttaaatcggctttaaaaacagctgagattacccccgatgaaatcgactgtatttgttacactaagggtccgggtatgggtgcaccattacaagtgtccgcaattgtcgttcggattctttcactgctatggaagaagcccgttgttgcggttaatcactgtgttgcgcatattgagatgggaaggattgttactggggccgatgatcctgttgtgttgtatgttagcggtgggaatactcaggttattgcgtatagtgaaggacgatatagaatcttcggagagactattgatattgctgttgggaattgcttggatcggtttgctcgtgttttaaccctttcgaacgatccaagtcctggatataacatcgagcagctagcaaagaaaggtgaaaaatttatcgatcttccatacgtggtcaaagggatggatgtttcatttagtggaatattgagctacatcgaagctactgccgaggagaagctaaaaaataacgaatgcacccctgcggatttatgctactcccttcaggaaactctatttgcaatgcttgtggagattacggaacgagcaatggctcattgtgactcgaaagatgttcttattgttggtggtgttcgggttgcaattgagcggttacaagagatgatgcgaataatgtgttccgaacgaggtgggagattgtttgcaactgatgacaggtactgcatcgacaatggagcgatgatagcatatacaggtctccttgcctttgctcatgggtactcaacaccactcgaggaatcaacattcacccaacggtttcgtactgatgaggtgcacgcaatctggagagagaaacaagagttgggtgacttgagtgctcttccggatggaggaatctaaatgcaagttcctattaaggtttcaatgattgtgttgggatcaggatcttgaagattcagaaatgatattatgtatcaattatattgttttgtagtagactttactaggaaaaaaagttaagaacaaactttaactctgtattatgaatatgtctgaatatgtaaatcatgttctgaatgtgtttatttg

SEQ ID NO: 198609 - DNA, 661 bp, Gossypium hirsutum
gcttcgatgccagtactaacatcatctcaatggcttactactcaatccataagaacccaaatcccttcagcttctctcaatcttttgacaggttcaagaagaagaatttccatctcttccaatgcagcgatcaaccccaaagcttgctcttccctgcttcactgctcctttatctcttcttcctcatccgcccgctcttggcatgcttcattttcagggttagcattggggatggattttagttcaaataatggggtgaggaatgagaaaaggcgaggcctggtgggttgggctgggaaggctgcactttgtcaaacaaagaggaataggtcccggaaatctttggctcgaactcatgggttccgtcgaagaatgagaaccactagtggaagagctgtattgaaacgtcgccgtgctaagggtcggaaggtcctttgcaccaaatctaatccaaacagtgggaagcgctaaactatttcttttgtttccgtttgcagaattctgttaatctgatcctttcttctatgatgtctaaaggataatttaggcaaaacttaaccaatccagcttttgttggttcaattcggcattatttgtttaagtgtttttgtatttgatgaacctctttgcaaaattatatgctttgggccgtttttcttgc

SEQ ID NO: 198610 - DNA, 387 bp, Gossypium hirsutum
cccacgcgtccgccaattttgaagattttttttggttttcatttacatattgcagagctttcttccctttaaaaaaattggttttggattcgtttcgttgctgctgagttttcgttgatctctgggctttgttgccctttcgcctttgaaatccatgatcttcagcaccccatggactcatctccagtgcacaccacttcttcactccatgaacaagaagatgagtgggacactgatggattcgtgattccgagcttgggaattgaagaaccatatgaaactaaagctgatacttcagatgtagaaacatcaaaaccgcattcgcagcaggccaaaaaagaagagtacatctacttgggaccgcatggtgcgccgccatcacaatca

SEQ ID NO: 198611 - DNA, 394 bp, Gossypium hirsutum
aaaaaaccccaattttttaatccaactttctctctctttcagtgatctatgctttcacaatcaccaaactgggagacaggcagccacctccccaccctcgcccttcacttcttcccctctcttcaataattctctcttttggggtactaaaaagttccatcttgcagaactccaagggataaatattccttttctttcttccccattcttcccctctctatccatccatttcttctctctttttttttttcttcagtttcaaaattaacttctttgagctttggggaataagccaaattctgggtgtgtgttttttttttccttcctggttaacttaagccttagttattgggttatttctagaaggaaaggtggtgtcgctgatcctgagatt

SEQ ID NO: 198612 - DNA, 653 bp, Gossypium hirsutum
cccacgcgtccgttcccatttcacaatattaattactagacggtagaccagccctgcttgactcctgctaatcaaagccaaaactcttgacctgttgtttccagctcacattccggcgatggatctccgtgaatcgatcactagccaaaccgacgtcgctttgaccctgaccaaacacgttctccaaactgaagccaaggactcgaacctactgttctcgcccctgtcgatccatgttgtgctcagcttgatcgccgctggtgctaagggtccaaccctcgaccagctcctctctttcctcaagttcaaatccaacgaccagctcagctccttctcctccgagcttgtttccgttgtcttcgcggatggaagtccagccggtggtccccgattgtcatttgcaaacggcgtttggtttgaccggtctctccctctcaagccttctttcaaacaggttctggacaacgtctacaaggctgcttctaagctagtcgattttcaaaacaaggcggttcaagtggcgggtgaagtaaatatgtgggcggaagaagagacaatggtcttattaaagaagttcttcctcccggatcagttgatgcttcaaccagacttatatttgctaatgcgctctatttcaaaggagcttggaatgc

SEQ ID NO: 198613 - DNA, 452 bp, Gossypium hirsutum
acaaagtttaatatggcgaagaggaagggtgatgtagctcaaagagcatggagggtactgcgtttagcattattatgggcgagaaaaggtgggtgtgttcaggagacggctgatgatggggctacgattggtgcctaagttcctcaagggtcttgctcatcatcaacctcatcgtcatcaccaactgatgagccattataaggaacgccagctttcattcgacgagacgcccatttttcacgtcaagatgcaccgtccagcctccatgcgattccttcttccttgcattagcactgaggaagtcgattttgactatgatttcggtcccgatgattacgatcgggtttactggtatgatgatggtgggagaaagagtgactcaacggcatctgatactgacgaagaagatggagaagtggaagagtgtggatatgaaggatgtgatgagaaag

SEQ ID NO: 198614 - DNA, 700 bp, Gossypium hirsutum
ctaaatactaaaagcgattttggatctggaaaggcgaagctgagggtgaaccatgagcggcgatactagtgattcctccagttactttgatgggcgagagccagatgaactgatcagggccatcgtcgagaaacggccgggtaccgatggtaaaataacgctcggtttgcactttattgatctggaaagcaataaagtctttattaaggcgatgccacctgctgctccttcatgttccactgccgtttcctgtggcaaccgcgtttacgttattgggggaatgcgcgaaaatgatgctaattttcgtggttatgatggagtaaacgatgttttccaattagttttgaaggaccttgaacgtgggtgggggagaactacttctatgttgttccctcgggcttatccccatgttcttgctgctgaaggaatgatttacgtcttcgaatgtatgggttctgaatcttttggcgaggtttacgatataagtggggatatttgggaaccattgtcgccccctccggaagctatcgatatacgtgtggtatgtgttcctgttctagattcttcccgatctcgaattttggtgcactgcgatgccagtgatactctttacgcttattactacgatcgtaaatcatgggtttgcctcgaacaaaaattttcttactggtctggctcagcggcaatcgtggacgatttg

SEQ ID NO: 198615 - DNA, 596 bp, Gossypium hirsutum
gtgtctactttcgagattcaaggtttttattttaacctttggtcccgggaaagcgttagccttgaatttcccttatgtattgcatcacatgccagacgagagcgtaaccatctcgaaccacagagaccgattgttgagattggtgaagagtttgtcccccaaagttgtcacacttgttgagcaagagtctaacaccaacacatccccctttttttctcggtacatcgagacacttgattattacacagctgtgttcgaatccatagacgtagcttgtccaagagatgacaagcaaaggatcagtgcggaacagcattgcgtggctcgggatattgtgaatatgattgcttgtgaagggcaagaaagggtggaaagacacgaacttctcggaaaatggaggtcgagatttatgatggccggcttttctccatatccgttgagttctttggtcacactagcggtacgagatatgttaaaagaatataacaacaactatagacttgtagagagagaagggtctctctatctagggtggataaacagagccatggcaacctcttctgcatggaggtgaaaaaagcatggaggaatctgta

SEQ ID NO: 198616 - DNA, 703 bp, Gossypium hirsutum
gtgagcactcattttttatcctgttcattgtcctccctctctggcgctgttttccttccaaaaaacagagggtctagttggaataagaaaattatatgctatgtacatttctgcaaattagtgtgggtttttgaaccacttaagctctgctttcattgcttctggttcaagcaaaaaaccaacatagattccatctctttttccaatggatgtactttaaatctaaacagatctagtgggttgttttcaaaatctgtttttgttggttgttctttgttctttccttctttttcctgtttttgtttcttttacaatttagtcctcccctgttttttttttcccaaaatggatcggcttccttcaacaactatcttccccgacacaaccgatgatttgtcgatgcaaatggcagtgatttggggccaaatcaaagcaccattgatcgtgccattgttgaaactcgccgtcgtggtttgtttgataatgtctgtaatactttttattgaaagagtttatatggggatagtcattgctttggtcaaactgtttggtcggaaaccagacaaaaggtttaaatgggaagccattaaagatgatgtcaagttggggaactcagcttatcctatggttctggttcaaatcccaatgtataatgaaaaaaaggtttatcaactgtccattggaactgcatgtggcctctcat

SEQ ID NO: 198617 - DNA, 635 bp, Gossypium hirsutum
gggtaagactctttttaattaattgtagatacgttggaagtttttgtcttcagggattttatgggcaaatccacctttcattaaaaaatgatgaactgtcatcatcaaaaatatttcccattgaaaaaatgagttctcaagaaagtgggagagcaatggaaagaatagaattagatgaagcaatgctacaagggcaagcagagatatggcgttacatgtacagcttcgcagattccatggcgcttaagtctgccgtggagctccgcatagctgacataatacactctaatggtggccccctcactttgtcgcaaatagcttcatgcattaatggtggccttacttcacctgacatcaccacccttgctcgcataatgagattgctcattcgcagaaagattttcaccgtccaccatccttcagacggtggagatctcttgtacgacctaactcactcatcgagatggcttctacatgattcggagcaaaccctggcgcccatggtattaatggagaaccatccattgcagatggctccttggcactacttcagtcagtgcgtgaaagaaggtggcacagccttcaagaaagctcatgggtgtgagatatgggatttaacatcgagggatcccaat

SEQ ID NO: 198618 - DNA, 635 bp, Gossypium hirsutum
aaaaaaaaaaaaaacatttacagatcgctagaacaagaaaaaatctaaagcgagttcgaagagttgcagctttgttgaggcggttgtttttgtgtgtgtgtttgggttatggtaattgtctgaagagaaacaaaacaaagatggtagcggaagctgaggttgtttgtcaacaaagggtgccggtgttagatgttccatattttggtaaaggaagtaacatcgaggagattgatgaaattgttgcgatttcatcgccggtttcttcacccaagctcggaaaagttggccttcccgccgatttacccacacctcaactggatgtgaaatctgtggaaaaaatcacagatccgagtattgaaactactacggtggtgcaatttgttccggacattcgttcaggtagttttgctgatattggacctaggagatacatggaagatgaacatattagaattgatgatctatcttcgcatttgggtccccttttcaagttccctaagcctagtgctttttatggggtgcttgatggtcatggaggtcctgaagcagctgcttatgtaaggaaacatgctcttagattctttttcgaagatgtcgattttcctcggacttgtgaatttgatgatgttttcatg

SEQ ID NO: 198619 - DNA, 532 bp, Gossypium hirsutum
gctagacattcgttgaagtggaacgaatttggaaagaaagggcttggggaagcagttataacactgaaagccttctcgagcatggaaacgagtccaactagtcgctatcaaaatcaacccggcatgcgtttctacaaagtcggtatcctgtcccggaggcagttgaaggtgtgagcctcatctttctacacataaatgtcgaaaggtgaggcatcttggaacatttagattgtttactgcattttggtcttgcatatttcaaagttgagaaggaacttggtggtgatgatagataaccttgtatatataagttgtattatcgccaacggcacgggacatcttttaagtaggcccgaagttgaggcatgatccttgtatatgttctttagctcatgttttcaaagccttgttggaagcaaaaacggcagcattggaatcatgatggattgtttttattgtagtggacaccccgaaacagcatctaattggccttttaaaaaagaagaaaaacacagcccttttagaatgcatg

SEQ ID NO: 198620 - DNA, 402 bp, Gossypium hirsutum
gcgtccggtaaaaatgcacattctcttatttgttttgcaatggttggggatatatcaaggccgttgatgctcatgtgacaaatttcactggaggggttgaaacaattgagaattgtgtttgtttgcatgaagaggatcatgggatcttatggaagcatcaggactggagaacaggtttagcagaagtccgacggtcgagaaggctaacagtatcttttatatgcacagtagctaactatgagtatgggtttttctggcatttctatcaggatggtaaaattgaagctgtggttaaactcactggaattctcagcttaagagcattgcagcctggtgaaacaccgaaatatggcacgaccattgctcctggattgtatgcccctgttcatcaacactttttcg

SEQ ID NO: 198621 - DNA, 464 bp, Gossypium hirsutum
  unsure (1)..(464): unsure at all n locations
gctaacccaaaacttgaagtctcttttgttcagttgacggccataactgatcagcctacaatggaatccctccacgaaaacgccatccgaaaacctctgtttcattcacaaatttcggatccgaaatccgagtctgcaagttcggagcgtggaggatgttttgtcggacggtaactcttccttgttggagcgttggggaaaagcgacatgtatcgaatcgaaactccttttccacttggcagcgccggctgtcattgtttatatgatcaactatctcatgtctatgtccacccaaatcttctccggtcatctcggtaatcttgaactcgccgccgcctccctcggaaacactggcatccaagtctttgcttatggcctcatgttaggaatggggagtgcagtggaaacgctttgcgggcaagcctttggagcacacanatacgacatgctaggcatatatcttc

SEQ ID NO: 198622 - DNA, 373 bp, Gossypium hirsutum
cttgttttctcgacagggcaagaaactgtgattcttcgtcggttcgagaagaggacaaagttaaattaataaaacaaacatgttttttcacatagtattagagaggaacatgcaattgcatccacgccacttcggtcgtaacctacgggaaaacctcgtatccaagctcgtgaaagatgtcgagggcacttgcagtggtagacatggttttgtggtggcaataacgggtatcgaaaacgttgggaaaggtttgattcgagatgggaccgggtttgtgacattccctgtgaagtatcaatgtgttgttttcagaccatttaaaggggaaatcttggaagctgctgttactatggtgaacaagatggggttcttt

SEQ ID NO: 198623 - DNA, 958 bp, Gossypium hirsutum
  unsure (1)..(958): unsure at all n locations
aaaaaagaaccccacagataagaaaacctaatatcccaaagcccaaatcaaagccaacacctctcgagtagaatcccatcaaatttctcatcaaccaaacagaaatctcatccccctacaaccccacttctctttccaaattagatagaaagaaggtcagggattaacatagatagaggtagaaagagagttcttctttgatctagcgaaggatgtctgcggcagtgtgcggtagcaagagatcgttcttcgaggatatcccgtcatcgccatcggcttctgtctctaagaagctccggcgctgctcgccttcatctccttcttctgttcgttttgctccgccgccttctctccttgatcacctccaagctctcttccctcatatggaccccgagcttctggagagagcactacttgaatgtggcaacaatatagacactactatcaagaggcttcaagaacttcacttaggagctgcagatgctacaggggaaaagatgggtcctgttgaggaactgggtacaactgctgagcagggtacagtaaccaacaatggagaagctgctgatactactgctcagattccatcggcccctgaaactctgcctgttgatggtgcagaatgggtggacttggttgtgggggaatgaggtgcttcagtggtgtgagccaaagccgtgcctctaattggctgggttctttgaaagtccatagtgacatgtgctaaggagcccacaagtttcataagaattgatgtgaaggacannatcagtgtgatcagaaaaccggtttaaactgctggtttccctgaaccccaggatccggcaaaccatggtgactttaacatggttattttgacctggaatctaggaacatctaaagtttggcgcgaaaattttcgcggttccattttataaacaccccattgacagggattatttatgcgttggattgtttt

SEQ ID NO: 198624 - DNA, 440 bp, Gossypium hirsutum
aacccctcacattttaagccataacctaagtgcgaatttgaatcccatcgggttgtcatcaaccaaacaggaaatttcagtctacaattcggattgtcgttttctaagttaaaatagaaggggagtgagggattgagactgatagcgataaggagatactgtttttttatttgatttagcgaaggatgtctgcggcagtgtgcgggagcaagagatcgttcttcgaagatatcccgtcaccgccatcggcttcttcctctaagaagctccggcgctgctcgccgtcgtctccttcttctgttcgtttctctccgtcgccatctgctctcaatcacctccagtctatcttccctcacatggacccccagcttctggagcaagcgctattagaatgtggcaatgatatagacactgccatcaagaagctggaggatctttgc

SEQ ID NO: 198625 - DNA, 497 bp, Gossypium hirsutum
cgggcggacccacgcgtccgattttccaaagagggtcctctctctctctctctctctttctggaatcagaagaataattcttcggcatctcagaacacttttatttttaattattcaaattatttttttacctttttttttcatataaaactaaaaaattcttttgttagtttagtttactgtaaatttgaaagcaaaatttttagattcagttaaaaaaaattcaaaatcatgacttcagctgtcgagatcaacggtgaacaactagttaacgctcttcccgatctctcgattcaagatcagattgaagtgaagaagaaaggggctgttgttgaagaaggttgcgaaaaccacagtggaatatgcgcgatttgtttagataagataatgttgcaggaaactgcactcgtaaaaggttgcgagcatgcttactgtgtgacgtgcatccttcgatgggcaacatacagtcagatgcctacgtgccctcagtgtaaaca

SEQ ID NO: 198626 - DNA, 724 bp, Gossypium hirsutum
  unsure (1)..(724): unsure at all n locations
cgcccgatccccccaaagcaaactctatttttaaaacagtgcgtgagatcggggaaaaaacaacacagtgagatcgaaattcaaactgaagcgtaaaccttgttccttcttctctctcgttgttattttttggttgagcttcttctgcattcgaagaggaggaacaagatgcttcctctttctctactaaaaacggcacagggtcatcctatgttggtggaactgaaaaatggggagacatataatggacatttggtcaattgcgacacttggatgaacatccatcttcgtgaagttatctgtacttcaaaggatggagacaggttttggagaatgcctgaatgctatatccgtggaaatacaattaagtatcttcgagttcctgatgaggtaattgataaagttcaggaagaaacaaagagtcgtgcagataggaagcctcctggtgtaggccgtgggagaggcaggggtcgagaagatggtcctggtggaaggcaaccaaaaggagctgggcgtgggcttgatgatggtgctaggggtggaagaagacgangcangggtggctcaggtggaaaaaccantggaancaaaagtggtggccgaggtcaaagttgatgtcatgcttctttatattgggcaacgttgctatttttaaaanctggttgcctccaattgaccgaagttggtttctatcctttttgttttttctgtcggagtggtttgg

SEQ ID NO: 198627 - DNA, 582 bp, Gossypium hirsutum
cccgaagttttttttgttcttcgctagggttattcttcattcaaagagaaggaataagatgcttcctctttctctactaaaaacggcccgccctcgcccccggttggtggaactgaaaaatggggagacatataatggacatttggtcaattgcgacacttggatgaacatccatcttcgtgaagttatctgtacttcaaaggatggagacaggttttggagaatgcctgaatgctatatccgtggaaatacaatcaagtatcttcgagttcctgatgaggtaattgataaagttcaggaagaaacaaagagtcgtgcagataggaagcctcctggtgtaggccgtgggagaggcagggctcgagaagatggtcctggtggaaggcaaccaaaaggagctgggcgtgggctagatgacggtgctaggactacaagtggaggccgagggaggggtggttcaggtggaaaaaacactggaggcagaggtagtggccggggtccgggctgatgcaacactctactttgttttgacggggtaacatgggctattttaaaaaacaggttgcatcccaatgactgacc

SEQ ID NO: 198628 - DNA, 603 bp, Gossypium hirsutum
ctaaaaatctctccacaatgcttttgagaccagcttcatctttgcgtgtgcaagccaagcaaggggataatctaatttgctcccttaagggctcccctgtaacatcatcatcatcatctgctctgagttttctgcccagaaaacatggaagggctttgggtgtttatgcatccataggaaccgacaatcatgcacttacaggggtagtgttccagccttttgaagaggtgaaaaaggaggaacttgacatcccaatcgctcctcatctttcgctggctcgccagaaatatgctgatgcctgtgaagccgccatcaatgagcaaatcaatgtggagtacaacgtttcctatgtgtaccactcgttgtatgcttacttcgacagagacaacgttgcgctcaaaggctttgccaagtaagattataacaacaagaagctctccaaagttatttttttaatatatatatctgtatcactgtatgacatgataaaatttttatattgttgtcatcagattcttcaaggaatcaagtgaagaagaaagagagcatgcagagaagctgatggaatatcaggttttctttcatgtctattttctttttggg

SEQ ID NO: 198629 - DNA, 582 bp, Gossypium hirsutum
gaagggtcccgatcgctgtctcaactcatccaaaagtttaaagactctagcaccctggggccttttggagtatgactcgcttctgccatgggctcttgatgtggcaaagcagcaagggatttatggagcttctttctttaccaactctgccgctgtgtgtagcatcttttctcgcatccatcatggccggcttgctctgccgctgacccctgaaagcaaacccttaatgttaccaggacttcctccattaaatttccgtgtcctgcccacttttcttcggtttccagatagctgccctgcttacttggccatgaaattgagtcagtattcgaatttgaatgaagctgatcgggttttcgataacacctttgaagacttggaaggaaaggaagcaaaaggcgtgtcagagctctggcaagcgaagttgattgggcctatggtaccatctgcttacctagatgaaaggatcaaaggtgacagaggttacggttcaagtttatggaagccacttagcgaagagtgcatggaatggctagaaacaaagccatctcaatcccgtgtctatatttgatttggaagcat

SEQ ID NO: 198630 - DNA, 782 bp, Gossypium hirsutum
  unsure (1)..(782): unsure at all n locations
cccacgcgtccgcccacgcgtccgtccactcgtccgcccacgcgtcgcttattttcagtgcttcaatcagatggctttagaagctcttaactccccaacaaacgctgctgctccttttcacttccaagataccaatttacactgcctcgatgccttcaccaagcgtaagcgttccaagcgaccacgcttcgacgatgaccatgttcccaccgaggaagaatacctcgctctctgccttgttatgttagcacgcggcggtgctcctcgaaccacctccactaccttgactcaccaaaaacttggcacctacaagtgcagcgtttgcaacaaggcctttaattcttaccaggctttgggtggccacaaagccagccaccgtaaactttcaggagccaacgatgaccactcaacgccaacgacctctccgccgnttggatcanacccagcggtaggtccacgnagtgttcaatctgtcacaaaagcttccctactggccaggccttgggaggccataagcgacgccactatgaaggtggngctgccaataccggtggcattacatctgagggatgagttcaacctcaccaataccaccaaccggaacttgaactgaattaccactcttnctgattctcacggctaattattggtttcgcgtgattaaatgaagccccacctataagaacctgttttgtgcaaggcccccatatgagaactattatgccaatnctttttcttatttgccatcaaggcttatggctatggacaggtattattatccc

SEQ ID NO: 198631 - DNA, 513 bp, Gossypium hirsutum
aacacttttgctctgcatctttctttcatcccaattcataaccaaaggctcctgggttttttgtgtttactttcggtgttggaatcaatcagatggctttagaagctctcaactctccaactacaaccgctacgcctactttccactttgaggataccactaacttacactgcctggaatcgttcaccaagcgtaagcgttccaagcgaccgcgtttcgatcatgttaccaccgaggaagaatacctcgctctctgccttatcatgctagcacgcggcggtgatgccaactccaccgacacttctgttatcccacagcgccatcgctctcctactccaaccgcctcaccaccgcctgcaccagcaccagcacctacctcaacagagcaaaaggttagctacaactgcagcgtttgcaacaagtcctttaactcttaccaagctttgggtggtcacaaagccagccaccgtaagctttcaggcggaaacgatgaccagtcaacgtcgacaacca

SEQ ID NO: 198632 - DNA, 457 bp, Gossypium hirsutum
  unsure (1)..(457): unsure at all n locations
gaaagggcggggggacccacgcggccgcccacacgtacggttgggatccttcnttttggaagggctagaggcacggggcggctccttagggagctcaatctatgaggctttgcgaggcaaagaaccaaacagtgctgacctattatcttacatgcacattctttatgaggtttgcccctacttaaagtttggctacctgtctgcgaatggagccattgcagaggccatgaaagatgaagatagagctcatattatcgatttccaaatagctcaggggagtcagtggatcactctcatccaagcatttgcagctaggcctggtggaccaccccatatccgaataactgggattgatgattccacatctgcatatgcccgtggaggaagcctaaacattgtgggaaagaggctgtctaagcttgcaaggtattttaaagtgccatttgaattccatgct

SEQ ID NO: 198633 - DNA, 383 bp, Gossypium hirsutum
ctttttgcatcttcgaaatatcctgaaagattttaaagatttcccttctctttttctttggatcaactccattcttcagatcaccttacattgactgatcggagaatctgtgttcgtttccgaatttgcggcttttataatttggggaagaagagaattgcatgaatataaagttgtggtgtttgtactagatgaagggagcgcaggcgtggcgactaggcagcatgggtgatatgcaaatcttgcctgggtctcgccaccgccctcctttgaagaggccgatatggattatttcattggttcaattagttggccttttcctagtttgtgcttatatctattcaccacaaggcagtgctgcttgttatgtattttcttcaaga

SEQ ID NO: 198634 - DNA, 713 bp, Gossypium hirsutum
  unsure (1)..(713): unsure at all n locations
caaaatacaaaaaaattggaagcaattcttgtgtcctgggaaaaggaagaggacgcccgatgaattttttgagggtatgcagttgatgcacatgacaatctgtttggcctcaagganagcaangggctttgcaggtccaacttggctgannagagacgagtcttaatcggacttaacttttggangcgttaccttcattcgaagataaagtgcatgaagtgtcttggtaaatctgagctgtatgaaaggatgatggatctaactgttgagattgatggggacatcggaagtctggaggaggcacttgcacagtttacagctagagaaatcttggatggagagaacaaatatcattgcattaggtgcaaatcttatgtaaaagcaagcaagaagtggacggtattagagtcacctaatattcttaccattgttttaaagaggttccagtctggtaattttgggaagttaaataagtcagttcaatttcctgaggtccttgatttggccccatatatgagcggatcaagttcgaaggcggtcatatacaatctctatgctgtggttgttcacttggatgttatggatcctgccctttcaggccattacgtatgttacgtgaagagtttccgaggggaatgtttaaggattgattaacagcacggtaataccaatgtcattggagagggttttgttcgaaagggcgtacatgctct

SEQ ID NO: 198635 - DNA, 384 bp, Gossypium hirsutum
  unsure (1)..(384): unsure at all n locations
gttaaaaggagccgaaaactaatttagtgggtcaatggattcctctaaactcggggaaaattcgactatggtgcacgaaacgcatcggcaaggaaaccctactgacccaaacgccgatcaaaacgctgctttgatcaattctttcattgaaatcacttcttcttctaaagaagaagcccttttctttttggaatctcatcagtgggacttagacgccgccgtttcgactttccttgacagcaattctaccgccgcactacaacaaccaccgaccgcaccgnctgtttctggcgttggtggtgttaacaactctgcttctcctttgcagtccgattcccctgattactctccctctcaatcgccttctcggtctcgttctccttc

SEQ ID NO: 198636 - DNA, 528 bp, Gossypium hirsutum
atattttcaggtcaaacttgtgggttccctaaaacctctttggggttcttcttcttcttcttcttcttcttcttatcctcttttcaatctcaattattaagttcaactacgttttaattttcggtccttgaatcattgaatgtcacaaattaaaaaaagaaaagaaaaaaaagacaatggcagacactggagacactgccagctccagtggacctggtgattcgcacggagccctcatcggaagcaaccctgctcgggcaatacgacctcgggaagttgctgggatgtggggctttcgcaaaggtttaccacgcgcgcgacgtcgactccgggcagagcgtggccatcaaggccgtcagcaagaagaaggttttaaaaggcgggttcatggcacatgttaagagggagatcgctatcatgcgccggttgcgccaccctaacatcgtcaagctcatcgaggttttggctaccaagactaaggcttatttcgtcatggaattcgccaaaggcggagaattgttcacgagg

SEQ ID NO: 198637 - DNA, 592 bp, Gossypium hirsutum
gaaaccttttaactggttttggattttataacccgttttggctccttgatattgccaatgctgccattgttattcaccttgttggtgcatatcaagtttactgtcaacctcttttcgccttcattgagaaaagcgcgaccgagcggtttccggacagtgaattcattaccaaagatatcaagatcccgatcccgggttttcgcccttacaatctcaacttgttccgattggtttggaggacaatttttgtgatcattacaacattgatctccatgcttcttcctttctttaatgacattgggggactccttggggcacttggattttggccattaacagtttatttcccagttgagatgtacatttcacaaaagaagatacctaagtggagcacaagatgggtttgtcttcaaatccttagcattgcttgtctctttatcaccattgccgcagctgccggttcgattgccggggttgttctcgatctcaagtcgttcaagccctttgcgacagtatactagttcggtagaattgacccggtatgattcgcaacattcacggacagtaaaaggcgaagaaaaactgatctttt

SEQ ID NO: 198638 - DNA, 404 bp, Gossypium hirsutum
atataataaaacgtttttttgttcattcgccctttcgctgttgtatttggtttttgtttaatagcttaactgactctctgaaatatcgcggatctttggtgttctacacgcattttcgcttttaattatagcctgattttactcggaagatgaggctggaggaagagttctctcattgcgacaactacgacgaagaggaggaacccaaaacgatgtcgcaatgttccatcggagctttacaacaacaacagcagcagcaaaagtttgtcgttgtcggttatgcccttacctctaaaaaaatcaagagctttttacaaccaaagttcgaaggtttagccaggaataaggggatattatttgttgcaattgatcaaaatagaccttttctaataccatggttcctt

SEQ ID NO: 198639 - DNA, 673 bp, Gossypium hirsutum
ttcacgcgtccggaagcaggatgcttcccaggggccaaataacttgggttgtctgcaatcacttttcttattagatacagaaggcaaagctgataacgaatctcttattccagaagtcatctcaaggtctaaacatttgagggtgttaggtttggctgagtgtaatttagagcaattgccaagcaacataagttatttaaagcagttgagatgtttgagcctagcctacaatggaaatattaaaagatttccaaattccatttgcaatttgcagagtttgcgaacacttgacttttctggatgcgggggaattgaagagttaccaaaagacataaggtacctgattagccggggggcattgacggtaacaacaaaacagacgcgtttgcaagagaatggaatatcgtgcctaacttctcttcggatgttgatcttttatgagtgcgaaaatttagaaaaattgtttgaagacattcaaaacctaacagcccttcgggaattaatcatagttgactgcaacaacttggtttcattgccacgagatttaaaatacctaactgcattagaaattttgataatttgggattgcgaaaagcttgatgtcactgtggaggagttgaaacttgagaggaaagaagatggtagcctccggaaactggcgattggaggagtg

SEQ ID NO: 198640 - DNA, 663 bp, Gossypium hirsutum
cccacgcgtccgccgatgtaaattcttgggttgaaatgccagctggcatgggtgatggttggcctgcaagacaggcaggaacaaaattgagtgttactgtggatggtgagctgtatgcactcgatccatctaattctcctgaaagtgtgaggattaaggtatatgattaccaagatgatgcatggaaagttgtagtgggagaggtccccattcctgactttactgattcagattttccctatttactttctggtttccggggaaagcttcatgtgatcactaaagatgccaacaacaatatttcagtcttgcaggctgatgtgcaaaaccattttacttccctatcatcagcttcattggatagctcacctggtgcacatcctgagtctgcagaacctgcaacagcatttgaaacggatctttggagggttattgccacaaggacgactggatcttccgaactagtaagttgtcaggcactcaatatctagtgccactgttggactacttagggatctaagtttcaacttttccgaaaattatttggttgcccttatttgtttcactagatctgttgattttacaagcggcacactgaaattgggatttatgtaagttataacctttactcttgtatccttgtataatataaagcaaaggaat

SEQ ID NO: 198641 - DNA, 429 bp, Gossypium hirsutum
gtgatttttaatttatcaaataagttacaaagtcccaggtataatataatctaaccatatgacgcaacttgtcgtccattcactctcctcagctccatctggttggtgctaatctcgcgaaggagtagatcgtgagtggaagacgcccctgccccactatgaattactccctgattacggctctttggatgcactcacccacacgcatctctccgttcgtttgaccggaggccactctccaccgttcacgtgtacgttaaacatataggtcgaaaacaaaatccagtgattaaacgaacagagaaagaccgactaagatctgaaatcgaacgaacgaagatttggggtgttttgtcgttggattggcgttttaaacttgggggcaatcttgacccattggagagggtgacaacaaccaccactgtggtg

SEQ ID NO: 198642 - DNA, 440 bp, Gossypium hirsutum
gaaaatatacactttgatgttcttctcgtttcctttgtatttttttttttttggttttgtgatgattgagaaattaaggggggatttttattgaataatgttaggcggaggagattttcaatgacggaggtttataggagaatgctgagtgatgaagatgaagatacgccggcgaagtgccggcaacgacggcgaagaaggattgagatgaggaggcatgctgctgtctcggcatcgggagcgttacggagtctgggcccaacggaggatcctgcggagagttcagattgcggtcgtgaagggaagcggctacatgtgctggaagccggcgatctggtagtgactaacagtacgcatagttcttctggcgaggaggaatctatggcccggaagtcgagagcggaattgaataacggccggtttacggaactatgtcgatt

SEQ ID NO: 198643 - DNA, 429 bp, Gossypium hirsutum
gaactattcagaaagagtcatgcttttctatgacggtctccactatgatggtgggggctatgtctccgtttgaggatgctcccgaggagtttgatcagactatattttccgtacaaaaggatagaaccatcgggccggttgaaggcctagcactgaatctggtcaaggatcaacaaagtaagaggagatacaccgacacagccaacttcactttgcgttgtggagtatgccaaattggcgtcattggccagaaggaagctgctgagcatgcacaagcaatgggccatggaaactttcaagaatatagatgatagaaatctgagaggttagtggcattttcttaagctcagctccttcataccctacctagttcatcggacttgtatcatttggttgataaatcatcttattgaattctcggataacaaa

SEQ ID NO: 198644 - DNA, 739 bp, Gossypium hirsutum
tcttccacgcgtccggccaaagatcttggggcggctgtataagcagagaacacgaaagatggcaatgaaaatcttcagcttggcagcacttctcgttgggggtttggcttcatccgtgttgcagagcacatatgctgcaacttacactgtgggtgacgccaccggttggacagtccctaaccctaataatcctgaattctatgatgactggacagacaataagaacttcgtgggcggggatgttcttgcgtttagttttacaaccggacgacatgatgtcgccgaggtgaatgaaactgcttacgacaactgcatcactaccaatcccatcgttcgatatactacaggaccggcgaatgttacccttaacaggaccggtggataccacttcatttgcactttcgccggtcactgtggcatcggccaaaagctcagcatcgatgtcagaactggccccagcactgctcccacacctggttcaacccccaatccttccagctcagcttcatcccttgttgccaccatatctcttgttttcatgtccattgccttagctttgttctgctaattttgcctgttcatttttatgtgagattcatatgtcaggtcagtataattcacactttgtggcgtatacccagacacagtcttcattcgttttgttattatcattatagtttatcatatggagtgagatttttgtatgtttgaataaaaaagcttgattcatttgctttcc

SEQ ID NO: 198645 - DNA, 536 bp, Gossypium hirsutum
cccactcgtccgcacccctaatgtttcaaacaaatataaaccccaaaagtgagagagagagagagagagagagagagagagagagaagaggaaaagaaaagagaaggttttcttcttttttactgtcgagtaagtgattaaagatggaagcagtgaatggatgctcatcttctacatcatcatctgatgcatcttcttcggattcgtatttatctgcaaggggttcaaacaaagctgagaagatcaaaggtccttggagtgctgaggaagataggattttgactcgactagttgagagatatgggcctagaaactggtctttgataagccgatatataaagggtcgatcagggaaatcttgcacgcttagatggtgtaaccagcttatccccaatgttgagcaccgttcgttttcccaagctgaggatgataccatcttggccgctcatgctcggtatggtaacaggtgggccaccattgctagattgcttccgggaaggactgataatgctgtgaaaaaccattggaactcgacg

SEQ ID NO: 198646 - DNA, 448 bp, Gossypium hirsutum
tatcctctccctctctctcttgtgctctctttcatttttccatagctttccttgcggtcaaatactaatccctttgtttttttgttctccctctctttaaaatttgatttttacagagcacgaaaagtaaaaagttatggcggaagaagaagaaacagagctgagcgatgatcaaaagaaaggaatcgccaaatggttcctcgtaaacgctcccgctggagaaatccaatatgtctccagagatttaaaattggttttgaatgatgatgatgtgtataatgaggcggcatcggaggcgtttcccgtttacaacaaatctcacctcatttccctcaaaatgcctggtggattcggtgatgtgttggttacatcatatggggagcttcaggataacgagtacctagaccccaagactgcccaagttgccatagtcgatcatgtcaaacag

SEQ ID NO: 198647 - DNA, 471 bp, Gossypium hirsutum
tccgaagatgggttcttgttcttttcttcttttgttgttctatataactgctggttgttcaatacgttgcgttttgggttctccaatttgctcccatgaagctgatgtgttcattgaaaaccttcgatttcaatgctctacttcgttatctccaatcccccctctcgaggtggatggaaacttcctggacagagcattgacttccaaacagagaaatggtcacgtttccgtgctcctttatgcttcttggtgcccattttcacgaagattgcgtccgaattttgacattatcggttccatgtttcctcagttggagcatctggcagttgaggagtcttcagcttcaccaagtatattttcaagatacggaattcatagtttgccatcaattctaattgtcaaccagacatcaagggtacaatatcgtggtccaaaagatctcccttcaatagaacaattttatgagaaaat

SEQ ID NO: 198648 - DNA, 400 bp, Gossypium hirsutum
ccacgcgttcgcccacgcgtgcgcccacgcgtacgcccacgcgtccggaagctcaaaagaccagggagaatgggattgtccaaaagcacatcaaagacgcagttgtggtggatcgaggccaagcttcagctgtcgggattgagaccacaacagaatcaagctccaaagtatccattgcagaacgcaatcaaatactcaatgatgttcagctgactgatgaaacaacaaagacagcatctgatgagcagattccaagggaatgcgatcacattgagaacttggagataacaagcttggtcgtcggggaatatgttcggatagatttgcaggacagagttgatccgcaaaaggctgaaatcggagatgtcaaagagatctattcaggaggaatagaacatgc

SEQ ID NO: 198649 - DNA, 631 bp, Gossypium hirsutum
tcccttcttaacgacgactcgaattctaaaaaagaaaaaaacctacaacatgaggcccctcttctccgtcccattcttaaccttcctcttcttccatttctactcagtcccgaccctcagttcctacgtatacgacactagcgccaccaccaccaacgtcatcaactctacagatttcattcgtacaagctgctacgccaccttgtatcccgatatttgctatacttccctttatggctatgccaacgccatccaacaagacccagctcgtctagctcgtgccgccattagtgtcagcctctctaaagctcgtaacatggcagtctacgtctctaacctctcccgggaagccgattacggcgccgacccaagagccagcgcagccttgcacgactgtttctcgaacatgggtgatgcagtggatgaaatccgtgggtcgctgaagcaaatgcaacgggtagtggctccaggttcggagtctttcaggttccaaatggggaatgtccagacatggatgagcgcggctttgacggatgaggagacgtgtacggacgggttcgaggatgtggcgggtgggccaatgaagacggaggtctgcaagagggcggctaaagtgaaagaagtttacgag

SEQ ID NO: 198650 - DNA, 547 bp, Gossypium hirsutum
ccttctcgtccggtgatcccattgtgcaaagctgtgttagaagcctatagggatcttggataccggggcaataggcaaaagactagaatgatgtggctgattgatgaactggggattgaagtgttcagatcagaggtagccaaaagaatgcctcagaaagagttggagagagcatctgatgaaggtttggttcaaaagcaatgggaaaggagagactacctcggtgtccatccgcaaaagcaagaaggtttcagctacattggcattcacatcccagtcggtcgcgtccaagctgacgacatggacgaactagcccggttagccgacatgtatggctcgggcgaactcagactcactgtggagcaaaacatcataatccccaacgttgagaactcgaaactagaagcattacccaacgagcctctattgaaagaccggttttccccccaaccaagtattctcatgaaagggctagtagcttgtactggtaaccagttttgcggacaagccattattgaaacaaaagctagagccttgaaggtgacgg

SEQ ID NO: 198651 - DNA, 368 bp, Gossypium hirsutum
cccacgcgtccgcggctgaaccgggtatggttaggtcgttgttgaaccaggcggcaacggtttcgaatccgttttcggttcgtcattctgctttggttcgactcaaggggttggctcgggagtcggagaagaattggaacgtgatttgttctcatgaggctagggagatactgatgaggattttgttttccgatgtgagttccggttcgtcggagttgagccaggaggcgcttgcggttttggtgatgtttcaactcactgagtctgagtgcacggggatcggttcagattccaacagagtggtgtatttgtcggaactcttgttccattcctcgatcgaagtacgagttaactcagctttactcatc

SEQ ID NO: 198652 - DNA, 653 bp, Gossypium hirsutum
  unsure (1)..(653): unsure at all n locations
aataaattttggcttttttttattcaagatttctataggtagtaactcgagtaaaccctanctaactccacccaatttcgtgcttctttcaaaaggtgtgccgagatggctgatgttcaagactcagatggcaaaccatgtgaagacagtttgccttgtacatctcaaaagcaggaaactcgtgatgaaatgctttctaggcacaggagagagatatcggagctgcaaaacaaggaaattagcctgacaaaggcagcagcaaagggtagcaaggctgaacagaaggctaaaaagaagcaggtggaggaagagatctctcagctctctagtaatctcaaggcaaaacatgcagaagagcttgcttcactaggctacagtaacggaaatgataaaagcaatatggacaacttggtgaaggccatagctggggtgtctgtcgctcctcagcaggatcatccaaagcccagcaaaggtgccaagaggcgagtgaaaagagctcagcaagaggcagctagagaacaaagaatccaagaagagcagagcaaccttgtgagtgatagaatgatcgacgatgagaaattggaggaaaaactgaaacccctggtgatcacaattaatgaaattaagccagatgggcatccggctttaccgag

SEQ ID NO: 198653 - DNA, 390 bp, Gossypium hirsutum
  unsure (1)..(390): unsure at all n locations
tcgaaaaggcgtattacctcgtgagctctctccnttccttatttcatatttctacttctgctgcggcattattttcatttttctctttcttttattttttaataatgtttaatccatctacaaacgcactctcactgacgttcccctcacacgttgttgtagcattcggagatatgacgtcagatggggcgacgtcgacgccggcaccagtgccaaggaggaaaccttcttgcagggagagagagaacaacaggaggagggagaggaggagaagagctatcgctgctaagatatatactgggctgagcgctcaaggaaattataatctgcccaagcactgggataacaacgaggtcctcaaagctctttgtgccgtggctgattgggttg

SEQ ID NO: 198654 - DNA, 849 bp, Gossypium hirsutum
cccacgcgtccgcccacgcgtccgttcacgcgtccgcaactttcaactctaagggatcggtagaaatcaagatcaaaataccacatggtttcttcatggttcacataaaaacaccctgatttttgtttgcccctaagccaatacaatccaagtataccccagtctagaccccactcttcttctcttatcccttcccttccccaaaaataatatcttcaagaaaagttacaaacctcagccgtcttctcgcttctccagtttctttcaagcagcttccttcatggagctcacttgtttgcataacaaattcaatttgtctgctttgcctcacctttcacttccatcctccaagaaccctaaccccagattcttttctagaaaaaggaacaatctttgtctggcctcaacttctgatacccttgtgactggctccggaaaagaagttagcagcaagaaagatgctgaattgggggacttgaaatcttggatgcacaaaaatggctttccaccctgtaaatttgttctcaaagagaggccttcttatgatgagaagcatagacctatacattacgtcgctgcctgtgaggatcttcgggcgggtgacgtggctttttcggtgccgaattcattggttgtaacgcttgaaagagtgctgggaaatgagactgttgcggaacttttgacaacaaacaagttgtcagaattggcatgcttagctttgtacttaatgtatgagaagaagcaaggaaagaaatcattctggtatccatatattaaagagcttgatcgccaacgtggaaagggccacctggctgtggaatctccacttctatggtcagatgatgaacc

SEQ ID NO: 198655 - DNA, 368 bp, Gossypium hirsutum
cttgtagagaacaaggctctctttgaggacaaggagcaattatcacagaagccgcctatttgaggaattagtgcctccaatttcaacctggaggacttgaaaagtcaggctgcacttattcatgattatgatgatgtgccaaatgcagaagatcgagatggcagcaatggtgttgttggattatcaccagagagaatgtcttctgaaatggctagtaattccattgcttcaagtagccaggaggatgggcctaatgatcttcatgatctaaagagttccctggcggcagttcccattaaacctcttcaagcactcaaaggctgttttgacattggtgaagatgatgaggatgtaaacagtccgaatcg

SEQ ID NO: 198656 - DNA, 401 bp, Gossypium hirsutum
ctcaactccagctaccgtctcattaggaatccatgcccgggaatctttatcaaatggacccgcgatcggcggctgaaaaggccgtttcagttatcggtttcggattcgacttgtgcagggatgtcaggctatccgcctgcctgcctggcccttccggctccagattgatcgaacttgactcagcagcgactcgggacctggtttttcctgatggagttgttgtaaaagatgtccccaattcgattaaatacgataaaggcgagcgtaccaggtttcggtctgatgttctgtctgttagccagatgtcagagaagttcaatcgggatctatcattatccggcaagattccttccggcctatttcaatgccatgttcgagttcaaaggctgctggcataaaga

SEQ ID NO: 198657 - DNA, 503 bp, Gossypium hirsutum
ggcgagtaggcagtggcagatgggcggtttctttggttttcaagccaatctccaacgtctaccttcgttatctccgccaacattaacacaaagcggatttatttaagatagaaaaaatatcaaacaattggcatgcacagtctccgcctagcttcttccgctcattcccagtctctcttcacaatgtccgccgcctccgcttcccttgctctcccttctcccctttcttcgtttcgctccaatggacctcttccttctagatgcttcctccgcctcaacaacccctcaagatctagggttttcatgagtgtctccgttggatcccaaactgtcgtcgatgatgccttgttcgctgattacaagcccaacatccgccttcctctttcccggtcagggcgctcaagccgttggaatgggaaaagaagctcaggctgtgcctgctgctgcagaattgtataagaaggcaaataatatattaggttttgatcttctagatctttgca

SEQ ID NO: 198658 - DNA, 808 bp, Gossypium hirsutum
aacaaatcaagcttcaactccactttacctgtgaaaaagcttcactcattcattcatgcatctctttttttttcctctaagaagaacaagagagttgcttgaattgaattgcctcaaaactctttgatgtctgtcccaaagctgtttcctttaacttctctttgtctcctgttctcgaagaagaggagcctgtgatatagattgaagaagcaagttagatttaaaaaggacaatgcggttgtttccatcgaattcgagtaagggtcagagtaatggtggaagcaatcgtgctttgttgtatctcaatgtatatgacctcacacctataaataactacctttactggtttgggattgggatattccactcgggtatagaagtacatggtttggagtacggatttggagcgcatgagtaccctacaagtggggtgtttgaagtggaaccaagaagttgtcccggcttcatcttcagaagatcaatagtattgggcagcactaacttgtctcgttcagaatttcggtcacttatggagcacccttcccagaaataccatggggacacgcaccatttaatggctgagaattgcaaccatgtcaccaatgaagtgtgcatgcagctaactggaaagcctattcctggatgggtaaataggctggctcaattaggttcattttgtaactgtctacttccagaaagcattcaggttactgcagttcgacatcttcctgatcatccagcatattccgatgatgaaagatcaaattctgctgcaacatctttaacaggagagagcgatgaaaaggat

SEQ ID NO: 198659 - DNA, 819 bp, Gossypium hirsutum
  unsure (1)..(819): unsure at all n locations
gatagataaagagaaggagatggtggaaaacttgaaactgcccaccaaagtccgctgttagtcacagcaaacgccctttttattcaaaaaacttacctttattcaaaaaagtctctctctttctttctatgtgcctatcctttttatctttgaatgtttccgcttctatcacccaataattccttattttcctgcttgacttcccaagatattcgcttgggtttctgttagtttcccccccttttcttcctaaattgatttcttagctggacatagatagatgggtgtatatctcagcactcccaaaactgaaaaattctcagaagatggtgagaatgatagagttagatatggtctagcatcaatgcaaggatggcgttcaactatggaagatgctcatgctgcatatcctgatctcgatgcatctacttcgttctttggtgtctatgacggtcatggaggtaagggtggttgccaagttctgtgccaaataccttcaccagcaggttctcaagaatgaagcatatgctgctggggacataggaacatcagttcagagagcatttttcagaatggatgagatgatgcgtggacaaagaggatggagagaattagccattttgggtgataaattcacaagttttctggcatgatagaaggtttgatatggtctcctangagtggtaacagtaatgaccaagttgataactgggcctttcgagagggccctnactctgacttttcttgacccacatctgggagcacggctgtgttgcaagtctaagaaacatcaactttttgtgcaatgcttgtgatctc

SEQ ID NO: 198660 - DNA, 564 bp, Gossypium hirsutum
tctttcacgcgtgggaaagaactttgtttcatctgcttcatttgtttcgaaatctttgaacaaaaatggcctctttcaattgctttgctttagcattcttgattgctttgtcatttgcaagcattgatgttggggtagcagctcgtcaccttctgcagcagcctcgaacgcaaagtttaccatctttccctaatctcccaacgccatcccgaccatcattcccatggcctggggcgcttcctccacttcctaccacattcccaacaggactgccccctctgccaagcattccctcagtccccacaatcccaactgcaattccccctattcctttctcttttccgccattgccatctttccctaatctcccaaaccctggggcgcttcctccacttcctaccacattgccaagaggactgccccctctgccaagcattcccttagtccccacaatcccaattgcagttccctctattcctttcttttctccaccaccttctccttctactcgttgaaataccccatttttttctatctgctgcatactggatctggtttaataag

SEQ ID NO: 198661 - DNA, 459 bp, Gossypium hirsutum
tttccacgcgtccgcccacgcgtccggctttctttcgtctgcttaattggactcacatctctagaaaaatggcatctttcaattgctttgctttagcattcgtgatggctttgtcatttgcaagcactgatgttggggtagcagctcgtcaccttctgcagctgcctcaattgcctccaatgccaactttgcctacaaccacactccccccacttccatctatccctaatctcccacagccatccataccagcattgccaaggcctggggcgcttcctccacttcctaccatgccagggttgcccacattgccaagtgtaccaagggccacactgcctcctctgccaagcatgccctcaatcccaactgcaatcccctctattcctttcctttctccaccaccttctccttctaccccttgaaataccctttggtttattgaaataccccctttggttt

SEQ ID NO: 198662 - DNA, 494 bp, Gossypium hirsutum
tccacgcgtccggtttcatttgcttaattagtttcaaaatctccgcaaaaatgggttatttcaatggcattgctttagcatgcttgatggctttgtcgttttcaagcattgatgttggcctagcagctcgtcaccttcagcagatgctcaccaatgccaacattgcctacaactacactcccaccattgccatctatccctaatctcccgcagccaacaatgccaaggcctggggcgcttccaccacttcctaccatgcctgctttgcctacttttcctgctataccaacggccacactgcctcctctgccaagcatgccctcaatcccaacaatcccaactgctattccctctattccattcctctctccgccaccttctcctgctgctactccttgaaatacccccttcttcttccgtctattgacagacaaaatctgctgcatactggatttgttttgatgtgtttttagtcgtctttgtctctattgagt

SEQ ID NO: 198663 - DNA, 545 bp, Gossypium hirsutum
tattagtttcaaaatctctggacaaaatgggttatttcaattgctttgctttgggattcttcgtggctctgtcgcttgcaagcattgatgttggggttgcagctcgtcaccttcagcaactgcctccaatgccaacattgcctacaaccacactcccaccattcccatctatccctaacctcccacagccatccataccatctttcccaaggcctggggcgcttcctccacttcctgccatgcctgctttgcccacattgcctagtgtaccaagggccacattgccccctctaccaagcatgccttcgattcccacaatcccaactacaattccctctattccattcttctctccaccaccttctccttctagtccttaaaaatccctttcgctaggtgatgggtggctattccaatccagagtcttatttttttggtccaccacttatattgctttgtataaatgggagtttccccaattcccatgattttctgtactttgatacttattttggttattattggattatataccctatttttat

SEQ ID NO: 198664 - DNA, 458 bp, Gossypium hirsutum
cagtttttcctttaagaaaaaaagcagtagaactccttcattccaactcagtgctcatggatgcgcaagaaggaactcagcagtcacagcagcttttccttgctcacaaagtcttcctcctcgggcgccgggatgtccctgacatccagaacgtccgactcaaggatgaggtcctaaacaccgtcaaatccaattatatgactccatattatgaaaacctagtcgcggacaaggtgctggacctggaccacagcgttttggactcgatgcgtgcaaagaatgaggaagagattaaaccgatccacgaatagattgctgatcctgaagaaaacttaggtgaaagtgaagttcgagaggcgcatttagctaaattcttatatttcattcagattggtgaaaaggagaaagcattggagcaactgaaggtgacagaaaacaagacagttgctgttgggcaa

SEQ ID NO: 198665 - DNA, 420 bp, Gossypium hirsutum
tcgctgatcaaaccagcaaagcaaatctagtgcaaagtttacaacgaaaactgcatttcaacatcggcaagagtgagattgaaagggaagatgagatcgtcgatctgttgcttttgttcgacggtgccgcataccgaagacgttgatgaatttgagcagttggaggaggtgaagtcctcgaggtcgacgcctagatcgccttacttgattaaggaaaaatgcaggaacctaatggcttggatcgggaaaggagggcacaagcactacgcctcctctgatttcagttacgatcccatgagctacgcgctaaatttcgaggacgagtcgagtcgagctgacgagcttcctttcgtcaacttctcgtcccgactccgatctacgccggaccggttaccggcgatcaagcacttaggtgaaacg

SEQ ID NO: 198666 - DNA, 1191 bp, Gossypium hirsutum
  unsure (1)..(1191): unsure at all n locations
ccttccggccatttttgttgttccaggcaaatttttaggaagggtttttggtcccctgaggaggatgaaaagcttttaaggcttattacaaagtatggccatggttgctggagctccatccctaaacaagctgggttacagaggtgtgggaagagttgcaggttgaggtggattaattatttaaggcctgaattaaagagaggcacattgtcacatgaacgaagaaaatctcataattgagggtttttctcggttttcaattaggtggtctcaaattgctgcacgattaccaggaagaaccgacaatgaaatcaagaacctatggaactcttgtttgaaaaagaaacttaaacagaaaggcatcgaccctgtcactcacaagccactatccgaggtcgaaaatggcgaaggaaatggaagcaacaagccatctttggtgggtcatcatccaattcaccaatatacatcgccgcccccaccaccaccaaagctctcctctaactggttcaaccctgaattttcaccacccatgaccgcctcttacggacccttatactatggaaccaccaccggtggctcagccaataacaccacttggggattggttcaaacacaaactgaagaagaagaagaagaagaagaagaagaaaccnnntggactgagttgcttaatagccctttattaatggcggctgctttacaaaatcaaaccccacaatcttattacaatatcgagatcaaatcagagccttgttacttaactaatagttcatcatcatcatcatcatcaaacgatatgtggtggcctcagacccaacaacagcagttaccactacgacatgaacctttacganatccagacatatgtgggtaagatatgcaaacactcacagcagcagctttttggacataattaaggggttgtgtctggtaacccaatttnttttttttaaaatttttttgccttccggtgttcatggtataatggggtcgtgagtacaaaaaaaaaagtgtgatccaagggttcggtttcctttttggtaccgantttgttgaaccaaaaaacaaccttctggttggtttggttaatttaaaccccttttgggttttcaagttttccaaaattttgggtgggttggtgnttaaaanannagagaagaaggaaaagattttcttggggggccgggccaa

SEQ ID NO: 198667 - DNA, 354 bp, Gossypium hirsutum
ggaatgctacatctttgtcaaatattgctgtcgctttcatttgtggcattatgcgattatggattttcctccttcatgccacctgacaaggaaaatacttggaatactagaagcgaagacaacaaatggtggcttttgccaaccatccttctgatattcaagtcaatacaagctcgatttgttgattggcacattgcaaaccttagaagtccaagatttctccctcttctgtccggatccagatgctttttgggctcatgagcctactgcttgaatttaaagtgaagactgactgcactccatcatcttcttccatggttctggctgtgatgcttagctttccaactgaaattt

SEQ ID NO: 198668 - DNA, 420 bp, Gossypium hirsutum
tcgtttacgcgtccggttataatacacttccatcttccaaccaaattaatctttcttaacatatacattcatgcggatgagttgcaacggttgtcgagtccttcgcaaacgctgtactgatagctgcactataagaccttgtctccaatggaggcctagcgctcaatcccaagccaacgccacccttttccttgctaaattctacggccgtgctggtcttattaatcttatttgtgctggccctcagaatctccgtcctggagtttttaaatcattgctatacgaagcatgcggtcggatagtggacccagttcatggttcggtcgggttgatgtgctccgggaactggcatctgtgtgaagcagccgtcgacgcggttttaaacggtgcgccgattaacaagttccttctgaattgtcg

SEQ ID NO: 198669 - DNA, 432 bp, Gossypium hirsutum
gctggcttctcccttcttttaaggttagatatatcggtagagaggagggggaggggaaaatgaaaatgaaaagaatgaaagagagggtctaaaagaaagtgtgaagaaatttgatggaggaacatctcagtccattagctgttactcatctccttcaacacacactaagaagcttgtgcattcatgagaactctcaatgggtttatgcagtcttttggaggatcttacctagaaactatccacctcccaaatgggatggccaaggagcttatgacaggtcaagaggaaacaggagaaactggatattagtttgggaagatgggttctgcaactttgctgcctcagcagctgaaataaactccggagactgtcatggttcctcagtccatggcagcagtgagtttcaacattatcaaggactgcaaccagagc

SEQ ID NO: 198670 - DNA, 600 bp, Gossypium hirsutum
aggccacaaatcattatgaacgcccagcaagggagaaaaacattagagcaattttcgccgccatttcagctactaggcctcgggctgatgttgcctattgcatccatgctcttgcaaggcggttatcaaggacacataattgggcggttgcattgaaaactctaatagtcattcatcgtgctctgagggaagtggatcccacatttcatgaagaactcattttttatggaagaagtagaaaccatatgcgggacttgtctcatttcaaggatgattccagtccaaacgcttgggattactctgcctgggttcgcacttaatgccttattcttggaggagaggctggaatgttttcgtgtcttgaagtatgatattgagatggaccgcccaagaaccgaagatttagacactgcagagttgctcgagcagctgccagctttgcaacaacttctttttcgtgttcttggctgtctgccacaaggtgcagctgttcataattttgttatccggttggcactttcaatggttgcttccgaaagtatcaaaatttatcaagctataagtgatggtacagtcaatcttgtagacaagttctttgac

SEQ ID NO: 198671 - DNA, 600 bp, Gossypium hirsutum
tgctaacacagccagaggggaggagccagataagaaaaactaaaggaaaattgttttctggttcaaaaccacagccctatcccacatgcggttcggatccggattctctaagatccggttgacattcatcgctttaattttcattctgatctgatcccaaacgaatctattcggccgtgaaaaatgactcgtcgctgctcacattgcagccacaacggccacaactctcggacatgtcccaaccgaggggtcaaactcttcggagtccgcttgactgacgggtcgattcggaagagcgccagtatgggcaacttaagccaatattccgggtcgaattctggcgcgcataacgggaacgggtcgggttcgcccggtgagggtccggatcacaccgatggttatgcttctgaggatttcgtccccgggtcgtcttcgagtcgtgaaaggaaaaaaggtgttccttggacagaagaggagcataggatgtttctccttggtctgcagaagcttgggaaaggtgattggcgtggaatctcacgcaattatgttatatcaaggactcctactcaagtggctagccatgctcagaaatatttcatc

SEQ ID NO: 198672 - DNA, 500 bp, Gossypium hirsutum
ttcacacctctctttgttgcacctttttttggtcaaaacaacacaaacaacaaattaacaaacccttgttctactactattactacaacaacatcctctgtctacaactcaaaagcaaaagaaagtaaaaaaatggatggaagcagcatagatgaatccgcatctagtgattccatatccgtatccattgccccatcaaatatttcacctttgcctcagctcaccaaatctcctgactccctctaccgcgttgggagtggaaccagcgtgattgtggattctgaatctggggtcgaagccgaatcaagaaagctcccttcttccaagtacaaaggtgtcgttcctcaacccaacggtcgatggggtgctcagatatacgagaagcaccaacgtgtttggcttggcactttcaatgaagaagatgaggcggccaaagcctatgacatagcagctcaaaggtttaggggtcgtgatgctgtcactaacttcaaacaccttca

SEQ ID NO: 198673 - DNA, 397 bp, Gossypium hirsutum
cccacgcgtccgcccacgcgtccggcaaatgtgatctctacatttggttgatggaagaaactccacactaaaataaagagagggaaacaaagataagaatatgcaattgacagccacagaatagagcaaaaatcaccaaaaataaaaaagaaatattagtaaagggaggaaaatgagcagcggtgcaggaaaaaccgtgtgtgtaaccggagcctctggctacatcgcgtcatggcttgtgaagcagcttctacttcgtggttacactgtcaaagcctctgttcgtgacccaaatgatccaaggaagacacaacacttgcttggacttgagggtgctgagagcaggctcatgttgttaaaagcagacctattggaacaaggttcctttgatcctgtg

SEQ ID NO: 198674 - DNA, 686 bp, Gossypium hirsutum
cttaacaataaaaaatcaaaatcagattactaaaaggggaaaaaaagaaattttctcatcagccaaacagagcccagaaagtaaaaacaaaaaaaaaaccataaaaactcaacctttgagtgttaattagctttttttgtttttgaatcggttcatgtgaacatcgttggtactttcacaatgagtttctccagaatcggccgctctctctcccgctcttctcgctctaatttccgaacaaatgttatatcgaggaaactgttacgaaatgaatcgaatgtaccaagtcctgtaacaaatacgtgcatttcacgcattaataaagggttagggcttgtaaagggttatttcgcaccggctggagttgggaagcagcttagtactaatacaccgttgtcgaatttggattctattcttgcaaaccctaggatcaggcggtttttttgcagtgaagggcctaagaaaagaaattatgaaaattactttcccaagaacaagaaatatattcctaaggctaatgaacagaaatctggatccaaagaggattcaggtgctggtgagcctgggaattctcagaacattcaaaggttggtgcagaatattgttaccactttaattgtgattgggattacgtactctttgttatccggtccttatgaacagcaggagattagttttcaagagtt

SEQ ID NO: 198675 - DNA, 398 bp, Gossypium hirsutum
cgcggacccgtgggattttacttgacccttgtggtgtatactgataactttatgagagtgatatgatctgtttgaagttattttggtttgaataggtctatgatacaatcgaatgaatttgtgtgttcaaagaggattccactatgagcatctgtcaattttgaatatagacgtattctcagttataagggatattcaaatgttcaccggtctaatagtttcagtgatatgtacggttgggaaatcttagttgttagtatcctccatatctgaatagcatcatgttttggctctagaattatctaatatttacaccatttgtctatttgagtatcgttgtgctttgtgacaagagttgtaaggaatatttctgagagagctattagttcattatctat

SEQ ID NO: 198676 - DNA, 367 bp, Gossypium hirsutum
ccttttattaggagaaaaaggtagtcctttagttgaaggtttctactttagcctcaactgagagtcgaagattttccggctgaaaatggaaacaaataatgaaaccagcaacccatctcagattaagagctttctcgagaagtcgatcaacattgttgacttgaacaaaaaaaggaaattagagcctgaacaattgggcttgcctttatcgaagcatcaatgttggaagcaaagctcatctttgaagcctcctacgtttggcagtatcacacaagtagaggggttcactccatgcactttccaaggaaagacatgggctgtttgtgatgtactggaaactggatcggcaaaagatagttttagcttt

SEQ ID NO: 198677 - DNA, 482 bp, Gossypium hirsutum
caaattttcccctaaaatggaggcacgaaagacgattcatctcctttgatgagagtagtagtgtgaggaatgggaattatcttctcatttgttgaaacctgaagccgtggagaacaagaagaggtcgcctaattcaaaagggagcttcgaagaagctatgctttcgtttacttcaggtgtaatcttaccttcatctggtgtggtgaaatcaagtgggggtgccgggtgattcagatcactctgatcttgaagcttccgttgttaaggaggccgatagtagtcgagtcgttgagcctgaaaagaggcctcggttaactctgatttgggcctattctctacgaggaacattcgttgcaccttctccttctttcccgtttcgctgctaatttcgctactttgcccttttttgcttttaaagttcaccaataccactttttatttttttccttcgttttcacttgtaattttcttcggcttattaa

SEQ ID NO: 198678 - DNA, 673 bp, Gossypium hirsutum
  unsure (1)..(673): unsure at all n locations
gattgtgagcaaacgttttccttcatccaagtcagttttgatcaaatataaggataatgatggagatttggtgactattacttgcacaacagaactcagattggccgagtcttctgtagatgctcttgttccaatagagcctgaagccgataaaactagtggattcagaacattgagattgcacattgttgaggtgagtccagagcaagagcctccactaccggaagaagaggaggagaagcctttggagagccagggagctaagtcagatgaaagtgtgtcgcactcgtctcttggtgattctgtttcagaaggtgttgatgtggagattgaaaagacagagaaagaagcttcaaagaggaaaattggggctaccgaagattcagagtgcaaggaagtggagatggatgattggctttttgagtttgctcagcttttccgcacccatgttggtattgacccggatgctcatattgatttgcatgagcttggaatggagcactgttcagaggctcttgaggagacggttacnactgaggacgctcaaatcctctttgacaaagcagctgctaagttccangaagtggctgctttggctttctttaatgggggaaatgttcatatgtgtgctgcaagganacggattcncttaaacgagtctgccgggnaagat

SEQ ID NO: 198679 - DNA, 736 bp, Gossypium hirsutum
taaaaaaaaaaaaaaaaaggcgtagcaatcatgatgtcctctcccctctgctccctctcatcattaacccttagctttcatcatcgccactccatgttttgctatctaccaaccgcacaaaacccaccgccttacccaacccagctcccaacaccaagaaaaggaagaagaagaagaaaaaagacaaggaaaaagagaatttagatgaagaagatggattctctcaagaagaagaaacgaaaccctacctcctccatctgcatgccttcttcactgagttaaagggttctctcttttcttcatcaatgaacaaaggcctttttcattttacttcatcttttcttcttttctcttctttcttggggaaatgaagcatcatggtccgatttgtatgctacatatcaactaaaacctaatactataccatatatttactgctgcacatgtttggggagctgtttcctttttttttttctgtatggatttttctttgattttacagcatctgagatcttatctatgctccaaagcagacttttgtttgcctttggtttaggtgattgaagatggatggagtcaatattgtataccatgtatgtgtttgatcaaacctctctccctctctctcttgtcttgaatattataacaatgctaagtactgtaatagctttctgcttttatatgcatttcgatttatatgacaataaagattgctctttgatcagatgagcagttg

SEQ ID NO: 198680 - DNA, 403 bp, Gossypium hirsutum
tccacgcttcctcccacgcttttctttcgaacaattctcttcattttccgggaggaattatctcctgtttccccagaaaaggtttgctcacttagtaacgaaaggtttataaatttcttaagagagaaattattaacataaagaaaccatgatttggaccaacctacttcatcgtcgagattgtttgcggcagcttcttcgaccacatagacgatctcctcgacttccctaacgaggatgtcgaagctggtttctccgccgctgattccgccatcaacgccgccgcttttcccagcatttggactgctcactccgagtcattcccgggttctgactcagttttttccaacaacagcgcttccgacctctccgccgaactctctgttccatatgaagacatcgt

SEQ ID NO: 198681 - DNA, 887 bp, Gossypium hirsutum
  unsure (1)..(887): unsure at all n locations
caaaaaacggagtagatctagttctcggcggacgcctgggttttttttctccgatcgacggtgaaaagttccttttttttcatggcgatgatgacctgccgttccttgttgcttttacttttgatctcactttttgtttcttttggtttcgccgagatccgtttcacggagatccgatccgatgtccgacccataatacctttcgatgagttcgggttcactcacaacggccgccttgaactcaacctctctcagatcgatctctccgacaagaacaagaacctcgacttgaacaaaatcggattcttcctctgcacgcgcgacacgtggttccacgtgcttgaacaactcaacgaccaccatgtcacgtgtgctctcgattccgaactcgtcaaggtcgtcttcaggttcaaatctctcgacgggaaaacgagcatcaaccccgttttccctgtaaacaacgctgaccagtacgccctactcttcgctaattgtttgactcaagtcaaagtatccatgaccgtccgatcggcgatgtacaatattgaagggaagcaaagccgtgattatctctccgccggcaaaacaattctccctagggtttacttccttttatcccttgtttatttcagtctcgcacggatttgggtttactttctttacaaaaaacgactcaccgtgttccgaatccatttctttatgctagcagtcattgttttaaaagccttcaatctcgtgtttgaagcccaggataaatcttatattcaacgaaccggaagtgctcatggttgggatgttttgttttacatattcagtttcttgaanaggatcatgcttttcaccctcatccttttgatcggcacgggtggtcgtttttgaaacttatt

SEQ ID NO: 198682 - DNA, 588 bp, Gossypium hirsutum
gccacatttcgattattttcatgtataaggctaatcaagagctgggcggtgaccgtatagccactgtactgatgtatttgtctgatgttgagagtggtggggaaactgtgtttccaaatgcagagggaaaactttctcagccaaaggatgatagctggtcagattgtgcaaaaaatggatatgcagtgaaacccagaaaaggtgatgcattactattcttcagtcttcatcttgatgcaacaactgattccgacagtttgcatggaagttgcccagtgataaagggtgagaaatggtctgcaacaaaatggatccatgtcaggtcattcgatacggcaaagtggcagtctgtaaatagagattgtgttgatgagaatgagaattgtgctacctgggcttcagcgggtgagtgtgaaaagaaccctagttacatgattggttctgaagactattacggatattgtaggaagagttgtaaggtatgctcctcgtagaaagtcgtttcctggctgtttccaaagacaatggtaaagctttaatagctgtatataccacacattttgagttatgctcgatgcaccatatttt

SEQ ID NO: 198683 - DNA, 539 bp, Gossypium hirsutum
cttgtgatcccgtatcttgaagtgaatccggtttggcaagattcaagctcattcatggatatatatgatgtggatcactttattaatgtattaaaggatgatgtttcaatcgtcaaagagttgccagatgaattctcttggagcacaagggaatattacgccactgctattcgggccaccagaattaaaagagcacctgttcatgcatctgcaaactggtatctcgaaaatgtcttgcctgtactacagagttatgggattgctgcaatttctccattctctcaccgtttgtcttttgacaacttgccaagtgagatccagcaactacgttgtaaagtcaactttaaagcacttggttttgtcccgcacattagagcacttggagatgccattgtccatcgcctcagatatcctcctggtgaaactgaagcacttagcagtgactatctcagggtgaccactgatcaaaatgacaaacaaaggccacaaaaatttgtcgtcttacatcttcggtttgataaggatatggcagcccattc

SEQ ID NO: 198684 - DNA, 458 bp, Gossypium hirsutum
  unsure (1)..(458): unsure at all n locations
agggaaaaaagggccgccgacgcgtccggaatcagtacccaaggtatcgccgactccaaccctaggcaccggcggccggcacatcgcggatcaagcggcggctaaaacctggtgcggcagcgcctttcagatgccgctgcattacccaaggtacaccgaagctgattacgaagccatgcctgagtggaaagttgattgtttgcttaaagaatacggactacccatcaccggcgactgttgagcagaagagaagcttcgccatgggagcttttctgtggcctcggtagctacaattaatgttgttttatgggtcccaattttcttcctttttttttttttttaaattatgaagtctgaaagggcattngagttatgatcttttgtttgcttcattgccaagtgattatgaaaatatggtaattttgagctatttgtattttaaatattaaataaaattt

SEQ ID NO: 198685 - DNA, 471 bp, Gossypium hirsutum
gctttctattcccttccaaaagctcagttttgcttccgttttacagctcctgattgggatgccctgctttacccttccaacccgaaagccacctgcaccctgtctctcccaacatccgatcgaagcacacgcctcctccctctttttctcctcctttttccgtaagctaaacaaacgcagctcgatcttcaaatccctacacctaataaatccatcggttttctggtttgtaaatccgacggagaggtggcggatcgcttgacgcgtatcgcgattgtcagctccgaccgctgcaagcccaagaagtgccgtcaggaatgcaagaagagctgtcctgttgttaaaactgggaaactttgcattgaggttacccctgcctcaaagattgctttcatctctgaggagttgtgcattggttgcggtatctgtgtcaagaaatgcccatttgaagcatattaaatcattcactta

SEQ ID NO: 198686 - DNA, 467 bp, Gossypium hirsutum
ttaattcataaaccaatcttacaataaaacattaaaatccctccttcccttaaacctcccttcttcttcctcttctgtttcgagctgtgattttctatttttatttttgcaaaatagtagagagagatggcgccgaatgatcccaaacaaagcggtggtttctttgcgtccatcgctagcagtatatctaattttggtagcgccatgactaaatcagtcaacggtttaatgggatatgaagggcttgaagttgttaatccagaaggcgggactgaagatgccgaagaagaagcaaggagaggaagatggaaacaggaggacagggaaagttactggaaaatgatgcaaaagtatataggttctgatgttacgtcaatggtgacactttcagtacttatttttgagccaatgtcaatgctgcagaaaatggcggagttgatggagtactcatacctgctagatctggc

SEQ ID NO: 198687 - DNA, 462 bp, Gossypium hirsutum
gtcgtctcggggatttgaagcctacttatctcgatgatgcatttggatctctcgagccttccctgctgtctccattgaagggactgtccataaaatccggaatacaagcccagttgcaatctccaactggacttaaaatacgccagaactcgaaccaactacgttcaagctacccaacaaaccttacatcatcccctgtgaggaagccctcggcattcggttatgactcatcagctgcagtggctgcagcagtaatgaattcccggtcttcagcatttgcaaaacggagccagagtttcatagaccgtggagcagtgaccaaccctgccggacttgctgcacctgctaatccgacaagcacaatgtcttcaaacaatttggattggagctcccctaatgggaaactggactggggtattcaaggagatgagctaaaccagcttaggaaaatccgcttcgttc

SEQ ID NO: 198688 - DNA, 450 bp, Gossypium hirsutum
ggcgccgtccgaaacaatcctaaaaggtgaaacatgtcgtccgacgggaacgtcaccggcggcggcggcgctaacaccgtcggcgtaaccaataagcctttcttttgctaccaatgcaaccgtaccgttaacgtaacgatatcccctccctcttctgatccgacttgtcccatttgcaacgagggtttcctcgaagaatacgacaacccaaaccctaatcaaggctccggtttcctaaacccgaatccgaactcaatcccgttccatgaccctttcttgacgttatcggatccgttcgcttccctccttccgctcctttttccgtcctcttcatccacaactacctcatcctctgcttctattgaccctaataaccctagcctatctgggccgacccgctcaggtcgaggcgacccgttcgctttcgatcccgttaccttcatccagaat

SEQ ID NO: 198689 - DNA, 699 bp, Gossypium hirsutum
aggagcttggaatgaagcattcgatgcctcaaaaacaaaggaccatgacttccacctcataaatggtagctctgttaaggtgccttttatgaccagcaaaaagaaacaaactgttagtgcctacgatggtttcaaagttttagggcttccatataaacaaggcaacgataagcgtcgtttctccatgtatttctttcttccagatgcaaaagatggtctgccagctttggtagagaaagtgagttctgagtctggtttcttagaacgccaccttccatatcaaccagttgaagtgggtgaattgaggatcccgagattcaaaatctcatttggacttaaagcttctgaggttctgaaaagattaggacttgtgttacctttctctggtgaaggaggtttgacagagatggtggattcgcctcaaggtcaaaacctatatgtttcaaacatattccacaagtcttttatagaagttaatgaaaaagggactgaagctgctgctgctacttctgctgtcatagcactcaggtctctgcgtattccacaaactatagactttgtggcagaccatccattcctcttcttgatcagggaaaatgcgactggagttgtgctcttcattggccacgtcctcaatcctcttgaaaactgatgagtccgttgtggtcatgaggcaagagaatatgtgttgtattttgc

SEQ ID NO: 198690 - DNA, 494 bp, Gossypium hirsutum
ttctttatctcctttctcgctttgaacaccaagtttccaaaattcccagcactttcttcttcatctatatataaactcggtttcggttacccatttctgcaaatccaactcagctcccaattatttcatctttagctcgttaaagttgcgtgtctttttcttgtctttttttttttaatttcttcgtgaaaatatgatcaaaaacgaacaatacgaacgtgttcttagttacttcgatagagacggcgatgggaaggtttcagcatcggagttgagccatagattgcgcttaatgggcggggaactgaagttaaacgaagcccaagtggcaatcgaagcgttggactcaaacggcgacgggttgttagatttggaggatttcattgggttattggaagaaggaggtgaagcagagaagactaaggattttgaagaagcttttcagatgtacgatactggtggaaacgggttcattacgcctaaagacttgaagg

SEQ ID NO: 198691 - DNA, 441 bp, Gossypium hirsutum
cccacgcgtccggcaataacacatcaacaatgacggagcaaatgaacggtgcggccgtagacgaaaataactgtacccaaagtgaggaaatgctgctccatgaagctctccgccgtttgatttcgacgatcatctaccccgatggatcgtcatcgccaccagctccgcttctgcagcggatcaagatctctgtttccgagaatgggcctcgccttggggaagcctctagaaacactagccgtactgttatacggtggactcgtagtggcagcccccttcgtgctcttcttgtcatctctgttgggtccattgcttttcttaccttgacaggattgcttgtgtttatgcttttctttctagctgcaactgtcaatgccgtcatcatctcttccctcattgctttggctgctgcaggaggcttcttggctcttttctttggct

SEQ ID NO: 198692 - DNA, 526 bp, Gossypium hirsutum
ttctttgggtttttaaaatttccatctctgggggtctccaatccaaccgggagagtcagaaaaaaaaaaaatggcttcttggaattcaattccactggaaatcacgtacgacacttttggttggctagcctttttttcgtggtccattagtttctaccctcaagtcatcttaaattttcgaagaaaaagcgttgttgggttgaactttgatttcgtgctgctgaatttgacaaaacactcctcttatatgatctacaacgtttgcctttacttcagccctgttattcagaggcaatactttgagaaatatggctctggagagatgatcccagtagctgctaatgatgtcgcgttctcaatacatgctgttttgttgacggctattactttgtttcaaattgtgatttttgatcgtgggacgcaaaaggtttctaagatttctgtgggaatcgtcattgctgtgtggttaatcgccgccatttgtttcttcatagcattgcctagccaatcatggctttggttaatc

SEQ ID NO: 198693 - DNA, 375 bp, Gossypium hirsutum
caaaggggctggttaagaccttagagagtggtagacatttttgcagattttgcggacctttgtccccgtttctctatttctttctttcttttactctttttctttttcacatccttctgttatcttcagtaccatcaccaaaatttggaagcttgaagaagaagaagaaagagggcaatgggggtaggttcaactgcatcttctaagctcaaaaaagcggctaaaaaaatggtgggcgctgcatgtggttctttctcaaagaatactttcttcttctcctcctcctcctgctggtatgtcaatgtcaccattgaaaccaaagaataagtttgaagcagtatcagctggaattgaagcagaatctatcaccaacca

SEQ ID NO: 198694 - DNA, 524 bp, Gossypium hirsutum
attcatagtcagcggatggttgctagtagctgttacattcattctttatggctgtgttgtaatcatgaacaatgcaatttctgacacttgtttggctatggaagaatgggtggaaaatccccacgcggagacttgctcttagtaacatccttccttgtgttgatccgtgaacatcaaaccatactctcactcaaagcaaacaagtcatcactagtatagtagatgttgtcaatacatatatctactccattgcaaatatagatctttccccagacgacaatcgttactacaatcagtctgggcctactatgcctgctttatgttacccatttgactctcagctccaagatcggcagtgcgggtcttatgaggtgtctatggcaaatgcttcactggtttggcagaactacacgtgcatggtatcagaatctgggctatgcaacaccactggaaggataacgccagacagattcacacagctggtggcagcgattaacgagagttatgctcttgagcactatacc

SEQ ID NO: 198695 - DNA, 680 bp, Gossypium hirsutum
cccacgcgtccgttttgtttcgttcaaaaaccaaatctctgtttcgatcttcaaagcccccccaatccatagtgaaaatcaaataaacaatttgatccaattagtctttcttgggttaaattttattgctattatagaaatttcaaaaaaaaaaaaaaaaaccctcaatggctcaagctattgaagaatggtataagcagatgcccgtcatcacccgttcttatctcacagctgctgtagctatcactattggctgttctctcgaaataatatcaccttatcatctgtacttgaaccctaaacttgtggttaagcattatcaattctggcgcctaattactaacttcctgtacttccgcaagatggatttggatttcatgtttcacatgttctttctcgcccgatactgcaaacttcttgaagagaacacattcaggggaaggactgcagattttttttacatgcttttgtttggagcttctgtcttaactggcattgtgcttataggaggaatgataccttatctgtcggcatcatttgcccgaatcatatttctaagcaattcattgacattcatgatggtttatgtatggagcaaacagaatccttttatacatatgagttttctgggtctttttacctttacagcagcttatttaccctgggtgcttttgggattc

SEQ ID NO: 198696 - DNA, 614 bp, Gossypium hirsutum
attcttttcttctttttggttcttctagaaacaaaactattctctgtttcgatgcgtgaagaacgccccaaatcccagaaaatcaaattaacaaatttatcgaatttgcctttaaattatcttggttcaactttgttatcgttgaaattaaagagaactttttttggtaaaaagaggaaaatggctcaagctgtcgaagaatggtataagcacatgcctatcatcacccgctcttatctctcagctgccgtagttaccactatcggttgctctctcgaaataatatcaccttatcatctgttcttgaacccttagctcgtggttaggcagtatcaattctggcgcctcattactaacttcctgtacttccgcaagatggatttggatttcatgtttcacatgttctttcttgctcggtactgcaagcttcttgaagagaactctttcaggggaaggactgcagatttcttttacatgctcttgttcggagcttcagtcttaactggcattgttcttgttggaggaatgataccttatctgtcagcatcatttgccaagattatatttctaagcaattcattgacattcatgatggtttatgtgtggagcaaaca

SEQ ID NO: 198697 - DNA, 375 bp, Gossypium hirsutum
tgacactcaagggagaatgaaagaaacaaagtgcttttcggaattggtggtggggactacgcacctcggcatatggatatagtcatgtaagtaattgttaccgttagctttttctacattggccatgcacctctagatcttgaattttcttcctgttatctcctgttattccaaacttattgacatgcctttttaagttttttgtgttctcctgtttctaggaaaagaataataaactttctttttttgtaaactactaactgcaggaaagaaggtgtttgggtgggccacctgctttcaggatattctttgccaatggaagatccaagtcagtcaaaagagaacggaaatactgatggtattggtgggacatgg

SEQ ID NO: 198698 - DNA, 373 bp, Gossypium hirsutum
cggacgcgtgggttgcacctttttttctctgagcttcttatgtttgaaacgcgggagacggaaagaaaaatatcttcgttgccttttggccttacctgatctgattttttcattcctttgcaaatcaaatttcgaagcttttgatctctgcttcaaacagttcttagcaaaaagtggggtatataggatcacatggtgtacaagctttgaaaagatacaaatacagcggtgtggatcactcttaccttcctaaatatgtattacaacccttttggtgccgttttgttaactttcttccctctttggatgccaccaatcatgattacacttacaggatttatgcttatggttaccttatcttagttttgctatt

SEQ ID NO: 198699 - DNA, 430 bp, Gossypium hirsutum
aacatcccaatccacactccactcatccattggccgacgacatgccaacataaaacttccttcaacctgctcattctcagcctccacttattaagcgctattctttccacgcttcccttctattccttgttcctcccaatataaaaaccattcctttgttcgctctaaacgctcaccccaagccaaccccaactccccattgaaaaacctctcctgaatggctcttgaaacgttgaattctccaacttcagcccctccactgctccaccatgatgatacagttgaccaccactgtgttgagctcgtggacacggaggaaaagaacacaaagacccagaactgacaacccgccaacggaagaagaatacttagctctttgccttctcatgctggctaagggaaccaccaggaacaacccctcatgctcagc

SEQ ID NO: 198700 - DNA, 413 bp, Gossypium hirsutum
ttgtttgtggttcttggaaatttggctttgttgcttgacgtgtcgtctgcgaggaccgttacgacgggccgaaaatctcgtcccttggcgatcgacgtcgttttgaacctgcagaagagggatccgcatttctcccacgtttctcttcccaacaagagccaactcgactactgggacggggagaatcgggcaccccgggccgtggctcgtggcaaagcgaattcgaaagtaaaggcggtggattttgacgcggcgtccagtgacgacgatgagaacggcaacggttttgaggaggaagaggaggggtccgattgggagaacgaaatgaggaagagagttaaagaaattgaggagatgagggaattggagaagaaagcagaggagctgcagagtaaagcggaagcagaggaaac

SEQ ID NO: 198701 - DNA, 750 bp, Gossypium hirsutum
  unsure (1)..(750): unsure at all n locations
gaaccccaaaaagaaaaaccctttactttcaattttcattcaaaccctttaaaccttagtattcactcccatctcatcacttctcataagcttccatggtttgataaacaactgggaaaacccaaacaccatgatcccagcatgttttagccaacctagcaacttgtccggtacctctcaagtgcctcaaaatctcatcacctgcatttaccatactcagctatgggactcacctacgtgtctcacgcttacatggtccaaaacccatttctcccattccttaacagtctatgctgctgattccttttctattaccatttccctttttccttccaccttctccttcttcagaaaccgaccaggctccaaatctgtctacttgactcaccaccatcgtcaaagaatcaagctgtattgggatttcaccagggctgactttgctgaaaactcagctgagcccgagtcttccttctacattgccatttcatgcaatgggaatgctagaattcatccttggggatctcatggatgaactcgccaagaggtggtctgggttgtctatggctccacaggtactccttgaaccaacgctcttgtctaggagagacatgttttgggccttagagtatgtttcagggctaactggctggtctaacatgagatagggttgttganntggaaggtctaggtagatgtgccaacaagctgtattagcatggcttgatattaagattgagaggtattatgaag

SEQ ID NO: 198702 - DNA, 580 bp, Gossypium hirsutum
gcaacagttgctgcatcatctactctcatttgacatggccaacctccccgatggcgtcgatagcatgtttgatagccctcaattcaaggagaacttatgttactttcagcaactgcttgaagaaagggtctttagtgtatctgcaccattggtgaaagtctaagattagaaaacattgcaaagactagcattattcctcttaacaaaatcccattgggtggaacgcctgccgacacttaagaaatgtgatagttttcaaggatctatgaatgctacaggaccaaatgccattgcatcaaataacttcggtaactatgaagagatcacgcaacagtcaaattcaaaactttccagaatcaaggactttaaagagccccaaaagggtgatcatgaaagcttcttgtgaaaacaaagaactcatagataatgatggttcttgctttagtccaagaagcctatttgctttgccttctgatcgtagctctctcatgctggattctcttcattttgtcgatgaaagttccgaccaagatttgctgctggatgtgccgtccaatggctcattcccgcaggcagaact

SEQ ID NO: 198703 - DNA, 438 bp, Gossypium hirsutum
ccggaactaggttctctggctgtagctggaaattcgaacaacttaagtgaagggaaaaatcatgaatcaactcaagcggcggaattacctggatctagtgactgtgagggaggatgtgatgaacagagtcgagaagaaagagatgatgatgaaccaaatccgaaaagaaggaataccgcgccggaagctgcagtagtgttgtcgcacaaggcggtcgcggatccaaaaattatcgtgcaaacaagaagtgaagttgaccttttggatgatggctatcggtggcgcaaatacgggcagaaagtggtcaaagggaaccctcatccaaggagctattacaaatgcacgagtgctggatgcaatgttcggaagcatgtggaaagatcatcaactgacccaaaagcagttataacaacatacgagggaaagcataaccacgac

SEQ ID NO: 198704 - DNA, 507 bp, Gossypium hirsutum
cccacgcgtccgcccacgcgtccgaaaaaaacttcatcgacggccgctcaaactccgcccaaacaacctctctggccaccgtcatggaaaacacagacgaactcaagagggtgttcgatcaattcgacgccaacaaagacgggcaaatctctattacggagctccgcgacgtattgaaggcaatgggatccaactactcagaggaagagttcaagcgtgtcatggaagacatcgacagcgatcaagacggttacatcaacttctccgaattctccactttctggtccacttcttccgacgccgttaaagccgcttcggagttgcgcgaggccttcgatttgtacgatcagaacaagaacggcctgatctcggcaaccgagttgcaccaggtcttgaatcggctggggatggcgtgttcagccgatgattgtgtcgggatgatcaagtcagtcgattcggacggcgacgggcacgttaatttcgaggagtttcggaagatgatgaatg

SEQ ID NO: 198705 - DNA, 751 bp, Gossypium hirsutum
tgctcccggtaattgtgatggattagcttttgtgcttattcctaatggtttccacacaagatttcagggccaagggtcttttggtctttctggtgaaaatatattccttggtattgaatttgatacaaagaaagatgatgataaagctggaaactttaatgcaaatcatgtaagcattgatattcatggttgttgaatctgttaaacttagcaatttggcatctctgaatttagtgttgaacagtgcgaatgtcttgaaatcttgggttgattatgattcgagttccaaacttttacaagttagattaagcaaattagatgaaaataggcctttgaatccaattctagcataccatattgatttggtagaaatgtggggcaatcatgatgtttttgttggtataatatcaactagtgatgaatcttcacaaattagtagcaatgttaatgttcattcatggagattcagggtaaagtttgttccaagttggatgcattcattgcctgctgatccaagaagttatatggataacaaggatagtgaggaaactagggaagaaaaggggaggttttgtgctttgccaattcttgctaggttgattttcgctactggatgtggtgcctttgttcgcgttcatgatgcttgtttatgtgggcgattttcgttagtaggcacacggtattccccgtcaagtatcaacccagtcatgaagatttcaggtatgagaaagtcaatgtggtggtggagaag

SEQ ID NO: 198706 - DNA, 456 bp, Gossypium hirsutum
cccacccgtccgttcattttcacgttttttctgccactcttttaaatcatcgggttgccttgttttttaaatagtaccgactgccggcgattgttcgccggagaacggaagaagctcgcagggggaaagagagatgaaggcactggtgagcgatgatgttcgcgtgaattcccaaggcaatcacgttacgtcctcgtgccgtcgcgtatttcgggaactttaaccgtatctgaaaagaaataaaaaccctcaagcaaaagcgacttaacttagcagagttttgaagttattctatgctttgtccggcaaaactgaggcagaattagtatataataatcaaagcttatgagtcccgagtcttggtaaaccgcattgaattttggccctccccagaaaaatattatgaatttctgtgttgatggcctttggcaggcctcatcgctaagccataatatg

SEQ ID NO: 198707 - DNA, 533 bp, Gossypium hirsutum
tccactcatccgcaaaacgtcttgttttatactgaattctcccctttctcacctaactcttgtttgattgctttctttgtttcaattaaattatctcccaatttttcttttttagttttctttatttttcctctccttgatcgttgttagctgcaaaaaggttacgtcagaaatggattttttcttcagaggcctaaatgaggaattttcatcttcccaaatggacattcttagatgtccatttttgagaaacattaacgagccaactaacttttccttctcgtctgccttgccttttcccatgccggtacgaggagccaaaggaccaatatttgaagatggacccaatttcgacatggcattcaggcttttccatggacgtgacggagtagttccgctatctggacaatcatccttgcgtattgagaaagctgagaccgaaacagccccaccaaagttcaatcctttggctgcaaaggcagccaccattagtctctcatcctttggaccgggagggcctttcagttttgatg

SEQ ID NO: 198708 - DNA, 816 bp, Gossypium hirsutum
  unsure (1)..(816): unsure at all n locations
cgggtngggaaggaacggggcggaccaacccgtccggggacgcgtgcggacgcgtggggtttatccaaagaattggtatcccattcctcttatgttctgccggccttggggtaagctgccagaaaatgtaccttgccatccaaaacttgccgactttgctaactgcatgaagaagaaaggccgtggaatgtccatatttatcaatatactagatggggactatcatgaacgtgctgaagatgcgaaggctgcctgcaaacagcttgatacctacattaactacaagaattgtgaaggtgttgcagaaatagttgtggcacccaatatgagtgaaggcttccgtggagttgtgcagacaatgggtctcggcaaccttaagcccaatattgtagtgatgcgatacccagaaatatggcgtcgtgagaacctaaaagaaatccaggcagatttgttggtataattacgactgtattgttgcaataggcaagttgtcattgtcaaggcctggatgaatggccaatgagtataaggcagnatggtccattgatttgattggattggaaatnnngttggtctcatgcttcttctgtcacagcttcttctacganagagagcttcagagcttgtaatttcaggtcttctcatgncgnangagataccgatgcaaagggctcaggttattaaaanaatttttnntgatcttcgatgcagctgatgtnttgtatncgatcaagtctgggatgacaaccgagatggttcttaccaatgatcaaagaggctttcccgttgtaacacggtgctgatactgcagaatan

SEQ ID NO: 198709 - DNA, 691 bp, Gossypium hirsutum
  unsure (1)..(691): unsure at all n locations
ctctctctctcttcatattcaagtcttcccctttcttctacctctagaattttgggtgcttcaaattttggagtgtacttttgttttttttcttttggagtttgttcttagatgaatgccatgcccctatcctttgaggaatttcaagggaagggggctttagattttgcttcttcaacttcatcttattccaattcatcactgttattacaacaccagcaacagaaaaagtggcaaaacaacaaggaaagttgttgctatgtgggatttgatcccacatctacaagaagcccgagtccaccaacgtcttcatcaacactgtcttcctcattcgacggaggcagcggtggtgcctccacggacagtattggcgtggcggaaacagcaactgtctccaaaggtaaaagtcagtcttttgatacagggacgggaaaatgtggtttaagtatggaggattgggagaatgaccaatccattttgagactaattatgggtgatgttgatgacccttctttggggttaaacaaaattcttcaaccaccaattggcanctgcggtggtggtgggtcgtcnaaaaatatggagtttaatgctggttttggtatggtcgatcatantntcgggttcgactccattactattattgttagcttgatgaacaatgatatggtttcgtgtttgaatcctgtat

SEQ ID NO: 198710 - DNA, 563 bp, Gossypium hirsutum
caaacggtgaagtaaagatgcagatgtttaagggtagaacggtaagtaaaaacagccgttgttgtttgattctaatttccgtagaccaactcccccttcttcctaggaaatcagacagacaacatctcctttttacaaaataaattgcttagcttttggttttgtttcagtcgagaaaacagacagttcattttttttccatgttctatcgatcggtggtgtttccttcaatctcagaaaggaaacggaattcaaacagaagcaaaaccgacactgtaatggcttcttcttcttcttcttcggctttgaaatctcagcctcttcataacttccaattgcatgaccttaaatgggccatgaaccacactagcaaccaccgccttcggaaactctccgattctttgcacaaatctcctcaacgtggagagagtggttctgagtccgacaataaccggaaggtcaatccggtgtgcgaagctcgctcaaagattggacattcttcaggtttttctcctgatcatagaactggaaaatcagagaggaaattcatcgatggttctgat

SEQ ID NO: 198711 - DNA, 634 bp, Gossypium hirsutum
gttcctgatgatgatgaatggtatacctaccatggaactgcacaaagagttgaactcctattaaactctatttacaacgttgttaaagtaacatttgatggccaagattacctacctgtggaaaatttaaccttttctcagaagcttttagtggaagatgcaaagagacaagcttacaagaatgttcggaacctgaccccaggtgatcggcgagcaattacgggcccttcgatgccctttaccgatctgctgcctgaaccggtcggcacctctaatttacttctgcaccaacctgatttctcaggtacaagaccagacatgccactaggattcaaccaatcctcaacatcattttcctatgaagtggaaaatcccaatcccttacagggaattgaaccacttaatccaatgctaagtaacagtagttttagaatggaagggatcttcccttacaatgcagacaacagtttttcacttttcgcggacgacggtttcggtacaaatcaggacaacactcaggctcaaatgctaagcttaacatcagctactccagcatgggcacaaggcagtggattcattttcacaccagactatgaaacatcatctataagcttcttgtcttctttcccgagct

SEQ ID NO: 198712 - DNA, 388 bp, Gossypium hirsutum
agagcctcttcgcatctcggagtatagtcgcagaaaagtgagagagctgaaacgctggcgtcaaacaaatggctgtctcctcgtgttcctttcctcctagggttttcaatgcttattcttcattcgagtgccgttccgatcccgacttctccggtacgccgaccggggagaagcctcgcatcgggtctaaccgacgagtaacggcatcgttgttttgtacaggcggtgggggtttgtcgtctttgatctttcgtttccccccgaacttcgtccgccagctcagcgtcaaggctcgccgcaactgtagcaacatcggtgtcgcgcaagttgtcgcggcttcgtggtcgaacggtcccacttccggttacccctcatcggcggcggctgc

SEQ ID NO: 198713 - DNA, 680 bp, Gossypium hirsutum
cccacccttccgcccacgcgtcctttttcaacttgtcataagctggttctagaggtgagtgccgcaattaaaactgttttaatgcccaaattcgttcaatagcctgacgaacacaaaatgaagagtatcaaacaagcattcgagtccgccagtgggatccccaacgtgggcggttcaatgtacactactcacgttcccatcattgcaccaaaagtcagcgtcgcagcgtatttcatcaaaaaacacacggagaggaaccagggagattcgtattccattacccttcaaggcgttgtcgaccaagccggagctttcaccgacttatgtattgggtggcccggttcgatgtccgatgatcaaattttagagaaatcagcgtttcaccaaagagccacatggggacatttgaaggacgtttgcgtcgtaggcaacaaagggtacccactaatggactgggttttggttccttacagccaccaaaacctcacttgggctcaacatgctttcaatgagaaaatcggggagattgaaaaggtggccaacgaggcattcgcgaggctgaaagggcggtggtcgtgtttacaaaagagaaccgaggttaagcttcaagagttgccgatcgtgcttggagcttgctgcgttttgcataatatctgtgagatgagaaactaggtgatgga

SEQ ID NO: 198714 - DNA, 455 bp, Gossypium hirsutum
tcccacgcgtccgcccacgcgtccgcataaatctaagaacccgaaaagtagagctttggttctctgtctgctgcttctttcttctcttatacttcattatttttcctttttcttcttttttgtgaaaaaacattgaaactcttttcaagacgcaatagaagatgtgtggaggtgcaatcatttccgatttcattgccgtgaaacgcggtcggaagttaactgccgaggatctttggtctgaacttgacacattctccgacctgttgggtctggattacggaaatggaaaagagtctctctttcactcagttcgacaacaccaaggccggttccaaagccaagaaccttgaaaaagtgagtatgatttatgcttctggcttttcttcaaagtttgggtgcttttttcttttttctttttgcagaaagccatgcttttccatttgtttcttgcatgt

SEQ ID NO: 198715 - DNA, 407 bp, Gossypium hirsutum
ctaatagccctaaaagtaaagctttggttctctgtcgtgctgcttctttcttctcttggtacttcattatttttcctttctcttcctttttgtgaaaaaacattgaaacccttttcaagacgcaatagaagatgtgtggaggtgcaatcatttccgatttcattgccgtgaaacgcggtcggaagttaaccgccgaggatctttggtctgaacttgacacattctccgacctgttgggtctggattacgggaatggaaaagagtctctctttcactcagttcgacaacaccaaggccggttccaaagccaagaaccttgaaaaagtggcatacgagtcgactcaaaagaccagcccggggagaaaaaaagaaaggaaaactcaacgaactttaaagaacatttacag

SEQ ID NO: 198716 - DNA, 628 bp, Gossypium hirsutum
tgctactgcgtccggttccccggttgaaggatcttggtgtctttggtgttgtgaccttaaatgaaccatacgagacgggggtcccaacatcgctgtatcatgcacacaatattcatcatttggtgattccaacaagggattatctttttgctccgtcatttgctgatatttgccaagctgtagatttcatacatgagaatgcatctgttggaaagactacgtatgttcactgcaaggcaggtcgaggacgcagcacaaccattgttctctgctacttggtagaacataggcatatgactcctgatgcagcttatgagtatgtgagatctatcagacctagggtccttctggcacctgcacagcagcaggctgttcaagattactatcttcacaaggtcaataataatggaatctgtggagactcttgctcaatgataataaagaaaactctagttgtacctgaaaaacaggatatagcggtcttcgatgatggctctgtagttgttgtaacagagtcggaccttgacgggtatgacgctagctttgcacagatgtgttaagcaacgagatgttggatgagggaagcctaactggcaggttgcagtttgctagtcaagcagctatgacc

SEQ ID NO: 198717 - DNA, 1134 bp, Gossypium hirsutum
ggaaaacaatctaagatcccaagcaaaacccgatatccttagccttttaaattcattcattcattcattcacttcctctagtttcgtttccgtccaacgtaactaccacgccgaccgtcgtaaccaccgccgtaaattctcccaaaatggcgaaactacccttacagatcctcctcctcttcctcctttccctcatttcctcctccaccgcagagatcaaaaccctaaccatcacctccgactctcgccccatgatcctcttcgagaaattcggcttcacccactccggtcacatcgccatctccgtctcctccgtctcggtcacttcctccgccaatgcccccaatcccgacgcttcccgcctcggcttcttcctcttatccgaggaagctctcctccaagtcctcctcgagattcaacagaatcctcacttttgcgtcctcgattctcgctacatccagcatctcttcaccttcggcgacctctccccacctcccctctcgcgtttcaaccacacttaccctgtttcttcacccaatgaatactctctctttttcgccaattgcgcccccgaaacccgcgtttcgatgaacgtccgaaccgagacctacaatcttgaacgcgacggttccaaagattacctctccgctggtctaacccacctcccttccctttacaccttcttctccatcctctacttagtcttcttgggttgttggatctacgtttgttataccaacaaacgatccatgcaccggatccatttattgatgagcggtctgcttttatttaaagctttgaatctgatctgcgctgccgaagataagcattacgttaaggttaccggaactcctcacggctgggatgttttgttctacattttccagtttattcgtgtcgttttgcttttcaccgtcatcgttttgatcggcaccggttggtcctttttgaaaccctttttgcaagaaagggagaagaaggtcttgatgatcgtgatcccgcttcaagttttagctaatggtgctttgatcgagatcggtgaaactgggccttttattaaagatttggtgacatggaatcagatgtttttgctggtcgttataatgtggtgttgggctattattatccccaatt

SEQ ID NO: 198718 - DNA, 382 bp, Gossypium hirsutum
cttccgttttcctgaatatatatatcctcttttaaacattttttggttctctcaatatcgggggttatggctttaccgacgagaaaattttcgtcaccttgggttatttttctcatattatcaattttcttagttgcgccatcgttttccggcaccgatactttcgttttcggaggctgttcgcagctgaaattcacttcgggctcacagtacgagtacaacgtcaactcgatactcacttccctagtcaactcagccatgttcacttcttacaacaacttcaccatgtcagcttccggtggtttcagtgccgtttacgggctgttccaatgccggggtgacctaaacaacctgactgtaaccgttgtgtagctaaagcgtt

SEQ ID NO: 198719 - DNA, 628 bp, Gossypium hirsutum
tacttctttttcttgtttgttttatcaagctcctcttatttgtgctaatggagttcggaatacccttattccatatattcatcagctttcttcttgttttgttaattgcaattcgaagcgtgaggaaatctaaagctaggagtttaactcaaaggttgattccagggccacggaaattacctttgatcggaaatctgcaccagctcgctgattctactctaccccatcgcaccctgcgtgacttggctacgaaatatggcgccgtcatgcacctgcaactcagtcaagtttcaactgtggtcatttcttctgcagaaatggctgaagagattatgaaaacacatgatattgtctttgcttctaggcctttacttcttgcggccaagattataacttatgaatgcactgatattgtcttttcaccatatggaaagtattggagaaatctgcgaaaaatttgtacatcggagcttctgagtgcgtctcgggtcgcctccttccgatcgataagagaagaggaagtgttgaatctcgtcaaaaccataaaatcaaatgatgggttggctgtgaatctgagccaaaaagttttttcaatgacttatggcataacagcgaaggcagcctttgg

SEQ ID NO: 198720 - DNA, 437 bp, Gossypium hirsutum
gggagaaccgaagccattttaggagagcccagatctattttcaatgttgaagaagccattacatgaacctctccctgttttaaatcctcatctcgaagtttccgccatgaaagctgcttccttcaacactccccattttccgtccatcatcatgaaaagaacatcaacacagccatgtccaactcgattcgcaagaaccctttttcttaaactccctccgagcttccaaaacaatcccttttttagaccgtcggctaattcctctgcttcttctttttcctccgtttcttcttcctccaacgcattcatcgagtcaactgccaacggcacgtatttgggttggaacaaagctccggagattgagatcgatggtggtggacaagctaaggctatggggaacaaagacaaagtcataaccgtggttcttttgggatggc

SEQ ID NO: 198721 - DNA, 654 bp, Gossypium hirsutum
  unsure (1)..(654): unsure at all n locations
catcgactataaatccctctgttgctccaccctcaaaatcttcgtctctttattttctttcgccgcctttctctcccagtcgcagtctgtttctttgttcggggcaatttaaagacgagtcaagatggtgaagtttacagctgaggagctccgtgccattatggaccggaaacacaacatccgtaacatgtctgttattgcccatgtggatcacgggaaatcaactcttaccgattctcttgtggctgctgctggtatcattgcacaagaagttgctggtgatgttcgtatgacagatacccgtgcagatgaggctgagcgtggtatcacaatcaagtctactggtatctctctgtactatgaaatgagtgaggattctttgaagagctacaaaggcgagaggcatgggaatgagtacctcatcaatcttattgattcccctgggcacgttgacttttcatctgaggtcacagctgctcttcgtattactgatggtgcccttgctggtcgttgactgtattgaaggtgtctgtgtccaaacagagactgtcctccgtcaggctcttggagaaaggatcaggcctgtcttgactgttaacaagatggataggtgcttccttgagctccaggttgatgnagaggaggcttaccaga

SEQ ID NO: 198722 - DNA, 515 bp, Gossypium hirsutum
gcgaatatcctcctttttgcgcccttcatttccagagagagagaaagagcgttccaacaatcttcgtctctttctctcgcttgccgtttttctctcttaggttttgattcttctttgtagttcgaggtgttttaaagacaagtcaagatggtgaagtttacagctgaggagcttcgtgccattatggacaggaagcacaacatccgtaatatgtctgttattgctcatgtggaccacgggaaatcaactcttaccgattctcttgtggctgctgctggaattattgcacaagaagttgctggtgatgttcgtatgacagatacccgtgctgatgaggctgagcgtggtatcacaatcaagtctactggtatctctctttattatgaaatgtctgatgactctttgaagagctacaaaggagagagaccagggaatgagtacctcatcaatcttatcgattcccctgggcacgttgacttttcatccgaggtcacagctgctctacgtattactga

SEQ ID NO: 198723 - DNA, 444 bp, Gossypium hirsutum
ttcacgcgtccggcaatcttcatcccttttctctcgccgcctaactctaaggttttgagtggtcagtgtaatccgaagacaagccaagatcagtgacgcttacagctgcggagcttcgtgctatcatggaccggaagcacaacatctcgtaatatgtctgttattgcccatgtggatcatgggaaatctactcttactgattcgcttgtggctgctgctgctctcattgcacaagaagttgctggggattgttcgtatgacagatgcgccgtgccgatcaggctgagcgtgggttcacaatttaagtctactggcatctctctgtgttctggaatgagtgatgattctttgaagagctacaaaggagagaggcaagggaatgagtacctcatcaatcttattgattcccctgggcacgttgacttttatctgaggtcacagctg

SEQ ID NO: 198724 - DNA, 640 bp, Gossypium hirsutum
cccacgcgtccgttacaatctcagttgtttatcattaccagagattcccacaggctgagaacaaattgcagaatctagttgatttagtaatgtggagagatgtatcgaaatcagcactggtgtttgggatgggaacattcatcattatctcatcctcttacacccaagacctcaacatcagctttatttctgcaatgtcctatgtgtgtcttgtctaccttgccgccatattcctctacagatcaataatctgcaggggagttatggacgtagatgaattaagttatgtggttggagaagaagaagcattttggttacttaaattggttcttccttacttgaatgagttcctaataaaactcaaggcacttttttctggtgatcctgcaacaacaatgaagctggcagtactactgttagttttggccaggtgtggcagctctataaccatctggaaaatgactaaattgggtttttttggcgttttcattgtcccaaaagtctgctctgcttattcacaccagttaactgcgtacggaaaattttggattcgacggtttcgagatgcgtgggaatcgtgcacccataaaaatgccgtggcaatggccatcttcacactggtttggaaccaatgttcctt

SEQ ID NO: 198725 - DNA, 443 bp, Gossypium hirsutum
gattgcgatgcgaacccaagtcctaaaccagaaagcctgaaaatcttcgagaacaaaagaaatatcgcgggattgttagcatgggcggcggccgtagtcggaggccacggcggcaacagcaaccaagacgatgacttcaacattgtcccatttattttctccccagagcagcaacaatgcgtgcaagaattaggatcgaacggcttcctctctcacccgtctgatccaagatctacgtctcaggttgcctcctcctgacatctcccaacgcctccctcatcttcacgcccactccctcgcttccaatgccgcccttgctctccaactcaacgctcactcttctaccgcgtgagcaggcccaattgcgagaggagacgttgcaacaggaaaacactgcatatgaaaatgctatatcagattgtgatggtaaaatacacgagaag

SEQ ID NO: 198726 - DNA, 579 bp, Gossypium hirsutum
ggttcaatacaattgctcattggctgccaaatttaggaattcatcaattagccaatgcaagttcgaaggaaatgaaaaatgtgcaccccaagtcttgaaagtccgaccaaacaaaacctacaggctcaggattgccagcaccactgctttagcttcactcaacttggccattgagggtcacaaaatggtggtggtggaagctgatgggaaccatgtgcaaccatctgctgttaatgatttggatatatattcaggggaaagctactcagtgttgttaatttctgaccaaaacccgtacaagaactatggggtttcaattggtgtcagagggagagatcccaaaaccaaccaagccttaacccttttgagctattctgccacccctgcatcaaagctccctacaactcaacccccttgtaacacctcgattggaccatttcaatcacaacaagggcctcaccaaaaacatatattcacttattggatcaccctaaccacccaaaacttatgaccgtcggatcattcttcttaacacttaaaaccgactcaatgggttcgtcaagtgggccatcaacaatg

SEQ ID NO: 198727 - DNA, 385 bp, Gossypium hirsutum
ctttttcgtttgaatataaagaacttaaagccccctcttttgtcgcttaaacccgaagcacaagccccctcttctcatcggatgtccggtttccagtttataacagcctcttcttcttaacttcattcctaagcttggcttttcctcaaggtgcatttttgcatattgttggttaaatctaagagtaaaagaatggcacatctgatgtcaacttcatgctcaataaagatctcctctagctacagaccttgtggtcaacctctaagtcaggatcgaaccgtacttcctaactcttttaccattaagacttccaagtcacctttcaaaaggctcatttcgaaagggcacagggcaggaaggagttgtggggttcttgcaattgctg

SEQ ID NO: 198728 - DNA, 383 bp, Gossypium hirsutum
cccacgcgtccggatttctctgacccaatgaagaacttgaaagagaaggacatcatgcgacagacgtgtacttgagcttgtggattatgttagttctgcgaatggaaagttttctgaatccgttatgcaagaagctgtgaagatggtgtctgccaacctgtttcgacctcttactccacagcctcgtgaaaacaaggtgctagaagccttcgatttggaagaggaagagccattggtggaccatgcatggcctcacttgcaaattgtatatgaattctttctgagatttgtggcatctcccgaaactgatgcgaagttggccaagagatatattgaccattcttttgttcttaaattataggatctctttgattctgaagatc

SEQ ID NO: 198729 - DNA, 487 bp, Gossypium hirsutum
tctttcaaggtgtacaagcagtttcagatacacctactgatacagaaacgtttgagattgtaaggaaagatgatgatcgtaaccgagttcgattcatagcatcaaatggtttgttcctacaggcacaatcggtgacactggtaactgcagattatgcagaggctagttgggatgatagcgatccatctgtgttcatactgacaatcgtaaacaccttacaaggtgaatttcaaatcactaatggttatggccctgataaagcccctcaagtcatgcaggatcattggaattcttacatcactgaggaagatttcaatttcatgtctgcaaatggactgagtgccgtgaggatacctgtagggtggtggatagcgcaggatccaactccccctaagccttttgttggaggctcttcaatagccctcgacaatgctttcacatgggcagagaaatatgggatgaaggtaattattgatttgcacgcagc

SEQ ID NO: 198730 - DNA, 396 bp, Gossypium hirsutum
ctcttcttcccttttcaaactcatttctttcgcctctttttttctttttctcggatggtctttctccctctcagcaaagatctttgattctttctgtctctttttcgttcgctctctgaggctggaaacaggctcgtcaaacccccatcgtcagtcgctgagctcatccctttcctagacatgggccatgagttccttaactcttaaaggcaaagcttctgatcaagctccagccttggcaaatattcagacagctcagaagcgtcctgtttcgcaaccagtttcacagcctaaaccacaagcctctttgaatcttcggtactttttcacctttggtttgggaagcaatatttggatagaaaacctctcagaaagccttctaaggttttttttggt

SEQ ID NO: 198731 - DNA, 666 bp, Gossypium hirsutum
agcattttgagctccacgaaccattccaaggctaccccctcagctttctccaacaggaaatttcaggaaaatggaaagccaaatcccgagaaaacccagaattctgtgcctccatggattcagaacaagcgctgaaattttcaagagacaggtccttcgatggcctgcagctgtgcttgataagctggacctcattttccttgatgccccatatcctgcccaagggaagtccggtgttgaacgcttttttgatcctccttactatgaatggttccaagctacagaggatttcactgagtacacaaattttgaagaatgccttgcgtttattgaagataatatgatgaagagtggtccatttgatggttttctgggcttctcccagggagcacttttatctgctgcattgcctgaaatgcagagagatggattaccccttaccagggttccaagaatcaagtctctgataataatatcaggagccaagtttggagggccaaagttcgtacatcataagctcacttccaatgcatattcttcacctcttgaatgcccttctctccatatcataggagaaacggacttcatgaaacaagaatcaatttctctgctggaatattttgtggatccttttgtgattaatcatcccaaaggccatactattcc

SEQ ID NO: 198732 - DNA, 476 bp, Gossypium hirsutum
cccacgcgtccgcgaacaacttatgtactggttcaaaatggagtgatacaggtgcctacttaggggctacaaagttcagcaaggaaacaattgcaaaaaatggtgcctctgaaccaagattctctaattggtccatggatgagagatggcggcacaactatgatgtcagtggaaagaacattgaggctgatgtgcagtataaaacagttgatattgacaaggatgaacaaactccaacgaagatagaaaattcaggtgttaatattggtgtatcagaaccaaaaggtgctgaagagtcgcttggtgagatggatttgtcccctgagtggatttacaagataaagtcttctgttaaaaaggaactcactcatggttcaaaaccatctcttgtcgaaacacttttacattctcaagaaaggaatatatctgaagaggcctcaggtcaggtacatgatgggcttgcagctttgcagcca

SEQ ID NO: 198733 - DNA, 630 bp, Gossypium hirsutum
  unsure (1)..(630): unsure at all n locations
attatctaattcctaacagctcaatcattatcaaaatcaatcaattaaaaataaaaaaaataagaataagaataancaaggaaggaaggaagttcattcttaggtaggaggagaagagcagctagcttgaaaagagccgctgtctttttgatatatcagccaaggttttgaatttttagatggcgatattgtacgcgctggtcgcgcgtggatcggtgatgctggcggagttcacggcggcgtcgactaacgccagcgcgatcgccaggcaaattctagacaagattccgggtgacaacgacattaacgtttcgtattcacaagatcgatacatcttccacgttaaacgcaccgatggactcaccgttctttgtatggctgatgaaagtgccggaaggcgaattccttttgcgtttcttgaagacattcatcagagattcgttaggacttatggccgagcaatattttcagcccttccttatggcatgaatgatgaattttcgagggttttgagccagcaaatggaatattactcgagcgatcctaatgctgataggataaatcgactaaaaggtgaaatgggtcaggtgcgaaacgttatgatagagaacatcgacaaagtcttagaga

SEQ ID NO: 198734 - DNA, 606 bp, Gossypium hirsutum
ttgcagcgttacagaaatgcacacaggatgttcaatgatgatgtccagggaacagctggcgttgcaactgccggtcttctcggagctgcgggagcacagggaaggccaatgtttgactttcctaagcaaaagattgttgttgctggtgctggaagtgcaggaataggggttgtcaatgctgcaaggaaaacaatggcaaggttgttaggaaatactgagcatgcttttgatagtgcaaagagtcaatctctgggttgttgatgctaatggtctcataactgacgaacgtgaaaatattgatccagacgccctgccatttgcaaggaacactaatgaagctgggtcgtcaaggattaagggagggtttcaagtctggtggaagatggtgcggcatgtgcggcctgatgtgcttctggagttgtctggtgttggaggatttgttctcataatatgtgttgtaggctcttaaaggttctactttcacttaacccagctatctttgcaatgttcaacccttcaaatattctggatgtcctcaaagaagcttttcattggtggcacaccttattttcagtggaatcctttgagatttgtcttgataggcca

SEQ ID NO: 198735 - DNA, 390 bp, Gossypium hirsutum
cggacgcgtgggaaaaaatccaatttatcgattcattttcatagtgaatcagagtgaaaaaccttaaaatcattattactttaaaaaaacccagaaaaacaaaagcttagcaaacaacaatggtgaaacaccttagcgagaaatctgcgattgaaaggagggattcaaggttcacaggtgtacgtaagcgaaaatgggggaaatgggtatctgaaatcaggctaccaaacagtagagaaaggatttggttaggttcttacgacaccgccgagaaagcggcgcgtgcattcgacgccgctcttttttgcttacccggccggtctgctaaattcaatttcccttggtaacccacccgagataggcggcggtacgtctttatttcccatgaaa

SEQ ID NO: 198736 - DNA, 713 bp, Gossypium hirsutum
caaagataaaaaagaaaccattttctccttcccctcctcgcataaataagtactgcaatattccttggctcaaaagcatctgaaattcgactagatcccttaatgaagttgtaaagtaagttcaaagatcgagagctaggtatttgatatccaaatcattctctgtaaacccaaaaggggggttggattctgtttcgtcggaactatgtcgtcttgctcggaatctacggctatgaaaccggctaggtcaccggagaagccaagttttgcccaaacttgtaatttgttgagccagtacttgaaggagaaaggtagctttgggggtctatctctgggaatgacatgcaacgttgaagctaatgggacaccagtggtgccgcctccgaccatgaatctgttccctctcaatgacaagtccgatgatgtttgtggccgaaacggtgggaatcctaagaacttggcatccatggatttgttcccccaacaagctggtttggcttctaaagatgatagtcccaacaagttggagcctcagactgcaccaatgaccatcttttatggtggacgagtgattgtgttcaatgattttccagcaaacaaagctaaggaaatcatgcttttagctagcaacagcagctcacaaagcaacgacagcttcaaccccatcccttttacttctagcatagccagaagtccaatcaaatcaagcatcg

SEQ ID NO: 198737 - DNA, 480 bp, Gossypium hirsutum
gaaaactctttgagacctgacattgttccctgctggtgttcccaggttaagctgcaagggatattgtcaatgaaaccatgtccactgagccaaggagtattgctggcactttttcagcaactggcttgtgatgtcaacaaggaaactagtagaaagcttgtatggatgactgatgtagctgttgccataatcccctctgatccgacaatagccatgcatgtggtaccaatatttagacaggtgtctcagattgtggatcatttacaaagcatgtccacgacatctgcctcagaaaccggcagcatccggattcttaagtttgtcataaacagtgtgttgaactgtaaatgatttttgtgctaatttttgcaagattttcccttttttccccctttacatatataaatctaggaacatacggtgaaaaaggtggatatttcgtaaattcagttgtatgtttcaatgtgtgaaatagttgag

SEQ ID NO: 198738 - DNA, 587 bp, Gossypium hirsutum
  unsure (1)..(587): unsure at all n locations
agtttgagttcncccaattcccctgaccaaagccttcacgttcgagctcatttccgcgtccagtcccactaatgcgttcatacaccttgcgaggtctcaccccatgtccaatttccccattactgaaaccacgacgaagaccaccaccacaataaggtcgaggaccaccgtagccaccacgcctttcagatggccttctactctcaccatcttcaggtgcaccttgaccgagttcagcactgttgctgaatgaattctcatcattggcaaaatcacgtctgtatccaccactgccaccacgcccacctacacatccacgcccaccacggcctccaccacgaataccttcactcttcgcctccctcacagcctgagccggagggagaggcttggagggaagcttagcctgcggcttcgtctgagattgagcctgccctttcttagggacgctggagggggcggtggcagcagcctttttctgagcggcgatcagcaatgagagctccccagtatcatcatcacccaataaatcaaacgggttggagctcgacatttttcttcaataaaaaaacactcaaactaatcac

SEQ ID NO: 198739 - DNA, 590 bp, Gossypium hirsutum
attaaactaaagacccagaagattcaatttttgcatataaaattatggaaatccttctgctacaacattgaagcaataaagctggaatggtaacttccttttttaggggaagcttaccagcctgagcaggagggagaggcttggagggaagcttagcctgcggcttcgtctgagattgagcctgccctttcttagggacgccggagggggcggtggcagcggcctttttctgagcggcgatcagcaatgagagctccccagtatcatcatcacccaataaatcaaacgggttggagctcgccatttttcttcaataaaaaaacacccaaactaatccctccaagcccttcctcttaaagatagaatatttccatagtttagtattttaataacatgcaaaatcaaacaaatgttgggatgaatagatctgcgagatagaaaatataatgaagagagaaaaaccctatattagccgcgagaggagagaaattaactgtaatcaattctattttatagtggtttggtatgaattatgatactttaaaactgactttattgatcatttttatatataaacgtatagttttttt

SEQ ID NO: 198740 - DNA, 382 bp, Gossypium hirsutum
ttcaaaaggagctacaagaatgtagcagagaaaaagactcttcgggcattagcgtctctccaaaatcagacaatcttgctcgcttgactggcatcatccctggtccccttggcactccctatgaagggggctcccttgaaatcgatatcacattgcctgatgggtatccatttgagcctcccaaaatgaagtttgtgacgaaagtttggcacccaaacatcagcagccaaagtggggcgatatgcctggatatattgaaggaccagtggagtcctgcactcactcttaagacagctcttctttctgttcaagctttgctttcagctcctgaacctgatgatcctcaagatgctgtagtagcacaacagtatcttagagagta

SEQ ID NO: 198741 - DNA, 567 bp, Gossypium hirsutum
cgggggggcccaacgcttccgttagatttaaggaaacctaaatcactgtttcgaggcttagcgtggaaatccaagtggggggagtaccagaaataagaagagcagacccacaacttgtaaacggccaatgccaccgaaataccttctcccttttaaaccgttctccttcgccgccgcttaatttcctaaacgccgaaacccccaaccccatttccaacattacaaatggcttccttcaccatttcttcgccgtctaaatcgtcgccgtttttgtcttcttctttatcttctctcttcactccttcctctcttagccgtaaaagcttcgctttcaatatctctcgttctcctatctgcgctcccaacagtttgaaatgtgaactgcctcaacctgtgaattatgaaaatgggataccaacgatcccagtcctcaatgaaaggatactgcccaagttcgtggaatcaaatcgaatggataaagctgttaacagaaatggtgccaagctcaaattgttttctggcaccgccaatcccgcactttctcaggaaattgcttggtacatgggc

SEQ ID NO: 198742 - DNA, 860 bp, Gossypium hirsutum
atggtttccaccatctcaaagatccccactcactccgtcttcatactcctcgttttgtcctcacccaaaccacccgtttcctgcttcatttccaccgccaccgccaccgccaccgtcaccgacaccgctgagaaccggactcagaaactcgaacgcatcgtcgacgagcttttagatcttacaaggctcgaacgctacgactattccatcctcttccgtcttaaactcggcctcaactgctacggacctgccgtatccggcgtatcctccgccgccgcttcgggtccgggaaccggatccagcgcagcggaaaagaaaacggcggaaaagacggcgtttgatataaagctggagaaattcgatgcggcggccaagataaagataataaaagaagtgaggacgttcacggaattgggtttgaaagaagcgaaggatatggtggagaaagttccggttgtggttaaaaagggagtaacaaaagaggaagctgaggccattattaagaagctccaagaattgggtgctactgtggtacttgaatgattttatttatttgactaaaggtgtagaataattgttgttttgatgaaatgggaactaaagtgtttgagggtattgttgttattggtattaccaatagaatttgaaagtgagaaactttgctgaagtcaatttgatccattgattgggtttgttttggaatagtttagtttagggtgtattgaaatgaatggattaggatggattaatggtagtacctgcagttcaccttctatttgagaatggtggtgaccggtgccaatgccccttggcgttgggtccctttaaaattcaagttgactcgtgattatgcttcattg

SEQ ID NO: 198743 - DNA, 403 bp, Gossypium hirsutum
cggacgcgtgggttccccttctttttctttgtaatatacccttaaaaagcattactcaatctccatgtgctgacacaaaattcctccaagaaaggacaacaggaagaaaaaaaagagagagagaaaaaattatgcttcctttagtcccttccatatttcttcattttattttcatcttcttcgtggttgtccacggcagcaagaacgattccatttacgagatactaaagcttcatgggcttcccacggggctgcttcccaaggggataacccgatttgaatacgacgatacgggccggttcgaggttcacttggatcaggcctgtaatgccaagtttgaaagcgagtttcattatgacattaacgtgtcggtgactttgagttacgggaagatcatggaatt

SEQ ID NO: 198744 - DNA, 559 bp, Gossypium hirsutum
cttccgggaccatcttcgagggccatgggaaccttggctttggtacctaacttggtccttgagggaatcaatttaatggtccaattcccttggctattggggaggtatcggctttggaggtggttggtggttccaaaaatccatttaaccggccaatttccctggcctttagggcagtggccttctttggggaagttggttgtttcacaaattcaattaaagggccaaattccatggcctttaggggagtcttcacctttgaagtggttggatgtttcaaaaaatcagttaaacggccaaattccctggtctatagggcagttatcatctttgaagctggttgatgtttcagaaaatcaattaaatggtacttttcctctatctttgggacgactagaaagtttggaaactctggattgcgggtataatctattagaaggagttgtatcagaaacccatttttctaatctcacgagattgacaactctagcagcatcacacaatcggcttagatttgaaccaaactcaagctggattcccccatttcaatgtgaacgga

SEQ ID NO: 198745 - DNA, 803 bp, Gossypium hirsutum
ggcaatctgtcataagctaaaatagtagaatggtatctcttatacacctgatcaaattgtggtcagtaatggtgctaaacagagtatccttcaagcagttcttgcagtttgttctcctggggatgaggttataattcctgctccatattgggtgagttacccggaaatggcgaggctggccgatgcaacacctgttattcttccaacactcatttctgacaattttctattggacccagagctccttgagtctaatatcactgaaaaatcaagattgttgattctatgctccccatcaaatccaactggatctgtttaccctaagaaactgcttgaaaaaattgcagaaattgtagcaaagcatcccaggcttctggtgctatctgatgaaatatacgaacatataatttatgctcccgcagctcacacaagctttgcatcattgccaggcatgtgggagcggactttaacagtcaatggcttttccaaggcttttgcaatgactggatggcgacttggatatattgctggacctaagaactttattgccgcatgttattaaattccagagtcagtcgacttcaggaagctagtagtatagcacaaaaaccaggagtggctgcattaggcttgggttatgctggtgggggagttatttcaccatggtgaaagcctcagggaacgtcaagatttcttggttaaaagctttggagaattggaaagtgtaaagatatctgaacctcagggagctttctatctattcattgatttcatttcttactacggaataaaattgaaggttc

SEQ ID NO: 198746 - DNA, 677 bp, Gossypium hirsutum
taaacaaacagcgtaacgaccttgtaaacactcaaaacgctattgccagcaaacaccgcggaatcccacgcgccacctttttccaccgatctcactcgcgacccatggcgtcccccgcgaccattccgatgacgacgtctcaatctacggccggtggtggtacccaatcacagcccccgatagccacgcccgcgtttagggcgttcctctcgcgcttcacgtcctcgatccgtcaaggactctcccaacgccgtccatggtatgaactcattgatcggtccgccatggcccgtcccgataatctaactgatgcctattcccggatccgcaaaaacctctcttacttcaaagtcaattatataactctactagtggttgtgctcgccttttctatcctatcgcatcccctctctctcctcgtcctcctcggcctccttgccgcttgggtcttcctttacctcttccgaccgtcggatcagcctctcgtgatcttcggccgtacgttctccgatcgtgagacgcttggcgcgttggtggtgttgaccgtcttcgtcgtgttcttgaccagtgttgggtcgctcttgatctccgcgctcttggttggcgtcgctatcgtttgcatacatggtgcttttagggttccaaaagacttgttcttggacgatcaggagcctgtg

SEQ ID NO: 198747 - DNA, 712 bp, Gossypium hirsutum
cagagatgaagacccagaaattctcaaatttcataaatgcatttcaattgatagcaatgtcacatgatctggatttatcaggtctctttgaagggcaggatggcaaaaggcagagaaccacaattggatccaagcatacagttaatgaaaccataaagaaaatagaagccgctgcaatggatgtgagtctgtcggttgaaaggatgaatagtttcaaggtaattgtggttgctccaacaaattgtgttgtagaaatatcaaaatcggcaggagaaatagcagtttacaaagagttctgcaagagtttgtcaagtctgctgatagagaaatcagatgcctcatcacaaattcaagggtccaagacagtcaccaacagcactagtattctaatgaatgaatgctccaaagaagaaaaagacagaacagaagaccagcgaggatatttctcctcttgaagatcgggttaattaatttagtttcaacttccatcctttcagtatcctgagtaaattccccaggattaatagagactcgtgaacacaatctgtctcaacagcaggaactatgagaactcaaaattactgctcttgggcatcattcttcacccaatacgaagttcaaacaacgtcatctgcacagctatgttcatgttttatgtgaaagttttgtccttttactttctcctctcttaaattagacactgcaccatatg

SEQ ID NO: 198748 - DNA, 666 bp, Gossypium hirsutum
  unsure (1)..(666): unsure at all n locations
caagtctctgaagcaacgaaaccagatcttgttatttttgttatggatagtagtataggtcaagcagcttttgatcaagctcaagcatttaaacaaagtgttgcagttggtgctgtaattgtcacaaaaatggatggtcatgcaaagggtgggggtgctctcantgcggttgctgctactaagagtcctgtcatatttataggaactggagagcacatggatgagtttgaagtgtttgatgttaaaccatttgtaagccgccttttaggcatgggtgactggtctggattcatggacaaaattcatgaagttgggcccatggatcaacaacctgagcttctccaaaagctttcagaagggaactttaccttaaggattatgtatgagcaatttcaaaacatactcaaaatgggtccaattgggcaggttttctcaatgcttccaggatttagtgctgaactaatgccgaaaggtcgtgaaaaagaaagccaggcaaagatcaagcgctacatgaccatgatggactcaatgacgaatgaagagttggatagctcaaatcccaagctcatgaatgaatcaaggatgatgcgaatagcgcgggggtcgggacgtcatattcgagaggtaatggaaatgatggaagagtacaagcggctagcaaagatt

SEQ ID NO: 198749 - DNA, 678 bp, Gossypium hirsutum
  unsure (1)..(678): unsure at all n locations
tttcctctctaatggctgcagttcctctcagtttgtagcattagtaggaacataacatatgcttgctcttctttttcggtttctaaggctttaaatttcgatgattttttagtgaggaggagatcattgaatttgagattgaatctttccagcgagtttccacttagatccattagaatggaaatcagtgataattgtacccctttgagtgcaaacaatgaatctagaggcgcgttggttgttttcgaagggttggatcgtantgggaaaacgtcacaatgtgggaggttggtttcgtatttggagggattgggtcattcanttgaattatggcgatttccagacagaactacaagtgtcggacagctgatatctgcgtatcttacaaataaatcgcagttggatgaccacacgattcatctccttttcagcgcaaatcggtgggagaagagatcaatgatggaaaccaaactgaaagctggaaccactcttatagtggaccgttactcttattccggggttgctttctcaactgctaaaggacttgatttcgaatggtgtaaggcaccaaaaatcggtttaatanccccacatttggtcgtgtatctcgacataacacccgaaaaagctgcagaaagaagaggctacngaggtgaaacatatcaaacacctgagtta

SEQ ID NO: 198750 - DNA, 921 bp, Gossypium hirsutum
tgttgagcgtatttttgggggcactttactggcgatgtgctccaatgattttatttgtttttatagttgggctgaatgcagattgattcgtcggattgatgttaccgttaaaaatctttactgggctgatagtggtgacttggtggcaattgccagtgatacatcgttctatatcctaaagtacaatcgggatgtagttcaatcatacttagatagtggaacaccagttgatgaacaaggagttgaggatgcatttgagcttcttcatgaaaccaatgaacgtgttaggactgggatatgggttggggactgtttcatttacaacaactcttcatggagacttaatttctgtgtcggtggagaggtctccacaatgtttcatttggaccgtcctatgtacttgttgggatatcttgctagccaaagtcgggtgtatctgatagacaaagagtttaatgttatgggatacacattacttctcagcctgattgagtacaatactcttgtgatgcgtggagacttggaaagggccaatgaaattttaccttctattcccaaagagcaccataatagtgtggctcatttcctagaatcacgaggtatgatagaggatgctctagaagtagctacagaccctgattacagatttgagcttgccatacagcttggtaaattagagattgctaaggaaatagccgcggaagttcagagtgagtctaaatggaaagcagtgaggagaattggctatgtccactggaaagctacaaatggctgaacaatgcatgaagcatgcaatggacctgagtggtttattgctgatttattcctcattaggagatgttgaaggaatatcaagacttgcatctctttccaaagagcaagggaaaaacaatgttgcttttctttgtttattcatgttgg

SEQ ID NO: 198751 - DNA, 786 bp, Gossypium hirsutum
  unsure (1)..(786): unsure at all n locations
caaaggagaaactcgtacgaggattgaatgtatggaactacatgccccattccacctggcaagaatttcacttacattttacaggggatagatcaaatcggtagctttttctatttcccttctcttgctttccacaaagcggctggcggctttggaggcatcagggtcctcagtaggcccagaatcccagtccctttccctgaccctgctggcgatttcacccttcttattggcgactggttcaaaaatgaccacaggctattgaaagcaatgctagatggtggtcatatgcttcccttccctgatggtattctaataaatggtcatgggcttaatggtgcttctttcacagttgaacaatggctaatctttcaggtttcggatataaatgttgggctttcaaattcgttgaaattccgcattcagggtcacaaaatgaagctgtgggaagtagagggaaccccactgntcagaccatctatgaatcactggatgtncacgttggtaagtcctattcttgtgctggtactatggatcaagctgcccaggatttctacatcgtggccttcaactcgttcactgacaacatnnctttcaccactggcacccttcatacagtnactcaacacaggatgctggcctattctgctgacaaccgaccaaatgattgcttttaacaggtcggctttggaccaacttcccgagggccaggccaatcccgggtttccatgggcttaactttaaaatactcggaccagtctatggggagaaacttttacggttttg

SEQ ID NO: 198752 - DNA, 463 bp, Gossypium hirsutum
caagtttaaatattattgttttcccattttgtgattaaacaaaatcaaaatctttaagcaaggaatcagttcaaaggtggtggaaaaattatattcgacggtagcttttcccgcaaaggggggattcttatagataagtttcaatgcccaacaacaagtctaaacccggaccaagccgaatgtctgtttacctttacattcccaatattattgggtatataagaattctgttgaattgctatgcttttgctatatgcttttccagcaaaagtctttttgctgctctgtattttctaagctttgtttgtgatgctgtggatggttggtgtgctcgcaaattcaaccaagcttcaacgtttggagctgtcctggacatggtaacggataggattagcactgcttgtctactggttatactttctcaagtgtataggcctagcttggttttcttgtcattgctagc

SEQ ID NO: 198753 - DNA, 574 bp, Gossypium hirsutum
gttaaccaaccccatggttcttcttgctgtgatcctgggtagcaccatcattttcatactattcctccaaccgcgccacctatcatcttccccgaagtctgattccatggctgcccggagctttgttctttggcttcacgggcttggtgactctggtccagccaatgaacccatcaagacactctttaggtcttccgagttccgaaacaccaaatggtctttcccttctgcccctgaaaaccctgtcacctgcaattatggaatgcgaatgccttcttggttcgacattcaggagattcctgtcacagccgattctccaaaagctgaaagtgatgtccttaaagcagttcagaatgtgcatgcgatgatagacaaagaagtagctgctgggacggatcctaataacgtatttgtgtgtggatttagtcaaggaggtgccttgaccttggctagtgttttgttgtacccaaaaaagcttggtggaggtgcagtcttcagtggatgggttcctttcaattcttcaatggtagaaaagttcccagaagatgcaaagaagacacctattttgtggtct

SEQ ID NO: 198754 - DNA, 532 bp, Gossypium hirsutum
gagaaaatagtaataaggtttgggttgttttttgttagattcttgtgtacactgggggtgtcttgtttcaacaggtaaactctaacaaatatcaggcggggatggatttgttcctcaacgccaaagcggtgcgcctacgcggtcaccatgacaagtatctcgtcgccgaggaagacgaagaatccgtttctcaagaccgaaacggatcctccaaaagcgcttgatggaccgtcgaattcgtacccgggtcagaaaacatcatccgcttaaaaagcttttacaacaagtatctcaccgcctccaaccagccctttttacttgggatgaccgggcgaaaggtgattcagtcgctgcctaggaggctcgactcgtcggtcgagtgggaacccattaaagtaggatctcaggcaaagctcaagactcgttacggtaactttttgagagccaatggagggttaccggcttggaggaactcagtcacccacgatattcctcataggacggctactcaagattgggtgttggggatgtg

SEQ ID NO: 198755 - DNA, 582 bp, Gossypium hirsutum
  unsure (1)..(582): unsure at all n locations
caaagtccaaagtgaaaaggtctttaaattgaagtctaaactggaagctcttccttcatctctttctataattggggggagggttcctttcaagattcantttcccttcttttctgattctctcgctttcttccttccttcctctttttcaagaaaaacaaaagacagtgtttctttggctgaatagtagttcagatagatgtgtattttctttttctaaaaccctccacgagtttaacaaatccaccctatcgaattcccacccatgtcttccacttctttatccgacgccacaactacgtcggcgtctgatcctcacgcgcccctcctccgctcgcgccagtctgatgcctccgcggctcgctcttctgccctggctcttttgttggggcgggtcaccggacgccgtggcgcgtccatgcttgtgagggagaccgcggcacgcgagttggaggagcgccgggcggactgggggtactcgaaacctgtggtggccttggatattctgtggaacacggctttcgtggtggtgtcggtggtgatgttgatctgtacggtgaatgagagcctaacactcctgtc

SEQ ID NO: 198756 - DNA, 485 bp, Gossypium hirsutum
ccctctcttcctcccacgcgtccgcccacgcgtccggtgaaaaggtctttaaattgaagtctaaactggaagctcttccttcatctctttctataattttccataactttcctttcaagattcagtttcccttcttttctgatcctctcgctttctcttttctgattctctcgctttcttccttccttcctttttgtcaagaaaaacaaaagatagtgtttcttttgctaatagtagttcagatagatatgtgtattttctttttctaaaaccctccactttttttaacaaatcccctctatcgaattcccacccatgtcttccacttctttatccgacgccacaactacgtcggcgtctgatcctcacgcgcccctcctccgcatgcgccagtctgatgcctccgcggctcgctcttccgcgctggctcttttgttggggcgggtcaccggacgccgtggcgcgtccatgcttgtgagggagac

SEQ ID NO: 198757 - DNA, 328 bp, Gossypium hirsutum
cggacgcgtgggcggacgcgtgggctcgaagcttttgagggcaaaaaaagaggccatgttatcgatttctcaatgaaccaaggcatgcaatggcctgctttgatgcaagctttagcgttaagagttggtggtccgccagcttttagggtaactgggttcggacctcctagccacgacaactcagatcacttgcaggaagttggctgtaagttggctcagttcgccaataagattcacgtggagttcgagtatcgtgggttcgtggctaattcgtaggccgatttggatgcttcaatgcttgacctcaggccgagtgaagttgaagccg

SEQ ID NO: 198758 - DNA, 395 bp, Gossypium hirsutum
tataaaagactcttccttttttcctttcttttctgtccaagtttttgagttttaagccaagatgaatgctaccatgtttaaggttttgatgatgttgagtcttttggccaccgcttgtatggctcaagcaccaacagcaccacccacatctccaccaccgccagctgctactccaacccccaccccatccccaaccccaaccccaaccccaaccccaaccccaaccccgaccccatccccaaccccaaccccaaccccatctgcatctccagctccaaccccatcacccaccacttccccatctccttctcctgaagcttcttcaccttctccttcaaacgcttcccctccagctcctaccccatcaggtggagctgctccagcctccgagccca

SEQ ID NO: 198759 - DNA, 714 bp, Gossypium hirsutum
ttgattaaaatcatgctttcaaattccatcctctactaagctgtccaaaagcttcaatccaaccacaccaattcctcgtcttacgcgtttcctttcgctacaaattctttcatttttctttcctttttttctgtaaaccaaaagcttttgcagcaaattacaaatcaatggctttctacttgaactgcaatacccacttcttcttcaagttttcactccttttctcccttttgagcttctccttctcccaatccgacgtcgtcgaggctccgtctccggccgctgattcttgcaacgggatcttcttgtcttatgcttacagttccgggaccaagttgaaacccaccgatcctacccaccagccctacaggttcgagtcggttttgacggtgctcaacaacggcgatgaggagcttaattcgtggaaggtttccgtggagtttcaaaacgatgagtaatacaaattcttgtacagtacatgaaattgaaaccatccgcaaaagtttcccagctattgtagttattaagtccattaaactctcagaatgggactcatggtgatgccttatccggatcgagctcaatggattccaacagagcagcttggactagttaaaatgtttaatccacttgataaaatttgaatgcatggttgatgtggctatcccttttctacccagtttttttttttttgctttatatattgagatgaaa

SEQ ID NO: 198760 - DNA, 449 bp, Gossypium hirsutum
cgtccgacattttttgcacagttaacaatgtttctgtgagattctgctgggctgacaagccagaggattttgctaaagttttcgtcttcaggccatggagcaacaggcccaactgaaagatgcactaaatgaagcattagcggctgaagtccagcgactgaagctcactgccgcagagttcagtggagaggttcatctttcgaactgtatggctcagcaactttcaattgatcatcaaatgctccaatgacagcctcagcaacagcagcatgctaaacatttatcagatgcagcagcaacaccaacctcagcagggtcacgataaccaggcacagacccagcaacaatatggtgatgcttctgctgcaaatgaatccaagtgatgaccagcgaaattccagcttcagtttatgtgcagccatatttatcatatccaactacattcaaaa

SEQ ID NO: 198761 - DNA, 617 bp, Gossypium hirsutum
  unsure (1)..(617): unsure at all n locations
gccacgcgtgcgagaaaatggaagggtcatcttcatcttcacgccacgtactggcaatccttctcattatccttcaattcacgccctccatagccaaaaccttctcccacaaaccataccacaccaaaagaaacaccgaatacatcagatcttcatgcaccaccactacctaccccagattatgttaccgctccctctccatctacgcctccaaaatcaacaccagcccccgactgattgcccacaccgccctgctcgtcaccttcagagccagcaaatccacgtccaggttcatgcgaaaaatcgccagaacccatcgtttgaaacctcaggtcgctgccgccatggcggattgcatcgaaatgatcgacgactctatcgacgagccccaaaaatctataggtgaaattgctcgtatcagacgctccaactttgtgcttattatgagtgatcttcaaacctgggttagtgctgcactgacagatgaagatacttgcatggatggattctcaggcagggctatgaatgggtacgcgaagatgatggtgaggaaacgaatcgntaagatcgcacatttgacgagcaatgctttggctctcatcaataactatgcttca

SEQ ID NO: 198762 - DNA, 394 bp, Gossypium hirsutum
caaaatgttaaacccaatggcgatcccaactcagttagtcctctcctttctcctcctttctttttcccccgtcgttttttcagaccgtgaagattgcgtttactcggtctacataaggacgggatccatcatcaaaggcggaaccgactccatcatcggcctacggctctacgatgccaatgcctactcagtggagatcagcaacatcgaagcgtggggtgggttaatggggccaggatacaactatttcgagaggggtaatttggacattttctcaggtaggggacgttgcttggatgcccctctttgtgccatgaacttgacctccgatggttcgggtgagcaccatggatggtactggaactatgtggaagttaccatgactggcgttcat

SEQ ID NO: 198763 - DNA, 483 bp, Gossypium hirsutum
cccacgcgtccggcaagttttagcttgcgaaaacttgatttccaatgatgtctgcaggctggaggttaaagataacaaatatgtgcttggagaatttctggaatttaaagggaagcaagaggacatcctagctttgagaaatatcaagagatcaaaagttagtcgccttgtcatccaaaagattagcatgtttggattagcccattcaaagcttcaggttttgtactctcctcgagattatcgaagtggaggagcttcggcttccgagtggaaagaagtaagcgtaagatcaagtacagaggtcatattccagcctcaaaattctaccaaagtctgcaaattcaagctttcttcgatcatgtctatgtcgctaagtgcctaagaatgcatccttggaatgaatcaaatttttgtgtggggattctttcaacaagtcctgaaagtgaatgtgaatattaaataaagagctagttgtacatttct

SEQ ID NO: 198764 - DNA, 360 bp, Gossypium hirsutum
gccctaaactcggggcatcactggaatcgacgcaaactcaaggctaacaagtggatcatgtctgtcggcggccaacccatcaccaacaggaggatatccgatatgggaagtgccaagaacttcacgatccacagcactcttaaatggctaaactctcaactcccgaaacatcctcatctaaaagccttttatcggagcatctcccctaggcacttcctaaatggggactggaacagcggagggagctgtaacaacactattccaatgtccatcggtcaagaagtattacaagaagagtctactgatcaaagtgctgccaatgctgtgaggggtacaaggattgcacttctcgacataaca

SEQ ID NO: 198765 - DNA, 616 bp, Gossypium hirsutum
ctttgttgcagctttctctggttctactgataatttgttagatttgagttcgactgttcctgctatactgccatgggcacaagttttctataatgttcaaacaactgtgaatacagaaattaaaaatatattttctcgtggagaatttacggttcttagagaacttcttgctgttgataattgtgccaataaattgtatcctttgcttcaagacgggttcagtcctgctcgagagggatcgttcaagcattccgcttcagatttgaggaagacggcagagaaactatcgcaagggctggataatctttcaaaggtagtagatgactttttcaaaatagttttgtctgggcgtgatgctttgctttgtaatctaagagcaggttgtgcttccccaaattcagttcggggaagaaacaccgacaagcaaagtgtgcggtgaatcatgaatgaagtagagctaaactcttctgtatacagatggtttaggtatgagaccttctgttttctaactaatagggatatgcaaccttgtttgggtaatgaaagtatttattgggtgagttgttaggtgtgtacatgtatttggaccatcctatggcaaatgctatataaaaag

SEQ ID NO: 198766 - DNA, 688 bp, Gossypium hirsutum
cgttcattgatgagcagtttagttgcgttgccaatggaaggcctgatagagattatcagaaactgaaatggaagcctaaaggctgcactttaccaagattgaatggtggtcacatgttggagttattgaggggtaagaggcttgtttttgtcggggattctttaaataggaatatgtgggaatctctagtttgcattctgagaaatgctgcaaataaccccgaaaatgtttatgaagcacatggaagacattattttcgaggggaagcttcgtattctttcatattcaaagattttaatttcactatagagttcttcgtatctccgttcttggtccgagaatgggaaatgccagacaaaactggagcttagaaggagacattgcggcttgatcttgttggaaaatcatcagatcaatataaatcggcagatatccttatcttcaatacaggtcattggtggactcatgagaaaacttccaaagggaaagattattaccaggaaggtagccatgtttataatgaattgaatgctctctgaggcctttcggaaagctctgacaacctgggctagatgggttgatgctagtgtaaatcctatgaagactatggtgttctttaggggttatttctgcttcgaatttcactggcggacagtggtatactggtggtgcttgtgatagcgaaact

SEQ ID NO: 198767 - DNA, 544 bp, Gossypium hirsutum
ccgtttcctcatcggttgccttggtgcactagctcctcttcccctgtcctctatttgctcactcggaggtgttaacctaaactatagctcaattgaagcctcccttccagctgtagaagcaactcaaaaacaccccggtgatcccactgcagttgccgttgtggaggtcacacaagatggccgccataagattttaggagaaatctcggcctcaaaactatggaaatgtgactatttagctgcagcttgggcattagccaacctctcagccggacaatttgttatgggggctgaggataatgtgagttcaagattgcttcctgatatttcggttaattcaacagttgaagataataaggtagcgaatggtggtgggtcagcaagggcaagaaaattcagtagtagaagcatcgggttcaatcccgtgagcccgagttttggtatggggaggaccatgtataggggcagaagtgcacccttgacatgcaaaacttcaagttctttagccgcagttatggctcaaatgctatcccatagggcaaac

SEQ ID NO: 198768 - DNA, 891 bp, Gossypium hirsutum
gccgacgccgctgattccaactcaacccattggtccccagcgcactcctccgctctctaccgcatcgacggatggggagccccctactgttccgtcaataacgccggcaatatcaccgttcgtccgtacggaacggacactctggcccaccaagaaatcgatttgctgaaaatcgttaagaaagtctcggatccgaaatctgtgggcgggctgggtttacagcttcccctcattgttcgggtgcccgatgtgctgaaaaaccggctcgagtctcttcaatcggcttttgaatcagccatccaagcccaaggctacgagtctcattaccaaggcgtttatcccgtgaaatgtaaccaagataggttcgttgttcaagacatagttaaattcggggcgcccttccgcttcgggcttgaggccgggtcaaaacccgaacttctccttgccatgagctgcctttgcaagggaaacccataggcgttattggtctgcaatggtttcaaacatcctgaatacattttccttgccttgctaccatgaaacttgcgtatgaaactgtgattggttctaaaaaatgaggagggtatatggttatttaatatcttcaaaacttattgttctcccctgattggcttccgctcttcttataccaaactatggtgtttttctcgtcctcttattataaatggatattgcttttattattctctcttttatgatttaaaattctaataatgtgcatcttattttatactgacatttttaatttgactatatcctcacaatcatcatcattatgttcatctttactatatctcttaatgatcattcttcttctctataattgtacttctagcttcatcatctttctttttcataattactgttttc

SEQ ID NO: 198769 - DNA, 712 bp, Gossypium hirsutum
  unsure (1)..(712): unsure at all n locations
tcgcccacgcgtccgcccacgcgtccgttcagctgtcgttaagcagtgtctcggccgtgtctttcgtttgtttgacgaggttcgtgaaaaaacatggtctgaggaggttcttgttccttgataagctttgtgatgaaagtgagactgttaggaaacaatacactgttcagctcaataggtcactgaagattgtgtcattttttgtcctgccgtgtttcatagctgagactgcatacaaagtatggtggtatgcctctggtgcttcccaaattcctttcttaggcattgtgtggttgagtgacacagtagcctgtgtcatggagttatgttcctggctctaccgaaccacggtcttcttcctcgtgtgtgtcctgtttcgcctcatctgcaatctccaggttctccggctccacgatttcgccaaagttttcaatgtcgattccgatgtgggttcggtgttgcgcgaacacctcaggatcaggcggcaattgcggatcattanccataggtatcgagcatttatagtatggtgcctcatcttggtgactttcagccaattcacttcattgcttatcactacaaagagtaattctcgattgaatatttacaaagctggagagcttgctttgtgctctataactcttctcacaggactctgtatattgcttcgaagtgcaacaaagataacacacaaagcacaatcagttacata

SEQ ID NO: 198770 - DNA, 442 bp, Gossypium hirsutum
cccacgcgtccgtccaaatctcttctcctcgtctatcgaatatgatgcaacaaccaccagctggaggtgtagctccgccgccgtccatggcagccgatccgtctcaaacccagcagtaccagaaacaacagcagtcgcagccgtggatgatgatctctcaacaacagcaggcgggtcagccagttcctccacctgcaggttggaatccgcaacccgtccctccgccctctcagatgcagcagtactccgctggttccgcgaccgtcggatccggcgaaattcggtctctctggatcggtgatcttcaaccgtggatggatgagaattacctcattagtatcttcgctcaaactggagaggtggtttcagctaaggtgattagaaataagcaaacggcactgccagagggatatgggtttatcgagtttgtatcacgtgctgc

SEQ ID NO: 198771 - DNA, 833 bp, Gossypium hirsutum
  unsure (1)..(833): unsure at all n locations
ctgaaatgctggaaagggatgtcttanaaaccactcctggagtgcggtgggatgatgttgctggtttgactgaagcaaaaaggcttttagaggaggctgttgttcttcctctatggatgcctgagtattttcagggtattaggagaccatggaaaggcgttcttatgtttggccctcctggtactggcaaaacgctcctggcgtgggcagttgccactgagtgcggaacaacttttttcaatgtttcttctgctactttagcctcaaagtggcgtggggagagtgaacgcatggttcggtgcttgtttgatcttgcaagagcttatgcacccagtacaatttttattgatgagattgactctctttgcaatgcccgtggggcttctggtgagcatgagtcatctaggagggttaaatccgaacttcttgttcaggtagatggtgtaaataatactggcacaaacgaagatggtagccgtaagattgtgatggttttggctgcaactaacttcccatgggacataaatgaggctctcaggaggcgactggaaaagcgtatttacattcctctgcctaattttgagagtcgtaaggagcttattcggatcaatttaaaaacagtcgaggtggctgctgatgtggatattgatgaagtggctcgtcgaacagagggatacagtggggatgatctcacaaatgtttgtcgcgacgcttccttgaacggcatgagacgaaaaatagcgggaaagacaccagatgagatccagaacatgtcgcnagatgagatttcngaagaccctgttgcaatgtgtgacttcgaagaaaccttggct

SEQ ID NO: 198772 - DNA, 448 bp, Gossypium hirsutum
ttttatttaaaattatttcgacttcgaatcgtggatccaattttttgattgcctccgcaactcttcttttcttcccctaaaatcgaaatcccatgaaatccttccatctttttctcactgctgatgccaagccattcattgcattgaagaattttgattgtattttaagaacacctttcccttttccctcttccctcgtccaccctcaactatggcttccttaacctctctcaaaagatcctcaccctccatcctccatctctcctccatccatcatcgcctccaaatccgccaattctcgtcgctgccgctcatcatcgcttcatacatccagtctaataacaaaaaggattccattgccagctccttcctcaaatggatcgcggtcggttcgagtttcggcttggtttgctggtactcgttttcagcttcggatcggagtactggt

SEQ ID NO: 198773 - DNA, 511 bp, Gossypium hirsutum
cagcaactgaaagcccatctttgaatgctctctctttctttccctattctttcattctatttgctgtgcgataaagaaaagaaaagaaaggaaaagaaaatcccaagcaacgcttaattattagtaatcaaactgagaaaggaaagtgaaaatccaagtgcggaggattatttttcttttaagcggggggacgctacaaatggggactcttcaaacttggagaaaagcgtatggcgcccttaaagattccaccaaagtcggtctcgctcatgtcaatagcgattacgcggatttggatgtcgctatagttaaagctaccaaccatgtcgagtgtcctccgaaagaaaggcatcttagaaaaatcttgttagccacatcagcgattcggcctcgagcagatgttgcttattgcattcatgcgctttcccgccgtttggccaatactcataattggatggttgcattgaaaacactcatagttatccatagggcgctgagagagggtgacccg

SEQ ID NO: 198774 - DNA, 369 bp, Gossypium hirsutum
ctaaggcctctgctactttagctttcaaagcttaggggtgttgaagagtgttgctggagaagccacaggtcaacaatcctgcagaccaattggcttcactatctttgaatgataaccatgtctcttgagtgactggaattttggtattgtagggttgagtttggaacatttatttatgcctttgtttgttgcggtggttgcaaggattctaatactttgctagcattgtgtttttttcgggttggcttataggctttttctatttactggatttgtatttatgattgtagttaattccaataaaatttggttaatgttattggaactttattttttaatattattttttttttattttcattttttctt

SEQ ID NO: 198775 - DNA, 543 bp, Gossypium hirsutum
ggcagggccctctcactctcagtctccgcagccagtaaaccctacctagtcaaagatatatcattcgctcccaatctcccaattttttatttgctgtaattttttcagaaaaaaataagttaaaaaaaaaaaggaataccaaattctaaaatctctatatccccaaatcatggccctgccagaaaccctagattccccgcaatcatcatcttcttcagatccaagtctgttccggaacttgtcatccagtcggctcaatgcccaggcgccggagtttgtgcctactcgctcgacgcctcagcagcagcaacaacagcagcaaagtatgaggatgatgatccctcctcctccgccccctgggatcatgcacgtctactctcctcctcctgcgccggcgggggcggcgtttcacctccccgtgcctatgccacctcacttggttcccgttccccatcatatgtccatgagaaatcatcatcatcatccttaccagaaccatcatcatcgagagcaggaagttgaagctgttgctaacaaagatca

SEQ ID NO: 198776 - DNA, 439 bp, Gossypium hirsutum
tcctacgcgtccgcccacgcgtccgcaccatttttctgctttttcttctttcaaagggattccttcagatttttgaggaagatgaatcactacaatcttcagcagaatcccattgccgtttccgcttatgaggagatgggagggtttatctcttcaatatcggagcatcatagggccggccccgttgtttgccctaagcctcggcgaattggggttctcaccaataaccctatcaagccttttagattgcatatgagtcaccaagccgatgtaagtgaatcgaaagccagtgcagaacttctagatatcatcctcaacaagggtgatttatgggcagagcaatctgcagcacaggtagcatcttcacccccatttttttgtggttcgcccccaagtagggccacgaacccagttgtgcaagatgctcgatttggtgacg

SEQ ID NO: 198777 - DNA, 725 bp, Gossypium hirsutum
  unsure (1)..(725): unsure at all n locations
gcaaaaccttcaacgaagcttctctcacgacccaaaggcggggattttactctttctcctcccctaataaacttgcaagttgcaaagggtctcatccactgcgttctttttcgacctcctcatcgtcgtcaaaggttgggtttttgggatggtatttagcgaagctcgaatccaatcctattattacaaaatctgtcacaacttcccttatctttgccgctgctgattttacttcacaggtaagtctatatattttcgttttccctcaatccaattctcaattatgcaaacaagggtctgggatgttctcaatttgatcggttttggtaaaaataggagccttttgttttgagaaagtgatgttaaattactcgaaagtatgtctcttggcctagttctattgaattctaggtgtttctttgatgtttgcatttacaatcgttacacattaagggaaagaattgctttgcaacaacccaattcttatcttttgttgaattatccttttaacttttaagttaacttccaaatggtgtttacatcttcatttctgtgatgctattgtttgatccgttgatttaccataataatgtttccttctcatatgtataacatctttggttatatgatcacatcagcttctagttattactctattcggacattacggatggctggaatatgattgcttctcttggggccatcacancatctttggtttaacc

SEQ ID NO: 198778 - DNA, 422 bp, Gossypium hirsutum
tgaaaagtctctctttgctttctctccctccctccctcgagtatcttctcttcgcaggcaaacaaacagagctcaatttcttttcttattccgagtcttggttatcagattgcatgttgcactggagtgattgacatagcaaaagtttgttaggaagaatcaatgaaaccttggttagcatgtctggattaattgaaggtcttcccgatgctgttgcccttaggtgcctagcacgggttcccttctacctatatcctaagttggagattgtttctcattcctggagagctgccattcgtagccccgagctgtttaaagctcgacaggaacttggctcaacagaggaacttctatgcgtgtgcgcctttgatccggagaatttatggcagatgtatgatcctttacgtgatctttggattact

SEQ ID NO: 198779 - DNA, 371 bp, Gossypium hirsutum
cctcccaactaatccgtggaataaaaaaccctaacactttaaaacccttaaccattaattcttaacagagagacgggaagtcgattactaattcttgtttgtttgtattaatatttactaattgtttataatctctccgataacagcaccgaaaatgagtcgatacgatagccgttccggcgatcccacctcttaccgcgatcgtagaagtgactcagggtttggtggggcttcagcttatgacggttcagtgcggtcctcatcaagcagaagggattatgatggtgctgaaccgcctaagaagttggattggatgggttgaccccttttgagaagaatttttattttgagtcaccatcagtggcggcaat

SEQ ID NO: 198780 - DNA, 531 bp, Gossypium hirsutum
ttctattaaaaaaaaaaaagctaacaagaagaagccttcatcttctttcaaccgattgaaacggattctatattttagttgttttatcaacgaaatcaagaagaacccaaattacaattcccaataaccttgatttttttttccggaaaagtttgaatttttccgttaatttgcaattttttttatctgggtcgatggcagaaatggaagacagcaaggcgaaatcatcatctgggtcgttgttcttcaatcgttcgttcacgatgaactctacggcggcagctgagtcgaattcccccaaattccatctccttctcaacagcccttcgtctctcaatcgagcagcttccatttcgaggttttacaattccttcgattccgtcaaaggtaaagttaaaaagctttgcaatgtgttcgaatccgctaagtcttcgtcttcaccatcgaacttagccagtcctaaagaaacttctccaaagctgttttgagaccctcgaaatcattgcggattcgtactcgttttctttgagc

SEQ ID NO: 198781 - DNA, 444 bp, Gossypium hirsutum
ccctctcgtccgatctcctcccacttccactcatcatttagacgaaaatcttcttgggttttcataaaatgtatagaatactctttgtttttggatttttggtgtggcggatttacgtgtgctagaaattatggagaaatcgatgttgaaggcggagttgtccaaagaaatgtgcacgtctcccaccgtggagcccagcgattgtgggaacggcgagactccgattaattatcaacgatttgttacaattcttggagaagacagccctgtgttcgaaaacttgtttgaattttgtcaaattttatgctggtgggacaataggtaaattttgatatggtgggtgggcttctcttaatttgatttgtgcattttcagttgtaattgattgtcatggctggcagatgctgcaagaagattaaacaatcagttatgtgatattgctat

SEQ ID NO: 198782 - DNA, 488 bp, Gossypium hirsutum
cttttctccgattagggttccttcattattctctttaggaaattttaattttcaacttgttttcgtttattctcttcgattttgggttaaaccctagaaggctcctcgcgaaagtgtcagatggcaactttagctgattcattccttgcggaccttgatgaattatcagacaacgaagccgatgttctggaggaagaaaataatgatgttgcaaacatggaagaagatattgatggtgacctcgcggatatcgaaacgcttaactacgatgatctggacagtgtttccaaattgcaaaaaagtcagagatacattgatataatgcagaaagtggaagatgcgctcgagaagggttctgatatatcaaatcagggcttggtactggaagatgatcctgagtatcagctgattgtggactgtaatggactatcagttgatatcgagaatgagattgttattatccataattttatacgtgataagtaccg

SEQ ID NO: 198783 - DNA, 492 bp, Gossypium hirsutum
cggacgcgtgggtctatcttctccatttgatgtgagaaggatctttctttctttattctgcacatcttaaccttaaccacatcataagatagagatctcttaaacggtcgagttatggagactgtcttttcagcagcaagtagatccatttccaagctcattagcttcaccgctttgcttcttttcttgttttcctgctctactttcacttctactgaagcttatgatgcgcttgatccaactggaaatatcactatcaaatgggacgtaataagttggaccccagatggctatgttgctgttgttacaatgtacaatttccaacagtatcgccatattcaggcacctggttggacattggggtggacatgggccaaaaaggaagtaatctggagcatgatgggaggccaaaccacggaacaaggggattgttcaaaatacaaaggaaacgtccctcattgctgtaaaaaggatcccacagttgtggattta

SEQ ID NO: 198784 - DNA, 561 bp, Gossypium hirsutum
ggaaagaaagatggtggccgatcatttcagcggcggcggttgtggttggcgagatataaagacattcgggttgaaactgattctgggacggtggttcatggtgtttgcttcactgcttatcatgtcggtatctggcgcaacatatatcttcggtctatactccaatgttattaaaacatctttgggatatgatcaaacaaccctcaatcttttaagcttttccagggacttgggtggcaacgttgggatcctatcggggctcatcaatgaggttacgccgccgtgggtgattctcttgatcggggccgtcatgaatttcttcggatatttcatgatatggctcgccgtcaccggccgcaccgctaagccccatgtgtggcaaatgtgcgtttatttctgcttaggtgccaattcccaggcctttgccaatactggggctctggtcacttgtgtcaagaacttccctgaaagcaggggaagtgttttaggccttttgaaatcttatgtaggtctaagtggtgcaatattgacgcagttataccatgctttctacggggacaa

SEQ ID NO: 198785 - DNA, 654 bp, Gossypium hirsutum
agaaggccttgagaaagcagcaccattcctgaaggcccttattgaaataccgtttattaaatcggttatccaaggttttctacctggtattgttttgaagctctttctcatttttctgccaactattttgatgatcatgtccaagtttgaagggttcacatcaatatcatctttggaaaggagatcagcaactagatactatctctttaatttagtgaacgtattcctcggcagcgtaattgcaggcagtgcactggaccagctaaacacgtttcttaagcaatcagcaaatgagattcctaaaacaattggtgtagctgtaccaatgagagcaactttctttattacttatatcatggttgatggatgggctggaatagcagcagagattttgatgctgaaaccgcttataatttaccacttgaagaatactttcttggtgaaaacagaaaaggacagggaagaggcaatgaatccaggaagtttgagcttcaacgttggagaacctcgtatacaactctattttctacttggcatggtttatgctaccgtgacacctgttctacttccattcattgtagttttcttcgggctagcttatgttgtcttccgtcatcagatcatcaatgtttacaatcaagagtatgaaagtgc

SEQ ID NO: 198786 - DNA, 670 bp, Gossypium hirsutum
  unsure (1)..(670): unsure at all n locations
gaagagaactgtgaaatgatcctagtttatgattatatggcttatggaacgttgcgtgagcatctctacaaaacccaaaagccgcctcttccatggaagcaaaggtttgaaatatgcattggtgctgctcgcggtttacactatcttcacactggtgccaaacacactatcattcaccgtgatgtgaagactaccaacattcttctggatgagaagtgggtagcgaaagtttccgatttcggattgtcgaaaactggccccacattggttaatactcatgtaagcactgttgggaagggtagctttggctattgggatcctgagtatttcagaaggcaacagctaactgataggtccgatgtttactcatttgggcgtcgtcctttttgaaatcctttgtgcccgtccagcattgaatcctacgctgccaaaggagcaagtgagccttgcagagtgggctgcacattgtcacaagaaaggcatccctgatcagataatggattccgtatctgaaggggaagatagcgccggaatgcttcaaaaagtttgctgagactgcaatgaagtgtgtagcctgatcacgggatcgacagaccggccattggtgatggctatggaacctgagttgctttgcacttgggaaaacgcganagaacgcaagggattattg

SEQ ID NO: 198787 - DNA, 397 bp, Gossypium hirsutum
gtgacgcccatgggagacaccacacttctggtcagcattacatgcacgaaaagggcggacgccgtgcttaaactctgtcaacttttcgaatcattgaacctcaagattattacagccaacctcactgttgtctctgccaatctctttaacacgctgtttattcgggctgatgaaaaggagaaagaagagttaaaaatgcagatccaaacagccattgcagcttttaatggtccacaaactcctcctatcaccatctaatcaaaacaacatctcctccctcttggctatctgctttgatgtattgttttcagcttctgctggcacacgccttcacatcgatccactatgtttgagtttttaattatttaattttaagaaactttattttcttttctat

SEQ ID NO: 198788 - DNA, 491 bp, Gossypium hirsutum
agctatcttgtttcatcttcaatccgtcaagctcttgacaaccctttgaattatgcaaggatttatttagctgacttacttgaaacatgcatccaaaaagtgatctatttagattcagacaccattgttgtagatgacatccaagagctatggaacataaatctgactggttccagaacaattggggcacccgagtactgcaatgcaaactttgacaagtatttcacaagtgatttctggtcaagcccaggattttcaaaggtatttgaaggcaaaagagcttgttatttcaacacaggtgtgatggttatggatttggggagatggagacaaggtgattacacaagggagattgagaaatggatgagagttcagaaagataaaaggatttatgaactgggttctctgccaccatttttgttggtttttggtggagatattgaagccatagatcataggtggaatcagcatggtcttggtggggataattt

SEQ ID NO: 198789 - DNA, 453 bp, Gossypium hirsutum
atctccccatcaccatcctcttcctcttgccttttcaatggctttaatgcttgataattgtgaaggcatattactatcacttgactcacacaaaccagtaccagctccatgtttaaccaaaacttaccaacttgtcgacgatcccaccaccgatcacattgtttcatggggtgaagatgatactacttttgttgtatggcggccacccgagtttgctcgtgatcttcttcctaattacttcaagcacaataatttctctagctttgtgagacaactcaacacttatggttttaggaagattgtaccggatagatgggaatttgccaatgagtacttcaagaaaggtgaaaaacacttgctttgtgagatccatagaaggaaaacagctcagccacaagtgacggcagcgttaaaccactacaaccaccaccaccgtcatttacacacacagtc

SEQ ID NO: 198790 - DNA, 841 bp, Gossypium hirsutum
  unsure (1)..(841): unsure at all n locations
cagccacaccagttgttcaaccacttactccaattcctacagcagctccaccaggacatcatccaccatcgttaccgcagcaaaagtcacatttgcaccatcaacagcagcaacaagctcaaaatacccaacttgttgtgaagcataatcaacagcaggagcctataccttcggaagtgataatggctatcccggagcaaaaggtgccaccacaggaaattggtgggagcgagggcattaagcctgcatcgtctagatggcctaaagccgaggttctagcacttataaacctaaggagtgggcttgaaaccagatatcaagaggctgggcccaagggtcctctttgggaagaaatctccgctggtatgagcaggatgggctataaaagaagcgctaaacgatgcaaggaaaaatgggagaacatcaacaaatacttcaaaaaggtcaaagaaagtaataagaaacgccccgaagatgccaaaacctgcccatattttcaccaactcgatgccctttaccgtaagaaaatacttggaagtggttccagtagcttcagtgaccagaataggtttgaaggagaaacatcacaacagcatcaagatcctcctatggaagcaccacagcatagtcatgatcaatctgaaaataaaactggaaccactattgatgtactgacaagcaaagaaaattcacctgggagtctctttggaaaaggaaacggtagagctacaaagaaatcagaagatattgtgagggagcagatggaggagcaagagatgcanatgcaatagcaacaacatgcagtggatgactaatggctatgatctataaggttgactac

SEQ ID NO: 198791 - DNA, 394 bp, Gossypium hirsutum
cccacgcgtacgatttccaagcaaacaaaaatccccaagcggaatccaagaagacgacgataccgccttacatgaaagccatttcaggctccttcggcggtatcgtagaagcctgttgtttgcaacccatcgatgtcatcaaaaccaggttgcaattggacaggatggggaattacaaagggatcgttcactgcggcgccaccgtgtctagcaccgaaggggtgcgggctctttggaaaggattaacgcccttcgctactcacctcacgcttaagtacgcgctccggatgggatccaacgccatgttgcagagcgcgttcaaagactcggatactggcaccttgagtaacaaagcgaggtttttatctgggttcggtgctggggttcttgaggc

SEQ ID NO: 198792 - DNA, 427 bp, Gossypium hirsutum
gttttctgtttccatagtttgaagtattgcacatttgactggctgtattggcctgaagctcgtcaatcctactcacctgagacacttgaatatataaaatcattggatgctgaagaagatatttcccttttgaaattccttggatgggatatgccaccagagtgcgcacgcactctccgcatctccaccatgctcctcaaaaagggtgcggagagagggttcactccccatgcgattggaagtataatgtgcagggagaatttgaaggaggaatctccaattgagcaaatggtccaagaggcacaggattccgtgcttcctggcacaagtgaagctgcatttctggagacactctctcagatcatggatcgacatcttgatgagattactgggctatgaaaagctcaaattctgtattttctggggg

SEQ ID NO: 198793 - DNA, 456 bp, Gossypium hirsutum
ggggtgaggtaaccgaaagatccttcaactacagacattgtgtgagaacgggcgtgcctagttagcatcttagcaagtccaaaatctgcaatttttgccttgaattcggagtctaataagatattgctcgacttcacatcacgatgaatgatgggtgttgggcactcatggtgcatgtagcatagcccctgagcagctccaacagcaatttgcaaccttgttggccaatccaaaactgaacccatccttgacattggtgatctcttattcccatgaagccatttatcaaggctctgattttccatgtactcgtataccagaagctttgaatcttcactggaaatgcaacacaacaacttcactatgttggaatggcgaatgctgcccagtatttcaacttcagctaaaaactctttctcaagcttgtaatctagtttcttactattccagattttc

SEQ ID NO: 198794 - DNA, 695 bp, Gossypium hirsutum
  unsure (1)..(695): unsure at all n locations
ggagaatcatttttcaggacacatttaattcgatgcttgctcctcttttattaggtctattacttgatcttgtttaacatttggacttaataattaaagagtcaaattttcttattttagcgagtcatgcagtaatttcaacccctttagtatataatgaaaccgatgtcgtctggaataaagtttattgatataatgtgtggtttgcaatgttaggccaagtttttaccgacgtggttggcagtccatattacgttgctcccgaagtacttctcaaacagtatggaccagaagcagatgtatggactgcaggagttatactctatatattgctaagtggtgtgccaccattttgggcagaaacacagcaaggaatatttgatgcagtgttaaaaggacatattgactttgattcagacccttggcccctaatatctgatagtgccaaggaccctattcgaaagaatgttatgctctcgaccttcagagcgactgactgctcatgaagtattatgtcatccttggatttgtgaaaatggggttgctcctgatagggccctggatccagctgtactttctcgcctcaaaccattctctgcaatgaataaactaaagaagatggctttacgggtagactcttgagaatgtatgcgcttgaatctgcgttgtgacctgctgtcattgcnagagaagan

SEQ ID NO: 198795 - DNA, 521 bp, Gossypium hirsutum
ttaatgcctttggaataatggattttacttttaagggactgcatgtccagtcagacagtagttgatttcattcatgaccagctaaaatcggaaagcaagctttctgttgtttgtgagagggtactcgtcaagtgcttagcaccatcaacagccaccggtgagggttgtgataatatgaccatgatcttggtgcagttcaagaaaccgatcaaatccacctcatccgcagaggagcaatcctcgaattccgaatccactgaaactgaaccaaagctagagggaaatgcagaaaagtagttgctgcaactgttgggggagccttggaggtgtcagatcctctgattgaagatttgacgaccctttggttcctcaaatattgtggtatgcatttgtagatgggttagagaaggaatgaattgacatatatatatatatatattatatgcaccaccacattatgacaaaatagcatgtacagaatgttttctgggtcatggatcttgtgttaaaagaatctttat

SEQ ID NO: 198796 - DNA, 457 bp, Gossypium hirsutum
ccgtaagcgaccttcacgagtatcgtcaagcgtatggtggccgcagggttcgttgaagagtgctctcacgtttacagcacctgccgaagagagttcctcgaagagagcatctcgaggctcggattgcagaagctgagcatcgatgaagtccagaaaatgccgtggcatgagctcgaagacgagattgaacgctggatcaaagccgctaacgtcgcccttcgtatcctcttcccgagcgaacgccggttatgcgatcgcgtcttttttggattctcttccgccgctgatctctccttcatggaagtctgccgtggctccaccattcagttacttaatttcgctgacgccgttgctatgggtagccgatcgccagagaggcttttcaaagttctcgatgtgttcgagactttgagagacttgatgcctgaattcgattccgttttctctgatcaatact

SEQ ID NO: 198797 - DNA, 623 bp, Gossypium hirsutum
ggaagggtccggcccaggcgacgcgtactagctgtacctaaaccaccaatgtttcttaccgaccgacccgaaatcatactacgagttcattcaccgtgactgaccagtctgcagtgcactcaagctttggcctatataaagtattcatatgaacttaaaacaaatcaataacggttgaagagatatggggtggaaaggaattctgggttttgagtatggaattgttcaaggacctttgggaccggatattgctggtccggagctagttgctgctgttgcaaacgctggtggacttggccttcttagagctcctgattgggaatcaccagattatgtgaaagagttgataaggaagactcggaagttaaccgacaaaccctttggggttggtgttgttctggcatttcctcacaaagaaaatgtaaaggctatactagaggagaaggtagcagtgttgcaactgtattggggagaatgctcaaaggagcttgtaatagaagctcataatgctggggtcaaggttgttccccaagttgggagtttggaggaagcaaaaaatgcaattaatgtgggcgtagatgcaatcattgtccaaggccgtgaagcaggagggcatgtaatcg

SEQ ID NO: 198798 - DNA, 547 bp, Gossypium hirsutum
catctctcgctccaagagtaataaacttcaagttgatggaataaaattagagattgcaccagcagctttgttccaacgaaacctccatcattctccagaaatttttagattttgatttttgtctccaacccagaggcgacagcttcacctgccggtccgtcttcaattgcatgatcgttggctcaatccctgtctttttctagcatcaaacaacttaccccaaatcttactctggtttcatccaccgtgacttagtcaaaaacggtacctcctccattaaaaccgttcttcaaagttactgcaaacaagaaataaaccaaatgagggagaaagtgattcaatacattcccaaattagtttatgcaaaacccgtaaaggggtttaacaatacaaaggatgcctttcgattttccattgattgagttttgttgtgtatttaaattacatagtcccttcctgttttaaattgggaatgttttttaacataccttccgctgattctttctttttcatttttatttttttaagaacagagcaggggaagaca

SEQ ID NO: 198799 - DNA, 377 bp, Gossypium hirsutum
cccacgcgtccggggaatcatccaaagggggaatttgatcttgcaacgatgtccatatattttgaaggaccctacaagaccctaacaaatgcgctgtggtttctagatcttccttacacagtgggcatacaacctcctcacatagtgttcggcgtgccaagttcccatagtgtggcaccatgttattgaacaatctccaaacatgtatttttattttctctggaatatgtaaaacccaaagatccatgtaaaaaattttgtattcttcatttgtagaggacatgtgtagattgctctgtaaataatctgtaataagaactcggcacccactcctgacagtatactcacctgagccttcatacttccataccaacata

SEQ ID NO: 198800 - DNA, 506 bp, Gossypium hirsutum
  unsure (1)..(506): unsure at all n locations
ccggggcggccgaggcgnccgcccacgcgtccgtgaagagaaacctttattaggctttcttaatgaagtgtgtggggaagaaataatcttctccatgtgtcttttcctggattggaacccagcagccacatctatctcagtcggactttctgatggttctgtttcaataactacacttgcagagtccaaaatagaaaaattacaagagtggaaggcacatgattttgagctttggacaacttgctttgacattcaccaaccacaattagtatatacaggatcggatgactgcaaattcagctgttgggatatgcgggataatccatccgggatggttttccagaattccaaggtgcataagctgggaggtttgttgcattgccaagagccccaccgacccaaataccatacttacaggtagctatgatgaatacttgagggtatgggatctaaggtgcatctcaagaccagtgaatgaaacttcagtttgtcttggaggaggagtt

SEQ ID NO: 198801 - DNA, 418 bp, Gossypium hirsutum
ctcacgcgtccgcccacgcgtccgcatcactaaggagaggtttaatcttgtttctggtgcggctccatttgctaaggatccaggactgttagtgggacttagagaggggggcttcgctacttgaagtggttaaaaaggtcaaacctgatgtgcttcttggtttgtctggagttggcggtgtgttcagtgaagaggtgctcaaggctttgcgtgaatctggttcaactagacctgctatttttgcaatgtcaaatcccaccatgaatgctgaatgcactgcagcagatgcttttaagcatgctggagaaaacatagtgttcgccagtggaagccctttcgaaaatatcaatcttggtaatggaaaagtgggctatgtaaatcaagcaaataacatgtacctgttcccagggattggttt

SEQ ID NO: 198802 - DNA, 641 bp, Gossypium hirsutum
ataaaccctcttttccttctctttcatctatcctcttcttgaacatgacaaagaccccctatttcttgatcaaacaaccccccacaaactgcatttaacccaaaaaaaaagaaggttgtataccagacttcaggcatggcaactctaaggtttaactcactgacagggaccctagaaaagaacccgacatcatctttttcttcaaatccaaggctgtcttgggcttactttcagtgtaataacaaaggtggaaagaagggcatcgagaatgacagtcaaagcaatgggagcagccaaatacaaaggaactcaaatgagggaaaagaagctaactgagatgattgggaaaaaagttacagaagctaagcaagtttgtgaaggagatgagacatctgatgagtgcaaagttgcttgggacgaggtcgaagagctaagtcaagctaaggctgatcttaggcttagacttgaaatagaaaagaaagatcctttggagtcgttttgccaggaaaatcctgagactgaagagtgtaagatctatgaagattgatgggaaaatgaatatcattttctagatctgcctattgttatttagtgggaaaatagtaaggaattaagcacctctttagaacaattgaaccttg

SEQ ID NO: 198803 - DNA, 708 bp, Gossypium hirsutum
caactttattggcattagctggacttagacgcttgagcatgactgaaaatgttacttctgttcttccaattgatgaaatgcttccagctgttgcgcagggggctattggaattgcatgtcgaagcaatgatgaaaaaagggctaattacctagcttcattaaatcacgaggaaacacgattggcagttacatgtgagagggcctttctagagacattggacggatcttgccgtactccaatcgctggctatgcttcaaaagacgaggatggtaattgcatatttaaaggattggtagcttctcctgatggaacacgtgtgcttgaaacatctaaaaaaggtccatatgcttttgaagacatggttatgatggggaaggatgctggcaaaaaactcctttctcgggcaggtccaggcttctttgatttttgagtaatttaacaataatgagggctaaaagttgaaagcccaaggcttctggtttaacttttagggtttgtgtccatcaatcttcattcattctcttgagcctttgattgttgtaattccgggttagctattgtatgattaattctcaactagatcattttttttgatgagttgtgatagaaggttagaattttttttttaactctattgtaattgtattatcctttttttttaagtgaatgatttaaccctttaaaaaaaaaaaaaaaaaattctgcgg

SEQ ID NO: 198804 - DNA, 656 bp, Gossypium hirsutum
caaccctttattctgattattttatgatcactataaaaaccccgttctagggctccgtctcttcctttctgtgattcaaatccccaatttgaagccacctgcctgcccctttctcaattcgccggaatgaagctcatcatcaaaaccctaaaaggcagtcactttgaaattagggttcagcccaatgataccgttatggctgtgaagaaaaacatagaggatatacaagggaaagacaattatccatgtgggcaacagctgttgattcataatgggaaggttttgaaagatgaaactactttagctgaaaataaagtatctgaggatggttttctggttgtcatgcttagcaagagcaagtctttgggttcaactggagcctcgttctgctcagcctgcttcatcaactccatctaccactgttcctgcttctgcgccttcttcaaattctacacctgccacaggagctcctgcacaagcatctcaacaaaccgatacctatagtcaagctgcttcgaatttagttgctggtaataatcttgagcagactatccaacaattgatggatatgggtggaggcaattgggacaaaaaaactgtaactcgtgcacttcgggctgcttataacaacccagagcgagcagtggattatcttt

SEQ ID NO: 198805 - DNA, 545 bp, Gossypium hirsutum
tatccgaggcttcgtctattgtatccgaagtgcccgattatttattcgggttggagaactccgatgagatccaacctcgtgacccgaaattaaggacacgtcagcttttgtatgagaataattcggtttcggatcccggttctcctgccccggttgtttcttcttctcctttttgttccacgtcatcagctactgttgtaccttcagtggctaaaccggataatcctgaaccggttttgaagtcaaagcaaagtcaaacggacagttttcgtggagcaacccgtttcgcaaccgaccacatattcgggtactccgatgtggcatcattatgttccggattcttattattctgctcctgccgtacaacaaatacccgtttatttatgttccgggtcatgtacaacccggaaatcatcagggtcaagctcaacccgttcaaattcgtacacagtatgtccagcagtattcgaattcatcgggtcaagtacccgtagggtatcatcaacaagttcatggtgcgggtcaaacaatactggcaggcacca

SEQ ID NO: 198806 - DNA, 623 bp, Gossypium hirsutum
  unsure (1)..(623): unsure at all n locations
ataaatattgaacttcccaaagttccgtttggtacgagtttacatgttggtgtggattatcaaccatgagcaacgtggctaagtttctcagatactcttcactcactatcttcgaacaacccattgcaaaggacccttggccatcctctacttcctctttctagcttcttcttctagggttcttgcctttgggtaatctttgttgtttttttttttttgaagaaaatatgagtagtggagagaaaagtttgaggaacttccaattacacctaccacaccttcatcatcattgtcatcatcatcatcaagggaagaaacaaacgagggatgtaccaaaagggtatttggcaatcatggtgggatcacaaggagaggagcgacagagatttgtggtgcctgttatgtacttcaatcaccccttgttcatgcgactgttgaaagaggcagaggaggagtacgggttcgaccanaagggaaccatcacaatcccctgtcatgtggaagaattcaggaatatacggggcttgattgataaggaaaagtattttcatcatcatcatcatcaccatcatcatgtgggttgttttagggtttgaataatttattgttatttacttcaatgg

SEQ ID NO: 198807 - DNA, 1198 bp, Gossypium hirsutum
ttcacgcgtccgctactccaacgtttcggccttcacttacgattccaattccacttcttgcgttcaagccacttcctttttatcaagtcaaatatgggtctctgaaacttcattttttgcgttgtcaagttccagtctttggacgtatttagtatggacccttgtgataacttcagttttaagtgtacccatatgtttacttttgcttttattactcaaacactacacgaagcagatcgtttatgtcttgcttcctttctttataatcatgccggttttctttgatgtttattggttcgttgcttgtaccttgagctcttcttgtagtgatgctttccctttggtctatagaattctggtgcttgttttcattttgctaatagttggggttattgtttggatcattgtggctaattggcatcggatcgagttgactgtgaggattatcggggttgcttccgatgcgctttcgaggaatttagggttgtttttggtgataccgttgttgaccgttggattgttggcttattatgcgtcaattgttgtgttcttggtgttttctaggtttaatgggaaaattgtggctaaagaatcgaatggggagtatacttgtgtttggaaacaagatagctgggtgcctgcttattttacattggctattttgacaatgttgtggtccttgaccagtatggtggaagctcaggtttatgttaccagtggcaccattgctcagtggtacttctccaaagatgatacgaaacctcaccggagcataaggagatctttgagaaatgcatttggtccttcttctggcaccatctgtctatctggattacttgtctttgttgttcgagtggtgcgtgctgctgttgatagtgcaagagaagaagatgttcctgggatagtgaatcttgttctgcggtgttgtgttaatgccctaatgtctgcgatagactttcttaacaagttcacaatcaactttgctgcaataactggcgaggcatattgcacctctgcgaggatgacatatgagcttctaagacgtaacctactctctgctgtttttgtggagaccgtttcaactcgtttattagcaggagttatttttgtcctttcatcagtttatgcaattgcggtctgtgcgatcttaaagggtgttagtgatctaggggttaacatgtacaccgtcgcagctctg

SEQ ID NO: 198808 - DNA, 316 bp, Gossypium hirsutum
aatagttgtgtttttccacatttaaatacatattatcagagcccctaattcaattaaacatcatttttcttgccccagcttctcaatgtcaggggcgcttggttgggagctgttacaatgtaccgacctgtggctacagctgcagccacggggggagtcccaactgacaatggggactatgttgtgactttggatcaagtcccacggtggtacgatgcacatatcatggtctctcttgtgagtttgagaatgaagatccttcatgttcaaaatccttttttttcgtccccttttattctcatgtgatagtttttgt

SEQ ID NO: 198809 - DNA, 437 bp, Gossypium hirsutum
cggacgcgtgggcaaaaaagcaacaaatattttccctttgattccctgcctagaaggtaacgctcacacagtttcaggaaatggatcttgacgacgacggaggcacctctgatcttagcaccagtgctggagaacctaacgctgccaccgagaaaatttgtgaaagctcagcgtttcagattatgccatttaaagaagagccaatagactcccaccctccgccgcctatcggggtggtccctgtttccatgcggcctctacccactgttaaacgctcctccaccaaggaccgtcataccaaagtcgagggccgcggtcgaagaattcgtatacccgccacttccgccgccaggatcttccagctgactcgtgaacttggccataaatctgatggagaaaccattagatggctccttgaacatgctgaacaagctatc

SEQ ID NO: 198810 - DNA, 644 bp, Gossypium hirsutum
  unsure (1)..(644): unsure at all n locations
gggtggggtttacaaggagntacgtcaggcatggagggtgccaaagagcaaattgtacaggagtccaaaaattccacgctaccatctcaagatgaggaggcagctataaagaaaaaatatggagggattattcccaagaaaccaccactaatctccaaggaccatgaacgtgcctacttcgattctgctgattgggcacttggaaagcaaggtgttgagaagcccaaaggaccacttgaagccctccgtcccaaattacagccaacacaacaacaaacacgatacaggaaatctccttgtgccccagcagatggtgcaggtgggcggccggctcaaccagagggtgggactgccgacgaatgagaaactacccttaatcgtctgatcttgtgaggactagtgtttgctactctaatacccagataggtaatgaataattttaaactgtttccatgaataaaaacttgatgaaagatgtttcaattttagttaagttcgacaagatacaacatttatgcagtttgagaatggtgggaactgaaaatgtctattgttccaatgttttttttttaaactaatgtggaacattattcttcgtgatatgagtaatcttccccttttattctaaaaaaaaaaaaaaaaaa

SEQ ID NO: 198811 - DNA, 790 bp, Gossypium hirsutum
  unsure (1)..(790): unsure at all n locations
ggaataacaaatccaaccctaaaattctcgcttgtcttttttccctgttttccatttctcactcttttttgctctcgcgtttgtttcccgagaaaaaaaagtgaaaataaatataaaccaagaaagagaaagaggaaaaagaggagaaggattgggatctcaacaactgtcactctaacctcaaaactgttgtcctccatttttctttttaatttcccgggaatcaaagggacagttattctttcggtccgttttaatttgattatcgtttcaagcagcgttaattttgatgggaaattggtgatcaatataaaagctgaatttctgttgaaataatagaggagatgaccaaagaacacccgcctgagccactcgatttcttcatttggactgttgaggatgttggaatgtggttggaagagattaaatcttggtagctaccgtcagattttcaaagaaaattgtgtcaatggagaatacttggaaggcatgtctatgttcaccactgaacagaatcctcgaattaataaggcgggttcttataaattggggagactttatcacgctatgtagggaactcaaacaaataaaagtggcttgcctgaaaagagagcaaaaagttcgcaggccatggtgggctccttcntgcctttcaatattctttgttaaggtancaaaacgcaacaaacaatcacgtgttgtttcccttgaactggaacatgatgccaaaaattctttttaactacgtatatggtgtgttccttctcgtgagggagcaaaaaatgggggc

SEQ ID NO: 198812 - DNA, 706 bp, Gossypium hirsutum
ctttcttttgcggtactacgcacccacctacaggaggggcaactacttgtgcggctccagcccgctctcctcctcctacttcatcaccaccaccaggttccactcctcctccagcgactcccccgcccgttagctccccaccaccagcttctcctcccccggctactccacctcccgcaactcccccaccggcttctccacctccggctaccccaccacctgcttctccccctcctgctactcctcctccagctaccccaccaccagctcctttggcttctcctcctgccacggttccagctccggcccctagcaagaccaaagctaagtctccagcactatcaccttcggcctccagcccaccgtctccatcaaatgaggcccctactcccagcctcggcgcttcttcaccaggccctgctggaaccgatacgagtggagtagagaaaacatggtccataagaaagatggtgtggagcttggtgattggatggggtatcctcagtttaatgctttaaaccaagaagtcttttcttcaccatttgtgtcttagctatggtttttgttttcagtgttttaatttccattatatattgttactggcttaagtctctttgatggggctttttactatgcatatttgagcttacatttatttatatatatttgtattctttgggagattttttttgaggggagcttttat

SEQ ID NO: 198813 - DNA, 600 bp, Gossypium hirsutum
tgtacgcgtgggcggacgcgtgggcggacgcgtgggcggacgcgtgggcggacgcgtccgctcatttgcttgcgcggctgggcgtagtttaagcggagagggtgtgcaggattaaagggtcaccattgtttccaatatgatgcttaataataagtttttgttcttatcagctttgttttgcattgctgtagctggcgttttaggccaagctcctcctactcctagtaatcctccgacatccacgccggcgccgccgactccacccgcttccacacctccacctactactcaaccacctccaacacccacaactacttctccgccaccagcttcctctcctcctcctacttcatcaccaccaccagtttccactcctcctccagcgactcccccgcccgttagctccccaccaccagcttctcctcccccggctactccacctcccgcaactcccccaccggcttctccacctccggctaccccaccacctgcttctccccctcctgctactcctcctacagctaccccaccaccagcttctttggctttttcttctgccacggttccagcttcggcccctagcaagaccaaagctaagtc

SEQ ID NO: 198814 - DNA, 666 bp, Gossypium hirsutum
gcttgcgcggctgggcttagtttaagcggagagggtgtgcaggattaaagggtcaccattggttccatcatgatgcttaatggcaagtttttgttcttatcagctttgttttgcattgctgtagctggcgctttaggccaagctcctcctactcctagtaatcctccgacatccacgccggtgccgtcgaccccacccgcttccacacctccgcctactacccaaccacctccaacacccacaactacttctccgccaccagcttccactcctcctcctacatcatcaccacctccagtgacagcttctccaccaccagtttccactcctcctccagcgactcccccgcccgttagctccccaccaccagcttctcctccaccggctactcctcccccagctaccccacctaccgcaactcccccaccggcttctccaccgcaggctaccccaccacctgcttctccccctcctgctactcctcctccagctaccccaccaccagctcctttggcttctcctcctgccacggctccagctccggcccctagcaagaccaaagctaagtctccagcgctatcaccttcggcctccagcccaccgtctccatcaactgcggcccctactcccagcctcggcgcttcttcaccaggccctgctggaacc

SEQ ID NO: 198815 - DNA, 636 bp, Gossypium hirsutum
aagaaaatggagcagtggtggtggtatctttggtttacaatcatctctttgtttggtgcaagtttggggaactggattcacaggtggaggaaccctaaatgcaacggcaaactccctccaggttccatggtactcccacttataggagagacccttagtttttttgtcacttccaactccattgacatacatccttttgtcgctcaaagaatgaaaaggtatgggtcattgttcaagacgaggggagcggggagaccagcggtggtatcattagatccagatttcaactatttcctgctgcaacaagaggacaaacttgtcgaactatattacatggattccctggccaagttggttcaccaagactacatgaaaaacataggtggcgacttccacaagtatttcaagcgcgtcatcctcattcacttcggacatgagcctctgaaacacaagctcttgtctcattttgaggatgtcataaaccattaatttgcaggactggagcatgctgcctcatgttgatcttaaacaccaaactgcttctattgtatttaacacggcctaaaatattctgattatcctgtgtaccaaaatataatttatgtcatgatttgagcgacatcttgcaaggactta

SEQ ID NO: 198816 - DNA, 391 bp, Gossypium hirsutum
tcgtttcaggttacagagaggagaaaaaagatgtctttggtgacagaagagatcaaggccagtgcttgacaagtataccatggagatgagatctgtcaagtgaaatccaagtctttgctggaggagatgggcatgcccagagggcttttgcccttgaaagacattgacgaatgtggatatgtgaaggagacagggttcgtgtggctctaacagaagaagagcataacctcacaagtttgaaaagattgggaagcctgcttcctatgcaactgaagtcactgcaccgattgagaaaaacaggataaagaagctgaatggggttaagagcactgatcggagagacccttagacaccttggcacttccaactccattgacatccatccttttgt

SEQ ID NO: 198817 - DNA, 584 bp, Gossypium hirsutum
gaacaacttatcaggaatctttatccacctattgttctcttatagcacaggttttctcaaggtttctgatgttcacacaatctactgggagcagtcaggaaacccagatggccatccagtcgtgtttcttcatgggggacctggaggaggaacatcacctagtaaccgaaggttctttgatcctgaattttataggatcattttatttgatcagcgtggtgctggaaagagtactccccatgcttgcttggaaaataacaccacttgggatcttattgatgacattgaaaagctaagagaacacttgaaaattccagaatggcaggtctttggtggctctcggggaagtacactcgctcttgcttacagtgtatcacatcctgacatggttactggcttggtcctaagagggatattccttttgcggaagaaagagatcgattggttttatgaaggtggtgctgctgttatttatcctgatgcttgggaaccgtttagagatcttattccagaaaaggagagggagagttttgttactggttatcacaggagactgaattctgaggatttggaaatacaatatg

SEQ ID NO: 198818 - DNA, 591 bp, Gossypium hirsutum
  unsure (1)..(591): unsure at all n locations
gtcagctgttatagaaaggagaagagagcgagaggaagagagacaaatggggtctagagacaaggaccaaacgacatcgcatcatcagccgctccttagcagccttgttgtaggaccttcggcaagcgacggagctgacggtggtgcaagcggaggacgaggccgtggtggtggtggtagcgattatgagcccggggaggtccggcgtgaaccgcatccttattctcgttctgatcgatacaaagatgaacctggatatagaattcgtgcaggttcaagttctcctatacgtcgtagggacgcagatcaccgtaatggttcccattttgatcgctcaggtggtccgtcacggggccgtgattttggtaatgggagggatcctggtaaataccgagactcttcacctccttatattcaaaggccangtggtggcaggcaacacancanccggggttttgatggaactggttatggtcctggacctatcggaggtgaaggcatgactcgaaataatcctaatgtacgccctanggaaggtgactggatatgtccaaatcctttatgtgcgaacttaaactttgcaaggaagat

SEQ ID NO: 198819 - DNA, 565 bp, Gossypium hirsutum
gcagactcgagcaggagagcttcgaaaaaccagccaaatcctcttcctgtacttgcaatccttgctaaggatgttggtgagctagcagtccatgagacgaaggttttcagtccaatactgaagggttggcatcctttggcagctggtatagccgtggccacccttcattcttgttatgcaaatgagataaaacagttcatctcaggtattatggagttaactcctgatgctgttcaagtcctgagagctgcagataaacttgagaaagatcttgttcagattgcagttgaggatgcagtagacagtgaagatggtgggaaggccataatccgtgagatgcctccttatgaggctgaaactgcaattgccaatctggcttaagggttggttcttgacaagtttttatcagtcttaagttatgtgatgcctggaatttgctacttatgttgttttatcctaatacttatttattagggttttcttcgttttatatttgtatttttgtttattattgattagttcttttatttcttatctatactttatacttttttgtcttatttac

SEQ ID NO: 198820 - DNA, 460 bp, Gossypium hirsutum
ctaatttccccagattctccctcctcccaacccaatttgaagagagtaaaggaagatcccgaaactggggggttcatgaatttggatgaaaaccttttgtacgaggttctgaaacacgttgatgccaggaccttagcaatggcctcctgcgttagtaagctgtggctcaaaactgctagagacgagcgtctttgggagttgatctgtaccaggcactgggctaacatcggttgtggaacccaacagcttagatccgtggttttacctctcggtggtttccgccgtctccactcccgttacctttggccgctttccaaaccccaagctgcttcacctttgccttgggctccgcccaagattataaattccaagccgcctgcaccggggggaaaagatgaggttcacctttgtttggcttttctctttatacagttttatgagaagaagcattttacaagct

SEQ ID NO: 198821 - DNA, 575 bp, Gossypium hirsutum
  unsure (1)..(575): unsure at all n locations
ctgtttttttatctccatttttctccagttcaaaagcttcactttcgcagctgctatttttttttttgtgggggtcaaaccctcaaatctattttctccatcaacctgaagtagaagatgggaacattgggtaaagcaatctacaccgttggattctggatcagagaaaccggccaaactctcgatcgccttggctgccgcctccagggcaactactacttccaagaacaactgtcgaggcatcggacgctgatgaacgtattcgacaaagctcctgttgttgatagggatgccttcgtggcacctagcgcttctgtcataggtgatgttcaggtcggacgaggttcttctatatggtatggatgtgttttgagaggtgatgttaataacatcagcatcgggtctggaacaaatatccaagataactcccttgttcacgtcgcaaaatctaacctgagtggaaaggttttaccaactattattggaagtaatgttaccgtgggtcatantgctgttttacatggatgtactgttgaagatgaancgtttgttggtatgggggctaccctattana

SEQ ID NO: 198822 - DNA, 499 bp, Gossypium hirsutum
cacggggggtagttctctctccatttttctccacttcaaagctttttactttctcagctgaggaaagaaaaaaaaagatttctctcagatcttcaagagaaaacaattatctccgtttatctgaagtagaataaggataagaagatgggaacattggggaaagcaatctacacggttggattctggatccgagaaaccggccaagccctcgatcgccttggatgtcgcctccaaggcaattactacttccaagaacagctgtcgaggcatcggacgttgatgaacgtattcgacaaagctccaattgttgatagagatgcctttgttgcacctagcgcttctgtcatcggcgatgttcaggttggacggagttcttctatctggtatggctgtgttttgagaggtgatgtcaatagcatcagtatcgggtctggaacaaatatccaagataactcccttgttcatgttgcaaaatctaacttaagcgggaaggttttac

SEQ ID NO: 198823 - DNA, 381 bp, Gossypium hirsutum
cccacgcgtccgtagccagccctttccaccagtaaaagagaggctgaggctttgcaaaactcaggtatgatgcctttgattagctcacttgtttgggttccttttctccttcttcccctgctgctgctgctgctactctccaagcagaagacccatcaagttaagaaagaacacaattacaagcttcctcccagtcctcccaggctaccaattataggtaacctgcaccagcttggtgaattgccacacagttctctttcccaactttctcgcaaatatggtccagtcatgctccttcatctaggtcgtataccgctgcctattgtttcatcagccgaggcggcgaagcgtagtcctaaaagtcaatgatcttgcttggtg

SEQ ID NO: 198824 - DNA, 451 bp, Gossypium hirsutum
aataaaaatagaagatctgttttgacatgaaatggttatatccatatatctctgacttatctttatgaaatgataaaatatggcaaaacctataccaaaagttggttcacgtaggaatgggcgcagtagtgcacggaaaagtgcacgtagaataccaaagggagttattcatgttcaagcaagtttcaacaataccattgttactgttacagatgtacggggtcgggtaatctcttggtcctccgccggcacttgtggattcaagggtacaagaagggggaccccttttgctgctcaaaccgcagcgggaaatgctattcgagcagtagtagaccaaggtatgcaacgagcggaagttatgataaagggtcctggtctcggaagagatgcagcattacgagctattcgtagaaagggtatactattaagtttcgtacgggatgtaacccct

SEQ ID NO: 198825 - DNA, 520 bp, Gossypium hirsutum
caagtccagtgtttgtgatattcctcctcggggcctgtctatggcatctacctttgtcggcaactcaacctccattcaggagatgttcaggcgagtgagtgagcaattcactgctatgttcaggaggaaggctttcttgcactggtacactggtgaagggatggatgaaatggaattcactgaggctgagagcaacatgaatgaccttgtttctgaatatcaacaataccaggatgcaacagctgaggatgaacttgaatacgaggatgaagacgaggaagctgttcatgagatgtaaaggtggtatgctacttgatactatgtcatgtggtaatgcctcgttatactagagagcgaagtttggcgattatgtgctgttttgtgtagtttaatatatgtgaaaagcttgtgtgtattactcgttatgtttgcattccagccttgttccattggtttacaataatgaaaattagtagtattggcttaaaaaaaaaaaaaaaaaaaaatgtcgacgcggccg

SEQ ID NO: 198826 - DNA, 620 bp, Gossypium hirsutum
  unsure (1)..(620): unsure at all n locations
ctttgttgttatcgccctaagcactttccccagttcccacgagtcatggaagctcttcaagcctcatctcttcgagcttcccctctaaaacctctccaaaaacccaagctcaatatccatttccccaatgcatcgagactcgttcccaggccaaccaagaaattctcttccatcaccgcttcatcccccaccgtatctgctcccaagcgcgagaaggaccccaaaaaacgggtcgttattacgggtatgggattggtttccgtttttgggaatgatgtcgatgcttattacgataagttgctggctggggaaagcgggatcggactcatcgaccggttcgatgcttccaagtttcctacccggttcgccggtcagatccggggtttctcttctcagggttacattgacggaaagaacgataggcgacttgacgattgcttgaggtactgcattgttgcaggaaagaaggctttggaagatgctgatctcgggggcgataagttatccaagatcgacaaggagcgagctggagtgctagttggaactggcatgggtggtctaacggtattctctgacggcgtccaaaatctgataaagaaaggctatanaaaaataacagg

SEQ ID NO: 198827 - DNA, 975 bp, Gossypium hirsutum
gccatttccaatggagaactcgttcacattggttacgattttcggtctgctgtttactttaggcaatgtaggtcctcaagctgaggccgcgagggcgtttttcgtgttcggagattcattagtcgataacggtaacaacaactatctagctaccacggctcgtgctgatgcttacccttacggtatcgactatcctactcatagagctactggccggttctctaatggccttaacatcccagatcttataagtgagcaaattggctctgaaccaacattgccatatctgagcccggagctaaacggacaaaggcttcttattggtgccaactttgcttcagctggaatcggcattctcaacgacaccggagtccaattcgtcaatataattagaatcggcgagcaattacagtacttcaggcaatatcagcaacgagtgagtgcacttattggatctgaacaaacacaacgcctagtgaatgaagcacttgttctaatgaccctaggtggcaacgacttcgtaaacaactactacttggtgccgttctcggcacggtcacggcaattcgcactccctgattacgtcgtctatataatttccgagtaccggaaaattcttttgaggctgtatgagttaggggcaaggagggtattggtgactggaaccggaccattaggttgcgtcccggcggaactagctcaacacagcagagccggtgaatgcgcgatcgagctgcaacgagcctcagctttgttcaacccacaacttgctgaaatgctcagcggactcaacaatgagcttggagcagatattttcgttgcagtaaatacaaatgaaatgcacatggattggatcaataacccccaacaattcggttttgttacgtccaagatagcttgttgtggtcaaggaccttacaatggtattgggttatgcacgattgcatcaaacttatgtccgaatcgagacattgg

SEQ ID NO: 198828 - DNA, 643 bp, Gossypium hirsutum
gcccacgcgtccgaaagaaagaaactgtaaaattttcgatcatccatagctgcaaaaatggctctaaatcctcagcttttccctaatggcatgcccatccctttcactaacgagatgtttgttctcgtcagacatggcgtcgaattcgaagttgacaagattcctggatctcaaggaggtcgtgttaaagcatggggcataatatatttgtcaaatatacggatggtctttgttgcaagtcgccctgttgggaatttctttgcttttgatatgcctctgctttatgtgcatgatgaaaagttcaaccaaccaatatttcattgcaataacatctctggtcaagtggagcctgtggtccctgaaaatgagcatagggctctctactccactcattcattcaagattttgttcaaagaaggtggatgcggaacctttgttccacttttcttgaacttgattgcttcagtgagacgatataatcaacaagtaaatcatgaaccacagcctcgtgtggatcctttacaagcagcacaaactccagtcgatgaaatgatgcgacatgcatatgttgatcctaatgatccaacaaaaaatcttcttacaagcatccaactacggagtcttaagttaaggcgacgtacgt

SEQ ID NO: 198829 - DNA, 955 bp, Gossypium hirsutum
  unsure (1)..(955): unsure at all n locations
ggggcacaacacctgttgatatccatgggaagcctattgcagatctttcaaagactgggggatggagtgccgccttatttatgtttggaaatgagatggccgaacgaatggcttattttggcctatcggtgaacatggtggcctttatgttctatgttatgcatagacccttttcaagttcttcaaatgcagttaacaatttcctggggatatctcaagtatcctctgtccttggtggttttctagccgatgcttatctcggtcgatattggacaatagccattttcactactatttatcttgctggtttgatagggataactttatgtgcatccatgaaaatttttgtgccaaatcaagatcaatgcgatcaactgtccctgcttttgggtagttgcgagcctgcaaaaccatggcagatgctttacctctatgttgtcctttatttaactgctttcggagccgcgggtataaggccctgcgtctcgtcttttggggctgatcagtttgatgaaagaagtaaagattacaagaccctcctggataggtttttcaacttcttttacctctgtgttactattggggcaattgtggcattcactctggtagtctacatccaaataaagcgtggatggggagctgccttcggttcattagctatagctatgggagtgtccaacatgttgttctttgctggtactcctttatacaggcataggttgcctggaggcagccccctaacccgagttgctcaggtccttgttgccgccttcaaaaaacaacatgtcccttttactaaaaccgagttantaggcctctacgagctccctggaagacattctgctataaagggcagtggaaagatacctcatactgacgatttcagatgcttggataaggcagctctccaattgaaagaagacgggggcaatccaattccctggaggctctgcat

SEQ ID NO: 198830 - DNA, 443 bp, Gossypium hirsutum
tctctatttacaaatacgccgccgtctatcggagctcagagaggaacggttcgattgccggcggggttgatttatcttggtccgatggtaattgaaggtgtttggagccgcttgttttccttatgcagtaacacctatgctaattttgatcgagttcatttgccgggcaatgtgaatggtggttgtttgaatacttttagagaattagtttgtgttggggtggatcatgggggctgcatgttgttgttcctgctagagacaaaactatcgtaaatggatcaggtagtgaggttttacataggaatataaggtattctccaacttggagttttcgttgggataaccgagggcgtgtagctggtgaagacacttctataagttggttttcggatgcagttagtcggaatgatggatcagagatcaaatatgaatctgcatgtgca

SEQ ID NO: 198831 - DNA, 587 bp, Gossypium hirsutum
  unsure (1)..(587): unsure at all n locations
ggtagttggaaaaacaagctatgctggcaacttctcaggctatgatgaatttgttcccatggttgataaagctgttgattctagttggaagaaacaaacctccctcttgaggccttctgcttccaaaggtacattagcagctcctgaaactcccaaggcccaggaaggaattcgagcttggattttgctgatgctcatggcttttttcatgacactttatactctcttccactcagtggcactgaatataaccagaaagctacctaactcagtttctggtcattgtcaaaatgttactgaacctaaacctaatgcaactcaaaaggaagaatgtcgcgccccttctccaacagctcttcagactcaggcagatcttctatcttctgttattgagaggttgggtgagcttgaacagaaagttggtacactacaagcgaagccatctaagatgccttatgagaaagaggagttgttgaattctgctgtatgtcgtgttgaaactctaaaagcagagctcattgctgccaagaaagctcttcacnaaactttgatgaagcaaaaagagctgtttgcatccctaaacagtc

SEQ ID NO: 198832 - DNA, 534 bp, Gossypium hirsutum
  unsure (1)..(534): unsure at all n locations
cccacgcgtccgcccacgcgtccgcccacgcgtccgtccacgcgtccgatttcttgaagagagaaaaatgatgtgttactgccgcttgtttgttttgcttgcactctcaagttttgtggtcgaaagtcgacatctcaaaggaaattcatacgaattatccaacttccatccttccggcaccaatgccaccattgaacccaaaatatgggcagttttagttgctggctccaatggttttgtaaattataggcaccaggcagatatatgccatgcatatcaaatcttgaaaaatggtggactagaagacgaaaatattatcgtttttatgtatgatgatattgcattcgacgtagaaaatttgagacctggtgtcattatcaataaaccagatggagacaatgtttataaaggagttcccaaggattacacaggggaagatgtaaatggggacaatttacttgctgcaatacttggaaacaaaactggtgttaggggttgaagtgggaaagttgtggagagcggtccanatgatca

SEQ ID NO: 198833 - DNA, 665 bp, Gossypium hirsutum
  unsure (1)..(665): unsure at all n locations
aacaatttcaacttgcccaaatttcttaaaacagttgctgcacttcttcttcttctctttgtctttcaccttagtcctttctgcattctctcctaaaacccgttcctcccttctgttgccctttctttcttgtttcttttatttctattcttttttccttttttaatctctgtccatcggtcgtcggtcggtgtaaggtctccctctctcgttttcgcgctgccgctgaccagttcgcctttctcggttctcagatggaaagtgataatcttgcatacatggaacttgcaattcaccaggcaaaacttgcttcggaaagccttgaagtgcctgttggttgcgtaatcatcaaggatggggagcttatagcctcgggtagaaatcgaaacactgagacacgaaatgcaacaaggcatgcagaaatggaagccataaaaaatcttctaaaaatgttggagaaaaaacgattttcaaaagcagtattggtaaaaaacttttcacaatgtattttgtatgttacatgtgaaccangcataatgtgtgctgcaactttgtcatttcttggcataaaggaagtatattatggttgtgcaaatgaaaaatttgaagggtgcggatcaattttatccttgcattcaatttgctcaaagnctttcatcaatgat

SEQ ID NO: 198834 - DNA, 395 bp, Gossypium hirsutum
gcggaggatcaaattaagcggctggcgaaggatccgcaagtcgttccggctctcgggcagcaccttcgcactggcaagactcccaacgtccgtcaactcgccgcagttctcctaaggaagaagatcactggacactgggctaagctcgctcctcaggttaagcaacttgtcaagcagtccctcattgaaagcatcacaatggaacatagtccaccagtgaggcgagccagcgcgaacgtagtgagtatagttgcgaaatacgctgttccggctggagaatggcctgatctgctgccgtttctgtttcagtgtagtcaaagtccacaggaagatcatagagaagtggctttgatacttttcagctctttgactgaaacaattgggagcacctttag

SEQ ID NO: 198835 - DNA, 395 bp, Gossypium hirsutum
gaatagcccaagtgaaagttcctcacaatcatttgtcattcaaagaggggaagctcaaaacagtgatcagtgagaaaagggcaagtgaatgtgttctttttgttactgtttttgagtctctcttcagcttctgatcagaaatggaggaaagcaatgatgtcagcttacaatggttcttcttcttcttcttccatgatgatgaatagagttgggtcctccatcctgttcccaattcatggaaatgtgtatccaacagggtactataatgttaccatcaatataggtcaccctcccaagccttactttcttgattttgatactggaagcgacctcacatggctccaatgcaacgctccatgcgtccattgtattgaggcacctcacccgctttacca

SEQ ID NO: 198836 - DNA, 753 bp, Gossypium hirsutum
aaaaaagaaaaaaaaaagacagaaattaaaataaaaagtgaaagagcgaaaaagagtaaagcacaaagaaacagatttgacacagttgaaaatcttttgagtttccgtgcttaaaaaattcaactagttttaaaagaggggaaaatcatttgattttcctttttttttaatttgaattttgcagcaataactgagaatcaatcactttcagtgttttttttgggagaaaattctatgtcgagcgagagagttcccgttgagttatccaagggcgttaacggccttgaaaaaatcatcctccgcgagactcgaggcagctctgccgaggtgtatttgtatggaggacacgtgacatcttggaagaatgagcatggagaggagttgcttttcgtcagtagtaaggcattgttcaagcctccaaaagcaattcgtggaggaattcctatatgttttccccaattttcaaatcatggtcctcttgagccgcatgggtttgccagaaatagactttggagcattgacactgaccctcctgcttttccgacaaactcatccaacaaagcttacattgatttgatccttaagccttctgaagaagatatgaagatttggcctcacagttatgagttccgcctgagggttactttgggacctggaggggatctaatgttaacatctcgcatcaggaatacaaatactgatggaaagccgtttacattcacatttgcatatcacacatatttttccgtgtcg

SEQ ID NO: 198837 - DNA, 674 bp, Gossypium hirsutum
cttcctcacattttattcgtcccaaaaaacatttctattcctcttttatacaaacaaaaaacaatggctacaccgttgcttcatcttcttcctttaccatgcttcatttagcttcattgttctccattttcgtattagttaacgcaagaatccccggtgtttgcactggtggatcctgggaaactgctcatgtcactttctatggtggcatgttcacatctagggaaaatcaaaatcaaagaacccaaaactaggaaaccaaggaaacgatgagaaaaagagcaaaaagggattggaaattgaagggtaccgagtggaagggttgtcaataggagggcatgaaacttgcattatttttcccactcttaacctagcatttgatatcggtcgatgcccacaacgtgccctttctcaagatttcctttttatttctcatggccatatggatcatattgttagttttttcctttctctctttctttttcttgtgttcttgttcttgcttttggtagtctaattattggttttcctctttttcttttattagatgctgaattgataataatgttagaaaattaggtgattactaaagaaatgtactctgcttaaagaatttattgtttgaaggtagaattggaagtttcttcttatgaatctctgttttcaggtacttc

SEQ ID NO: 198838 - DNA, 843 bp, Gossypium hirsutum
gacgacttcggaattgcggttgcagccaaacaacttggacgcttctctcttcagtcatactcccttttactgcgaggagaacgtctattttctttgcaagaaactttgttcatccgagatagcagatgctcaaggatctgatcttttcgtcgttttcatttccaatgacaataaacagattccactgtggcatcaaaaagctagccatagagcagatggtgtaattctctgggattaccatgtaatttgtgttcagaggaagaaagatggtggtactcatttagtatgggacttggattcaagtcttccatttccttgtcctttagctacctatgtgtcagaaactatccggccatcatttcagctcttttcggagtttcagagaagacacatgaaagattctgaagggaactttactgctcaacctcctccatatgaacccatagttgctgaagatggatctgtgcacaacttaaacgagtacatggagatccgtgctgctgatgtactaacagatctaccaccggaactgacaagtgcagtttttggtcagaagcacggagttgtaattggtgaagcacatcttgaggaattattttctcaaattccttgaatatggtgggtacttttaaccaaaatcttagaacttgcatgtttgatgcatggtcttgagcacttaaaactgctactgtacaaatatgtttccaatactgttatactatgtcgtgtgccacaagcctgcaaaaatgaaggaaaacaacatacttacagcaatattgttgatgtgtgtgtatatatatatattatctttgattgtaataaaattctttgtttgccattgtt

SEQ ID NO: 198839 - DNA, 497 bp, Gossypium hirsutum
gcaactgggagctcggatcagtttcagtggccaagttagaaattaccaacgaacaatttcacaagtggtgaacctgcttggggatgaaacttcggcagcaaattatttaagcaaatgcatttactcgatcggactcggcagcaacgattaccttaacaactatttcatgcccctttattactccaccagcaggcagtatacccccgagcaatttgctgatgttcttattcaacaatacactgagcagcttcaggctttgtataactatggggcaaggaagtttgcgttgattggggtgggtcagatcggttgcagtcccaatgaattagctcaatacagtggagatggtaaaacatgtgtggagagaatcaatgctgcaaaccggattttcaatgtcaagcttaaagggctcgttgatcaattcaacatcgactattccgatgccaaattcatctacatcaatgcttatggaatttccaagatcattacaagcaacc

SEQ ID NO: 198840 - DNA, 597 bp, Gossypium hirsutum
cgtgacactgacactctgcttctaagctttactttttctcttttttctctcaatactgtttcactaaaaaatgccaatcaaaaaagatccttcgattccaccgccgatgatcagcaagatcggcccttacaccgtcttcgttacccctccgtcaaccccttctccaactgaccctcctgtttttcactctcccaagaaggccgcgccgccttctccttctccttatccttctgctccgccgcctgtccagccacctccccaacagttcgacaagtctttccgtacttcccaatccctttccgacggttcatttctgggtttcttcaaaaacgctgccttcaaactccaaaacgctcattcaagcttggatgaccatttagctcgttggttaggcttaaatcagtccaagtatcaatgggcattggacgattattatgagagcaagggattggaaaaggaaggtgtaaaagtgaaagaaatatctagcaaaatacagagtgtgtagcatacttctcgtccccggtaatgaagaccctgaaccgtctcgccttttacattttctaatgttatcctttctcgaggttatatcgtgggttc

SEQ ID NO: 198841 - DNA, 376 bp, Gossypium hirsutum
tgctgatctaagatatagatatctcatgaacagcagtattgctgggcttgagaaggctgacgtattccttttggttggtacccagccaagggttgaagctgctatggtaaatgccagaattcgtaaaacagttcgagcatcaaatgctaaagttgcctatattggtccgccaaccgaattcaactatgattgccagcatcttggtactggcccacaaacactgacagaaattgctgagggtcgtcattctttttgctcggccatctcaaatgccaaaaacccagccatcattgttggtgctggcctgtttgagagggacgacaaagatgcaatttttgctgctgttgaagccattgcgaagaatggaaatgtcatc

SEQ ID NO: 198842 - DNA, 389 bp, Gossypium hirsutum
ggtgagaagaaacgcggctgacgagatctttgcagaataatggcgtcgctgcgtcttttagttttcctgttactttgtcttccttttatttccggtgcttacaggccaggggacatcgttccgatgtgcaagatgggtcaattccactcctctagaactgttgggcatgacgtgatcgcgaaacattggcccaatttttgccgttaatcgggaggtgttaattcctatagcaaagccgactggttacacgggagctgatccctataaaatatcattccaagttgggaaggagaagtttcttgttccttggctttttcttataaatcgtaaaagttctgaagttccaatgattgacatgcatttgaggtactcaggtggtgatttgcatg

SEQ ID NO: 198843 - DNA, 1384 bp, Gossypium hirsutum
  unsure (1)..(1384): unsure at all n locations
cggacgcgtgggcaagtatagcctttttcttttgcctttttgtcatttcccttaattaattgtctcttatggagtcgttctcttttttgttgataatttcaattttctatcttctcttcaaaatatggaattggatcaataacgtgagagaccaacaatgttacattttggattaccaatgctacaagcccagtgatgataggatggtggggactgagttctgcggggaagtgataaagaggaacaagaatctcggactcaacgagtacaagttcttgctgaaagccattgtcagttcaggcatcggagaacaaacctacgccccgaggatcatgttttccgggagagaagagagcccgaaactggaagatgggatcttggaaatggaagagttttttcacgatagcatcgagaaggtgttatcaagggcaggcatatcccctcaagaaatcgatctcttattcgtcaatgtctccatgttatccgcagttccttctttgtgttctcggatcataaaccactacaaaatgagaccagacatcaagtcttttaacttaactggaatggggtgtagtgctagtctgatttctcttgacattgttcgcaatgtcttcaagtcttacaagaacaagttcgcattgcttgtgacttcggaatcgttgagtccgaattggtatgccggcaacgatagatcgatgattctctccaattgtttgttccgttcgggtggctgcgcagtacttttgacgaacaacaagtccttgaagcatcgagcaatgttcaaattgaaatgcttggtgagaacacatcatggagccaaagatgagtcgtatggttgttgtatccaaagggaagatgataaacgaaggatgggatttcaccttagcaaaagccttcccaaagccgcaactcgttctttcgtcgataatttgagggtcatcaccccaaagatcctgcctgttagggaactattccggttcatggcagtttcactccttaaaaaatggaacgtcgtccgccatggttcttcccacaagggagcttctccaggaccaatcaaagcttggggtgaacttcaagagtggggtggaccatttctgcatccccccaggagggatagccctgatagatgggatcggaataagccctgatttgaccgagtttgatttggacccagctaggatgacactgcatcgatttggcaacacatcggcaaatancctgtggtatgttttggcatacatggaaaccaaaaaaagctgaaaaaaagggataaggtgttgatgataagctttggtgctggctttaaatgcaacagttgtttgtgggaagttgttacggatttacgacaatgggattgtttgganagatgacatttacattt

SEQ ID NO: 198844 - DNA, 709 bp, Gossypium hirsutum
  unsure (1)..(709): unsure at all n locations
cttatcttattctcctaattttctttcgtttaaaccctaaccctaatttccgccttcatgtagtaacatagaattcctcacgaaaaataaagaaaaatgattccttttgttcctgccatatttcttcacgtcattttcatcttcttcgcgcttgtcaacggcgagcaggagactatttacgatatcctaaaggcccatgggctacccacggggctgcttccgaaggggataacccgatttgagttcgacgaaaccggccgcttcgaggttcagttggatcaagcttgtaatgctatgtttgaatgccagtttcgttatgataggaacgtttctgggactttgaagtacgggcagatcggggccttgtctgggatttcttctcaagagctgtttctttggttccaggtcaaagggatttgggttgatgttcctagctcgggcctcatttatttcgacgtcggtgtcgtttctaagcagttttcgttgtcttggttcgaaacgccgagggattgtatggcgattcaggatgattctgaatctggtgattcgattggagatggcaagttattagctgaagcagtcgcgaagagtccacgtgcgagacatcgatttgaacttgatcatggaggttttgggaggaacgacatctacatagtcaganagaccagagacgagagaagttgttcaatagctcaatcaggtgagcctt

SEQ ID NO: 198845 - DNA, 454 bp, Gossypium hirsutum
tttttctttgctgttttaagaaaaacattgcgaatagggagaagggtgagagagataaaaggggaacaaaagaactgcaaaaaaattgaactttttttttcctaaaaaacctcaattagaagagcgattatcgcttcatcttccccgaaacgacttcgtcagcttgcagatttttttcaggttgcttttgttgccatggctgctgctgcgactgcctctggtggtccacgatatgctccgcctgaccctactcttcccgaaccatggaaaggcctggttgatggaaaaactggttatctctacttttggaatccggtaacaaatgtcacgcaatatgagaggcctagagggatagattctgtcccaaaatcttcttcagtgcctatgggttcttcaattctggttcaacaatcttctgaagggcgttataagtataagtttgagaaggaaaatg

SEQ ID NO: 198846 - DNA, 757 bp, Gossypium hirsutum
ctgttgttttcttgtttaaccctctgccttgttgtattcttgctctaaccaccactacggaccggtcttgcaagtttttgggcggtggaatgggactattcaaggctgctggcgttgtttacaagccggtcgaggagattgatcttggtcctgacagcaatgagttttatctcctcccccacgttatagctcctcgcatggctggatttcttgtcaaaatatttgcttggttcctggagtcaaggatcattggaacgttattgttgtatatattgaagaggaacaacctaattcacaagcttgtttccaatgcaacgctggaggaggcacctatgtttgttcctttgcatccatttgttgaccttaatgaacaagaagttgaacaaattgactctgatgcatcgccagcagaacgagttcaacgggcaatgaattgtcttcctttgaccttagagaagtcagtagatgattcaaattccagcagcttccgacgctggacaatagcggattattcaagggcctatagttctggagaaataactccccggaaggttgcggagcaatttataaatgccgtgcatgaatcttcccgtgctgctttgccaatgtccttcttcattaactatgatgctgaagatatcctgaaacaagctacagaatcaactcttcggtacgtaagaggggatccgttttcagctctagacggagtcccaattgctttcaaggatggattagattgttctccatttccaacatc

SEQ ID NO: 198847 - DNA, 613 bp, Gossypium hirsutum
  unsure (1)..(613): unsure at all n locations
tttttatgaaaaaggcacctcagatataaataaggaaattaagcacattttctacaaaccaaacacgtaaagtaactgagcataattcagggtttttatcttaaaacagactgaaactttagaaatttaactcaattgaattccttgacaagcttattacataaacatacatgcttttattatcgatctctctctacacccaatgaactctcttttttttttccgttttgcaatctttttttgaagggcccaatcagtttacccttacaggtttccttcatgttgctgttgccattatcataatcgatcacacggaagtggtatgagatcatgcttctggaaatctaaagcctttatctcaaccggtagtagaaactgctttgatccaagtactgcagatcccataattcttcacaaaatacatattacatgggtcaatttcaggaaacaggttaatataaaaccgaaagccatcggggcttatatccctgcatagcaaacctttgatctctgcagttagaagatgctccttggccatggccggagcaatccctaatgtcattgcagcatcagttgggcttataccagttagaagcgcttcaggcttantcac

SEQ ID NO: 198848 - DNA, 606 bp, Gossypium hirsutum
aattcagtaaaagtattttaattaacttttaagcattttgtttattgtaatcaattaattcctcctttatcaataataattattaaaaataatatattcggatcctacatgaagaaaactcataagaaaaaggacccgtcgagtcgacccacccaacctatgataggcagcttggaaatttgcttgcctgttaatctctgtcgaagaagatggtttccgtttagatccagcaaaaatacagttttcttaagccttctttgatcctatattcctagccaatacaatctgcagttttcagaaatactagtaatttagaaaaaaaatggcttcaacggggggtctggtgcccataacaagggcgtttctcgcttcttattacgaaaagtacccattcgatccactcccagacgacgtgtctcgtctttcctctcagattcggtctttcatccaggatttgatccaaggctttcctccaactcaaggtgaaagcttattaatacaagaagcagatagtcagcctccgcataaaatggatgagaacatgtggtaaatttgtgattttttggactatttttgttttaattaaatgactttatttgctcttat

SEQ ID NO: 198849 - DNA, 688 bp, Gossypium hirsutum
gaagaacctgcaattagaacaaataccaccatattattgggaaacattgcaagctacctaaatgaagggacacggaagagagttttgatcaatgcatttacggtccgtgcattgcgtgatactttctctcctgcccgaggagcaggagttatggctttatgtgccactagttcttattatgacatgactgagattgctacccggattcttccaaatattgttgtacttatcattgatcctgacagtgatatacggtcaaaggcatttcaagcagttgatcaatttttacagatagtgaagcagtataatgagaagggtaatgctgaagatacttctggtgctggaagtttagggatttcatcaatgcctggaaatgctagtttactgggatgggccatgagttccttaactcttaaaggcaaagcttctgatcaagctccagttgctactgcaaattctgtcacacctgcaactaccacagcctctacagccagctcaggactaatagaaactccaagtacagcaccagtccaccgagtaagttccagtacagattttgcagatcaactgatgcctccatctcctacttcaaccgatggatggggagaaattgaaaatggcattcatgaagaacatgacagtgaccaagatggatgggatgatattgaaccccttgatgagccaaagc

SEQ ID NO: 198850 - DNA, 506 bp, Gossypium hirsutum
caagttcattctaaaaatcgccgaatagccattccggggaggaggtgccgaatggctattccaacctctccatcgaatgaccctttttttctcctccaaaaataccctttcttagattgaattttctctaacggtttcaacttttgttttcttttggtcattcgacaatctcaagctcaaatcaatcttaaaggaagcagatcaacttgaaggccaaatcaacttgattttgttgtaagttcaattcaactagggtttgttttgcattttgattgattttttttttgtttctgatgatttgtccaaggggaattgaaatggattctgcaactgttcacgaggtgatcgattcattcttcgagtcaactcctcctctcatagattccgctaaaatcatagacaaattgaatcaggtcatccaatttgattctccttcaggtgcaggacctgggtctagggttgaggagctgctaaaatgatgcccaaatcttaagaaaattattatt

SEQ ID NO: 198851 - DNA, 458 bp, Gossypium hirsutum
gtacgattaaccccaaggtcatagagtgcgagtatgctgtccgtggtgagattgtcacccttgcacagaaattgcaagaagagatacagactaagccagatgctcatccctttgaagagatactgtactgcaacattggaaatccacaatctcttggtcagcagccaataacttttttccgagaggttcttgcattatgcgaccatccagccattttggacaaaagtgagacacagggtttattcagtgctgactccattgaacgtgcttggcaaattcttgatcaaattcctggaagggcaactggtgcctacagtcatagccagggtatcaagggattacgagatactattgctgccggaattgagggtcgtgatggttttcctgctgagccaattgatattttcttgacagatggagcgagccctgcattgcacattatgatgcacttgctgata

SEQ ID NO: 198852 - DNA, 428 bp, Gossypium hirsutum
tactgcatggaagccggtaataaaatcggtgcatcagctcatcccacttccttacatcctccggtccgcggacatgcctcgactggcaccctgggacgccacctggcaaggcggctcgtggagatcggtgtcaaggacgtcttctcagttcctggtgacttcaacttgaccctcttggatcatctaatagcagaacctgagctgaacttagtcggttgctgcaacgagcttaacgccggatatgcggctgatggctatgcacgcgctaagggcgtgggagcctgcgtcgtgactttcactgttggaggcctgagtgtgcttaacgctattgccggtgcttacagtgagaatttgcctgtgatttgcatagttagagggcctaattcgtatgattactgtaccatccggatcttgcatcatactttttg

SEQ ID NO: 198853 - DNA, 504 bp, Gossypium hirsutum
caaaaatgttccgcttgttgagcatcttcttcgtgagtgtaaccttttggggaaaatgcttgaagctgaaaagaattgcacattaacttctgatccgaatatgccaacaattagtgctgaaggtagaccgcctccaaagataggaaatcttggacacttgacacgcatatctaacaaacttgttcagcttggaaatagcaatgctgaaattcaggcacatctgcaggaaaacagtgaatgggttgattggcacactaatgtcttattaaagcgtaatgctacagaaaatatctatcagtgggcttgtgggaggccaacagctctacacgaccgaaccagagacagtgatgatgatgattaccatgatagggattatgatgttgcagccttggcaaataacttaagccaggcatttcgatatggcatttacagtaatgatgatatggatcaggtacatggctcactcgaaagagatgatgaggatggttacttggatgatgaatc

SEQ ID NO: 198854 - DNA, 463 bp, Gossypium hirsutum
gattcacatactcagccaaaagggctctgctttggagttctttctttcttcctttcttctggcgtactttgggttcccactctaatcatggtatccaagcacaatccatcgggcaacaaaaaacggagcccactatctatatttgctgttattggtttgtgttgtttcttctacattctgggagcatggcagcgaagtggttttggcaaaggagatagcatagcattggaagtaacaaagcaggcagactgcagtatcttaacaaatttgaactttgaaacacatcacaacgatgtagagattgttgagccttccaaaccaaaagctcacgtgtttaagccgtgtgatgtaaaatacactgattacaccccttgccaagagcaagaccgagccatgtagtttcccagggattacatgatttaaccggaaagacactgtccccccgaggaagaataactacact

SEQ ID NO: 198855 - DNA, 644 bp, Gossypium hirsutum
cccattcgtccgtttcagttttggcgggaggatgggggagagtgaactctgcgaagaatccatggcgggcgattcagagatgaacccagagcaggtagaagaagagttcagcgtatggaagaagaacacccctttcctctacgatctcgtcatttctcaccctctcgaatggccttctttgactgtccattgggttccttcttctcccactccttacggacctgaccctacttttaacgttcacaaactcgtcctcggaactcacaccagcggcggcgcccccgattttctaatgatcgccgacgcagttctccccactctcgcctctgaatccaatatcgctgctaaaaatgatgacccagttatccctaaggttgagataacacagaaaatgcgtgttgatggggaagtcaacagggctagatgtatgcctcaaaacccggttattatcggcgcaaagaccagtggctccgacgttttcgtgtttgattatgccaagcaggctgcagctaaagagcaggagggtgactgtgttgctgatttgaggttgaggggtcatgaaaaggaagggtatggattatcatggagtccatttaaggagggttatcttttgagtggttcacaagaccataagatatgccttt

SEQ ID NO: 198856 - DNA, 412 bp, Gossypium hirsutum
gttctctctcttcagtctttacttttcgagaagctttgacccttacccttttcctttctcctacattcttagacacaggggttataataaaagacggaagctatgtgggctgttccaaggcgaagagtttcttcttcttcagttttgggccaatcatttcggattgctcgaccttcacgttgttacagttcttcctcaaatgaggcctatgcaaagactttagtttctagaaaagggacatcacatgttgcagggattgtgggttctctagggtttccatttggcccaaggcctctaagggacgtgatttcatttgttcaaagatatcctccaatatttcgccgcactaggtcattttctgctgatagtgatgatccaaatagaggcctcatggcatcagggaactctagtg

SEQ ID NO: 198857 - DNA, 490 bp, Gossypium hirsutum
ctcgtgtcttgtctctcacagtctgttatagtaaaagctagaggcaccaaaaaaaaaaaaaaccatgggaagatccatttcctgtttcaaaatcatcacttgcggcactgattcagctgataaaaacgacgacgttatcgatgttcctcaggacaagagatcgagtgacaaaaagggatggagtttccggaagagatctgaacggcatcgggtgcttagcaacactgtggtacaagaagcttctactggactggaggaaagtcctgaaactgctagttatgttcaacagtctgatgtctccgttgctcctgagaaaacctccaccgttcagtacaccgaagagaaacttcagtcagtggcaccaaaagattacgttgaagaaaaatctcaattattgacccaagaggacttgaaagtgcccgaacctgttgttgctgccacgaatgaggctaaagatgattctaacgtggatgaatccgtttgtgtagtc

SEQ ID NO: 198858 - DNA, 737 bp, Gossypium hirsutum
  unsure (1)..(737): unsure at all n locations
aagaaaagtccacttttcttatagattactcgtttccttcaagctagctctctctttatttagatcttgaagtgtgagatggcgacaacatcagcaacaaccttctcaattgggtcgactgtctccttcggaagcaggggaaatccacttccacaatctaaaccttttgttgcgaggttcacctccccaaattcacttgcaagttttagtggtctcaaggcagcaacatatgtgaactgtgagtcagagtcctcattcttcagcaaggaaagcagcgccgctcttagaggctcatttgtaccaaaagcacagaaagcaaaccagaagtctcagaatggtctacagcctgtggcatcttacaaagtcgcaatacttggagctgctggagggatagggcagccattagcccttctaatcaagatgtctccattagttgcagccctgaacctctatgatatagcaaatgtcaagggagttgctgcggacctcagtcactgtaatactccgtctcaagttcaggatttcactggtgcttctgaatangaaattgtttgaaggtgtaaatgtagtgggtattcctgctggagttccaagaaagccctgtatgactcgtgatgacttctttacattcatgccacatcgtgaggaccttgntganngcgtgctgatattgtccgatgcctcatcatatatagcattccagtactcacagtccaatgttgcgagtctgaacaagg

SEQ ID NO: 198859 - DNA, 305 bp, Gossypium hirsutum
gagctgcttctcttgttgtggagtggaggtgcagctaccgtactggtggccttggtggcaatagcaacaggcaatggcaaatcattgagggcgtttggtgaattatttgtcaggcaaagctggtgccaacatgcaaaatattgctgaagaaatacaaaaagttggcatagtaaatgtttcagctcatattttctacatttagagaactagcagttgctacagacaactgctatcctgattggctgataggtgaaggtggctttgggtgggttctataaatggattcattggtgaaaccttgatca

SEQ ID NO: 198860 - DNA, 826 bp, Gossypium hirsutum
  unsure (1)..(826): unsure at all n locations
agattttaaaaacccatttttatttattttccaactcttgctttaggcttcactctctagcatagaagcaaagaggtaggaaaagaaaagcaaaggcaagatatgggttcggtttcactgaaaattggagatggaactgctagattcaagagagcaaccctttgttcttcagctgttaacattctcatgcttttctcagttattacaaccaatctctttgctttatatgccttcacgttttcaccaaaacaacacttagacaacctatttcaccatcctcacagaaacatctctctgatctctcaacatgtctctttgattataaaagagatcgattcttctcagaggaagcttgctcaaatggaaaaagagctccttggttatgacactcttgatctttcaagacccaaccttgctgctgagctcaagttgtttttgcaacatcatcagcttcctttggggaaggattccaaaactgggatcactgagatggtggcttctgtgggacattcttgtgagaaatctgctgatttattgtcccaatacatgagttacaaggtttctggaccttgtcctgatgactggagtcttgcgcaaaagctaatcttgaagggatgtgagcctttgccgaaaaggaggtgctttgccaagactgttcctaagccaggtcttacttctttacctgtttcttctatggaaacctgttaatgataaaatcgttacttggaattgtctgggttgcaanatttcaactgtttgaatantaaaaaattgattagggatgtttttggtgctttatttgactancggatatgaaactcannat

SEQ ID NO: 198861 - DNA, 533 bp, Gossypium hirsutum
tgtttttcagccattatcacccacaaaagtggggggcaatgcccctttcctcgacctccattgtcctctaaccactcaaacaccccatctttgactcctccctcttctttaactccgtcatcttaaaaaaaaaaaagtggatagttgagctgctattgagattttcttttttctccccaaccctgtcttatcttggttgctacctgcctcctgcatgaaacagaaacagagttccctttcttgcttctcactgttgcgatgaagtatatccggaccaacaacttgaaacggttattctcattaaaaagacgcagtttcgaagaaggtggtgccaaccaacatggggttttcgaagaagacaccaccaatgatagttttaagattgcttctgttgcagagcgttctcagcgaccttcctggcgaagcttctcctttgaagaaatttttgttgccaccaatgcttttagctcagagaatttggtagggaaaggagggtttgcagaggtatacaaaggagtactaaaggacgggga

SEQ ID NO: 198862 - DNA, 446 bp, Gossypium hirsutum
aaaagagagagagagaaaggatggttttctcaacggtgttaacatcagttccaaatctctaccttaccaggaaacccaagaatattcacatccaaattcgatgcctatcgtcaccatctgtatcaatttcaagtcaatcaaatttgacccaattcgatttaaaggcttactgggctaccctttatgcagaaatcactcaaaagcttgaagaagcaatcccagtgaaatacccagatcagatctatgaagctatgaggtactctgttcttgcaaagggtgctaagcgagcccctcctgttatgtgtgtggctgcctatgaaatctttggggataatcgactcgctgcttttcctactgcttgtgctcttgaaatggttcatgctgcttcactaattcatgatgaccttccttgcatggatgatgctccagaacgcagaggccaacct

SEQ ID NO: 198863 - DNA, 642 bp, Gossypium hirsutum
ctaggaaaaaacctcctcgaattttcctacacctaccgcgcattttagcaaaaatggcccggcatccgatagccgaagccaacgaggagagccccttcggcaccttaactccggacgaattctatgcccgccactcagtgagtcactcatccgagttcatcactaacgctcgcggtctcaaactcttcacccagtcttggaccccactcgatactccgatcactggaatcgtcgccgttgtccacgggttcaccggcgagtcgagctggttcctccaacttacctctgttctttttgccaaatcgggattcgccacgtgtgcgatcgatcaccagggccacggattctccgaaggccttgacggactcgatactcatattccgaacatcgaaggcgttgtcgacgattgcattcagtgctttgactctttccgtgctcgtcacgcgccggatttgcctgcctttttgtactcggaatcgcttggcggagctattgccctttatatctctctccgtcaaaaaggcgtgtgggatggcttgattctcaatggagcaatgtgcgggataagcgctaaattcaagccaccatggccgttggaacattttctgttcatagtcgccaaacttatccccacctggcgat

SEQ ID NO: 198864 - DNA, 694 bp, Gossypium hirsutum
catttttctgtagcaccccccaaaaagcttgtgcttggatatggctgaaaacccagtaaaatggctgtttctcattctagcaagctgcctgtgtttcgctttcgtcctctcggaaagcaactcattgataaagaagacctacatcgtccaaatgcacaagtctgcaatgccagcatcattctccagtcctctggaatggtactcatcgaaattaaagtcggtaatgtccgatacccagagtgaaggtgaaggagatggtgaaaataggatcatctatagctaccaaaatgcttttcatggtgttgccgctcagttaactgaagaagaagctgagaggctaaaacaagaagatggtgtagttgctatacttccagagaccaagtatgaattacacaccacaaggagtcctatgttccttggattagaaccagaagaaagtactagcatctggtctcaaaaacttgcagatcatgatgtcatagttggggtacttgacactggaatttggccggaaagtgctagctttaatgatacagggatgacaccggttcctgctcactggaaaggaacatgtgaaactggacgaggctttcaaaagtatcactgcaacaagaaaattgtgggtgcaagagtgttctaccggggatatgaaactggcactgggaaaatcaatgagaaaaacgaatattaatca

SEQ ID NO: 198865 - DNA, 429 bp, Gossypium hirsutum
ctgactttttccctcctattccttccttcttttcttttctctcctgtcatttccttccatttcctgttattttcaccatgccctttcctttcctcctcttcttttcctccatgttcctctcctttccttccctttccttctctcaacaaacccctcccaaaggatatttaattaactgcggcgcaaccaggagatcggtgatccacggccgagtatggttacccgacggtaacttcatatccgccggaacatccaaaaacctaactgtccccggcttagtccccacgctctccaccgtccggtcgtttcctctcgagaacaagaacctccggcgtaagttctgttacgtggtgcgtgtataccgtggcgcgaggtacttgattaggacgacttactattacggtggagtcaacggcttggattttgatt

SEQ ID NO: 198866 - DNA, 450 bp, Gossypium hirsutum
  unsure (1)..(450): unsure at all n locations
ctaggattcaaaatccaagatccgacattcttgtatcgcaatctctgtgacggatcaagccaagctgaaaccagcactgccgaagaaacgctactcttcactacagccgtcaacaccatgcggtggccggcggtgaaaagtggggggctgggggtggttgcgatgacatacgtggcggtagactatttacgcatcctatccccaacgtggcacgagcgtcttcaacccgtactctggtctttactcgccctcgtcgccgtcacgcgcgtccccttttaccgtcactggagcgccgagtttcgagctgccatctctttccttgcttcgatgatatttatgctctcagctcttctttttgaagcctgcacagttcgtttcgttgccgttgttcttggactcaattggcacaatggtaggcctnctcttnctgatactggtcaatggttgctc

SEQ ID NO: 198867 - DNA, 569 bp, Gossypium hirsutum
gatttatctcatccctgaagccaacgccttatgccttggttctttggaggaattatctaaagctcgaagatcagtcctcgatcctccttgggaaggattgaatttgattcctggtgatgtgctatggtcagatccatcaatgaaacctggtctttccccaaataaggtgagaggcattggcctgttatggggccctgactgcacggtggaattcttaaaaaagttcaaactaaagctaattatcaggtcgcatgaaggcccagatgcaagagaaaaaaggcctggtcttggaggaatggatgaaggatacacaatagatcatgatgtggaatcggggaaactgataactgtatttagtgctccagactacccacaatttcaggcaacagaagagagatacaataacaaaggagcatatgttgtactaaagccccctggttttgataatcctgaatttcatagttttgaagccattaccccaagacccaaggtgaatccatactatgactttgaggaggtgattgattctgatgaagacttggatttaacttcaatggggacttctgact

SEQ ID NO: 198868 - DNA, 770 bp, Gossypium hirsutum
cttcatcatctatgtttggagtttgaatacaaaaagaaagtaaggttaagccttttcattaatcctcaagcttttatttttgcccataagtctactcccagtttcccttaatcctccatgggcaaaggcggaggttgtgtcccaagcaaaaagagacaaccttcctctgccgaaggctctgccactgccactgccactaccgccaccaacaacgcacccatcgaagccgatgaagaaactcacgaaactgccagtgtagctgtgaatcctacgaatgcgcaatcagttaccgccactttaaaaatctttattgtttactactccatgtatggtcacgtggagaaactggccaagcggatgaagaaaggggtcgacggcgtggaaggggtagaagcggttctttatcgggttcccgagacgctcccggctgatgtgctggaccatatgaaggtgccgtcgaaaaaccccgaggttccagagattaaagcggcggaattggcgcaggcggatggggttctgtttgggtttccgacgaggtttgggtgtatggcggctcagatgaaggcgtttttcgattccagtggacagttttggaaggagcagactctggccgggaagccagctgggttctttgttagtactggaactcaaggaggcggccaagaggccaccgcttggacggcaataacgcagttggcacaccatggaatgctgtttgttcctattggctacacttttggagctggtatgttcaagatggattccatacg

SEQ ID NO: 198869 - DNA, 494 bp, Gossypium hirsutum
tctagatcgcgaggggccgccctttatcttatagggggctttttaaaactttacattcctttgttttacaaaaaaaaaaaaaactttacgatcctttctctatttctcgatcctaactccgggattttttttttccatttcgctctccgggaaatagttttcccggaaaagcacgagccaaagtgtctatcgggccactcggaaaaacagagtcagatagctttcttttgaagggggcaacaacaatcaaaagacgagttgctatacaatcaagtcaatgtgtggtaacgcagaagggatcaaatctcttttccgtgaaggcgcaggcctcgagtggatggatagagaagggaaaacgccgctgatatgagcgcgtttgaatccacagcttttcgatgtggccaagactttgatcgaacttggttctaacgttaacgctaatcgtccgggacgccatggggggacacccttgcaccatgcggcaaaaagaggcc

SEQ ID NO: 198870 - DNA, 535 bp, Gossypium hirsutum
gcggtagcggagaggaagtggctgagcgagtattgagccagccatctttggccgggttgcagggccccacggtatgtccagttttttgtaagcgtgatggaaaagtaactgctgactactatgccatagtcatatgcgtacctaagaaagctttatacaagtctgtacaacaattgagagcgattggaggcagcggggtgttgatatcacctttgacctacatttttgatgaagagaccccaagatggagagaacttctttcattgcttggtgtcctgtccatcttgggattgaggcatgggtggttttacttgcatttcatataaaaagctgaataatttgtaagtgccgaggtggttgaaaatttacttttgccgagagatagggaccttcaaagtgttgtcatggtggtcttgtttctcagtagtggcattcttcagccccttgtttcttttgtcaataatgtttatttttattttttgcatttctcctctttgcaaccgtatcgatggtatacaaaacatgtttccctctc

SEQ ID NO: 198871 - DNA, 595 bp, Gossypium hirsutum
ctagctgtccacatttggcgacacgtatcccaagcacgtaaccttaaacccgaagatctacacggtttttactggctgtcgccgattgtcgtaaaagggttgatccaccgatgcccgacagttacttcggaaacttgattcaagccatcttcaccgccacagcggccgggttgttattggaaaacccaccgtcattcggagcttcagtgatacaaaaagctatagaatcccacgacgctaaagccatcgatgaacgtaacaaggcatgggaagcagcgccgaagattttccagttcaaagacgccggtgtcaactgcgtagcggtcggaagctccccgaggtttaaagtttacgaagtggatttcgggtggggaaagccggtaggggtgaggagtggatccaacaacaggttcgatggaatggtgtatttgtatcaagggaagagcggtggccggagcattgacgttgaaatcaccatggaagctcaagctatggagaaattggagaaggataaagagtttttaatggaagtatagtattttgcatggaagttaggtactgtgaaaattgaaagtgtgctaattaccgttttagt

SEQ ID NO: 198872 - DNA, 775 bp, Gossypium hirsutum
cccacgcgtccggagagctatgcaagatgctttgggtagagaagctagagaaaagcacgagagattggagcgtgagaagcaacaaagggaaagggaggaggaagagagacagcaacggagatatgaattggagagggaaagggaggagaaagagagagaacaaagaaggcttgagaaagagagggaacaggaaagggccagacaagctgttcaaagggctactagagaagctcgtgaaagagcagcagctgaagctcgtgtgagagctgaaagggctgcagttgaaaaggcagctgctgaagctcgagaacgtgccgaaagggctgcagtgcagagagcacaagctgaagcccgtcaaagagcagcagctgaggcaagagaaagagctgaaagagctgctgcggaagcgagagaaagggaagcaaaagagaaggaagctcaagagaaggctgaaagagctgaagcaaagcttagagctgaaagagctgctgcagagaaggctgctgctgaggctcgagaaagagcagctgcttctgcaagggcaagccagcaaaataatgacaatgatcttgaatccttctttagtatgggttctcgaccaagcagtgctccaagaccaagaactaactcttctgatcccctgtttgatggacaaaataagggagggcctgaagtagctaggggaacatctgccggatcctcatctagcatgaggaaagcttcttcaagtgcaaatattggtgatgatctcagctctatttttggagctgctgca

SEQ ID NO: 198873 - DNA, 683 bp, Gossypium hirsutum
  unsure (1)..(683): unsure at all n locations
gcagccaaaattgttggttgttgactaaaactaaccaaaaaaaaaaaagttttcgcttcacctttttaatctgtcacgtttcattgactaatttggccgataaaatcaaacattcggctgagtgttttaaaattttgagttgggcttaatcaatctctgctttttctcggtttcagctgccatggctaccgacccttcaccccaaatcccaatgagggccagttcaaagagctcaaacaattcgatacacccagtggatgtggaaaccccacctgttaggactccaacaccaatcatttacagagaaatcaagcatttcaagaaatggataccttggttggttcctgcttttgttgttgctaacactgttatgtttatcatcaccatgtacgtcaacaattgtcccaagaattccgtttctcgcgttgctgatttcttaggcagagtctcctttcacccctttaaggagaatcctcttctgggtccttcctcccccacgctgctgaaaatgggggctttacatgtgaaggaagtatttgatggagaccaaggatggcgtctcatcacttgcaattggttacatggaggggtgtttcatttgctggcaaatatgttgagtcttttantcattggaatccggcttgaaagataattcggattcatacgggttggattgatatatt

SEQ ID NO: 198874 - DNA, 455 bp, Gossypium hirsutum
cctacgcgtccgaccgactcatctgtttttgtcaggtataatcgaatgctgcatgggaggaagactgaaagaggtcggaagcgtgatactcttacgataaaggtcctcaaaaagtatatccattacgcaaagcacaggattcagcctgagctgactgatgaggcttcagaacacattgctacagcttacgcagagctcagaaatgccagttcaaatgcaaagactggcggaacccttccaatcacagctagaaccttggaaaccattattcgtctgtcaactgctcatgcaaagttgaagttaagcagaaaggttacgaaagttgatgtcgaagctgctctgaaagttctaaattttgctatttatcataaagaattgacagagatgggggatcgtgaacaagaacggcaaagagaagaagcaaggacacacagagcggatcgtcaagggccaac

SEQ ID NO: 198875 - DNA, 470 bp, Gossypium hirsutum
cccatatctattttcggcggcaacatcggagaggcaccactaccagcgccaattcccagaccttcttcttcagttgtacattctcaaatcaaatcaaatcaaatcgtacactgaaaaaagcttaacgaaaatggtgcgtatagaagaaaagcaaggcacgatagtgcctagttcgatgccccagcaacaaaaccctctgcagcaattgcaagctaagttcaaggaagtggagaacggtttcagggcttggttatccaagcaacccttgccagtcgaggcgactgttgtaaccaccaccggcgcagctcaaggcgctgctatcggtgctttaatgggtacctctcaccaatgtttatttcgtcctctcttcaaactcctcctcaagcttccctaaatcctcaagctatggcttctttcaaacaagcccaggctctatcagggggtcctttggtacaagctcgcaactttgc

SEQ ID NO: 198876 - DNA, 479 bp, Gossypium hirsutum
  unsure (1)..(479): unsure at all n locations
cccacgcgtccggcaaaacgcaatttggtatatggtaattacacgatcttctctctctctgcaatccttacattttagtccttcgccaaaaccttacaacaacgacaatgttgcaagaaagacacggcggtggtccaccccacggcgtaatactagcagtggtcgtatttgtcgtggtattaactccgttcttatccggtgaccaaggtgaagctatcactgaagccatttccgagctattgactccactcggtctcctcctcttgcccatcttcctccttctcgcaatccagttcctttcctccgatcgtggctcctttgtctccgccgtcttctccaccggtgtacccgacaccatttacggtctaagtggctcccctgtcggcgttgccctctttcttctcctcgncttgttcttactttacaatcgtgtttccatcttcggcgggggcgatgattccgatgattgacgatttaac

SEQ ID NO: 198877 - DNA, 717 bp, Gossypium hirsutum
gtggtctttatttactcgcactctatattcactctctgtatctatacctgtctctctatctctctctgtttttctctctcccgcaaggatttaattttttaattaaaaacccattttggattctcagtgttttgcttgtcacttccaagcatcactctcatggcttccatcattgaatctggttggctgtatctgatcacgcatttcagcgacttccaactagctagtatgggaagtttccttcttcatgaaagtgttttcttcttatctgggcttccatttatatatcttgaaagagctggattgctaagcaaatacaagattcagacaaaaaacaatacccctaccgctcaagaaaaatgtatcactcgccttcttttgtatcattttagcgtcaatttaccgcttatgattgtctcgtatcccgtcttcagatgcatgggcatgagaagtagtctaccattgccatcctggaaagtggttctaactcagataatattctacttcattctggaggattttgtgttttactggggacatcgtgttttacatacaaaatggctgtacaagcatgtacacagtgtccatcatgaatatgcaacaccattcggactgacatcggaatatgctcacccagctgagatattgttccttggctttgccacaattgttggtcctgccatcaccggcccacatctgattactctctggttgtgg

SEQ ID NO: 198878 - DNA, 432 bp, Gossypium hirsutum
  unsure (1)..(432): unsure at all n locations
caacccttcctaaataaagagggaaaaacgaaatgcagggatatcactgntattacgataaaagaaactgggtatctccaaatctcaacctgaggaccgtgcacctgaagaagttaagaaatttgctaggcttgatattgacccgaattctattacgtggagaagagtgatggatgttaatgatcggttcttgaggaaaatcaccgttggccagggcccggaagagaaagggatggtgagggaaactggatttgatatttcagttgctagtgaaataatggctgttttagccctgactacgtctctcgctgatatgagagagaggctaggaaaaatggtgatcggaaatagcaaggctggtgaacctataactgctgatgatcttggtgttggaggtgctttaacagttctcatgaaggatgccattaaccc

SEQ ID NO: 198879 - DNA, 817 bp, Gossypium hirsutum
cccacgcgttcgcggacgcgtgggctagatcgcgtgcttctgcccttttatttttcgaggaaccgtggaccttcgcccaaccatgagcacctctattcgaagcaaagtttttcccagaaaattaaggaatttcgcatgtgaaaacgcgtacttcaattgtatataataatatatgtacatataatataaccctaaaatcgagattccaaaacccactccattaagctttcaaaatacaaagaaaaactcgggatttcatcttccccaaaataatggctttcaagagtttcccaaagctctccattcttgctggtgtttttaccttactattatcccaccacctatatgaagtctccgctgctaccggtggtcggatgggtggctcttcttttctcttcagagtgcccgccatctcaccggaatgatgatgattatcatcattacattcatcatgatcttcatcaccgtcaccatcatcattatcatcattcccagcctggtttcccgaggagcgccgatcaagagagtggtcctacgtcggcggctgtttcttatttaattttaaccattttcatgggagtagcttcagttattgtatacagtagcaccgtgcaaaatcgaacaagtattcttcaaattcaggttggcttgtctgcgaaagcccgttcgttgcaaaaggaactcaccgaaattgcctccacaacggacacttctactgcaaagggatggaacatcatattggaagaaaccgtatcatcattgcttcaccatccacattgctatcttcatggctattcatctgtaactcatcactgaa

SEQ ID NO: 198880 - DNA, 417 bp, Gossypium hirsutum
  unsure (1)..(417): unsure at all n locations
atcgcttacgcgtccgtccacgcgtccgcccacgcgtgcgttgtgatgcacctctttgatacccaccgtacacaaatggaaagctcagggtactaaaggctcttgtgggtggcagcatattaggcattatccgtgctttgatgggatggtccaaggcttaaaagagaaaacctatgtggctatctctgttgtcactttttattatttttttcatgttatgcaatttactgatttcaatatattttcaagcatgtaagtcagtttaaagaccacggttgtatagttttcttttttcgcttaaaatcaatgtgatgttcataatgtaggtatcatgatttgagaatcattttataggaatgaattggcactgatgcagctcaacattgtaaaaatgtgttgatttgtntatattttaat

SEQ ID NO: 198881 - DNA, 686 bp, Gossypium hirsutum
gaaaagagaagacaagaaaatggcctccgatcagaccctttttcactgctgcctcctcacactttacataatcgccttaccaacatggatcagcctttacttcctccaagccccttacggcaagcacaaccgccctggttggggtcctaccatctctccacctttggcttggttcctcatggaaagtcccaccctctggctcactttctttctctttccctccggccaacatttctacaaccctaaatcattccttcttatctccccctttctctttcactacttcaaccgcaccgtcctttaccctcttcgcctctccaggaacaccacccaaaccagggcttttccggtgagtgtagcttttatggcgtttgggtttaatcttttgaacggttatttgcaagccaggtgggtgtcgcactataaggacgactatgaaaatgaagagctgttttggtggaggtttcttgctggattgctaatttttgtatttggtatgtgggtgaatgtttgggctgataaagtgttggtgggactgaagaaacaacgtgatggtggatataacatcccaaaaggaaggctgtttgagttggtgagttgccccaactattttggggagattatggagtggtttgggtgggcgttaatgacatggtcttgggtgggttttggcttctttctctacc

SEQ ID NO: 198882 - DNA, 488 bp, Gossypium hirsutum
tttcgaaagccttttgccatcataaaaacaccctgtcgaaacctctccaactcacccaaggaaaccgaagcattacgaggagaacacaaaagaacaggagaaacattacgatccctcctaattccaataatgcctgccactaaatgttgcatcgttttcatctgtctcctcttgatgttttcttcttcttgggatgttgcaatgggtggtcggtacatcccatcgagtgttccgagcacaatgaggcctgcatccgtggattacgtgaagatgaaccctcaagtgctactgaatcacaagcacaaggtttcccatgagaaggaagtaaagggttgcatgccaaaagggtttcgccgttcatcagctccaagccgctatgttaactatcaaactcttggttcttcttgcgctacaaaagcgcactgagctgatcagaagcctttatcatgccatatacttttgtctgattgtaagagaactatgtatgt

SEQ ID NO: 198883 - DNA, 611 bp, Gossypium hirsutum
agtgaactgaaagaaactccagtactacaccctgttcgttatttggtccgcagcaccccgatccggatcgtaacaaactcattttccgccattggattcaatctctctgccctcctaatcctgcgccgccgtctgtcttcggccgaccgcttttaagttttcgccctccaggccaggaaagagtggatgctaaaggtggaatagagaatggacaaattaagggaatttgggagaaaagctttgttctatgttagggttctctccggatatgaagaacgtagaattcgaaactacagattgcagctcgagcaacgcctgcagcaggcacaagcaaggaaagcagccttaagaaagattcctgagcagactgtgttacaagaggttcgccgaatggttgaggatatgcaagcgctgaataaaaggcttgaagaaactgaagctgccattgaagagtacttcaaaccaatagacaaggaagtggagacaataatgaaaatccagcttgatggagaagagaagacaatgaaagagatgatggcaacaatgcagagacaagccttgcttgagaaaatggaagctgagaaaatcgcaaacacgcatcaaccagacat

SEQ ID NO: 198884 - DNA, 684 bp, Gossypium hirsutum
  unsure (1)..(684): unsure at all n locations
aatccaacaaccaccatcaccaaaaaagcttccttttttaatcccaaaaactccatcaaatctcaatttaaagaaataaagttacaaactttgtttctaagagaaaagtgagtgtttgagacagagatggcaacgcagtttggcaaaatctacattggaacacaaaaaacatgtgttcttcccaatgtttcaaaaacccagaatcccaaacatgttccttttgtttcattcaaatcaaatctcaatggaaagacaagttcttggggtttggttgtgaagaacaatgggaaatttgggtcaataaaggctcggtctttgaaggtttctgcttcaacagcttacagctgagaaaccatctagagcttcagagattgtgcttcaaccaattaatgaaatttcgggtactgttaagttacctgggtctaaatcattgtctaatcggatcctgctcttagctgctttatctgagggaactactgtggttgaaaatttgttgaacagtgatgatgttcatcacatgcttgttgctttggggtaactgggtctgtatgtgaaacatgacagtgaanagaaacaaccactgttgaagggtgtggtgggtcatttcccattccggaaaaggtgaaggtcaataaaccnaacttttccttgggaatggcggaaacggcatggcgaacactttac

SEQ ID NO: 198885 - DNA, 420 bp, Gossypium hirsutum
cttccactccaaaaaactgtagctatggctaacattttcctatatttttgcctcttctgtagctgaggtgtattaactcattcagctcctgaggaggctctggtcactcaactccctggcttttctggcacttttccttcaaatcactactctgggtatgtgaatgtcgatcaaaatcatggcaagaacatgttttactattttgtggaatctgaaaggaatccgtcagaggatccactggttctttggctcaatggtggacctggatgttccagctttgacggctttgtttacgagcacgggcctttcaatggtgaagcagcataggctatttgagagtttgccccaactacattctctatcccttattagttggtcccaaggtctcttaccattatttatttagattctccagtcggt

SEQ ID NO: 198886 - DNA, 1263 bp, Gossypium hirsutum
  unsure (1)..(1263): unsure at all n locations
aaaaggctatcaataggctacacagaggctgagaaggttgttgcatcttcacttgcttgcttaactgattcgaagtcatcctttggatgtggggacccaaccaccaatttccagcagtgtccacttctgaatataacttactgtcctgcatcagaagctgacctgtctcatggaaagaacttaattgttgtggtctacaattctttgggatggaaaagagaggatgtcatacgttttcctgttgttaatgaagatgttactgttcatgattctgagggaagaaaaattgaatcacagcttgttccaatagttgatgcctatgtggacctaaggaagtattatgctagggcatatttaggtagcagcccaggtgatgtacctaagtattggattgcatttacggtatctgttccacctcttggcttcagcacttacaccatctctgcctctaaaaagccaggagctggatcaaccaaatcatctatatacaaatttcagaagggtgagaagccagctattgaagttggtgaaggaaatttaacgcttactatttcagctccttcagggaagatcataaattatgtcaacaacagaaacttggttgaggaatcagtggaacaatcatttagctattacactggatataatggagttaacgacaaagcaccccagaactctggggcatatgtcttccgtccaaatggcacataccacataaaagctgaacagccctcattgactgttattcaaggaccattgataaatgaggtgcatcagcagatcaatccgtggatatttcagactactagactttacaaagaaaaggagcatgttgaagttgagttcattgttgggcctgtgccaattgatgatggatttggaaaagaaatancaactcagataactacttctctggaaaacagcaaaacattctacactgattctaatggacgtgattttattaaacggattcgtgattttaggacagactgggacctgaaagtaaaccaaccagtcgctggaaattattacccaattaatttaggaatttacattcgtgatagtaagaaagaattctcggtcctggtaaatcgatctctaggaggatctancatagtggatggacaaatagagttgatgctccacaggaggctgctccttgatgactctagaggtgttgatgaggctctaaatgaaacagtctgcgttcttgatgattgcagaggactanctgtcccaggaaaatattattacagaattgac

SEQ ID NO: 198887 - DNA, 597 bp, Gossypium hirsutum
  unsure (1)..(597): unsure at all n locations
cggcaatgaagaggccagtaagcgatttgctgacattaacaacgcttacgaggtgttgtcggatagcgaaaagaggggcatatatgataggtatggtgaggagggcctgaancagcatgctgccagcggaagcagaggaggaatgggggtcaatattcaggacattttcagctcgttttttggcggaggctcggtagaagaggaagagagaatggtgaagggcgatgatgtaagtgttgaattggatgcaacacttgaagatttgtacatgggaggtactcttaaggtttggagggagaaaaacatcttaaaaccagctccaggtaaacgccgctgtaactgcagaaatgaggtctatcataagcaaattggtccagggatgttccaacagatgactgaacaggtttgcgagcagtgccaaaatgtgaaatatgaacgagagggatactttgtcacagttgatattgagaaaggaatgcaagatggacaagaggtggtcttttatgaagatggtgagcctattatagatggagaacctggagatttgaagttccggtttcattcggcaccccatgaccgattcaggagggaaggccc

SEQ ID NO: 198888 - DNA, 589 bp, Gossypium hirsutum
tcccacgcgtccgctcttctcttcgtaatctcccaaatatctttcctttgtcttatcgaatatgatgcaacaaccagcagctggaggcgtggctccgccaccttccatggcggccgatcagtctcaggctcatcagtaccagcaacaaccgcagtcgcagccctggatgatgatgtctcaacaacagcagggtggtcagccggttcctccacctaccggttggacgccgcaacctgttcctccgcccactcagatgcagcagtactccgccggttctgctgctgctggctccggtgagattcgatctctttggatcggtgatcttcagccgtggatggatgagaattacctcatcaatatctttgctcaaactggagaggtggtttcggctaaggtgattaggaataagcgatctgctttaccggaaggatatgggtttatcgaatttgtgtcccgtgtggcagctgagagggttttgcagtcttataacgggctgccaatgccaaacgctgagcagaattttaggttgaattgggcatcacttggatctggggaaaagaggcaagaagagggtcctgagtacacaatc

SEQ ID NO: 198889 - DNA, 441 bp, Gossypium hirsutum
ctcattttaactataaatactcgtttctcttgccattttcgtttccccctagaaaaaacagatggcgaaactgaaatctctaaggctggtattcttctcccatctctttctggtgggcctcttccgccgccgtattccctgtcttacacgacctacgtcttgccgggtcgagttttccgtcggtgcaagcaaagaaattgatgcgggagttgaatttgtttcctaaagaggaagttaacctggtcgatcgaggccgagtttccttaccccaggattcgaagctggtaggaaaagcggttcaagttccccgctttggaagcccttggtggcgtttctgtcgaccgatttgggtcatcatgctggctattacaagcttcctaattcttatgatgccagaatgtgctatttcttctttgaatcacgcagtaacaaagaggaccc

SEQ ID NO: 198890 - DNA, 560 bp, Gossypium hirsutum
  unsure (1)..(560): unsure at all n locations
gcatgancgtaacgatcattaacaaaatatggttcagcttcaacaagctagctcaacgttgcacttctttcagttagatctttcttctcgcttctgattcaaatcagatcttaagaaaaccgtgaaccgcatcgatctgatctgcaaaattactagggatttcgtcgggcaaaaaatataaacgaaagaagaaatggcgggggcagcatctgcactatttcttctagatataaagggccgtgttctggtgtggcgtgactaccgtggcgacgtctccgctgctcaagctgaacgcttcttcaccaaactcatcgaaaaagagggagatccgcagtcgcaagatccagtggtgtatgataatggagttacgtacatgtttatacaacacagcaacgtgtacttgatgactgcaacaaggcagaattgctatgctgccagtcttcttttcttccttcaccgtgtagttgatgtttttaagcattatttcgaggaattagaagaggaatcgctaagggataactttgtagaagtgtatgagttacttgatgagattatggatt

SEQ ID NO: 198891 - DNA, 426 bp, Gossypium hirsutum
ccaagctctctctatccccgtctatacacctatattattaccctctctacactctcttccatcgctgcccctacccagtacttgagagagatgggtctctcaagctcctttccttcatggattttttcttctgtattctgagctaagcaaagacaagaagatggcaatacagcaatatgaacagcagcaacaacaacaagagaatcacccttccttcttgctagatgctctctactgtgaggaagaagcggatgcaggggaagttttagaggaagagagttcttgtgtgggctgttacaatggcggaaaccctgcatttttcccactgttgttgttagtgcaggatttgttttgggtagcccttatttgtttcttttattttttatcttataataatattattacatttatctaactattttattt

SEQ ID NO: 198892 - DNA, 633 bp, Gossypium hirsutum
  unsure (1)..(633): unsure at all n locations
agcctttctcaacctgttcttctattttatacctgaaaaactcgattagtctctcatttttgtttttaataggtaagaggtaagcctaagctctcgtctcttctacgtagggtttattgtttatcctcctcctgtcaattgctttgattctttcccaaaatttcatcactcatgctttttagtgtcttctgttgactgtgcggggtattggcatggagatacagacatgtgggtaaccgattgattcgctgttagagaaggtgctttggatgaatatattatcctctgattatttcaaagagctttacccgactcaagacttaccatgaagtcattgatgaaatttacaatcaagttgatcatgtcgaaccgtggatgactgggaattgtcgtggtccttctactgcattctgccttctttacaagttttttaccatgaaacctactggcaagcaaatgcacgggctactgtagcaccctgattctccttacattagagcagagttgagaaggaaagagaatgcaatagcacgacgtaggttctttttaattttatctgatgagtccgagttatcattaccgttngatttgactgagtcttgcatgagtcctaaacatctttctttttctccg

SEQ ID NO: 198893 - DNA, 740 bp, Gossypium hirsutum
tgagcttagcctaagctctcctctcttcgacggagggggtattgtttatcctcctcctgtcaattgctttgattccttcccaaaatttcatcactctcacgctttgttgagtgtgcggggtattgtcatggagatacagacatgtggtaaaccgattgattcgctgttagagaaggtgctttgtatgaatatattatcctctgattatttcaaagagctttaccgactaaagacttaccatgaagtcattgatgaaatttacaatcaagttgatcatgtcgaaccgtggatgactgggaattgacgaggtccttctactgcattctgccttctttacaagttttttaccatgaaacttactgtcaagcaaatgcatgggctactgaagcaccctgattctccttacattagagcaattggattcctctacttgagatatgctgccgatccgaagactttatggagttggtttgaaccatacatcaaagatgaagaggaattctcccctggatctagtggacgaatgaccacaatgggcgtgtacgtgcgtgatttacttcttggacagtactattttgatactcttttcccccgaatccctgttcctgtgttgcggcaggtgacattcaatcttgagaagatgaagcttgctacttaaccttcagggtcaactggggataataacccgcatggatctgatgacacttgttggccgccaaccttttgtaaagcaacacttt

SEQ ID NO: 198894 - DNA, 636 bp, Gossypium hirsutum
cggccgcgtcgacctgaaactctcactgaaaaccgggggagaaaaaataaaaataaaaatttaaaaaaacaaaaaaaaaagagagtacttggcagtgcagtcatttagtctaaagggaaacgactgagattgcccagattcaaagctttttcccccaaaatatcgaatgcaacttcgattttcttcttcatcaaaatttcaatctttattttttgttttgcttttttttttccattgatgggttgctagatttttattaacctcacataaatactctatctttatccggacccaaatctttacaatcttttttttttttttcacatataatctttagttttatttgtttttttctttcggggggatgatggcatcttcatcactggcaagtcctttaatgcacttggctggtggcggcttgtatgtcggtaacgtacggtaaagaccagtcccggtctccattgttcaactcatcagcctccgcttcttcgaacaggctcggccgttgggctcgtaataaaaggaaggctctcctttctcaatgctgtggtggcggcgcaacccctaacaaagacgtgggcttgatttcttccttccgtggatccaccattcaaggcttgatggcttcttgcttgc

SEQ ID NO: 198895 - DNA, 960 bp, Gossypium hirsutum
  unsure (1)..(960): unsure at all n locations
ccaggactcttcgccaagccatggctcggtgggtcactcgagccatcaagttccggttctgccccatccttgaagaagctcaagccaaaagtgagcctgttgatctacaagacgtattgcttcggctcacgtttgataacatttgcggattagcttttggaaaagacccggaaacatgcgctcaacgactccccgagaacggcttcgcgtctgcgtttgaccgagccaccgaagcatctcttcaaaggtttattttgccagaggttttatggaagcttaagaaatggcttcggcttggattagaagccagtctgagccgaagccttgtccacatgaatgagtatttatccgacgtaatcgttacacgtaagcaagaactgctgagtcagcagaaagatgggaacccacacgacgatttgctctcaagattcatgaggaaaaaagaatcctactcggaggaatttctccaacacgttgcacttaattttattctagcgggacgtgacacttcatccgttgctctttgttggtttttttggctcctcactcaacatccaattattgaagataaaattttacatgaaatttgcactgtcctggtcgaaacacgtggtattgacacgacaacatggttcgatgagcctttaggatttgaagaggttgatcgattgatatatatgaaagcagcattatctgaaaccttaaggctatacccgtcggtgccggaggattcaaagcatgtcgtggtggacgacgtgtttccggacggaacgtttgtgccancaggttcgtcggtgacatattcaatatattcggtggggagaatgaggtcgatttggggtgatgattgcctccagttccgtcccgagaggtggttaacggctgacggcaaggaattcatcatgcacgactcatacaaattcgtggcattcaatgctgggccaagaatatgtttgggat

SEQ ID NO: 198896 - DNA, 374 bp, Gossypium hirsutum
cggacgcgtgggttgcagaggccagcgttttacttgtgacatgcattgtcctgttttcaggacatggcgtctttgctttctcctatgacgaggctgcaacaatggagtgcttggcagcgcccaagagagctcaatatggtggagggatgattgggttcaatcaaagaacaaatggatccacattgtcgagtgaattaggagtttcaaatgatgggttacacaatacaacactctcattgaagactgtaaagctcgagaaaggaaatttatatacattttcagctttgggttcaaaatcagcaatggggagtgaaaagtgagacctgtagctgtgtgcattcaaggcttctaatggtgaattggtacatggaggt

SEQ ID NO: 198897 - DNA, 541 bp, Gossypium hirsutum
cgaacccttggccggacccgtgggttgggctaaaaaaacctaacttccctgagcttaaaccctcgttggctgtcaaacccatagttgtttctttgaattgtagaaaaaaaacagcctttggtactttttgggggctcaaaaccctaacattccctgtgaaacccatagcagttttccttgcattgaagaagaaaaagaacagcctttggtactagaaaccagtgctgcaatatggaatcatcacaagctcggcgggttttaacgaagctgatgaaggttttaactttgaggccccatcaccccgtttcaagggcagcaccttcgtcatgtgtcttgcaaacgcgccttttcagcgatataaaacgacccatcactgaaaatgaatccatcaggagcaatgaggatgatgatggggctaccgaacatatttccaaacgacccttaaggggtcgaaggcctttcaatccggcttttaaagaaaccgaaggggccagctttgatcggaatcggtcctcggttcaatcccccaattgccaaattt

SEQ ID NO: 198898 - DNA, 612 bp, Gossypium hirsutum
gtcgtttcgttcaaagactacgaaagaaagccgcatctcttcacaatgtaagtttagaacaagggacagtaacatctctacttgaagaaaatggtattgtcaaaggagtgcactataaagataagagtggtcaattgctaacagcttatgctcctctcaccatcgtctgtgatggttgtttctcgaatttgagacgctctctctgccattctaaggtggatatcccttcttattttgttggttttatcttgacgaactgtaaacttccaaaagaaaaatatggagtttttatattagcagatccttcacctatcctattttatcccattagtagcacagaaattcgttgcttggtggatgttcctaggcaaaatctaccctcttgtttccaatggggaaatggctcattacttggaaactttggtggctcccaaggttcttcctgaattatacaattcctttatatctgcaatagagaagaaggacaacataagaataatgccgaacaaaatcatggctggtgctccacacctcactcctggtgcttttttgatcggcgatgcattcaatatgcggcatgctataactggagggggaatgactgttgcttta

SEQ ID NO: 198899 - DNA, 484 bp, Gossypium hirsutum
  unsure (1)..(484): unsure at all n locations
ggtaaaaccattttcaaactttgaaacccagaagcaatctataatcaaaaccaaaaacccaaaatcatacagcagaaaaaaaaattggtaacctctttcatctgccccccttttcaacggcagcagcatataagggtcgtatctttcccagaggaaagcctccattgtttctttgtagagcaagaaattggaggcgaatcgtctgggattttaatcttttggggcttttttttttgtttttttggtagaagatgataagatggtggatttcttcttttcaattagctgagctgtttattagctcggtggttcatcttttatatgggttttatgtgtacagcactgctggtgctgcggacctttcacaggctttgagtgaatgtgttttcaagtctaatgtaagtttagaggtgaaaaagcaagatcccagtaagtctactgttgatgatctgcctnctattgttttggttcatggcatttttgg

SEQ ID NO: 198900 - DNA, 497 bp, Gossypium hirsutum
cagcaacactactaattttgagtatataaagtagagtgatctcgttttgtcgcgacaaggtggtcaggagagcaaaactgatcctccccggacactgacaaatagcaccagaaatggctgttggaggttttggcggcgtcgatggacctgtcagcagcttcaatggcaagatcacagcttcggtggtgatcacctgcattgttgctgcttcaagcggcctcatatttggttatgacattggaatttcaggaggtgtgacaactatgcaaccatttctccagaaatttttcccatcagttttaagaaaagcagcagaggctaaaaccaacatctattgcgtgtatgatagccaagttttaacatcctttacttcttcactgtacattgctggtttagctgcctcactggttgctagccgcctcagtgcggcaattggtcgacgaaacacaatggtcttaggtggtctcaccttccttgctggtgctgccatcaatggc

SEQ ID NO: 198901 - DNA, 509 bp, Gossypium hirsutum
aaaaaaaaaatccatccatcatgtctccaatttatatctagctttatatccttacttatcatcggttccatgggcgttgccgtcgccggcgccggcaagacgcacgtcatcgatttccgatggcctaacctctacccagaaggcatggcctgggacccattagcccagcacttcatcgtcggttccctaaaccaccgtacaatccactccgtgtccgacgcaggcgttgtcgaaactctgatctccgaccccgccctccctgaaaacgttactgttttaggtctgacggtcgatttcactaaaaaccgccttctcgcttgcctccactctgtttcccctctccctccattcaacgccctcgtcgcctacgacctccgcacccgccgacgactttttctctccctcctcccctccgaccccgattccctcatcgcctcaatcggccgcgggcgtgacgttgcgaacgacgttgccgtcgacttcaagggaaacgcttacgtcaccaactc

SEQ ID NO: 198902 - DNA, 518 bp, Gossypium hirsutum
cctactcgtccgcatcaaagcaaatagagaagaatttagaaagcaaagatgattagactcgtcaatgtttctatttgtgttctctttatttctgttactggcatcctagtaaaagccgataatgcaccttctccatcgccaaagacaactcctgtgtctccggcgaaagctcccaccacttcttcaagtcctccaatcacatcgccttctaaatctccttcatcatcacctccgtcggcaactcctgcgagttccccatcgataacatcgcccccgcctgcaacaactcccactgctatgcccacaccttctcaatctcctactgccactccgcctgcttcttctagccccccggctcaatccccagcgactccatcaccagcggcaagttctcctccgtccatgactccagtcggtgctccacctgttgcggaaggtccggttggaactcccgagtcttctgccaatattccttctagttcagcgacgccagcggagagtcctgcgatttcccatcg

SEQ ID NO: 198903 - DNA, 688 bp, Gossypium hirsutum
acatacgcttgtcaattggttatgcagactttgatatgaaaataaatggaattcttagcattatcctgcaagatgagggagattcattcgccaagagggctgaaatgtactatcaaaagagacctcagctcatccaaatggttgaagacttgcacaaatcctaccgctccttagctgataagtacgagcagctgagatcccaactcaaccacggttctcatccaacactattatcgtcgttgtcaagtcctgtcaaccaagtccaaggatatgttgagttgaatgctgaagatcctgatcttgagactgaattcgacgatgatgtctcgaaccatgtgtctagcaaggagtcaaagatgaaggcagaggataaaattaggcagggagagaaaaagaaaaggagcaatggcattggaatgcagcggaatacaagtgatggttatgaagcggccatgttggaaaatgagaagctgtggaatgaactaaggttcaaggtgtcggaactggtaaaagataacttaagtcaccacgctgagttgataaggagaaacgatgagaagagagaaatcttttgagatctttgttccccgatgaagatggatgagagcaaggccctgactgccaacaacactcggtctccagtatctagactaaagaggctattccttggggaagtttattgaaatct

SEQ ID NO: 198904 - DNA, 452 bp, Gossypium hirsutum
atcgactctaaatttcatctctcaacatctttctttcatatggcttcttttggtgttgcttgttttttcattgttttgatcgtggcatttggtgtatcaaactcggaagcatgtactcatgattcggagtgtcaattgaactgtgatcatctcggcctttgtgacttaaaaaccaataaatgtagttgcttgccggtgtctgagccattaccctttgatggtgtaccgatggcgaatgctaaatgcagcacggatgacgattgcaaggatgcttgtccaccaaattgcacacctaaatgctttcattgcttttgcttatgctattgtagtgcttgaaaaatatattggttttcattcaaaggacttcgaatttaagcctttcaataatttgtactaagaaattggtacataaaatgaatgaatagataaaggtgttgtgagaataatttttt

SEQ ID NO: 198905 - DNA, 636 bp, Gossypium hirsutum
ctttgttagaggaagaaaagcgtcttttggcagccgccaagggatcatcgttcgaatcatttcattgctcactctcatcgatcaaaaatttatttttaaaaccccactcccatcctttaaatcctaacactagagaagacaactgaaacgcaaagcagagatccccctaaatttgctttcttctcaaagttttttctttcatctctgcttcatggctcagtctactgtatcccaggtttctgtagctgttcccgttggaaacgacatttctctgaggagatctgtagctaacaggaacattataagctttggtaacaagtcatgggcttccaccttggcttttgatttgaaatcacgaaatgcacagaagaacaaaccgtacatagtatgcctgtcagtgcaacaagccagcaaatccaagattgcagtttcacctttggagttggaaattgcaaaagagcccccactaaatacattcaagcccaaggagccttacacagctaccatcgtttctgttgagagacttgtcggtccaaaagctccaggcgagacttgtcatattgtcattgatcatggcggtaatgttccatactgggaagggcagagctatggtgatatccctcctggtgaaaattc

SEQ ID NO: 198906 - DNA, 633 bp, Gossypium hirsutum
  unsure (1)..(633): unsure at all n locations
cgcttccgcttnctttccaattcctttcctcaaagccttaatcatcaaggaaagggctcctccctttctctccgacactatcatctccttctctgcttccctttcttcttcttcttctcttcctcgtcttgccccttcaattcctttctctgcaaattcgttccaagtcaaccccaagacgaatcctgacctgtccgttccaagatcagggagatcttcatgcctgccctcagttctaccatgaccgagggcaagatcgtctcttgggttaaatccgaaggtgatgtactctccaaaggtgaaagcgtcgtcgttgtcgaatccgacaaggctgacatggatgtcgagactttctatgacggcattctcgctgctatagttgttggggaaggcgaaactgctcttgttggtgctgccattggtgttctcgctgagactgaagatganattgctgaggctaaagccaaagctgcctcaaaatcaggtgcttcaaccccatctgctccacctcctgctccaactccagctgctgcctcaactccagctcctcccaaatcgacgcctgctcccgcggctccaacagttgcggaagggccgacaaaaactgttgccacaccatatgccaagaagtta

SEQ ID NO: 198907 - DNA, 446 bp, Gossypium hirsutum
gttcccctttcttcttcttcctccataatcaaaagctctctctcaaattttttaaaaaaacttaaaaggctcccttttttttaaagaaagatttaaatggccgtcgattccgcaatctcgtctcctttgggtccgccggcatgcgagaaagatgcaaaagctttgcgattcatcgaggaaatgactcggaacgccgacccggttcaagaacgagttttgtccgatatcttaactcaaaactcccaaaccgagtaccttcgaaggttcaaactcaatggggcaagcgatcgtgactcgttcaaatccaaacttccggtcattacttacgaagaccttcagcctgaaatccaacgtatcgctaatggcgaccgttccgccattttatcagctcacccaatctcagaattcctcaccagctcccggactttagctggtgagaggaaact

SEQ ID NO: 198908 - DNA, 512 bp, Gossypium hirsutum
cccacgcgtccgcaaaatcatccatgggaatttcgttgcctccttactatcttactccttttctcctccttttcatctttttcaacaatgtcgaccagcgaaacctcgttttcgccgacgatgccctgattgaaacccaatgtcacaatgctgaagtccccgaaacctgcataaaatgcataaaatccgatcctcgaagtcaatctgccgataaagtaggcattgcagccatcatcataacttgtctaagcaacaaagccacgaccttgataaacaacatgacgactcttgcttcgggcgctcgcgacaagtacttgaaattggctcttcgaggttgcgggaaagggttttactatgcaaaaaccaatctgactgttgcgacgaaccgattgaaggggaaagaatttgatcaaacgaatcttctggtgaaacaagcgctcgaagggagaagttgtttgtaagaatgaatgtgcggctttacggtttaactttccaaatagtgtcacgtttgg

SEQ ID NO: 198909 - DNA, 500 bp, Gossypium hirsutum
ttcctctcgtccgaatgagcctcttaaaacttggggtctactatcaacgcttccatttgcttcgctttattccaccacagtcttccaatgtctccccatctaccttttgggtgcaaaatctgaccaacaataacaccaccaaccactcatcgttatcttgtactcccaggattaatcctgtaatagccaaggcactgcgtactgaagcagctgccacagcacagcccataaaaatggtgaaagctatcagggttcatcaacttggtggacctcaggtccttaaatgggaggatgtggaacttggggaacccaaagagggtgagatacgtattaaaaacaaagctattggactgaatttcatcgatatctattttcggaaaggagtttataaggctgctaccatgcccttcactccaggtatggaagcctgtggagaagtgactgctgggggaccctgactgactggcaagaaagttggagatatcgtagcttatgctggt

SEQ ID NO: 198910 - DNA, 510 bp, Gossypium hirsutum
agaacgaggcgcttaggttgtatgcggcccatgtagctcaacttcgcaataaaggattgcctacgattccgactacgttaaagacagagaaggcatgcaatcccttccttcggacgtcaaggacagaaatccggcaggcattagatattccagccaccatgaatgaagcagaagccttgggtgtcatccgtcgagcaaaggacaatttctaggattacttttggggttaatacaaaaattggtccccgaatgcaatccggtaaatccgatccctcaacatatattattttagctacgaatgagttagttctgttacataaaatactgatgtgacataattgatcaaatattaaattgtgattttagtattagttgatcatgtcacgttagtattttatgttttgtttttaagtgtatagtttagggatcaatttacggaataccccttagttatactcggttcctctttgtgtataggttatgtaataatgtttagcatgtcaatacact

SEQ ID NO: 198911 - DNA, 512 bp, Gossypium hirsutum
gacccacgcgtccgcccacgcgtccgcccacgcgtccgaaaaaacaaaagaaatccaatcaaactatcagtgcttcacactacacttcaatctccaaagaccaaatcaaagcgaagctcaaaaatgaggtatggcatttcaaggaggaagcgagctttgctacgttgcttattcattctcttcgcagcttttactttcattacccggctcatgctcactctaagatccctcgatgccccgcccaccaccactaccaccacttccaacggagccgtgctggatttgcctgcccagctcgagctcctggacctcaaaagggtcgcctttttgtcttcggccgagacgcccattcaagctgggcccaagaccaagaactgtgcaaccgtggaagaaatgggcaaggtttttagggggaggattttgaaggacagtcttagagttcgaaagcttattcaaactcacttttctatcaacggtaatcgtatttctcttttgagtcccttttcaaagaa

SEQ ID NO: 198912 - DNA, 659 bp, Gossypium hirsutum
cggacgcgtgggtccaactctaatggctctcaaattttagggcaaatttcatctcggtatctctcagccatcctccatcccaatcccaaccccatcatctcttctttctttcccatgcctcgattcttcaatcctttcctcttatccttatttttctgtgttttagggttagggtttggcgttgatttcggtcaagctttcaaagtcccctttagggtcaatgatgttctcccggtgcttccgcgccaggtatcttggccggtcttgaacactcttcattccgccgttgacttgttgccggcttttgtcggatccgtgaccccgaacaatggctcaattgattggaaaggagcttgctttcatggaaacgaggctcgtctcgagttcaccagtagcgatcgcgacgattcgggattgggcggtggtgtgcttcacctcacgacatctgaagcgcacagctggacctgtatggatctttatgtctttgcaacaccttataggattacttgggattactacttttctgctcgagagcacacattgaaatttgattcttgggaagaagctgctgaattggaatatgtaaggcagcatggactctcagtatttctaatgccatctggaatgcttggcacattgctttctttagttgatgtatc

SEQ ID NO: 198913 - DNA, 760 bp, Gossypium hirsutum
gttccaaccatggataacagagtatcttacttctcagcatcaatcctcacgacacctggaagaaacttcagttagagctcatgacagggttcaagcttcaacaacaaaagccttgctggagaaattttcgaaacttgatagagaagcaggcattggaatatcaagctttatgagtgattctgaatttagtggaaatgtgagggaagcagtttcattatcgagaaatgccccacctggccctcctccattgtgttcaatatgtcagcataaggcccctgtatttgggaaaccgccgaggtggtttacctatgctgaattggagcttgcaactggtggattttcacaagctaatttcttggctgagggtgggtttggatccgttcatagaggacttctcccagatggtcaggcaattgcagtgaagcggacacaaattggctagttctcaaggagatcttgagttttgctcagaggtggaagtcctgagctgtgctcagcacaggaatgttgttatgctgattgggttctgtattgaggatagaaggcgactgctggtttatgagtacatatgcaatggatccctagattctcatctatatgggcgtcatcggtaacctttagaatggtctgcacggcaaaagattgcagttggtgcctctataggtctgagatacctttcatgaagaatgcacagtttgctgcattgttcaccgtgacatgcggtcgaacaacattttcattcacccttgatttttaacct

SEQ ID NO: 198914 - DNA, 509 bp, Gossypium hirsutum
aaaaaagttaaaaatccgaccaaaaatgaagaagaaaaagttgaaaaattggaaaagggttgttgttttttctttcttcttttctttgagcaaagctttctttctttcactttttgtttaaattgctttggtattattatataaatcacttcacattttccaaggatttgcagtctcctaagtttattttgggctctagaacaactgtcaacaacaagcaaatgccaatcacattccattgtgcaaagaagtgtacctttttcatacagaaggacaatactgggaatccccaacctctcgtttccattttttgttgcttcaatgttcacttccaagatggcttccttttcaccctgtcattctcctcatgtgccccttggcttcagtttcaagagctaccttcaatcttagtctccctcatcaacaccctcaccctgaatccggtgttcttgatgttcaatggagcttaaatgcatctttatctagaagacaaacattgtctgaaacac

SEQ ID NO: 198915 - DNA, 550 bp, Gossypium hirsutum
  unsure (1)..(550): unsure at all n locations
taaaaattatttttccctttctctctcaaaatcactccatcacttgacttacanagagaaagttttgagaaacgcaaaagggaagttcatttttttttattttggttttaaaacttgctaaaagaaaagggttaaaaaaaagaagaatttttggcttggttttttctgttctttttctttggatatatgtttttggtggctgccttttttgggcgtgcttttgaaatggaggggagtgggatcaaagggaaggatttgattgaggagatttttgggcggtaatggtgggatttgagagctagggtttttggttttttggttttttgctgtaatgttgtgctgttggggtttctgtattgtttggatctaaggatatttagattgagagcttaaaaaaatttaaattaaaaagttgcagcttttagtttncnctttcttttgtcaaatggaaggaagcaaaaaggttaaatctttggttttggtttgtttgatcttggtgctactgaattcattctggcttatttctgctaatgttgaatggtgttcattg

SEQ ID NO: 198916 - DNA, 795 bp, Gossypium hirsutum
atcaaaagatgatgcttggagaagctggtcaactcaatccgacggtccacgttccgccttggccttatgtaagcgatgatctaacggcggaggacaacttcagtgataacggcaaccccttttacctccaggaagcgttagcagcgctgcaatgttacttgccgtccgacgaactgggtttcgagtcggattccgagattttgagcctttacaatccgggttctccagtcgattcttactcgtgcgatcattttcggatgttcgagttcaaagtccggcggtgcgggcgtggccggtcgcatgattggaccgagtgtccatacgctcatcccggcgagaaagctcgaccggagggacccgaggaagtttcattattccggtacggcttgctccgatttcaggaaagggaactgtcggaaaggagactcttgcgagttcgctcatggagtttttgagtgctggctacaccctgctcgttaccgaaccttgccgtgtaaagacgggtcgggttgtcggcgtcgggtctgtttcttcgctcatactccggaccagcttagggttgtcaactttgctgattcttacgatagttcaccgccttgtacgaaagcaatgccgctttccggttctccacgggccgagtcttcgccgacggtttcacctatgtgtcaattccctactatgaacactatggtggcttctttgaggcacttgcaactcggtaaagtcaagtctttgccttcttctggttgcgggttctccaagagggtcactgatccgacccattttatctagcct

SEQ ID NO: 198917 - DNA, 394 bp, Gossypium hirsutum
ttcacgcgtccgctagaaatccacctccagcctctccctccctaacatcaaactgatctctgcgagcgaagtcacctccagcctctccctcctcaaaacacgcttttaagtttctctcttccgccaccgtcttcttcatcatcttcccctctttctttattttttttaatttcaacacctaacatacatgtttcatttcgcagaagccatctttatctgtttctcatgtgactctgaagcctcattctttccttcaacgtacccaagacaatactgctgatgttttggaatttaagttgaaggagctctcagccgtccattcgaaatccccttccgttcatcaattctctgtcgccttcaccaagacactgacccctctctttcaaattctaaa

SEQ ID NO: 198918 - DNA, 568 bp, Gossypium hirsutum
gaaaaaaagtgggggaagagagggttcattgttgtggtagggtttttcactgagaagaaactagaaacatagaaaccctttgcagatttgtttgttttcaacagttttaagctctaatactaacgaaatcgtaaatcatgcacgccccggttctcgttctaaaggattcgttgaaacgggagtctgggacgaaggttcaccatgctaacatccaagcctccaaggctgttgctgacattattcgaacaacattgggtcctcgatccatgttgaaaatgctccttgatgcttctggaggtattgttgttactaatgatggaaatgctatcctacgcgagttagatcttgcacatccagcagcaaagtcaatgattgaattgagccgtacccaagatgaagaagttggagatggaacaacatctgtcattgttcttgctggtgagatgcttcatgttgcagaaacctttattgagaaaaattatcatcctacggttatttgtcgagcatacaataaggctttggaggatgctattgccgtgcttgacaagattgcaatgtctattgatgt

SEQ ID NO: 198919 - DNA, 429 bp, Gossypium hirsutum
ccataatcaaccaagatgctctcctctagatctgcaacaacacacgcaaaatgaaaggcgggactttgaacaacagcttggagattcaacagaaccttctccaaagttcaaagcaaaacttcagcgaccttgagtcctctgatcccaggcgaaccgatctttcctcaccatcgtctgaaccagatcaggtacatcgttaacccaactcccacagatccctcttctccatccctccattgtcaggacatgcgctgcttcatttacctcacgaggcacaaagatatagagcgtcaccttccacaaccagccgctgaaagcacatcttacgcgcgaatactaaagctctctcacaagcccgtgcctttgccacaaaagaatcatctacatttttgaataagataagtttcgacccaacaacttcttaattgt

SEQ ID NO: 198920 - DNA, 891 bp, Gossypium hirsutum
  unsure (1)..(891): unsure at all n locations
gctaaaagtagtgttcttagttgcgtaaccttcttctctaggaatattttaccattcctgtactttttttttttatctttataggaactactcttttttctttatgggtgggtaggatttcaaaagggttgtaacattagttgttgatgcgttgatggaacaaggatcaatcaatggaggctactaatccgaatccgagttcaatgagcggcgtcgctgctgcttccgccgccgagcttctatgctgtgcgaacgcgagagcactgttggattccgtcgacgcatttctattcgattgcgatggtgttatttggaaaggcgacaagctgatcgatggagtcccacagacgttagatatgcttcgatccaaggggaagaaactggtattcgtgaccaacaactctaccaagtccagaatccaatatgctaacaagtttcagtctcttggactttctgtcaatcaggatgagatattttcgtcttcttttgctgctgctatgtacttgaaggtcaaccagtttcctcctcacaagaaggtttatgtcatatgcggggaaggcatatgacaagagttgcaacttgctggatttacagctcttggtggcccanaagatgcaaaaaaagggctcaatggaaatcaaatggctctttgagcatggataaaagtttggacaagtggtggtggatanaatcagatattactattccaaactcagtattgcgacctttgattcgtgaaaacccgttgcttttaatggttcaacgctataatttgacccttacgacttcagaatgcctgtcggaacatggtgtgccgtgggtaaggacagacccctgtatggaacttaaccttgaggctttatgggaataattactctctaagggctgggg

SEQ ID NO: 198921 - DNA, 527 bp, Gossypium hirsutum
cccacgcgtccgctcctcctcctcctccagtgcggcggtgcctcacccaagccctcttttgccttcagatttccggcggaccagtaatttaaataaagtggggaagaaatgagtgctttcaataagggcaaagcaagtgttcctgttgcgtggagcccgaacctctatataacccttgtgaggggaattcctggcacacgaaggcttcataggcgcaccttagaggcactaaggttacggaaatgtaaccgcactgtcatgcgttggaacactcccaccgtccggggaatgcttcagcaggtgaaaaggttggttggggttgagacagaagaaatgttcaaggcacgcaaagagaacgaagccaaacaccgagctctacgtccccctatcggcattaatcatctcctggcttctgcaactgactccactaagtagccttataaagacgacaatagtaagtttttgaacctctattttagtagggattgttcgggttttttcgacataatttctctatgtttgaagaa

SEQ ID NO: 198922 - DNA, 466 bp, Gossypium hirsutum
ctcgaatttgacgcgattttcttttcagaaaaggaaaatcctttttccgcatgccataaatatgcagcgcgattcagattttaatgcttcgagaaaacagaggaacaacaacaacaaaagagaatataacgcgctttttagttcgctgttgactgaaaaactccgttcattacttcgatccgatcattattctcagacgaagttcaaattttctgacgtctactttgcaggataatgatgttttctccaattagcacagctttggatttgtgaaggttttttttatgaggaacaccgatttgtagaaatgtctgaagcggagtgccctttgttaaaccaaatgaggatgccagagattcagttgggtgctcatactgtaaggtctcatggggttaaagttgcaaggactcacatgcatgactggatcattcttttgcttctcaatgtgatagaggtcattttaaat

SEQ ID NO: 198923 - DNA, 423 bp, Gossypium hirsutum
aaatgaaagaaaacgaacttaaacgatgatcaaaataatgaaccgaattttcaacaaccaacccagatgaaacacaatcagaagaaccttaaagacatcacatcaacaacaacgacaaccacaatgtgatgtcaaaagctgatgctgtcacataaatataacatttttcgaaatggataacaatgcttatagtatcccaagccacaagagttcatccatgtccttgctttttccttcaagcccctttcagggttaatgatcctcaatcttcttcaaccccttcatgtccgtcgtttccaccgttgatccatacaaagcaatcttctgaacctttgtaatttctgaacctgactgattatcttcaataaatattgtcaagctacggacattctgaaacttgacatactttacgactacaggttt

SEQ ID NO: 198924 - DNA, 472 bp, Gossypium hirsutum
cttttcgcttcaaaaatgtctttatcccttcgttttctcagcgctaaactgttcttatgcctctgtttaacattatttcaacaccatgtcacgtgttctgctttgaatcctactggtctaaccctaagggctgtcctggatgattctccaaactctcctttataccttattgaaaacatgactatagctgaaagaatcgaaagatttatccaagttaccaatgctaaagacaattatttgaatcttaatgcaagggtaggccctgataattctaattctctatctcgagtagtaatggctcgagatggtttaatttattcagtatggcttctaataggaagccaaggccaagaagtgaagctgttgatgggcacaggcggtggtcttacatggacgcagtgtcagccttgcctaaattgtttcccacagaatcttccaatttatgattctagaactttcactacttactcca

SEQ ID NO: 198925 - DNA, 564 bp, Gossypium hirsutum
cgctttttaagaaactgacctaaaacctcaccgtctattgagagtctgcacgcttcgacccttccgctttcaaaaaattttcaacacacaaaattggttttaacaattaaacacaatctaaagcgagtgttggttgcagccgctgcacggtttcgtggctgatcctctcttctctcaaatctttgttgctgtggttgattgcccttctatcaggatggctggacctgcaccattcgttgatctggggaaaaaagccaaagacctcctgacaaaagattacaactttgaccagaagtttactctttcaatgctgagcaccacgggaatgggacttacagccacaggactcaagaaggaccaaaatttttttggtgacataaatactgtgttttagagtggaagttcttctgtggatatgtaagttggtacctattctaatgtgtctacaaaagtgactgtcaatgatgtctggccatgttccaaagctgctctaagtttcaggatacctgatcacaagtctggcaagttggatgtccaatatcttcatcctcatgctgccattgg

SEQ ID NO: 198926 - DNA, 478 bp, Gossypium hirsutum
tcgttagggaggctcagacgggtgccttgatcttcacttttctctttcaagttttagggtttctatccttgttttctctctaaatttcagctgtcctcaagaatacgcttattttgctgcagatcgtctaattttctaggacatggactcgtttgagcaggatggaaatggggcggcacctgactctctgcctccacccccacctgtgcctcctgatgtggtgcctatcaaagcagaacctgaacctgcaaagaagaaggttgtgcgagtcccaatggccaggcgtggtcttggatctaaagggcagaagataactcttctcaccaatcacttcaaagtgaatgttggaagctctgatggacacttcttccattactgtgtttctctttattatgaagatggccgtccagttgatggcaagggtgttggaagaaaagtgatagagagggtgcaagagacctatggcaatgaattggct

SEQ ID NO: 198927 - DNA, 427 bp, Gossypium hirsutum
acattttcaaatttttcattgaccgagaggtatagggatggttctccaatggcaacccaaattgattgtaacaacgaggaaagcttctcatatgccctccaaatcgtcacctcttcagtgctgcccatgtcgatgcatgcggcggttcagctggacatcttcggaatcatggcgaaatgcgggccagacgctgagctctccgccaaggagatcgcggcacagttggctaccaacaactcagaggcggcctccatgctggaccgaatcctcttagtgttagccagccatggaatcgtgggctgctccgtggcggatgaggaaaagggtaatcctcgtaggctgtacagtttgacgcccgtctccaaattctttgtgcggaatgaagatggggtttccttaggccctttgatggcattgattcaagaca

SEQ ID NO: 198928 - DNA, 1069 bp, Gossypium hirsutum
ggaaaaacaaataaccatgtctaccgctcaatcttgtccacttcccacagtttctctctctaaatacctggaagaagagggccagaataaaaatgcagaaagccagctcctcaaatcctcattaccagctgaaaatgattgccatactcaagctgaagattcagtttctgatgttcccaaatacctgctagaattgggtctcaccccagaatgcaagcagcttatatcctcactgccagccgagaaaggttgggttgccaatctcctccatcaatatcaggggttttggcacaccactcgccagttacaagcagtgcttacttgccaaaaccactttcaagctcaggagacagatatcctccttgttaccactccaaaatcaggaacaacatggttaaaggctattgtttttgccttgatgaaccgagtcaagtatcccaacactgataacaatcaccctttgctctcagagaaccctcacattcttgttccatttttggagtatgggctttacattgatagtcaggttcctaacttcaccacttttacatctccacggctattcggaactcatttaccccttgtttcattgccagaatcggcaaagaactcatcttgcaagcttgtttatttatgtaggaacccaaaggatactttcgtatcgctttggcacttcacgaacaagctgagaaccaaggatatgggaagcaactctcttgaagagaccttcgataagtttaccacaggcgtgagtttgtatggaccgttttgggaccatgttttatggtattggaaacaaagcttggaaaaccctgaaagagtcttgtttttgaaatacgaggaaatgaaagagcagcccacacttcagctgatgaagctagctcagttcctcggatgcccattttccaatgaagaagagactagatgtgcggtggatggtatacaaaaactatgcagctttgagaatttgaccaacttggacgttaacaatacccggaagttggcatcgggtgaggattacaaggcatttttcacacaacgtgaaattggagatcctaacaatcattca

SEQ ID NO: 198929 - DNA, 919 bp, Gossypium hirsutum
  unsure (1)..(919): unsure at all n locations
ttcactcgtccgaaaagagtgcgcacccacacgctgcagctcagcagctgtctccagcccatttccctcgctttcgcgcgaccccattcccctctttatatacacccgaaatccccccatttctctatacctcctcctcctccaccgccatcgccgccaccaccaccaccaccaccaccaccaccaacccattttctctttcatctccaccgctcaaaatgtctcttcaccatttgctctttcccattctaatactcgcattctccactgcttcttcattagctgccactgcaaaagaccaaactttaaacactcatcaagctgagttctttaaccccaagcttccacccagaatcctttcctcttccaaaaagttcgaaggctcatcggacattgtcgacctccgttaccacatgggtcccgtcctttcctcgtcgccaatcaatatctacctcatttggtacggtcgttggtctgtttcccaaaaactcctcatcaaagacttcataaactcaatttccccttccgcgacgccgtcgtttccgccgtctccttccgtttccgactggtggaaaaccgtctctctttacactgaccagactggagccaacgtttcgcggaccgtcgtcattgctaaagaacactccgatacgggttactcccacggttctcacctcacgcgcctttcagtccaacaagttatcgccaccgccgtcgaagccgctcctttccccgtcgaccaccgtaatgggatctacttaatccttacctcccacgacgttacgttgaagatttttgccgtgcccgttgtggcttccattacttcaccttcccatccatggtgggtcacactttgccctacgcttggatcggcaactcgggtanacaatgccccgaggtctgcgcttaccccttcgct

SEQ ID NO: 198930 - DNA, 512 bp, Gossypium hirsutum
atttaatttgttgtatagggtatagcaaaattcaagggagccctaaaacagggtgcttcaaagaaaaagaatccatatgtttggggctttggcgggcaattgtctccactctccactcttcactcttatccactccagtttccaggagaatcgatttcaatcggctttctggttaaattcatctttgaaggttcttgtatgcatatatcataataagagaaaaggaatggtgctatgaattaatggcgtgttttcattctatgaatcttcgcactccttgcttatggacgagtctaccttgcattcggagacacttctcaaggaatctgaaggatggaaataaattattgagttttaacagattatatgtgatccgcccttcaccatttcaaaccctgaactactgtagcttatctggcaacttaagttctacttgtaactggtgatcatgcaattccccatgggaatgcagtgatttcttcaaaaaaagaacacatatttcaccatgaggc

SEQ ID NO: 198931 - DNA, 1195 bp, Gossypium hirsutum
ctggtaacctttttcttctctttctcttatggcggtttttggatttataaaaacatagcgtttaggcttttagattcatttgtgttttggtgctgtggaggtgcatggggtgtaggcaaagttcataatattgatattgggatccttgggggcgttttccatccatttccaccaaaattgcagggagcgttttgcttcaaatgaaaaggccttaatatgcattcttagtattagtattcttcacctgctccttgtactttctcttggattctagtggttttctctttcatatcatttgattgggatcagtgagaaaatggaaggagatatcaaccagaagctgctaacagagactactaagaacgaagaggaagaagtgctatttaaagaaagattatggaccgagatgaagaaattgtggattgtggctggtcctgcaattttcacccggttttcaacctttggtgtcactgtaatcagtcaagcttttgttggtcatcttggtcctactgaacttgctgccttttccctttgtttcactgtccttttgaggtttggcaatggcgttctgcttggtatggccagtgcattggaaacactctgtggtcaagcatttggagcaaaacaataccatatgcttgggatataccttcaaagatcatggatagttttgtttgcaactgccctctgtctccttcctatatatatcttcactaccccaattctgatagctttaggccaggatgaaacgatagcaacggtggcaggatatatcagttattggttcatcgggatcgtgttttcgttcattgtatccttcacttgccagatgttcctgcaagcacagagcaagaatatgattattgcatacttagctgcattctctattggaatccacatctgtctttcatggcttttgactgtgaaactcaagtacggcctctccggggctttactatcaacgattttggcctattggataccaaatataggtcagcttttgtttgttacatgtggaggttgtaaagatacatggaagggtttctcaatgttagctttcaaagatctaatgcctgttgtaaagctatctttgtcatctggtgctatgctttgtcttgagctttggtacaacacaatcttggttcttctaactggaaacttgaaaaatgctcaggttgcaattgatgctcttgct

SEQ ID NO: 198932 - DNA, 598 bp, Gossypium hirsutum
cacgcgtccgcgccataagttatccaaaagaaatcggttcgaatataatttgaaaattgaaaaactggtagccggagttgcagaaaagatgaagaataccggaaagagtagcaaaggtaccggaaaatcgtcggacgtgaggaaagataggagatctggtactggaatgattggatcgccaaagaaaggaggtcatggcgggaagttcacttgggccggagatggcttttcgccggctgagattggagttgagaaacaggtttttgatgttaaggatcctaactttgaagatcctgatgaaatcgtgaatgataattaattgtgttgtctatgatggtagtgtgagatcgttattattatcatcatcgatcgttgcctttggtttttttttctaatctagtttttatgatgagaccatgaaaagtgtttatgaataaattttgtagaaattgcggctttaattgttgatgtttgcttcttcttctttttttaatgatattatcttagctaaatcgcgaaagaaaatttttgtaagatgtttaaaattgatgtggttttgatttggatggtttctggaaatagtgtactgtctaaattt

SEQ ID NO: 198933 - DNA, 329 bp, Gossypium hirsutum
atattcttcaatggctacttcttcatcatgttcctcgttgaaacaacacttccttgtgtttctcattgtaataataagcagcattattaattcaccagtaaatggatgtttcacatcgattttcagctttggtgattcattaactgatacaggcaatttacttgagctttcaatttcagaacccaccaaacctcctcattctgctgttcttccctatggccgcaccttctttcaccgtcccaccggccgattctgcgatggccgcttggttatagatttcctcgctgaaactttgggattttcctttttaccaccattttatggatcta

SEQ ID NO: 198934 - DNA, 417 bp, Gossypium hirsutum
ccctcgcgtccgcagctttgtttcatcggcacactgaaacctttagaatctccaaagctacgtcgtttctgaagtcatgggacaaatcctagaaaaaatccatgggaaggaatggagaaagagacagattaggaaaatcagtgataaggtttttgagcgtgtcaaaaatcaatcaggaagagctactttgacatttgaagatctatatatcgctgtcttgctggtgtataatgatattaataagcgtttgcctgggccgcactttgatccaccctctaaggaccaaatcagatcaatgatgcaggagtgtgacttgaaccttgacggacaaatcaaccatgatgaatttgtgaaattcattcagaagcttacaaccgacacgttggttgtcgttagtcagggactgcttgtcacttt

SEQ ID NO: 198935 - DNA, 430 bp, Gossypium hirsutum
ctgacagtcgctcaaagcctcgatttagcagaagagaagaagagtaagaaagcttgaattctgaaatcgtttcaagccatgagcacgactcaacaaggaacccactcccttgccttcagggtgatgcggctttgcaagccttctttccacgtcgaacctcccttccgccttgaccccgccgatctcttcgtcggtgaagacatctttgacgacccactcgctgccgctaaccttcctccgctcttatcttcccaactcactaagtcaatggactcctccgatctgacttacggcaaccgattcctcctccaccatccatctgatgctatgggcttctctggcctcctcctcctccctcaatccttcggggcgatttatttgggagagacattctgcagctatattagcatcaataataactctaattttg

SEQ ID NO: 198936 - DNA, 630 bp, Gossypium hirsutum
  unsure (1)..(630): unsure at all n locations
caaaagcaaagatgaggcctctagacgagaaagaaaccaccgccgttttcgaaaaaatctttaaattcaccgggaacaacctgaagaacatagtcgagaacccatctcatgaaggacccgacaaggaacccggtcgctattgtttcaggctacacaaaaacaaggtctactacgtcagcgactccctcgtcaaacgagccactaacgtcgccagaaccaagctggcttccattggaacctgcgtaggtaggttcacccacggtggcaacttccatctgaccatcgaatgcttaaacctcttggctgctaacgccaagcgcaaggtttggctgaaacccacgtcggagatgtcgtttctttacgcgaatcacgttttgaaaggtgggctagggaggataacggagagcatcgcgcctggtgatggggttgtggttttttccatgtcggatttgcctttggggtttggggttgcggcgaaaattacacaggattgtangaaattaaatcctaatgccattgtcgtgcttcatcaggctgatattggggagtatttgaggatggagaatcagcatgagcaaataattgaagattaaatcgggtacggggatacgagcgtcatcaaactcagtc

SEQ ID NO: 198937 - DNA, 464 bp, Gossypium hirsutum
  unsure (1)..(464): unsure at all n locations
ccccacccctccggtgagtgagtgagagagagaggagtctgctatttgctaaggtgcagtttggagtggttttcataatggaaagaggtgcaaggatgctgttgatctcagtcatggtcctgctggtccttgcttcaaatgctgaagggagaagactcaaagaggaagcttaccaccctcagaacttcctcggagcctttggtactagtggtgggctagttccaacccctggtggaggtgttggccttaatttagggccgtcagtcttttgttcctatcctgggaccggatgtgttcgtgtccagcctactattcctggtagtactggtaccattggcgctggcacaccaccatgatagatgtcctgattcaggcttagagggtgttgaatgagcttcagttatggaggtctaagctgttgtctctttagtttggtgtttnttagtgtgtgtttgataggaaca

SEQ ID NO: 198938 - DNA, 791 bp, Gossypium hirsutum
agtcctttaaaggcaaccactcaagaaacgaatggtaagaagccccaagactggagggttgatattgcttctcctcttgctgctactgtgccaggggctcgtgagaatggttttaaggagaggaggaataatgagaatgcgagatctgcaaagtctgaaataaggcggtcccttttcagtaataagaattccgatgacaagacgcacaaaatcagtggttcaaagtctggctctcgtgttgctccttgtcaagaggaaatcccagaatccactgttgtggttagtaatgcctctgaaaatctcagctcaaaccacaaggactgcgaggatttatctttgatccgcacccaactggttcagatagaaaagcagcaatctagcctactagatcttctgcagagattcatatgcagctcacagaatgggatgaattcactggagacacgtgtgcatggtctagaattggctttggatgagatctcgtatgacttggctgtatcaactggaaggatgtctacttccagccggaccacttgttgcctactacctgctgcaggttttctgagatccaagttctggaggaaaacagggatgtacacaaatggtacctctacgttttctacatccagttgcaccccatccgctgctgccacacattttagagcttaatagaaattgctatgaaacatttgagaaccatagggtacgacctcaaggaggtggcggatttattacgaatccattggcagaaattcagtgaccaccagaagctgcaggcttgctgcatgact

SEQ ID NO: 198939 - DNA, 678 bp, Gossypium hirsutum
tgcttgaaaatggcgaaaccatcgagagaagccatttccatggcttcaacctcgccgtcgtctctctctcctccgacggtacccatggagctccacgtatccaaccgtcaaaagctcctcaaatcccttcgccaacacctctccaactcctctcgcccccatcatggcttcgttctcctccagggtggcgaagagcaaacgcgctattgcaccgatcacatcgagctcttcaggcaagagagttacttcgcttacctgtttggtgtgagggagcctggtttctatggtgctattgacattgcaactgggaaatccattctttttgcgcctaggttaccagctaattatgctgtttggttgggggaaataaagccagtttcctactttcaggaaaggtatatggttagcatggtctactacactgatgagattgttcaactcttggttgaccaatacaagggatctggaaaacctttattgttcctcctacgtgggcttaacactgatagcaataatttctcaaaacctgccgagtttgagggaatagaaaattttgagagagatttgacaactctgcatcccgtattgaccgagtgccgagtttgcaagtcagatttggagcttgctcttatccaatttgcaaacaatataagttctgaagctcatgttgaggttata

SEQ ID NO: 198940 - DNA, 442 bp, Gossypium hirsutum
ggatagtgcacactatctatctccttatgctgtgaaggttcagtctctaagtgttaaattgcctgcttctggaattgaatcctatacaaaactggagaacacaaagattcatggttcagaaaatcaaatatggcccttatcagaatgttccttcattctccggcccacccatagcaggtcattttgcaagctacttaccctttgctgttgctcatgaattggtgagagagatagaaatttcccattggggtaatgtgcaagtcactgagcattacaagctcatacatggtggtgcccagagcaagggtgaattttccaggcttgatttccaggccagacccaacgttcgtggtgcatcggcctttaagtatcttgttgcaaacttgccaccaaaggcacattctgtttattacagggatgaaattggcaatatattaacatc

SEQ ID NO: 198941 - DNA, 471 bp, Gossypium hirsutum
caccactgagatttgttaggtccggcaatcagatttttgctgtacacgaacaatttccttaaatttctgtgttccagagctgagacttcttctagagatgagatcatttaaaaaattataattatgaattatccaccagagaaggttgtgaggttccaggactggaattcagagaaaacctgcgaagtacattatactaataataatgggataaattcagggaaatttacatttgcaataaattcattttcagaaaagtttcaaagaggggttgaatctggttctgagaggattaaagcgattagaaagtcatttaaatctagttcattcaaccatgttgttgctaaaggctttggttctagtaagaaagttctttgatccacaggggccattccttcaacgctggaacaagatatttgtattatcatgtataatagcagtctcaattgatccactgttcttttacgttct

SEQ ID NO: 198942 - DNA, 564 bp, Gossypium hirsutum
ctccgccttcttcaaggaattttaactctcaattcgatagctcatcaaagaattggaattggttcctagttgaaggtggtgaaatcggatatgcagagccagcttatctgtagtgggtgtaggagcattcttctttatcctagaggtgctaccagtgtttgctgttcattatgcaatacaattactccccctgggatggaaatggctcaactcatatgtggaggttgtcgaacattgctaatgtatacacgtggagcagcaagtataagatgctcttgctgtcacaccattaatgttgcaccagcatccaaccagatctctcacatcacttgcgggcactgccgtacaactttaatgtatccatatggagctccatcagtcaaatgtgctgtctgtcaatatgttactaatgttggtatgggcaatgtaagggttccccttcccgtaaacagacctaatgggaaagctgccacagggtctatggctacgcaatctgcttcgccaagccaaactgttgttgttgagaaccccatgtctgttgacgagagtgggaaattggtgagc

SEQ ID NO: 198943 - DNA, 850 bp, Gossypium hirsutum
ggggcgagtacgaagggaagggaatcggaagatcctgcaaccaagtcttctatgaaagcaatggcagctagagccttatggcatcttgcaaaggagaattcgcttatctgcaagagtataactgagtccagagcattgctatgttttgctgttttgcttgaaaaaggaactgaagaagtgcggtttaattcagctatggcattgatggagattacagctgtggcagagcaggatcctgatttgagaaggtctgctttcaagcccaactctcatgcttgtaagctcatcgtggaccagctgttgaagatcactgagcaggccgattcagagctgctgattccttgtatcaaggctatcggaaatttggctaggacgtttagagctacggaaacaaggatgattgcccctttggtcaaacttcttgacgaaagggaagccgaagtttccaaggaggctgcaattgcactcgccaagtttgcttgcacggacaactatctacaccttgatcactccaaggcaatcattaatgcaggaggtgcaaagcatttgattcagcttgtgtattttggggaacatattgttcaactcccagcattacttctcctatgctacatttcccaccatgtacctgacagcgaggaacttgctgaagccaaggttcttaccgtcctcgaatgggcatccaggcaatccaacatgacccagaatgcaactggcaaactcttacaagaggccaaaagtagattggagctgtatcagtctagagggtcaaccggatttcattgatccaatcactttccctttgtaatttctctctttatacagtaccccatcattgagttcataattc

SEQ ID NO: 198944 - DNA, 487 bp, Gossypium hirsutum
gcgaaccttcttctccactcctccatctatatatatagttagaggcggaagggaggaagtgacattggcaatatggctttgctgcattcttacttcttaagcgctggtgagtgtgtttcagggtccatggtcttggcagtggcaatgtccattgcttcctattttctgatccctatggtgtttggtggtcgacataaaaactggaagaatgcaccaccaggccctgttggttggcctatccttggcagccttccacacctctccaatcgtctccatgaagatttctttcacatggccaagatctacggtccccttttcagtctaaacttgggaataaagccggccatagtggtgtcatcaccggaaatggcagcccaagttttgaaggaaaaggaagggatgttcttcagtcggaccataaccgagaccattcgagtcatctcttatgatgcccattccatcattttctcgccctatggtcccaggt

SEQ ID NO: 198945 - DNA, 540 bp, Gossypium hirsutum
cggacgcgtgggctcttcacaatcacatcttcattttcagaatttaaccaaaataatattagaaaaaaaaaaatttaaaagaaatccaagaagaaaagataagtagcatcgaatctttttttattcgttatttttattttatttttttgcttgttttctcttcgcagctcactgccggcagatcggctcaatctcaagactttgtttgtattcttgtagctgccaagtggcgttgtagtcccgataaccatatgatacaacaagggtgcattcctgagtttggcgtatcagatgatttgtagtatctatattatgctttgtcagtgccattatgggcattcgtctgatgaaatatcaatggccatggctgcttctcattctaatctcttttatcctagcaaacagaatcagagctatcagtcctgatggagaggcacttctgagctttcgggtagcaattattagttcagatggtgtgctttctcagtggagaccagaggatcctgatccatgcaaatggaaaggggtgaattgtgatac

SEQ ID NO: 198946 - DNA, 362 bp, Gossypium hirsutum
tcgctgagaaattctttgtgttccatggcgacaactcttgcattctccctctcaaccccgatccgagcctcaaccggttcacttcaaagacccgatccaagtcgcagaaaacctgtttcttcctcctcctggggggctcccctcttcgggttgtcctccaaccccgattacctcaacgatggccatatcggcgtcacatcggagagaaatcccgaagtatccgaatcggactcagatccgggtcgatccagatccaaatccacgctcaggtgcttcaccgaggagaaagcgaagcaacttcgcaggaagacaatggagaacgcgtcgtttcacgatatgatgtaccactcggcgatcgcgtc

SEQ ID NO: 198947 - DNA, 373 bp, Gossypium hirsutum
gaattgctcatatccaggtttccttccatagtcaccaagatggtactaagtcacttaatgaattaacaaacaatcaaaacattaataaaacaaataataattagaatttcatccactcaaaatatacataactatacgaaacagaagagcagattatcagaatgaataaaaggcattcaaactaataccggacaacatcctggaggcagtcgtaaaagtgcgcaagcttaatcttctctcggccagagaagattgcctccgctgctccaccttgttctccttgagctgccatctcaatcaacatgtaaagcttttttataggcatatcattcagcgcttcagcagcttcactgatatcttcttcagcaaataa

SEQ ID NO: 198948 - DNA, 460 bp, Gossypium hirsutum
atggagatgggggacttcttcgtcggaggttattacggcggcggagctacaggtgatttctcgccggagaagaggatgtccatggtggaggaaaagctgggggagaatttcatcgtcgacgacctcctcgacttctctaacgaagacgccgttatcggcgacggcttgttgttcgataatgtcgcgggtaattccaccgatttgtccaccgtcacttgcaattcctcagcgtccggtggcgaaaatcacttctcttccgctaatttcactcactcctctcagttctccggcgaactcggcgtcccgtacgatgaattggcggaacttgaatggctttcaaattttgttgaagattcattttcaacagtcccgaatttacaaagcaaccaccatatttttgctttacccacacccgaatcctcatcttcctcaacccgatccgattcattacctcggagct

SEQ ID NO: 198949 - DNA, 696 bp, Gossypium hirsutum
ctcccaaaccttctccccctatccctatccatatacctcaacacctccttcgccacctcaacgacatacgcgccaccatcaatcacctcactgcctccacctctgatcccaaacgcacttcccccgttccccatgatctcatcctccattcccaagtcgcacccatcgcttcttcctgccaccgccacccttaccttctccgtagatacatgaattacactcctttttcaacttgcccttatgatctcgacctccaagaaacgcttattctcaacggctgccacccacttccacggcggcgttgcttctctaaaaccccgccaaagcccacttcctcccttcctcttaatcctttcccaactgccctgcccgactcctctgtcatctggaccaaatactcctgtaaatcttttgcctgtcttttacaaaacaaccccatagacttcgatctcaacgcccgacgctcatcccttctaaaatacgcttccgagctcgaccttcccgtttaccggttcatgcaattggcttagtcagcttactttgtgatccgtcttggcattgacataggcggtggaactggaaccttcgctgctttgaggaaaattttctacaatgtcacgatgctgaccaccaccttgaacgtctatgcgcctttcaatgaagccgcggctgcaagagggttgatgcctttacacg

SEQ ID NO: 198950 - DNA, 638 bp, Gossypium hirsutum
agcaaacaagcgtcaatactgctgtgaagccgcagaggcgtgaagtgaagtgaagtgcattctggctggtcgacaatggggatttcgaggtttgttttactcgtgtttacgatctcaatgctggcatccccggcactctccgatctggttctctccaaagtcgatcgacgtatttatttgacatcccacattgttcgaatttcttcaactttagaggtggagaatgcaggtccagagactgtgtctaaggttttgttggcttttcctgaccttcaagcccaaaacttggcatatttgatggcttccccgcatgaagccaaagcgaaattcaaagtctctgttgtttctttccctattgatgtcgtcaaaccagaagatatgcctcctggtgtaacattctattcggtatcattgccacagggattaaccgtgggcgctagcttcacttttgatgtcttggctgtatttacccatgccttgcgacctatgcccgagcaaatcggtcaggctgatattcagcttgtactgtaccaggatagtgcatactatctgtctccttatgttgtcaaggtccagtctctaagtcttaagctgcctgattctagaattgaatcctatacaacactggagagcacaaa

SEQ ID NO: 198951 - DNA, 456 bp, Gossypium hirsutum
ggagaacgaagcatccatatgaatcagattcgtaattacaaacaaaaaagaaagcaattgtacataatttatccacataaccctccgtgaactataagaccagcagtttcaccccaaaggaatagaaacaaagatagaagtagaattgtagacacaacatcaattgaacagcagaataaaaaagtacaacataacaataactgaaggaaaatgtaaccaataatcaaaagccccattaaaagaacttgttatactggctagtgagagaatccctgagattagaataaaggccaaacagtgagtactgccgaaggttctcaacttcatactcatgtaattcagggcagaaaggtgcttatctgtcccagaaaatgctagctgtatcccaatactgcaatcaacagaccctccatggtttttgcagttgtttgtattaattgcacaatctagtttgtt

SEQ ID NO: 198952 - DNA, 454 bp, Gossypium hirsutum
acgctcaattatagctttttgtgctttattgttgttccccttaactctgcacaaagaaaaaaagggggtacacagttatcatcagccttgagaggggaggaggaagagagaatcaattctcagcctcgagaataaaagagaagatttgaagacaacggattaacacaaaagcatgaaatcatgtgaaagaaagttattagtatcttatctcagctcttaacctccatcacctctttctctttctcctttatttatttttggtttggcacccaatctttcaaccaacaagacaaccaccaccgtcctacgaccacgggcactctctcttcttttatatttaataaaagaaaacagctggtcctttttgcataaaatcaagaggtttatccaagctttcatctctattgcttttcctctctttctggtgaagaagagagtgaacaaaaatggagat

SEQ ID NO: 198953 - DNA, 372 bp, Gossypium hirsutum
cggacgcgtggggcaaaaccccatcacaaagaatctctctcctttcattcttccaaaaaagaaagtcccaaatttcaaaacagatcctaatagtattagcgatggatcaagaggtggtcggacgccacgcgctgctcttcgacgacgacgccatggccgccttcgttaactctccggaggctctcgttgactggaactccctcgccatcgatcgctatgatgtgcgtcaccttctctctggacctcctccgcctcgaaagagacggcgccacctttcatctccttccgggaccgccgatgataagttggagtccgatctcgatcgtgagcgttatctcgatttgcctcctccatctccgtcgctgcccgatc

SEQ ID NO: 198954 - DNA, 673 bp, Gossypium hirsutum
  unsure (1)..(673): unsure at all n locations
gtccgtttctttaatatccagtgtgcgtaacattataaacgatcaaatctcttggctttatagccgaagggatgaaaatgataaagataataaaaaaatacagtattctttttttgtttttgttttgttgtgcgttcgtcactttttacaagtatggggtgtgtgtggcgcgtgtaccagggctgtgtgctggcatacggaggcgatgtgctggaggctgctgaaatgctggaggttgtacgacgctggaggctaggggctgcggcgctaaggaaaccctaggtttccgtttggctgaacctaggtctaggttttgggccactgggccttttaggcattgggttatttgattgggctaggttgttttgtaaatgggcttgtaactgggctattgggtctgatattgtaatggactgataattggattttttattatttggttttttttatattttgtattttggttcttctttgggcctaggcaaaaatggcccattacaattattattttattggattctaaaaataaatgacatcaatttaaactgaaagaatttcttttacttccnangaaaaaaagaataaaaataccgaagaacaaaaagagcaaaatggagcgattncacattaaacgaacaaaccttaaattagtttaatttccaaaccatataac

SEQ ID NO: 198955 - DNA, 495 bp, Gossypium hirsutum
gggaacttgaagatgtatttcgatgcaaccatcgagatagtgacttctaaagatgtaagggtctgtggagccctcggaccttgcatctctcttcggaaaacaaataatttggtgagcgtgaatgagatcggggatggtggtacatatatatggaagctgcgtacacttactagtaaaacatgtattgctttcttcttccaaggaaactatgagcataaacctcaacccggcgctgcgttcttggtacaggtcataacacgctatagagatggcaacatgggaattcgaagacgggtgacaaccgctgcaagaagatgggttgcaaagcagtcaccagatatatcgcgccgggtttgatcaggaagcagcaacttcagttatggcccgactcgctattcatcgagctgaaacatgtcaagctagagatgttatcagatggttggacgataaccttatttgttgtgcttccaagtttggagactatatacaggaaga

SEQ ID NO: 198956 - DNA, 714 bp, Gossypium hirsutum
  unsure (1)..(714): unsure at all n locations
cacccactccgttcgggcaacttcaataatatatagattcccattctttcatgtccctaaatgagaaagagccttgcgagtttccgtcacaaacgcccgcccaaccccagcccaacccaccccgtgtcgccaagaaacgcacccgccaagacaaccactccccgtttcgcggggtacgtaagaggaggtgggggcgttacgtctccgagatacggtttccgggtcaaaagacacggatatggctggggtcgtttgggtcaccggagatggcagctcgggcatatgactcggcagctttcttcttgaaaggcgactctgctatcctcaacttcccggagttagtggggtcacttccccggccagggtcttgctcgaggagggatatacaatccgcggcggccaaagcggctttggaggaactcggtgggcagggtaaaagatgaggagggtccggaaagcatcccggtggtgggatgatgtggggatggcggcgtttgaagaattgaaagcaattccgttgaggtttgattcaatggagggagagctgttgtctttcatggaggatgatcatcatttcttcactccctgctttgagttgtggatatatataagaatgattttctattctatatattatttgatatcttcttaccttaggcttagggtctttgcttgttancctgcatggaccatggtttagcttactttattcag

SEQ ID NO: 198957 - DNA, 574 bp, Gossypium hirsutum
  unsure (1)..(574): unsure at all n locations
atgatcagaggctttttttccttttttaaaatttttcttttttcattttgctgaaaatctaaggctttatttggctttaaaaccatttctttttttctaagtgaagtagatttcaaaaccagcaaaaacaatggaaataatcgaaacccaaacagctgtttccaatttcgagccgttttacaacatgtcttcttcctcggagaataatggtggtggatttgaaatgtcgtcgttgatcgacggtcgagattattcaggcgagaatcacgcgcacggtggtggtcacggtggggtttttcgccactcgaacgcggcggctgttaaggttcagaaagtgtataggagttaccggacacggcgtaggttagcagattccgctgttgtagctgaagaactctggtggcaggctttagattatgcaaggcttaaccacagcacaatttcgttttttgataatttaaaacctgaaactgctgcttcaaggtggaatcgtgttcttttaaatgcttctaagatccggcaagggtntggctggagatgccaaagcacaaaaattggcttttcacattggatt

SEQ ID NO: 198958 - DNA, 621 bp, Gossypium hirsutum
ttatatttggtccttccggtaattcaccatgccagcattcgatactatcctccttccggatttgggagccgcagcctgcctctcctgtatcacacgttatttcattacgccgtcttctcagtaaccccaaacgaacacttcctccgggtccgaaagggtggccggttgtgggtgctcttccactcttaggttccatgccccatgtcgaactagccacgttagccaagaagtatggacctgtaatgtacctcaaaatgggaacctgcaacatggtggtggcttcaaccccggataccgctcgagctttccttaagacccttgacttgaatttctctaatcgaccatccaatgctggtgccacccacatagcctataactctcaagacatggtgtttgctgactatcgtcccaggtggaaattgcttcgtaaactgagtaacctccacatgcttggtggcaaagcccttgaggattggtcccaagtccgggctgttgagctaggccacatgcttcgggccatgtgggagtctagccgaaagggtgagccagtggtggtgccggaaatgttgacgtatgccatggccaacatgatcgggcaagtgatactgagtcggcgagtat

SEQ ID NO: 198959 - DNA, 460 bp, Gossypium hirsutum
cccacgcgtccgtttctttggaaactcggcttctttaagctattaccaataatggagtgccagatatccttattccagctcctcatcagcttcctcctgtttttgtttatggtaatcacaagtgtaaggagatcaaaagctaagaatttaactcaaaagttgattccagggccatggaaattaccattgataggaaatctgcaccagctcgccgcttctggtctaccccatcgcaccttacgtgacttggctacgaaacatggtggcttcatgcatctgcaactcggtcaagtttccaccgtggtcgtttcttctccagaaatggctgaagagattatgaaaacacatgatatcgtctttgctaataggccttttcccggtgtggccaagatgacaacttatgagtgcactgatattgtctttgcaccatatggaacctattggagaaatctgcggaaaa

SEQ ID NO: 198960 - DNA, 613 bp, Gossypium hirsutum
  unsure (1)..(613): unsure at all n locations
gcattggcctttgcatgtttttcaggagctgcaatgttagcaaggcgaacagaatacctttacctcggtggcttgctttcatctggtgtgtccattcttatgtggttgcattttgcttcctctgttttcggtggttccaccaccctctttatgttcgagatctactttgggctcttggtgtttgttggctacatggtactggacacacaggacataattgagaaagcacatttgggtgacctgcattatgtgaagcatgccctcacccttttcactgattttgttgctctatttgttcgcatcctgataatcatgttgaaaaattctcctgagaagaacgagaagaagaaaaagaggaggaatgattgaaccgtaaaggcgtagcccagtaaagtttgctcatcagatataacctgccttggaaatatggaagttagttgacaatacaagttcgttttcttgctttttttttttttgtggtgaatcactatgttaatatacctaaaagataggtgttaactgttacttcatctttatgttggtttttgttttggaacattggtcaaactaatgacatgttcatatttgcttctctcnnnnnnnnnnnnnnnnn

SEQ ID NO: 198961 - DNA, 527 bp, Gossypium hirsutum
ttcctctcgtccggcaccatagcaaaaacctcaagtaaacaaatagaaactccaaaaaggaatcgaaccgcccttctaaaatcatttcaccaactcctcagttaacgaaaggcccccgagattcatagatttaggaggcttttagcctttgaacctcctctaactattgggtcttctgcaaaccaaaccatgtctgacctagacaggcaaatagagcagctaaagaagtgtgaacccttgaaagaatccgaagtgaaagctctttgtctcaaggccatggaaatccttgttgaagagagtaatgttcaaagggtcgatgcccctgtaactatatgtggtgatatccacgggcagttttatgatatgaaagagctttttaaagtaggaggtgattgccctaagacaaattatttgtttcttggagattttgttgacagagggttttactacgtggaaacctggatgcttgtatcgccattgaaagacagatattctgatcgcataacactcattagagggaaccatga

SEQ ID NO: 198962 - DNA, 460 bp, Gossypium hirsutum
gaaagaaagaaagaaaaacaacagaaacgagtgaacggcatcggaaaatgagcggagaagaaggtcgtgaggccgccaccgctaccgtccccgctgctaattcttcaacaaagccatgggtggaggaattgccgacaatcgaaagccttatagactctaaagacttagcgattcgctctgctcaatcccttttccataactcctctacccatctacgctctttccaggattctctaccacaagcatcctctcactataaatcctatgaagatgcttttttcagcaaacttaaagagggggtgatgattgcaaaggaaaaccctggtgcagctgttgggattactttgactgctgctctctgtctcatgcgaggcccaagaaggtttctattccgtaatacgttgggtcgatttcagagtgaggaggcaaaattttctagggctgagaagaatggaaaagt

SEQ ID NO: 198963 - DNA, 826 bp, Gossypium hirsutum
  unsure (1)..(826): unsure at all n locations
ctttttttctttaatttttggttgttgaatggaatttttttgttggttacccaaaacaatacagaattaacatttactaaaaccccaaaaagaaaaaatggcgacggtgctctcgcttcacaatcgaggaatattgacggctgtgaacagtggagcatcgagtctatcgttcgttggatccggattcatcgtgctttgttactccctcttcaaggaacttcgcaagttctccttcaagctcgtcttctacctttctctctctgacatgctttgcagtttctttaacatggtcggggacccgtcaaaaggtttcttttgttatgctcagggctacaccacgcatttcttctgtgtcgcttccttcctctggacaacaactattgcttttactcttcatcgaactgttgttagacacaaaactgatgttgaagatttggaggctatctttcacttgtatgtttggggaacttcgctggttatgactgtcatacgttctattggtaatgaccacacgcatttgggagcatggtgttgggcacaaacaggtcgcactggaaaggcagttcatttcataacgttttatgtcccactatggggtgcaattctttacaatggttttacatactttcaagtgatacgcatgctgaataatgccacccgtattgcagttggcatgtcagatcgtgcataccagtttgattcaaggacagacacgaaggctttgaaccgntggggttactatccactgatcctgattggatcatgggcattcggcacaatcaatcgcatccacgattttattgagcctggccacaagatcttttgg

SEQ ID NO: 198964 - DNA, 493 bp, Gossypium hirsutum
catttgcgtcgaccccatttcgcatgaggatgtttctgctaccgttttggccacttacgtttatcataatgctagggatgtggggttggtctaagaccttcctcttctctttctacaatcttcgttgccgtttgcaccagacatgggtcgttcctaggttcggctttcagtatttcttaccatttgcaacaaagggcatcaacaagcacatagaggaagccatattaagggcggacagattgggggtcaaggttattagcctcgccgctttaaataagaacgaggctctgaacggaggagggacactgtttgttaacaagcatccagagcttaaagtgagagtggttcatggcaataccttgacggctgcggttatccttaatgaattttccaaggatgttataagaagtgtttctaacaggagccacctcaaagctcggtagagcaaccgctctctacctctgtaggaaaagagtcgggttcttatgttgac

SEQ ID NO: 198965 - DNA, 894 bp, Gossypium hirsutum
catcaaaacaaactctacaccaggtttctgatacaatctcagctgcttggttcattaagagagagaagaagaacatggatgttggttaccattcgtatgagaccgagtcaacccacactgcagggaaagtcatcacttgcagagctgctgtagcatggggtcctggacagcctctcgtcattgaagatgttcaagtggcaccccctcaaaagatggaggtgagggtcaagattctcttcacttcaatctgtcacacggatctcagttcttggaaaggcgagaatgaagcacagagagcatatcctcgaattctaggccatgaagctgcagggattgttgagagcgttggggaaggtgttgaaaacatgaaaataggtgatcatgtcatccctttcttccaaggggagtgcggcacctgcatctgttgcagaagccaaaaaaaactaatctctgccaaaagtttggagtgaatccattgaagagcgtgatggtaaatgatgggaagacgaggttttccaccatggatgggaaccccatctttcatttcctcaacacctccactttcagccagtacaccgttcttgattctgcctgtgtagtaaagattgacaccaaggcccccctcgagaaaatgagcctcttaagttgcggtgtctcaactggcgtgggagcagcttggaatgtagccaacgtgcaacctggctcaagcgtggcaatctttgggttgggtgccgtgggactcgctgtagctgaaggagcacgagtaagaggtgcatcgaaaataataggcgttgatatcaaccctagcaaatttttcaaaggcaaagcagtgggaattacagaattcataaacccaaaggatctagacgtaccagtgcatgagaaaatcggagc

SEQ ID NO: 198966 - DNA, 483 bp, Gossypium hirsutum
tcggttctcgatcagctccctaatgaaatgcatggggggagaattagagatgagaaaactactggccattatgataaggatgttggatctaatgttattaatggaaatggaacagaagcaggtcaaataattacaactgttgttggtggtcgaggcgggcatccaaaacagacaatctcgtatatggctgagcgtgtggttgggactggttcatttggtgtcgtctttcaggctaaatgcatggagagaggtgaacctgttgctataaagaaggttctgcaggataaaagatacaagaatagggagctgcagattatgcatctacttgatcatcctaatacagtccaattgaagcactatttcttttcaaccaccgaaaagaatgagctctatcttaaccttgttctggaatttgtacctgaaacagttttccgagtttcaaaacactattgtagaatgaatcgccatatgccctttttttat

SEQ ID NO: 198967 - DNA, 449 bp, Gossypium hirsutum
ttaacaatactggagcagaaatggcaatgccgatccccagtcggcaactgtgcatcaacggcgattgggctgagcctctgctcaagaaacgcatccctattattaaccctactactgaagaaatcatcggtgatattccggcggcgactgctgaagatgtggatgttgcggtgcaggctgctcggagcgcacttactcggaacaaaggtaaagattgggcctttgcttcgggtgctgtccgtgctaagtatttgcgtgccattgctgctaagataaaggagagaaaaccagtacttgcgaaacttgaaacagttgattgtgggaaaccacttagtgaatctgaagcagatatggatgatgtcatcggatgctttgagtactatgcagaccttgctgaaggtttggatgccaagcaaaaggcttctatctctcttccgatgaagacattt

SEQ ID NO: 198968 - DNA, 371 bp, Gossypium hirsutum
gagaaactctctgctagggtttcttttccatgccgccgccgccaccgctcaagccattccacggcctccgacgacgccccgacctccgatcgcgacggaggtggaccgattcgacggtttcggctaaagattcagccaactggggatgtacgtgggacacgtacgtgcgcaaagggtggtggtgcagggctgatgtgcggcggctagggttgaaggttgtatgctgctagggttgctgctggaatttagttagtgggctgtttagtttgggttaggtgttgggccattctaggtttagttgggcccgggcattattgggtttgacaaatttacctagcagtttggttttagctaagatgttatgactgcac

SEQ ID NO: 198969 - DNA, 622 bp, Gossypium hirsutum
gcagagggtttgatcatctctgtgaaagaaggttttgtgtatatagtgtattgtttggaaggaaggaaggaaagtgagggaaaataattaaagatggtgggatacatgaaaaaggaagtggtaaaagatgtggtgatagttgcaggattgataggggtgcaattctttttcgcggggaattcagttttacttggatacctaatgtcccttggccttaaacctttcaccattgttattttcttctccttttcaaccttcctcgttgtctctccttttgctgttcactttgaaaggagcaaatggcccaaacaattgacattgaagttgataattcagctggtttccatctccttttcaggggtaagtctcttccagttcctatttctaaaagggataaatctatcctcacctgcaatggcaacagccatgccaaaccttgctccagccctcatctttataattgcttggacttgcaggttagaaaaagtacctctaagttgcttgtacagtaaagtgaagattgccggcacaatcttatgtgtcttaggtgcccttacaatgagccttatgcaaagcactgtctcctccaaagatgcaacagtcatgcctcccctaactgatt

SEQ ID NO: 198970 - DNA, 754 bp, Gossypium hirsutum
attaaaattagaaaaagaaaaaaagaggaagaagaagatgaagtttgcattggctttttacttttctagtttgggtttctttcctactccgggggcgtccacactaatttctacaatataaaaattaagaaaaatccaatttttttcaatatttgttatttttcctctataaataatcgtcttcctttgttcacttgctcattaactagcttcacacacactctctctccctctttttctggttcaaagttgggttctcagttgccctgattcagggattaaaaagaaaaaaaagctaagttctatattcgggtgtggcaatggctactaataacaataatagcaagttagagaagttggcttccattgatgcacagctacgtgctttggttcctgctaaagtgagtgaagatgataaactggtggagtatgatgctttgcttttggaccggttcctcgatattcttcaagacttacacggcgaggatcttagggaaacggttcaagaatgttatgaactttctgctgagtatgaagggaagagtacccccaagaaacttgaggagctggggaatgttttgactagtttggatccaggggactccattgttatagctaaggctttctcccacatgcttaacttggctaacttggctgaggaagttcagattgcttaccggcgaaggatcaagttgaagaaaggtgattttgccgatgagaactctgcaacaactgaatcggatatcgaagaaac

SEQ ID NO: 198971 - DNA, 659 bp, Gossypium hirsutum
gcttgctgagctggaggctcttcttgctgattttggagtaacacagaaggagagcaatggccaggatgagtcgcgtgatgttgcacaagaaaagaaagatggagagggagaaaagaaggaaaatcctccaggggagtctaaaagtgccaagaagaagaaaaagaaggataaatcgaaggagggtaaagaatcacaggagcagctgacgagtacagatgccaccaatgggccatatgaagctgctggaactgaacagaatgaggaggatgcatcagctgctgacgtgaaagagcggctaaagaagatggcatctatgaagaagaagaaatccagtaaagacatggatgcagctgcaaaagctgctgcacaagaggctgctgcaaggagtgcaaggcttgctgctgcaaagaagaaagagaagaaccattacaatcagcaaccagtgcggtaaacgcctccttttttgttctacattacatatacatatatgaacatgttttctacgttgttcattcaacaatgcgaaataaacagtgggccaaaagatgactgttttagttttatttgaatggacgagaagaaagtttgatctgttttttttgctttttggatcctattgtttctcctttatcatggatttggaactcatttgttatggc

SEQ ID NO: 198972 - DNA, 540 bp, Gossypium hirsutum
gaaaaaagagcttgtgaaggagcaaatgatgagggagcaagctgttgctattgccttagctacatcagcttcggggaactctcgcagttcgtctaagcactttgccgatgatttgagtggtccgctttcaccagtgtcactgccagcccctaagcaactaaaatttacccctgggtttgttaatgtatctgctagagactcagcagcatttctagatcaaacacgaaagatggtaccagttggacatttatcaatgatgaaattgacaaccaagggacaaaccggaaaactctggaggtggaagagaagtcatcaccaatggcttcttcaatttagatggaaatggcagaaaccatggaaactatcagaatggatcaaacacagcgacgaaaccatcatgagatcaaagcctcgtgcacttgctctaactgaccggatatgataaaagcttacattcaccaccttcttcgtcatgtatatatacatcttgactgtcataatggctctccacggcttaccaagaaaataaacccaggcatg

SEQ ID NO: 198973 - DNA, 451 bp, Gossypium hirsutum
gtttattcaatacccaaacctccctttcccccccttttttggtttatcataaacaatcgtcatagcattaacatacagctaggatctttcttttgtttttttttgggggaaaaggttgtgtttttaacgaaaatgggttccatttctttcgttaattctcaaaccctgaagctattcccttctttcaattcctttcttcattctaagcaaccctgcattgtctccatataccattattcccataaagtggcactggcaccctccttgtctctccccaaacccaaagatggctcttttcgtcttgctgctgaacttatcaccaactctgttccctcaagaaatggaaattatactgtgggtgattttatgaccaggaaagaggatttacatgttgtcaaaactacaacaagtgtggatgaagcattggaggcacttgtggagaagagagtta

SEQ ID NO: 198974 - DNA, 514 bp, Gossypium hirsutum
ccttctcgtccgcccacgcgtccgccgattattgctggccacctctcacctctctcctccttttcatcgaacagctctcaaaattcccaatttttccctaagaaaaaaccctaactccatctccacatttacgcaacatgtcattcgatgaagaagagtccttcgaacacaccctcctcgtggtccgcgaagtcactgtctacaaaatcccgcctcgttccacctccggtggttacaaatgcggtgagtggctccaatccgacaagatctggtcgggtcggctccgggtcgtctcttgcaaggaccgatgcgagatccgattggaggatcccaactcggctgagctattcgccgcttgttttatctaccctggccagcgcgagagttccgtagagcccgcgctcgattcttcccggtacttcgtgctcaagattgaggacgggaatgggaaacacgccttcattgggctcgggtttaatgagcggtacgaggcgtttgatttcaacggggcctt

SEQ ID NO: 198975 - DNA, 467 bp, Gossypium hirsutum
cccacgcgtcgggggagcagtaaaaatatcccctcaccaccgctactattattataccattactctactacagctgctatcattactacatacatgtccacccaaagtcgagcagttggcggcaccgagcacaactggtgccgagcggtggtcgggggaaccgggatagccgtcttggctatcatttcttccaaaaaccccgacgtttcacatcttaaaaatgccctccacaagctccaaatctcccatcccattcttaggtctcgcctccattacagtcctactgccaacagttactccttcgttacctccccctcccctttcattcaaatcaagtactttaaccattctacaacttgtcaaatccttgaaaacaaccaaaacatctcaccccttcatttgattctcgaacacgagcttaaccaaaacgctggggttagttcttcatgtaccaccaaacacgacgt

SEQ ID NO: 198976 - DNA, 463 bp, Gossypium hirsutum
cccacgcgtacggttttatttgcaacagtaaaatcccaattgaaaactttaaagaatccacgcgccactatctctgatctcactctccgcccatggcgaccattccgatgacaaactctcaatccaccgccggcagtggaccccaatcacaacccccaataaccaaccctgctttccgtacattcctctcacgactgacgtcgtcgatccgtcagggattctcccagcgtcggccatggttcgaactcatcgatcggactgccatggcccgtcccgacaatttaacggatgcctattctcggatccgtagaaacttttcctatttcaaagtcaattacattactctacttgcacttgttctcgctttctcgcttttatctcatcctttttccctcctcgtcctcctcggcctccttgccgcttggctcttcttatacttgttccgaccgtcggatcaacctct

SEQ ID NO: 198977 - DNA, 447 bp, Gossypium hirsutum
gctcttcactaaacaatccactgcttctcacttgctttcttttcttttcttttgactggacttctcaaagcattccccaatttcctccctggttccagctctagtttccaagcagtttcagaggaaagaaagtaaagcctgtttaccgaagatggaaaaccccatcacttcaaaatgctgcaaccatcagccctggtttgtcttacttgtctttttcgttttctgtattgagctattttcctttgattactctggttttactgctaaaaaatctgccctcgtcactgttttggatgataatcatggaaacgtaatcaatacccaaagttctttacctcatgatttcactgagattaccaatgctagcgtctatccattgcccaaaactgatgaaaagggagatttgaaagtgggaactgagatcgattcttgtgtggggagatatat

SEQ ID NO: 198978 - DNA, 667 bp, Gossypium hirsutum
  unsure (1)..(667): unsure at all n locations
gtaactgccgctgcacgattgcctcttctgctacggtagccattttcattataatataccttatttgcatgtcctcaaaacccacgtctgccccggtttttattctacaaaccacaaccaagtttcggctttaccttcaaagccaaatccccaccgtctacataacacacttgttccggttctgggttcttttgcttttctgctgttttttctactctgaaaatggaggaagcgtcgaaacagcagatttacctacacggtgacttggatttaaccattgttgaagccaggagattgcccaacatggattttatggtcaatcatctccgcagttgcttaacctgtgagccttgcaagtctcccgcacagactgctgctaaagaaggggactccaaaatccgcggccaccgtaagatcatcaccagcgatccctacgtcaccgtttgcctcccccaagccaccgtggctcgcacacgcgtcttgaaaaactcccagaatcccaagtggaacgagcatttcattatccctttggctcatcctgtcactgagctcgatattaacgtcaaagacaacgacctcttcggncgctgacgcaatcggcactgccaaaatccctgcctcgaggatcgccacgggggagcatatcaccggatggttcccgctcatt

SEQ ID NO: 198979 - DNA, 827 bp, Gossypium hirsutum
ccctctcgtccggtgaatcgaggcagaattcatcttatcgtacgagttcggcttcatgggattctcatactggcaatcctcagtatggtcaagaaagcccgagttatatatcacagtatagctctgcctccccgcagtattatccacctccgcaaaaccgtggcagtgataaaaggacactagaccggaggtattccagaattgcagacaattacaactccttagatcaggtgacggaagctcttgctaatgctggtctcgaatcttccaatctcattgttggtattgatttcacgaagagcaatgagtggacagggaaaagatcattcaatagaaaaagcttgcaccacattggaaatagtttaaatccttatgaacaagcaatctcaatcattgggaaaacgttagctgccttcgatgaggacaatttaattccttgctttggattcggtgatgcatcaacacatgatgcaagatgtcttcagtttctacgcggatgacagattttgtaatggatttgaggaagtcttaagccgctatagagaaattgtgccacatcttcgacttgcaggacctacatcgtttgctccaatcattgaaatggcaatgaccatagttgagcagagcagtggccagtaccacgtgttagtgataatcgcagatggccaggtaaccagaagtgttgatacccagcatggccagctaagtccgcaagagcagaaaactgttgatgccatagttcaagcaagcaagcttcctctgtcgattatattggttggtggtggagacggaccatgggatatgatgaaggagtttgatgattacat

SEQ ID NO: 198980 - DNA, 896 bp, Gossypium hirsutum
  unsure (1)..(896): unsure at all n locations
aaacgattcaagttcaaatgaaaatgctgcacagagcaacaccaacaacaatgaaaacaataacaatgggaatgcgggtcaggacgggaagaatgccactcanagtaacactgacaacaatgaaaatgtgggtcagaatgagaacaatgctgctcagagcaacactgagaacaatgaaaatgcgggtcagaatgagagcaatgcaactcagagcaacactgagaacaatgagaatgcgggtcagaacgagaaaaatgctgctccaagtgacgctgagaacaatgagaatgtgggtcagaacgagcacaatgccgctccaagtaacactgagaacaatgagaatgcgggtcagaacgagaacaatgccgctccgagtgacaccgacaacaatgagaatgcaggtcagaacgagaacaatgcgactcagagcaacactgacaacagcaacagcaacaacaacaacgaaaatgcaagtcaaaacgagaacaatgctgctcagagcagtaacaacaatgaaaatgcaagtcaggatgagaacaatgcatctcagagcttcaccgacaccaccaacaacaatgaaaatgcaagtcagaacgaaaacaatgcttctcagagctacaccgacaccaccaccaacgagagcaacgatgccattcagaccaataccaacagcaacgaaaactcaagtccaaatgagaacaatgccgttcaggcctccaataacgaaaatgcaggtcagaacgagaacgagaacaatgctactcacagcttcaacgacagcaacgggagcagcaattacgacacaaatacagatggaaacacccagaataatcccgacacttcttcaacgaatcaagaagtaaaagaaggtgaaaccggtttgggaactttgccac

SEQ ID NO: 198981 - DNA, 364 bp, Gossypium hirsutum
cgtccttcttcgcgtgcgaagaagaagaagaagcagaaccaaaccgggttttgttttggttctctcttccaatggcttccaccattgtcatccgaaccttcgtttacgtcgaaggcgttgaataaatccctgaatacccatttcgtcccttccttcaaactccccggtttggtctctttcaagccccgaacggtttcccagttgtcggttcgagccgggttgatcgagccggacggtgggaagctcgtggacctccacgtggcggagccggagcgggggttgaagaagcgagaagcggctctgttgcccagggtgaagctgaccaggatcgacttgcaatgggtccatgttttgagtgaaggct

SEQ ID NO: 198982 - DNA, 473 bp, Gossypium hirsutum
cggtcggtcttctggatttattactaaactatttggattttggttctctacccaaattcagacaagcaaccggaaaaaagtgtcagttgtttcagttttcagacaaggaaacaaagcaggaaaatcgggtcagaaaaaaaaatgagagttaactggaaatcatggtcacttaacaaggaccatcttgtgaagcttgcaattggcattctcttagtgggttttgcttttaagctcttggtttttcgttctaaaggatttggtgttgatttggaattccctgaggtagagaaagagtatgttcaaaaaccagatttgaaatctcctctccctgttcaaatacctgaaaatgatgatcaaatgcctctagatgttgttatagagaaatgtgatctctttacaggggattgggttcccaatccctcaggtccgacctataccaacgggagctgtcccttgatagaagtcatcagaat

SEQ ID NO: 198983 - DNA, 698 bp, Gossypium hirsutum
  unsure (1)..(698): unsure at all n locations
ccgaaaaaaaaaangggaggccgcacgccgtaaactacancaaaatgaatctttgttctatttattaatgtctattaccttgactgtctactaacgacaattgggtactaatctattgagggacattgggcatcnaaaagctacttacaaaattatatctttacaatactgactcagattgncccataagagcaccaacataaatactcctacggcatatatggtatctattcttattcgaaacccccgggacacttcactgaaagaatgtgattttgtggctctctgcttgctctaccacaccccagaacatgtttgctcgacttagtgagtcttctgtagtgcagattcacccacgttggaatataattccaggctattcgccaaattgcaatttttatcttcgaaggtagatttaggagccagatatttttgtaaaaattcctagtttcagtttgtcaggcataagccctacgattattttcattgccctgtaatagtttataggctcttctcagggtaaactctcccgaggactcccccctctaggctggaaaatctttgtgaggctctctagcacgcagaatgcagaggattctctcagctatctccattggaaaggtagactcagtcaagtctttccccttcctctgactttcatcaattagatctgcaactttacagtcacgtaattatac

SEQ ID NO: 198984 - DNA, 770 bp, Gossypium hirsutum
  unsure (1)..(770): unsure at all n locations
ttcccctttttcagcctctaagatttgcgtcattcatttcatctgcttctttgtactcccttccggtcattttcctttagtcgctcggcataatccagaactgtgccaatcaggtaaatttcttccttctcctttaatgcctcccttgctagcatatgagccagactattcgcctctctaggcgtgtgctcaaaatagggtctttttgattgtattagtaactgatcaatatctcgaatatatgctccaacccttgatctgtcatttgcttgtgttgtgcatttcttaatgattgcaagtgcatcaccttcgataatgatatttggccattgcatgctcataccgatgcgagttgctgtcctgcaagcaattgcttctgcagcaaaggctgatgctacttggtgatgaagctctgtactagataaaagggcgcttccttgactgtctctggccacaattcccactgccgattggcgcgcgttctcatcaaaggctgcgtcaaagttaatctttacaaactgaccagattgcccaaagagcacaacaaaataccctacgcatattgggactattctattcgaaaacccaggacactcacgaaagatgtgatttgtggtttctgctgctctaccacacccagaacatgttgtttgacttaagagtcttctgtagtgcagattcacccacgttggaatataattctaggctatttgccaaattgtaatnttatcttcgaaggtagatttaggagccagatatttntgtaaaaa

SEQ ID NO: 198985 - DNA, 915 bp, Gossypium hirsutum
  unsure (1)..(915): unsure at all n locations
gatcccggtcgaccacgcgtccgcggacgcgtgggtgcttctttgcagtaaacagagttttgagtttttccctcccgactcagtcacttgctcactcggtcacacacatcgttcttccagcggtgttattcggaaatcctagccgacgatgtcgcttcgagtgttgaaccctaatgccgaagttctcaacaaatcggcggcactgcacatgaacatcaacgccgccaaaggtttacaagatgttctcaaaacaaatcttggacctaaaggcactatcaaaatgcttgttggtggcgccggtgatattaagctcactaaagatggaaacactctcttgaaagaaatgcaaattcaaaatccgacggctattatgatagcaaggacagctgttgcgcaagatgacattagcggtgacggaactacatctactgtactcttcattggcgagctaatgaagcaatctgagcgttacattgacgaaagtatgcatccccgtgttctanttgatggttttgaaattgccaaaagagctacccttcagttccttgagaagtttaagaaccctgtggtaatgggttctgaacctgataaggagatcctgaaaatggtagcaagaactacactaaggaacaacttgtatgaaagattggcagaatcactgacagacataattggtaatgccgttctgtgtgtccgaaaacctgatgaacccattgatctctttatggttgaaataatgcccatgcgacataagtctgaatttcacacaccgctggtggaagggaccaattttggaacatggttctacgcctccccaatattaagcgaagagcccaaattgtttactcttgacctgttatgtatccctggagtttgacagattgaattaatgccaggttttctactcaatgcttt

SEQ ID NO: 198986 - DNA, 651 bp, Gossypium hirsutum
  unsure (1)..(651): unsure at all n locations
cggccgcgtcgacgagggacaacacctaccattcttaaaaccgtgtttaccagccaaaagaaaaagcctctgtaaaacaaacagagctactaatgcatagttaaacgcaagtagctttactgtcggaaaatttgatgaattttttgtttgtaagaacaattacatgaggattcaaaaactgggtcttaacctaaatggaacaatctttaccaaaacaaccccaaggggtcatcatcgccattgacgttgttgatgaagggaccagagcaacaagaaggaaacctgacaggtaacgaggaacaagaagatagcaaccgtcacggttcttcttcttctctggaactggatcttgagtctggggtagtgtccgaaaccaagtcacatttagcaaaagaactggaaagagattgcaggatttgtcatctcactttggacccgaccaaccatgaatctggtgttcctattaagttaggttgttcttgtaaggatgatttggctgctgctcataaacattgtgctgaagcttggttcanaatcaaaggaaacagaacttgtgagatttgcggatcaacagctcagaatgttgttgctgctgcaaacgaaaccgacacaatggagccatggaacgaaacgaatgattctgcaacaact

SEQ ID NO: 198987 - DNA, 800 bp, Gossypium hirsutum
atctttcctagcaagcacctctcttcttaactgtaaatttcaaatctctcttctgccttaaacatggctactatttaccaccttgccactctcatgctcttctgctttatccaactcagcttctccgagttggttcaagagcaacccttggttttaaagtaccacaacggtccactcttgaaaggcaagatcaccgttaatctcatctggtacggcaagtttacacccatccaacgctccataatcgttgatttcatcaactctttgagttccgataaggccacaatggttccttccacgtcgtcgtggtggaaaattactgaaaagtacaagggtggttcttctaccttagctgtaggcaaacaaatccttcttgaaaattacccgctcggtaaattccttaaaaacccacatttacgggcattggccagtaagttcaatggcgttgataccatcaacgtaatccttacttccaaagacgtcgccgtagaaaggttttgtatgaagtgtgggactcacgggtcaacccgggttggacgtggtcctgttcgtgggacttatatttgggtcggaaactcggagactcagtgtccgggtcaatgtgcttggccttttcatcaacctatttacggtccacaaaccccccctttggttgctcctaacggagacgttggagttgacgggatgattattaatttggctacgcttttgggaaacaccgttaccaacccgtttaacaatgggtattttcagggcccggcgaatgctcctttggaagccgtttccgcttgttccgggat

SEQ ID NO: 198988 - DNA, 570 bp, Gossypium hirsutum
tggacgcgtgggtttttatggtttaatggagatgtggacaatccaaagaagaaaccaggttcttgataccatacttttgcttggaatagttctggttttgattaacataaatggtgttgaaagcagaaagtacagtgcttcattgacagactttggaggggttggtgatggagtaacatcaaatacgaaggcttttcaagctgccatttttaacctcagccaatatgcatcagatggtgggtctttactctttgttccaccaggaaaatggctaactggtagttttagccttaccagccatttcactttgcatatccacaaggatgctactcttcttgcttcgcaggatgagagtgaatgggctgtcattgatcctttaccatcctacggtcgaggaagggatgccgatggtggacgatatatcagtcttattttcggaaccaacctcactgatgtcgtgataacaggtgataatggcactattgatggtcagggtgttacctggtggaacaaattccataagggagagttgaaatacaccaggccttaccttattgagatcatgtattc

SEQ ID NO: 198989 - DNA, 479 bp, Gossypium hirsutum
ttcacgcgtccgattccaaacaggaagtcctagagagagagagagagtgaaaggaaagaactttcaggaattttctctctctagaactcgcctttctgtgtttgtttccctagaaaaaaacaccccggaatttcccccaattcaagattggtgttttcttcttcaaattgaatccgaatcttttataaaatttctcttttgggttctcaagtgatgtctttattgccaaagagcgattcaattcatatccgtgaggtatgggatgataacgttgaggaagaatttgctttgattcgtgaaatagttgatgattatccttatgttgccatggatactgaattcccaggcattgtattacgtcccgtaggatatttcaaaagcagttatgattatcactatcaaactttgaaagacaatgttggtatgtaatactttgtcaattaggtcttactttttcaaatagaatgggagctttcctt

SEQ ID NO: 198990 - DNA, 480 bp, Gossypium hirsutum
  unsure (1)..(480): unsure at all n locations
gtnatantcactttctctaaaacctcttttagtggtattgttttctaagccattttttttataatcaagaactggctaacacaaaggatagcattctggaggaaaccaacaagaaccaacaagtggttctcgtcctctatgaggccataaacactcgagacgtccaaaccgttcatcaaatccttgcccctgaccttgaatggtggttccatggtcctccagcccaccagtttatgatgcgcctcctcacgggagcttcatcggaccaaactttcattttcgacgttgaccctctttcggtcaccacttttgggtccaccgtcatcgttgaaggctgtgatcataaacgttcaatctcttgggttcatgcttggactgtaagtactgatgggataataacacaagtgagagagtatttcaatacttctctcactgttactcgtcttgtgaactctagccaaacaccaccattcaactaca

SEQ ID NO: 198991 - DNA, 647 bp, Gossypium hirsutum
  unsure (1)..(647): unsure at all n locations
tccaaatatactcactggtgaggcgagaggtgggaactttgcaagagataaaaaaaaattgagaatggtccaaaaatgaataaaggttcatcatcaatggcgaaagatcagtcaatctcagtttcagaagcagtacacaagattcaactccatctccttgacggaatccgagacgacaaacaactaatctcctctggttccttaatttctcgaagcgactatgaggatgtcataaccgagaggtcgatttccaacacttgcggttaccctctctgccgaaaccctttaccttccgaaccccgtcgaagaggccgttatcgaatctctttgaaagagcaccgagtttacgatttacaagaaaccagccgcttttgctccgccgattgcctgattaatagccgagctttcgctgggagtttacaagaagagaggtgttccgttttgaatcatgcgaaacttaatgcgattttgagtttatttgatgacgtggatttgaacgataaggatttggggaagaatggggatttagggttttcgaatttgaagattanagaaaatgaggaaataaaagctggggaagtttcttcggtgggtccttccaatgctattgaaggctatgttccacaaagagaattggtttctaagca

SEQ ID NO: 198992 - DNA, 946 bp, Gossypium hirsutum
cccacgcgtccgttcttcttcactcaaaaagaacaatagatcagtgttaaaacttaaaagccttgggttttcctcttctccaccatgttttgacttgaacaagttttttttacatttttctgtcttgttcccacgtctcagaattgaaaacccagtttgagttttgagttcatttgctaaatttttgatctgggttttgaatctactggtttttgaaaatggctctaagttcagttgtggtcaccatggagaagcctaataagttctctttagtggaaatcaatggctcagattcaactctgctactcgagaaacaaaaagcagtgagtcccaaacagttcacatggttccttttcctcaaagctaacagagtttttgcttgtctttcatggctgccaatggctttgaaaaccacgtttttatcggtcaagaaacgcattgcattatctgatgtgagtgacgaagaagccaaaagcagaagattgtatagattcatcaaagtctttctttttatctctatatttgctttggttttagaaatctttgctcatttgaagaaatggaatttgaacatgattcaaccatgggaggttcaaggtcctctcccattggtgttttatgacttggttgtcatttagagtttgattatgttgctccattggtgctaaccatgtccaaattctgcattgttctcttcttgattcagtctcttgatcgccttattctttgtttgggttgtttctggattaaatataagaacttgaaaccaagaatcaatggagatgcttatgatattgaagatggctcaagttttcctatggttctagtgcagatcccaatgtgcaatgaaagagaggtattcgcacaatcaattgcagctgcttgtcagcttgattggcctaaagaccggattctaattcaagtcctagatgattcatatgatggt

SEQ ID NO: 198993 - DNA, 454 bp, Gossypium hirsutum
atttaatccttacgtttcttcttcttccgggaattaatcaaaatcatcactaccacaaccgacaccgatatgaggaaagaagcagtgccctccaccgcccctttcaccgccaccaccgttggcaagaagctattcctttgctttgaaactaaaccctttgttgttacattgcttgctcttactttagttatgcttctctggaacttccctccttactatcaaaacctctctactacccgtccctgttcagctgctcctctcgcctcagtagtcgctgccgcctccactagcttattctccaccaatgcatcactcccttatacagccacccccgcaggtgaaaagaagtactactcggatccctaagttaaacccagggaccccaacaagcgggtcttcgaggcttacggtaacgctgctgctttgtctgtgcagatgggtgcttacaggggcg

SEQ ID NO: 198994 - DNA, 633 bp, Gossypium hirsutum
gaaaaatcatattttggtttctgcagtttggttgaggggttcagggatgcagttgtctttcacaaacaaggtatctacagttcctcagttcttgtcgttcgatggtgctcgagacgataaaccaagaaaagccacgcatgacacgctgttgtcatccggttttatgactattccaactactgattctaacaagaaaccgcatcctggcttgactcagaaacaagggggaaaccactatgcggctaccacctatggtctccaacaactcgatgtacaccaatcccgcctttcccacgaagcaaggatatttccaagttcaagtcagctgaatcacacgattacggtttctatgaacactcctcttctccaaccccatcttgcttcccccggacagaacataatcggtcatactataaacccgcaaccttttaccggagttccaatcatggctgcacctgtatctgttgttcctccatcaagtcctatcatcggtaccaccgatcttaggaatgctgccaaatcttctaaggcaccagctcagttgactatcttctatgctggatctggatgtgtgtacgatgatgtatctcccgacaaggcccaagctattatgttacttgctggaaacggtcc

SEQ ID NO: 198995 - DNA, 698 bp, Gossypium hirsutum
ccaacagcagttacagcatccgctgtcacagcaacaccagcaactggtcgatcatcagcatatttctactggagtggctgccatgtcacagtatgctccggcctcacagtcccggtcgtcacctttccaagccataccttcactatgccaacaacagagtttttctgactcaaatgggcacaccgtgaccagccccattgtatctcccttgcacagtcttttgggatcctttccccaagatgaaccgtccggtctgctcaacttgcctagatccaacccagtaataacatctgctgcatggccatctaagcggcctgcggtctgaagcttctgtcattctgagatctccacaatgtgttctgccccaggtggaaacagttggggcccacccaaacaaacatttctcataattctatttcgttgccaccctttcctggcaggggagtgctcgatagaccaagcagcgggttctgatccacagagccatctcttatttggtgttaatatagagccctcatctcttctattgcaaacgggaatgcagccttaagggatggcagcgagaggactccctactatcccttctcttttatatgccatactgaagcactgattttcaggtaatcagcatgacacttacagttgattgatgattggtatctgcatctcaaagatgtgggcatgaaaccaatccagat

SEQ ID NO: 198996 - DNA, 592 bp, Gossypium hirsutum
aaagtaccagtttatataatggaaatagattaacaatggttcaaaacctctaatcaataatataatcagttcaatatttcctggtaaacaggaaggcattgcagtaggaaggacttttgctgctcttaagaattataaagtggatggtaacaaggaaatgatggctattgggctgatgaacatggttggctcctccacttcttgctacattacaactggcgccttctctcgatcagcggttaatcacaatgcaggagcgaaaagtgcagtgtctaacatagtaatgtcgattacggttatggtgacccttctctttctcatgcctttattccagtacaccccaaacgtggtgttgggagctatcattgtgtcagctgtagttggccttatagacattccagcagcctgtcaaatttggaagatcgacaaatttgatttcattgtgatgttgtgtgctttcttcggggttattttcatctcggtccaagatggtcttgccatggcagttgggatgtctattttcaagatccttctgcaaattactaggccaaagacagtgatgttggggaacattcccgggacagattttttc

SEQ ID NO: 198997 - DNA, 648 bp, Gossypium hirsutum
aaatactgtattttcgccgtggaaatggactgagatttcctctgctgaaacccaaaggaacaaaaatgtattccgatcccaaacctagttttagtttccttatcctcctctttctttgtttacaacctctcatcttctcactatctaccgatgcctcacctccgcctactgtctgcatcgtcggcagcggcatcggcggttcctccgtcgcccacttcctacgccactactttcatccctccccttcccaacccagacctcctaacatcaagatcttcgagcgtagctacgtcgtcggtggtcgcatggccactgtctccattggcggtgaaacttttgaggctggtgcttcaattcttcaccccaagaactaccacgctcttaactactcgaatcttcttgggttgaaggtcaaaccgccgcctgcctcggaggatgatgattcgatgtcgcttgggatctgggatgggaagaaatttgatttcaaaacccttcaagtggattccaagtttccattggtgcagaagattgtttcctatgttaattcttttcgcatctttttccgctatggcttctctcttctaaagatgggcagcttcgttgagagtactgtggatagcttcttgaagtactatgaaagccctgaat

SEQ ID NO: 198998 - DNA, 878 bp, Gossypium hirsutum
  unsure (1)..(878): unsure at all n locations
cggacgcgtgggcggacgcgtggggaaatcatatgcgtctattgtgaagtttatgaaggagaatggagttcctttatccacccgtacgcattcccttgtgaagtctgcagttaagagccatgaccaaccaggaactgtggcaccacctatttctccggccccagtgtctgatgcacagatatccaacaacagtattacagaaaatgggaccaatcaagatgtggaagctgagggcccctccatttatgtcaaaggtctgcccctgcatgccacacctagcatgctggagaacgagtttaagaagtttggacctattaagaacggtggtattcaagttcgaagtcagaagggattctgttttggttttgtggagtttgaacttgcaagttctgctcaaagtgccatagaggcttcacctataaatattggtgggcgtaatgcaattgttgaagaaaagcggtctacctctcgagggaacaaaggacggtcttctggttcaggggctggatacagaaatgatggagcaagagggagggtaaactatggtggtggtggcaggggctacagccggggtgagtttggaaacaggagcaacaaccgaggagggtattccaaccgcagaggtgatggatatcaaaggggtgacatggggagtaatggcggcagccgcatgaaccactctggtggactagctgttaatgcagcagccaagaacatggcaccaagggtatctgcccctgcttgaagacattaatttggaaattggttgggagtgatcaaagatagttttttggtatgtagtgtantgatttattgacattgttgcaatatcatttagaaaaaagcattganagcttagcagaggaaatntggctgtg

SEQ ID NO: 198999 - DNA, 904 bp, Gossypium hirsutum
  unsure (1)..(904): unsure at all n locations
cccacgcgtccgattgaaaggctccctttcagacaatctaaactgtgggagaaaccttgagttcgttgatatatcaaacaataggttaatgggaagcttgccttcttgtttaaactctgaaacaagagataacagagttattaagttcagtggcaattgtgttgtccattgccggacatcatcagcatccagaatcatattgcagagaatttaaagttcatgtttataagagcagtaatggtggcaagggcataggagtattggttggtctcattgttggaattgcagttctcattgttcttgtggctattggctttctcattgtgtgtcgaagatactgccctcgagtgagatcggagcaacatttactgcagaaatcagtaccagagaactcaacagcagggttatcatctgagattttaaccaatccaagacatgtttttgaatcttcaaagtcggaggtacaaattcttccaaggtgtcgatcattcagtctggaagagttaaaggaagctacaaacaatttcgatagctcggcttttctcggtgaaggttcatacggaaagattttcaaagggttattaaagaatggaacccaagttgctataagatgcctgcccacatccaagaaatactcgatccgtaacctgaaactcaggttggatatgctggcgaaaattcgacacccacatttggtttgcattttggggcactgcattgaagttgaacaagatgataattgcagcataaacagagtcttcttcgtgcttgaatatattcctaatgggaattttcgttcccatctctctgataattctccaggagaagttctcanttggcctgaacgattagcagttctgatatgcgtttgcaaggcantgcatttcttgcatactggagttat

SEQ ID NO: 199000 - DNA, 508 bp, Gossypium hirsutum
cggacgcgtggggcaatttcagttgattctatgtgctgcttcttctccttcttcctcttcaacaactccaattttcctttcgaaaaggaataatcaataacaaaaagacaaatccaatcaatctgagcaaaatccaaatgggtaatcttttctgttgtgtacaagttgaccagtctacagtagccattaaggagagatttggcaggttttgaggatgttcttgaacctggatgccattgcctaccttggtttcttggaagtcaacttgctggccacctgtcgctaagattgcagcagttggatgttcgttgtgaaaccaagactaaggacaatgtatttgttaacgttgttgcatctattcaataccgggcactggcagacaaggcaagtgatgccttttacaagctgacaaacacaaggacacaaattcaagcctatgtgtttgatgttattagagcatgtgttccgaagctaaatctggatgatgtttttgaacaaaagactgaaa

SEQ ID NO: 199001 - DNA, 488 bp, Gossypium hirsutum
ctcattttcacattatttcccacaccaaaaatggctcagaaagtggtattgaaagttctaaccatgaccgacgaaaagaccaagcaaaaatccatagaagctgctgcagatatcttcggggttgattcaatcgctgcggatctaaaggatcagaagctgacggtgataggacaaatggatgcagtggcggtggtgaagaaactgaagaaagtggcaaaagtggatataatatcaataggacctgctaaagaagagaagaaggaaggaaaaaaggaagaaaagaaagaggaaaagaaacaggagaagaaagaagagaagaaggaagagaagaaagaggaaaagaaagaagaaaagaaggaagaaaagaaataaatttaaaaaataaaatgaaaaaaccccaaaccatcttcaaggtttctcaacaaatctctgcttgtagtgttacagtgtatgctctgttttttcttttttctttttggtggaaataa

SEQ ID NO: 199002 - DNA, 484 bp, Gossypium hirsutum
ttcacgcgtccacagagctctctccttctaggccttacatttcgtttggcgttctactatttccagcgtctctttgcggctgagtggtcttttgaattctttggtggaaacttttgaacaaaatcgaagttacagagacttaacgattaaaagagaaagaatggaaacacaaaagagccaggccgagaaacaagcgacgatggcttcatgtagaaagaaaaagaatgaagaagccaccttccttgaagacttgaaggatcacatcgatgagtttggtaatgcatcaatggatgagcataaaacttgctttaagaagaccatccaaaagatgtttggaatgtcaaaatttgtagctgaaaggaatgctgaatcaaaggaaacaacagtatcaaaataaagtatgttcatctttaatagcatgatatgtagtagcatgatttggtttacactatatttaaaacaaagccttcggtactttttgatc

SEQ ID NO: 199003 - DNA, 692 bp, Gossypium hirsutum
  unsure (1)..(692): unsure at all n locations
ttttcgttttcttctcctaggctttcaaatcttctcttcagttctggattttcaatccaattaaagtatttaattactttttagagcaaataaaaaaaccctaaattcacaacgaaatttgaaaaagaacaagcaattgaaaattacaaaagaaaaacatgtcgagattcagagatcggactgaagatttcaaagacgctgtacggcaatctgcaatttcatcaggtttcaacgagtctaaattagcagcaattatggcgtctttcataatccataaaccacggcaaaggacgccctttcttaactctgcactcaaaacgttggagagtatcggagctttggatcagttcttgttaaagcaccgtaaagattacgtggcatcgtcaccgaacaactgagcaagaaagggacagcattgaacatgaagttactgctttttgttaaagcttgcaaagaacaatttgatgttctcaaaaattgtataaaggatgaagaggcaagctccaaggggtggcttgggattagcggattcctcggatgctgatacgatagcgcacaaacatgagtgggtactaattntgagtgagaaacttcatttcgtcacggcacagtttgatcagatgagagctgttcgtttccaagaagctatcaatngagcaattgccaagaagaaaactttaaagaagtgtggn

SEQ ID NO: 199004 - DNA, 442 bp, Gossypium hirsutum
tgacgaactaatgtgtgctcttctaccagattccccttctgccacagccagcagaacaaaaagtggtcctatatggatcactaacggggatcctctacaacatcctgttgggtctgcgctttcagctgttctccacagtgattacatgcgtgcatcagacaatgaaatactaaggtgtggtgatgattcattggaaccatctgatctgagacagttcgcacaatcacaggctgattatgtgctgggtgatcaccccatggacataagctacctagtggggtatggtggtaaatacccaccatttgtacatcacagaggtgcttcgaccccagttgatgcaaccactggttgctctgaagggttcaaatggcttagctcaaagaaacctaaccctaatgtagcaattggagcccttgtagggggaccgttcaaaaatgaatta

SEQ ID NO: 199005 - DNA, 473 bp, Gossypium hirsutum
acagtatccttagcaaaagggttccactaccaaatggaggttccttggtgattgaacaaacagaggccttagtctcaattgatgtgaatggaggacatgggatgtttggtcatggaacatcacaggaaaaagccactttggatgtcaatcttgctgctgcaaaacaaattgctagggagttacggcttagggatattggtggcattattgtagtggattttattgatatggcagatgactcaaacaagagattagtatatgaagaagttaagaaagcagttgagagagaccgatcaatggtgaaagtctctgaattatcgaaacatgggctcatggaaataacaagaaagagggttcggcctagcgtcacatttatggttagtgaaccatgcacttgttgtcatggtacggggagggttgaagctttggagacctcctttcaaaaattgaacaagaaattggtcgattacttg

SEQ ID NO: 199006 - DNA, 715 bp, Gossypium hirsutum
cggacgcgtgggggaaatggcaggcgtcgaagcagggaaggaggaggaggcgaccgctgtgagaatcaccggaaaaagccacgtcaagccgggtaagttgataggaagaaaagagtgtccgttggtcacatttgatctcccctacctggctttctattataaccagaagctgctgttttacaagaacgacggtggtggtgagttcgaggacaaggttgaaaagctcaaggaagggctgagggtggtgttagaggagttttatcagctaggaggtaagctcgggaaagatgacgatggggttcttagagttgattatgacgatgatatggatggtgttgaagtggtggaagccgtggcagaggggattaccgtcgatgaattgaccggtgatgatggtacgagctcatttaaggaattgataccttttaatggcgtcttgaacttggagggtcttcacaggcctcttttgtccatacagttgacgaagttgaaagatggtgttgcaatggggtgtgctttcaaccatgccatcctcgacggaacctccacttggcattttatgagctcttgggctcaaatctgtaacggtacttcgagctccgtcgttgtgccgccgtttcttgatcggaccacagctcgaaacacccgcgtgaagctcgacctcagtccggttgtttcctgcaacggcgacgacgccaccaaacaaggccagcca

SEQ ID NO: 199007 - DNA, 514 bp, Gossypium hirsutum
cccacgcgtccgatttttctctcctataaataacacagccgcagtgaggaaccgaatggcggggaaaaataacctggtcctttttttttttgttcaaaagcgaagccctaactcgcatgctgttcggatcttaatcgtcgaagatccgattcatatctatctctgatctgatccaaaacgaaaccacccggcctctgagaaatgacgcgtcgctgctcgcattgcagccacaacgggcacaactccagaacctgcccgaatcgtggtgtcaagttgttcggagttcggttgactgacgggttggttcggaagagtgccagtatgagtaacttatcccaattcgccgggtccaattctgccgggcataacgggaatgggtcgggttcgcccggtgaaggtccggatcacgccgatggttatgcttccgaggattttgtccctggatcgtcttcgagtcgtgataagaaaaaaggtgttccatggactgaagaggagcatcgtatgtatctacttg

SEQ ID NO: 199008 - DNA, 590 bp, Gossypium hirsutum
aaaaaaagagagaaatgggcactttctatctctactctcatcatcatcttcttcatcctacgactgggtgaaatttgacaaccctaattcccttaaacggaaaacgcaaatttctctcttccccaaaacactcttctccttctccgttcctctgtttctcctctaaaaacaatccttccccttccggcgatagtgttcccagtaacttttgcatcattgagggaccggagactgttcaagattttgtgaagatgcagcttcaggaaattgaagataatataaagagcaggcgcaataagatctttctcctcatggaagaggtaaggagattacggatacaacagcggataaagaatgtgaaagttatcaatgagaatggcgaagaagaaacagatgagatgcctgacattccatcttcaattccttttctctctcatgtgacaccaaagacaatgaagcagctctacttcacaagcctggcatttatatctggaataattgtattcggaggccttattgcaccaacactggagctggaattaggtctaggaggcacctcatatgaagatttcatatgcaacatgcatcta

SEQ ID NO: 199009 - DNA, 475 bp, Gossypium hirsutum
gttgaagccaagcactaatgctgcatcagcaccggtaactaacccaccgtcatcagctgctccagaacccgaaattgatcattcatctagacattctggagcttcaagacatgtgttacaaatgtcccctttggagcctttggagcccgatatgacgcaagaacattcattaaccaaagaaagtacgatgcccaacgatccagctggagccaaagaaaataaacagtttctgccattcatttctcctccacccgtatctgcttcaccaacttctgaaagaccaagtgatccagcacctgcgattttgaaaacaaatagcgaggccaacatagatctggaggatgttttagccgctgctcagtcagctgctgaaactgctgagcgcgctgcagctgcagctcgggcggcagcaagtcttgcacaagtcagaattgccgaacttacacagaaaaggaatggccaggtcaatgagggt

SEQ ID NO: 199010 - DNA, 550 bp, Gossypium hirsutum
ctaaatttcctcgcccatataaaaaccaataaaataaaagagatatatttcacatttatttttctggatttgggcctataaaaccactgaaaagatagtaacaaaatccaaaaatggcggctccggcagtggagggagtagccgtgacggccctccgatcggtcctactccgagtccgacaggcagctgaacgggcggctactcaacccgaacgggtccgggtcgtggccgtttcgaagactaaacccgtgtcactcatccgccaaatttacgacgccggtcaccactgtttcggtgaaaattatgtccaagaatttgttcaaaaagcccctcagctgcctgaggatattgagtggcattttattggacatttacagagcaacaaagttaaaacccttctcggtggagtgccaaatctagccttttttcagggtgttgataatgagaagatcgcaaaccatcttgaccgtgcagttttgagccttgagagaaaccctttgaagatttttgtacaagtaaatacaagtggagaaccatcaaaatctgggat

SEQ ID NO: 199011 - DNA, 542 bp, Gossypium hirsutum
aaatcaccaaataaaatcaacccaaaaaatagagaaaaaatctttctccgagtttcgcctttctcggtcgtcttgttttcgtaagcttgtttacctctcaatttcatagctatgactgttatggcccctgcgccctatcgatcaacaagaagatgaggaaatgctcgtcccacagtctgatttgaccgacaatcaccagcccatggaagttgtagcgcaacccgaagctgcaaatactgtggaaaatcaaccagttgaggatcctccttcatcaagattcacttggaggattgaaaacttctctaggttaaacgctaagaagcattattctgaagtcttcgttgtcggtggttataaatggcgaatactgctatttccaaagggaaacaatgtggatcatttgtctatgtatttggatggtgctgactcagcaagcttaccctatgggtggagtagatatgcccagttcagtttggcagtagttaatcaaattcataataaatattctatcagaaaagacacacagcaccagttcaatgcac

SEQ ID NO: 199012 - DNA, 773 bp, Gossypium hirsutum
  unsure (1)..(773): unsure at all n locations
cttcttcaattcttgtttttgtggcaaacacatggcaagctcaaggactgtttgtgtaatggatgcttccggtcaccttggctccgcccttgtccacttgctcttacatagaggctacactgtccatgctgcccttcagccccatccaaatgggttccaatcagttgaggagctgtttccttgtagtaataaaaatttgaagatattcgatgcagacccttttgattaccacagcattacagctgcattgaagggatgttgtggtttattctactgctttgagcctccatctgaccattctacttatgatgaattcatggcggaaattgaggccagagctgcacacaatgtgttggaagcatgtgctcaaacagatacaatagagaaggtggttttcagatcctccgtaaccgccgtcatatggaacgaaagtcgaactggttccgacctggacgaaaagaactggaccgacatcaatttttgcaagaagtttaagttatggcatgcactgtcgaaaacgttggcggaaaagtcagcttgggcactggcaatggaccgaggcataaacatggtgaccattaatggaagattgttgatgacgcctgacctaaccatcacaaatccatatctaaaaggagcacctgagatgtatgaagatggggtatctgttacagtggatctaaggttcatanccgacgctcatatctgtgtgttcgaagatgtatcatcgtatggacgatatctatgcttcaaccatgtaatcaattgcagcc

SEQ ID NO: 199013 - DNA, 751 bp, Gossypium hirsutum
  unsure (1)..(751): unsure at all n locations
nctccttaancagtcagcatcgaaccaggatagnngagctcagcttgctcatcgcnatgctcggtcagccccnattgctgccnaagtatggtctcgtccgtcaggtgataataactgcaatttcatcataattcgtataaaatgatggaatttagtaggtnttttnntttgttaatgaggaatgaaaattgcaatgatttaggcagtgaaaaggactttggaaatcttggtagcactgggtacttttgctttgaaactgtttttggaccaaaagaatgaaaccttagatcaaaacaagaggaaacgcgcagctgaattgaggactatcttcaccagactaggccctactttcataaaattgggtcagggtttatccaccagacctgacctttgccctccggagtatctcgaggagctggctcagctgcaggtattcctgtattttatggcctagtacagcagtcaggactacatgcattagtagatgaaaaaaaagttcctataacaatggactgtgagtctgtgatgaaacaacatatttccattgcagatgcaaaaacatagctagttacagcaattaaactcatcctttggacaacctgataactagcccttggtatgacagattatagaatggttcaacaactcagggttctatggaatttcttagtactattcacaattcaaagtgcataacgagaagttcatgctcaccctataaatcaaaaagattcatccacacatttcattt

SEQ ID NO: 199014 - DNA, 547 bp, Gossypium hirsutum
tcttcattgctgatcatcccgttgagcttgaatcccctaagcctgatcaactctcccctgaaacccccgctgatcacattttcaggtctaaattgcctgatattcctatctcaaaccacctccctctccacacttactgctttgaaaatctcccctctctctccgataaaccatgtttgatctccggctcttctgggaaaatctattccttcagcgaaactcatttgattgcgcaaaagacagccgctggtctatccaacttaggcattcaaaagggagatgccatcatgattctcctccacaactgtgccgaattcgtcttcgccttcatgggagcttccatgataggagccgtttctaccaccgccaacccgttttacacctccaaagaaatcttcaagcaattcatagctgctcgagccaaactcatcatcactcaatcccaatacgttgacaagcttaaagacaccaataacaacaacgacggcgtcgaaaacttccccaaaataggtgaagatttcaaggtgatcaccatcgacgacccccc

SEQ ID NO: 199015 - DNA, 671 bp, Gossypium hirsutum
aaaacttttgtattgatatttctcaaggtcacatcccgaatcatgttggcgagcccaagctcgcagtctgttgcacacgatgagaagtatttgtcttgctggagtgtacttgacattggcacgggaaatggtctgctccttcaggagctttctaagcaggggttcacagatttaactggaactgattatagtgaaggagcaattgaccttgctcgaaccctagctgatcgagatggattttcaaacatcaagtttctggttgatgatattcttgagacaaagttggatagacagtttcaacttgtcatggataaggggactctcgatgccattggcttgcatcctgatgggcctatcaaaaggattatgtattgggattcagtttcaaagttgttggcccccggtggaatattagtgattacatcttgcaaccatacaaaagatgaattggtccaagaggtggaaaatttcaatcaaaggaacattgcaatatcccaggagccaagtgcaacgaaggaccaagagacacacagagatcatcccccgtttcgatatctgaatcatgttcggacttatcctacattcatgtttggtggatctgtgggatcacgtgttgccactgttgcgtttctaaggaactaaattcaaagcttcggtcttttgtcatgaac

SEQ ID NO: 199016 - DNA, 642 bp, Gossypium hirsutum
tcactttcttcctcttcctctcatctcatctgtcggtgctgccattgcggtttatactttataatttttctttacttttgtctattcctcttttaatcaagatgagcatgtatgggagagatccctggggagggccgctggagataaacgcggctgattccgccactgatgatgacaggagtaggaatctgcaagacctggacagggctgcgctctctcgccctttggacgagacgcagcagagctggctgcttggccccagcgagcagaagaagaagaagaagtacgttgatctcgggtgcatcattgtcagccgcaagatctttgtctggacggttgggaccttggtcgtctcagccgtccttgccggattaatcaccttaatcgtcaagaccgttccacgtcatcaccacggcaagcctcctcctgataactacactctcgcacttcacaaagccctcatgttcttcaatgctcagcgttccgggaagttacccaagcataataacgtgtcctggagaggaaactcgtgcctccgagatggaaagttcgatcccggcactacaatgaaggatctggtctgcggtttctactacgccttgatatgcttatcaagtttatctttcttttgattttttgccc

SEQ ID NO: 199017 - DNA, 725 bp, Gossypium hirsutum
ctctctaataaaatgatattattgtgaaagcaactttgtggagatcaattagcttcttcttttttttcactttcaagctctcatggctgccattattgaatctgggtggctgtatctgatcacgcatttcagtgacttccaactagcaagtctaggaagtttctttcttcacgaaagtgttttcttcttatccggacttccatttatatatctggaaagagctggattgctgagcaaatactagattcagacgaaaaacaacagccttgctgctcaggaaaaatgtatcacccgcctgcttctgtatcacattggtgtcaaccttccgcttatgattgcatcttatcctttcttcagattcatgggcatgaagagtagtctgccatttccatcctgtaaagtggttctgtcacagataatattctatttcatcctggaggattttgtgttgttactggggacatcgttttttacatacaaaatggctgtacaagcatgtgcacagtgtccatcatgagtatgctactccatttggactgacatccgagtatgctcaccctgccgagatattgttccttggctttgcaacaataattggtccagccatcactggcccacatcttattactctctggttatggatgactcttagagaactaaaaacaggtgaggcacattgtggttaccatttttcatggagcctcttaaactttttacctttatat

SEQ ID NO: 199018 - DNA, 574 bp, Gossypium hirsutum
gggcaagggatctcgatttcaatctcgttctctccggcagcaccgtctacttggttccggtgagatctcgacgttgtatccgatctcgacccgttccatagcatctcactgaactagatccgattaaccatggctcccgcgccagctcgggccaaatacaagctggttttcttgggggatcaatctgtggggaagaccagtatcatcactcgcttcatgtacgataaattcgataacacctaccaggctaccattggtatcgactttctatccaaaacaatgtacctcgaagatcgaactgttcgattgcagctttgggatactgcagggcaggaaaggttcaggagtcttataccaagctacattagggattcctcggtggcagtcattgtctatgatgtagcaagcaggcagtccttcttaaatacttcaaattggattgaagaggtgcgggctgaacggggaagtgatgttatcattatgcttgtggggaacaaaacagatcttgtggacaaaaagcaagtctcggtggaggaaggagaagccaaagctcgtgacatcaatgttatgttta

SEQ ID NO: 199019 - DNA, 646 bp, Gossypium hirsutum
  unsure (1)..(646): unsure at all n locations
atttttgaagtagcgcttggatcttgtatcttcactgtttatttatcttaccatcttcctttttatcagatcctttccattttccttcgctacttccttctaggctgctttcccatggagttctgggttgtcgcacgctttacaagtgtgtgatggattccgataccgtatcgtccgcgggtgggcttgaggttgcccatcaaaatggtgtttatccgtccggggatgcgtatgacagtggggttacagataatgcgaacgggaccgttgcggaaagtttcgagacttgtttatataatgaaatggatgacaatggagcaactgaacaagctagagaagggccaaatgagtgtgtggaaagcagtggattgattgattctaaggaagggggagtcaaagataatccgaaacaatccgaacctggtaaggttcaaggcaagaccaaaaatgaaaagccctctgttcccaaaaaagtttctccagctttagtgaagaaacatgaagatggaaagattacnaaggccacattgccagctcccaatggtggttctgttgctacaaatccacgtatgaaacagcctcttaaaagtagatcattgaatgaaagacnagccaatgtatccaagcattctgaaaaaccagatgt

SEQ ID NO: 199020 - DNA, 490 bp, Gossypium hirsutum
cccacgcgtccggttgagaactaagaaggagaagcaaatggcttcctcaatgatctctgccccagctgttaccactgtcaaccgtgccggtgccggcatggttgctccattcactggcctcaagtccatggctggcttccccaccaggaagaccaacaatgacattacctccattgctagcaacggtggaagagtgcaatgcatgcaggtgtggccaccagttggcaagaagaagtttgagactctttcctacctgccagaccttgatgatgcacaattggcaaaggaagtagaataccttcttaggaagggatggattccttgcttggaattcgagttggagcacggtttcgtgtaccgtgagcacaacaggtcaccaggatactacgatggacgctactggaccatgtggaagctgcctatgtttggttgcactgatgcttctcaagtgttgaaggagcttcaagaggctaagactgcataccccaac

SEQ ID NO: 199021 - DNA, 602 bp, Gossypium hirsutum
  unsure (1)..(602): unsure at all n locations
tataaatccaaatttcagcaagccaaacgaagtacaggagtcgagaaaaaattcctcttttccttgcgtcaacgtttgaattttacagggcttaatctttgtttggttcccgagaatatcaacaatgactcgcggcaaccagagagaaaaagatagagaaagggctcaatccaggtcaggcaacaaagggaaagctggttctaaggacgatggattgacccctgaacaacgccgtgaaagagatgcaaaggccttacaagaaaaggccgcatagaaggcagcgcaggcggcagctggaggtaacactgccggcggtgatggtggaagtaaaaacaagaaataataaaataaagacggtgagatgatttaccgtggaggttaaagatagtgttaatttgttgatcgnggaatttgatctttggtttccagtcttcgtttcgtgttttttaaagttcaacaaaccctcggcttgcttatatctttggcattgatgttgactgttaatggaattgatttcctatatggcattatggaattntgcgtttctatgattatctgtagttatcaattccagtagataaaaccccgtatcgattntgatc

SEQ ID NO: 199022 - DNA, 706 bp, Gossypium hirsutum
aaaaaaggggagggggtttctttctagggcttccttctctggcgatcggaccaccgtcggtggtggccagagaggcacccgaagctgaatctaggcctcttttctcgcttagaaataggcttaagacctagaaacccctgaaccaaccccgaaacccttaaaacaacaaagaacttccgaccattggtcttctccgccgtgacttcaagcggatccccaaggatccgacaatttttggactagagaagcaagcaccgaggccaccaacaccaaatacgggtttatgagggaagtcaacgggcaaaggctcccattttggtgcaaagggacaaaaggagacgagccccgggcgttggacatgccgacgaggcacgtgaggtgtgcggcgctagggggaaactagggtttccaggtctgccgaaattggcttgggttttgggccatcgggctatcaaaaattgggtttttcgggtttggttttaattgtaaaatgggttaaatgtgatttgggctatccgggcttttgtaaatggattttaataattttggacttgttaatttttgggttttattattactgttgggttttctaacgggccgggcaaatttgggcccgtacagtatttgattgctgctataatatttttttatgtaaaataaacaaaagaatttaacgaaattatctagaaatattatgcggacatgt

SEQ ID NO: 199023 - DNA, 930 bp, Gossypium hirsutum
  unsure (1)..(930): unsure at all n locations
cagaaaatgaaaaacatcaaagtcccagaatttagtttctatttttgtagtgttttgttgattttgttggtgaataatggatgttgtgactggggctcctccattcatgttggtcacgagataagccttgcggtgccattggaatatagtgatgggttcattgggagagctttcttgatggatgatggtaatggtcaggtggaaccaaattttagagttgcattgagtgctgaagctaacaaagggggatattcatgctccttggaagtttttttaggggatgcgtgcttgagcttactgaagatggggatttactgttgaagggtgccgaagatcaagtcggatggcggaccggcacttctggccaaggtgtggagagattaagaatcctgaagacaggtaatctcgtacttgtggatgttttcgaccaaataaaatggcagagtttcaatttcccaactgatgtaatgctttggggacaaagactagacctagccactcagttaacttcatatccaagaaactcaacttcattctacacatttgaaatccaacacaacaagcttgctcttcacctcggcgctgattccatcgtggtggagatcggttcagcccctgagcgtgaggtttttagcactgggaaatgagacagggaatttaggactatactcttactcacctaaaaaacaaagttttgaagcttcatttcaagttctcaactccaaatgtgactttcctttagcttgtaaaccttatgggatatgtacattctccaatgcttgctcttgcattcggctcgcaactaaggaaaaacacatggtttctaattgcagcgagggaacatcaagttcagcacagttttgcaatggtactcaagtggagatgctngaattaaatggtgtcaatactgtactaaaaaatgctttcaca

SEQ ID NO: 199024 - DNA, 857 bp, Gossypium hirsutum
  unsure (1)..(857): unsure at all n locations
gaaaaacccggnccgccccacccgtccgcaagaaccgtcgccttcatttcttctcaactatctatatatagctcacttccttgcaagatggggcgccagaatgtgggaattctcagtgggtttatatatgatcagtgtttggcctgattccttactccttgttgcaatttatgggtgttgtggaatcatccctttactggcattatttggtccaatcattggacgatgggtggataggctaacatatgtaaaggttcttcaactatggttggtaacccagaatctctccttcataattgctggaggtgcagtagtggccttactggtatttccaagcctgaagttcacaaatatagttgcattcatcgccctggtgatattgacaaacatctctggagctgttggtgtgctttcaacattaaccggtaccatcctgattgaaagagaatggttggtggtaatatctgaaggccattctcccaatttactggctggatttaattccgttattatactaattgatttacttgtaggtatttgccacggtataatggcttattttagcttgttttctgtagctcggcatgatgggccttgtgactctattttttatggttgatattatcttgcatagggacaaagtacccgtttagtatatcttatggtagagatctgtgttcttctatatgtgatactttctttcctgtgaatattactgcacttggatctccactaccttttttttctatctagtttcattatgttctctattattttgttttgtcattatctatttcatttatctttctctttcaatttaatataactgtctctttgtatattctctgctattttcc

SEQ ID NO: 199025 - DNA, 442 bp, Gossypium hirsutum
cccacgcgttcgcccacgcgtccgcggacgcttgggggttagttcttagatagaacatgcacataacctttcggcatctctcagtttcttcctctgcattcaatttgcactcatcggagaaaacaaaagatgtcgggcatgggagacgggtacgtcggcacggcccaagatgccgttaggatccgccgtctcgagaagcagagagaaaccgaacgccgtaaaatccaagagcttaaaaccaagtccgcctccgctaaaggtcaacccggtcttctccaattcggttcaagtacttctgagattctcgagactgcatttaagaaggaaactggtggtttggttacaagagagcaatatgttgagaagagagttaatatccgaaacaaaatcgaagaggaagagaaggagaaactccagaagcttcaacaagaggaagaagagc

SEQ ID NO: 199026 - DNA, 492 bp, Gossypium hirsutum
attttgggtttaaaatatctgtcctttttttttatgaacaaagaaaactcatccaccacaaggcttaggcctgtaccaacatatttggatttttgagttgctgaaagtctcagggaagaacaagtttaccttcttcagcttgtgatgagataatcgcctttgatcctgatggccaaagagtacagtggatcaccaaagcatcatcatcgactcgaagcgcagaggaaccccctcacttggattctaggggttagtttcctctgcatattgttttatgtgttgggagcttggcagcgttcttctacccccaccactactcaatttagtgcatacaatagaggtggctgtgatagtcatgttactacatccgacaacggcaatgctgcagttggtcatccatcatcaaccaacttggactttgcaagccatcatcaagttgtgcttaacagttctaaaacagtcagtcagttcccatcatgtgatatgtcattc

SEQ ID NO: 199027 - DNA, 484 bp, Gossypium hirsutum
  unsure (1)..(484): unsure at all n locations
gaaaatttaataaattaataaagctctctgattttcttctttttttcgtcctcttccgcttccttcccttctttattcctttgtcctctttctttgaatgtttcagttcctgtctgtttcacctcataatccctcgtttttcctttcagtttccaagaaatttctgtagggttttcctgagctgggcataaaaaagatgggtatatatctcagcacccccaaaactgaaaaattctctgaagatggcgagaatgacagggttagatatggtttatcatctatgcaaggatggcgtgctactatggaagatgctcatgctgcataccctgatcttgatgcttctacttcgttctttggtgtttatgatggtcatggaggcaacgtggttgcaaagttctgtgccaaatatcttcatcagcaggttctcaagcatgaagcatatgcagctggggacataggaacatcacttcangaagcatttttc

SEQ ID NO: 199028 - DNA, 482 bp, Gossypium hirsutum
  unsure (1)..(482): unsure at all n locations
agctccactccattaaacaaacaccaaaaagaaagataaaccccaaattctcatttttactctatccaaaccctagattcaatcgtcgcccatcttccctccgatggccaattcaaagaaaccgggcggtctccgcgagatgctggaatcgatgtactccgtcatcgctctgctcttcattttagtagcctgcgtcgaactctgcgacgccgccgctcccgtcgacgtctaccgtctaatccaatacgacatgtccggttcacctttcggatctcgattcgccgccctcaaccatcacgccgcctccttgcatttccctcccggtgtcgatctttccagaaccgttctcatcatccctctacgtgaactgaatatcactttcgttcgagaatatatcaatcaaaaaaagccgttgggaagattgttagttttgcttcctgaagtacttatctntaaaactggaggaataaccaagttcatga

SEQ ID NO: 199029 - DNA, 602 bp, Gossypium hirsutum
cctaaatgattccccaatggctaagatcaccaagcagggcagcaacaacaaaccccacaaagtcaccttcccatttctctttctcttcattcaaagacattgatgctatcctcaaagaagaagaacaacaacaagtcctctatcctcaatcccctaaaagaccctccattttccaccgtgtcaagctctccaccaccgtcttacgcgcctggtcctccttcaaccgccgtccacttactctccccaacgctgaccaacgcgtcgttgtttacctcaccagcctccgtgtcgttcgaaaaacctttgaagattgcaagaccgttcgatcaatccttagaggactcaatgttcccatcgacgaacgagatgtgtcattggattctagtttcttagacgagttacaagggaccattgggcgtaacaaaagtttcacccttcccttggtgttcatcggcgaaacgtatatcggcggagcagaggaagtgaaacgattacatgaatgtggtgaactgaagaagatgatcggtgggttaccgtcggtggttgggtcaagtgtgtgtaatttatgtgaagggttgagatttattctttgtccacaatgg

SEQ ID NO: 199030 - DNA, 670 bp, Gossypium hirsutum
gttactctcccttcttctccttgtaaacttcatttttatctatcaatctcattcttctccagataacagtgtcaccaaagctcaatctcagatcaaaccaaagaaggttcatttgtctctgtattatgagtctctatgtccatattgccggagtttcattgtaagtcaacttgtgaaggtcttcaacactgatcttctcaatattatcaatctcaggctagttccatggggcaatgctcaatatgtaaaacctaagaagaccatcatttgccagcacggtgaagatgaatgttacctcaacactatacatgcctgcgccatcagcatctggcctgatccgagaaagcatttcaactttatctactgtattgaaaatcaaggccttcccatcaaggataatcagcactctgacggtatggaagcagtgtggaaagcctgctctgccagatccggtatggatcagaaactcatcaaggactgctatgacagtggatatggaagaaagcttttactgcagtatgctactgaaactgatcatctctatccaaaacatttatatgtcccctgggtgacagtgaacaatcaacctctctatgataagtatgaagattttataacctatgtctgcaatgcttacaaagacaaagatttggtaagggcctgcctgtcc

SEQ ID NO: 199031 - DNA, 643 bp, Gossypium hirsutum
acaaaatcagcgggtagagagagaaagcagagcaagggaagggaaaaggaagggaaagggaagctttatataacccatctcctttctctctaaacgctcttcctttccatctttcctttctttgctttgcttgtttctattgagagatttccactaacaaaagctctagacttttgtcttcccacatttttctctcaccatgatttccttgcacagaagctgttttctgaataacactggcatttctgggtcatcaagccctttctcatacaagctgaagaagctgccaccagcttcagtcaaagtcacagctttaggccccaacagggatcgaaacagcagcgttttgattgaaaacaacaactcattgaaagaaataaaagaagatggcacttcttctgttgctgatgtggaccccaatcctactgttaccggcgaagaccgcgacctctactatgacgccgccgccaccgacgatcaacttgtcaccccttggtctctctctgttgccagtgggtattcgttgttgcgagatcctcaccacaacaaaggaatcgcctttaatgagaaaaaaagagattcttattacttgcgtggtcttcttccccccacagttatttcccaagaacttcaggtgaagaac

SEQ ID NO: 199032 - DNA, 396 bp, Gossypium hirsutum
tgaagatgaaatttccttccatctgcaacaaatcgagaaccaaagggatgtcatggaaactgtcgcttttctgtcacttgaaagccgttccattcataaacaagcctagaaggttgaagcattccacttctgctttatcagacagcactgccaagtttatttctgccttggattgctcttggtctcagtcaagacattgtttcacagtgcccaaagattctgaagaactgttggatatggctatcgaggcactgcggtccaacaggctgttcttcgaaccgggtgacactggtttcattctagaaggcagcccaggttcccattcaagggttgtgtggcattggccatggaaaacaggtggatcccatacatgggattttcgagttttcaatggga

SEQ ID NO: 199033 - DNA, 699 bp, Gossypium hirsutum
tagaattccctaagaaaagccatggctccacagcgtttattgctccttttcatcttcctcttttatttctcttctttcccatctactgcccgtgttatcaccggtccttcatcccccaccgatctcgtttccgatggaatctccaccgtcaaaaacccacctttcctctcactcaagcccctggtttcagcggaggaatcgtgtgaacaaacctatgggttcttaccctgtaccaccacagttctcggcaacttgtttttgatcattggttatggataccttatgtttttagctgctacttacttgtctaatggaagtgagcttttgcttgagatcctcggtcctggtattgtcggaggattgttcttgcctattcttggagcacttcccgatgcaatgcttattcttgtatctggactttctggaacagcagaaacagctcaagatcaggtctccgtaggaatggggttgctagcagggtcaactgtcatgcttctcactgtgatatggggttcctgtgttgttgttggccggtgtgatattcgcgactcagttgcggttgatggaactattactaaaggatttcacctaacagagactggtgtgagtaccgatatttggacttgctatgctgcaagtataatggctatatcaattatcccctttgttattgttcaactaccccaagttctcaattca

SEQ ID NO: 199034 - DNA, 582 bp, Gossypium hirsutum
ctggactctgttctttctcaattgtcagttccagtatctgtaactggtcatttatcaggagtacctagtggtgttggtggtcaattgcctgctcatgcggccaatatgaatgtggcaccttccactgctgcattcacggggcagatccaaacaatgccttttggtgctggtgctcctgcatttgcaccagttggcaatttctcaacattgcctcctacaggtcctctggtagctgcttctggactaacgcatacagtgcctggcagcagtggcagttcccagattggtgttaataatgctgggcaatggcctaatatgcagcaccaacagactcattttttctccacagctggcggtcagactagccaacaacttaacggagcctcgccaagtcagccatggaattttgctccttccccgcatatgcaggggcctcaagctgtctcaaaacctttccaggatgtcacttctgccgttgcatcacagcaaccacctacagaaacaaaagcaagtggaagacaagaactacctgcggatctatttactgcaacctattctacctatcctgcacctacaccagga

SEQ ID NO: 199035 - DNA, 582 bp, Gossypium hirsutum
atttaataattagcttaatccccactcatgattttctccctatatatttgctccattgccaatttcaattccactatagttttctcaaataataaatagtcaatctttgtggtgggtttttattggacttaaaattttctgggttcaagagcaatggcgacaacagtgtttctacagcagtctgctttattttctttctcttcatttactcacaacagccgccctttaactaaacttttcgatagtagtaccgcaacaattgtccctttctctaaccggcgtcgtttcagagttgtttctgactctgtttctgtatctgctctgcccactgttcgtgggaaactcaaggttcatcagttggttcaattaacgagttgattgagtgtttgattaatcgagttgatttaacggagtccgaggctgaggcatctcttgagtttttgttaaccgaagctaatgaggctttgatcagtgcttttcttgttttgttgagggctaaaggcgagactttttgagaagttgtgggattggcgagggcaatgttaaagcatgcttggaaggtagaagggttaaatgatgctg

SEQ ID NO: 199036 - DNA, 934 bp, Gossypium hirsutum
  unsure (1)..(934): unsure at all n locations
gtaaccagagacaatgcattgcaattgatggaagctgaatttcaggttctttcacctttggttcctattcgtcaaattcaattcatccggttctgcaagcagcattccgacagtgtgtgggccatcgctgatgtttctattaatctgagcaatgctgcaaatgcactgatgtttgcaaattgcaggaggcttccttctggatgtgttatccaagatatggacaacaagtactccaaggttacatgggttgaacactcggaatatgatgagagcacagtccaccatctctttcgccccttactcagttctggttttggctttggtgcacaaaggtggattgccactctccgaagacagtacagcagcttggcacaactaatgtcccctgacatccacggtgaagacattaatacagtggggaagaaaagcatgttaaagcttgcacagcgcatggcatacaacttcagtgctggaattggtgcttcaagtgtgaataaatgggacaaacttaatgttggtaatgtgggtgaagatgtaacggtgatgactcggaagaatgtaaatgatcctggtgagcctctaaggatggttttgagtgctgctacttctgtttggatgccgataacacagcaaacgctgtttggtttcttgaggaacgaacggatgcgtaatcaatgggacattttgtctagtggtagaccaatgcaggcgatgttcagtgtcgccaagggtccangacaaggcaactgtgtctctatccttcgtggtgctgcagttaacggcagtgacaccaacatgctaattttacaagaaacatggaccgatgcttgtggtgcattgatagtgtatgcacctgttgacgcctcatcaatcaaagtggtgatgaatggtggtgattcatcgcatgtggcactgttaccatcaggatttgcaa

SEQ ID NO: 199037 - DNA, 506 bp, Gossypium hirsutum
tggaacgctgaagcacgctggtgcccctccgcaatttccggggtcgcattttctcttgcatcgccagcgcatccctgagacaccatggggaaggtgaaggtcggagtcaacggatttggtcgtattgggcgcctggtcaccagggctgcttttaactctggtaaagtggatattgttgccatcaatgaccccttcattgacctcaactacatggtttacatgttccagtatgattccacccatggcaagttccatggcaccgtgaaggctgagaacgggaagctcgtcatcaatggaagccccatcaccatcttccaggagcgagatccctccaaaatcaagtggggcgatgctggcgctgagtacgtcgtggagtccactggcgtcttcaccaccacggagaaagctggggctcatttgcagggaggagccaaatgggtcatgatctctgccacctctgctgacgcccacatgttcgttatgcgtgtgaaacatgagtagtatga

SEQ ID NO: 199038 - DNA, 792 bp, Gossypium hirsutum
cccaaccccaatcctgtttctcttttgcatcctttgtttctctcttcatctcctgcactacttgcaaaataacgagctgaagccgtgctacaataacactagtgttttcaacaataaattaatcatagccgcagcttgtttcttttaaactctaaatataaaggaggccaaacatgccgcctcgtagataccaatttgggagggctgatgaggccactcatcccgactccatgagagccaccttggctgaattcctctccactatcattttcgtctttgccggcgaaggctcaattcttgctcttgacaagatgtacaaggatacgagtgcgacgcctgcaagactggtgatgatagcacttgcgcatgggttgtctctgtttgcagctgtggcatctagtgtaaacgtatctggtggccatgtgaatccagcagtcactttcggtgccttgctcggtggaagaatctctctcgttcgggcgctgtactactggattgcccagctcttaggttccattgtggcttgtctcttgctccgcctcaccgctggaatgcgaccgggggggttcgccctggcgtcaggagtaggggagttgcgtggtctgatattggagatagtgctgacatacggattggtgtacacagtttatgcaacagggatcgatcccaaaagaggaagcgtggggacaatagcaccgctggctataggcttgatagcgagcgccaacatcttagtaggcggaccatttgatggagccgccatgaatccagcaagggcatttggtccagcct

SEQ ID NO: 199039 - DNA, 1996 bp, Gossypium hirsutum
aggcgtggtacccgcgtccggcaattccctctcacctccagcctctcacgctctcctcagctctctcatctcctggaaccatggccagcacatccaccaccatcaggagccacagcagcagccgcaggggcttcagtgccggctcagccaggctccctggggtcagccgctctggcttcagcagcgtctccgtgtcccgctccaggggcagtggtggcctgggtggcgcatgtggaggagctggctttggcagccgcagcctgtatggcctggggggctccaagaggatctccattggagggggcagctgtgccatcggtggcggctatggcagcagagccggaggcagctatggctttggtggcgccgggagtggatttggtttcggtggtggagccggcattggctttggtctgggtgggtggagccggccttgctggtggctttgggggccctggcttccctgtgtgcccccctggaggcatccaagaggtcaccgtcaaccagagtctcctgactcccctcaacctgcaaatcgaccccaccatccagcgagtgcgggccgaggagcgtgaacagatcaagaccctcaacaacaagttcgcctccttcatcgacaaggtgcggttcctggagcagcagaacaaggttctggaaaccaagtggaccctgctgcaggagcagggcaccaagaccgtgaggcagaacctggagccgttgttcgagcagtacatcaacaacctcaggaggcagctggacagcatcgttggggaacggggccgcctggactcggagctcagaggcatgcaggacctggtggaggacttcaagaacaaatatgaggatgaaatcaacaagcgcacagcagcagagaatgaatttgtgactctgaagaaggacgtggatgctgcctacatgaacaaggttgaactgcaagccaaggcagacactctcacagacgagatcaacttcctgagagccttgtatgaagcagagctgtcccagatgcagacccacatctcagacacatccgtggtgctgtccatggacaacaaccgcaacctggacctggacagcatcatcgctgaggtcaaggcccagtacgaggagattgctcagaggagccgggctgaggccgagtcctggtaccagaccaagtacgaggagctgcagatcacagcgggcagacatggggatgacctgcgcaacaccaagcaggagattgctgagatcaaccgcatgatccagaggctgagatctgagatcgaccacgtcaagaagcagtgtgccagcctgcaggccgccattgctgatgctgagcagcgtggggaaatggcactcaaggatgccaagaacaagctggaagggctggaggatgccctgcagaaggccaagcaggacctggcccggctgctgaaggagtaccaggagttgatgaacgtgaagctggccctggacgtggagattgccacctaccgcaagctgctggagggcgaggagtgcaggctgaatggcgaaggcgttggacaagtcaacatctctgtggtacaatccaccgtctccagtggctatggcggtgccagtggtgtcggcagtggcttaggcctgggtggaggaagcagctactcctatggcagtggtcttggcgttggaggtggcttcagttccagcagcggcagagccattggaggtggcctcagctctgttggaggcggcagttccaccatcaagtacaccaccacctcctcctccagcaggaagagctacaagcactgaagtgctgccaccagctctcggtcccacagttctcaggcccctctctggctgcagagccctctcctcaggctgcctgtcctctcgtggcctccagtctcccctgctctcccaggtagagccggggatggatgcttagtgccctcacctttttctctctgtctataccagccccatttgagcacccattgctcaccatcagatcaacctctgattttacatc

SEQ ID NO: 199040 - DNA, 1151 bp, Gossypium hirsutum
atgggccctcttgcttctctgatagctcccagcttactctctgcagccatgattgccagacagcagtgtgtccgaggcgggtctcggggcttcagctgtggctcagccatcgtaggcagtggcaagagaggtgccttcagctcagtctccgtgtctggaggtgctggccgatgctcttctgggggctttggcagcaggagcctctacaacctcggggggaacaagagcatctccatgagcgtggctgggtcacgacaaggcgcctgctttggaggtgctggaggcttcggcactggtggctttggcggtggatttgggggctccttcagcggtaagggtggccctggcttccctgtctgccctgctgggggaattcaggaggtcactatcaaccagagcttgctgacccccctccacgtggagattgaccctgagatccaaaaagtccggacagaggagcgagaacagatcaagctcctcaacaacaagtttgcctccttcatcgacaaggtgcggttcttagagcaacagaataaggtcctggagaccaaatggaagctgctccagcagcagacgaccagcacctccagcaaaaaccttgagcccctctttgagacctacctcagtgtcctgaggaagcaactagataccttggtcaatgacaaagggcgcctgcagtctgagctgaagaccatgcaggacagcgtggaggacttcaagaccaaatatgaagaggagatcaacaaacgcacagcagctgagaatgactttgtggtcctcaagaaggacgtggatgctgcctatatgaacaaggtggagctggaggccaaggtggacagtcttaatgatgagatcaacttcctgaaggtcctctatgatgcggagctgtcccagatgcagacccacgtctccgacacctccgtggtcctctccatggacaacaaccgcaacctggacctggacagcatcatcgccgaggtcaaggcccagtatgaggagatcgccaaccgcagccggaccgaagctgagtcttggtaccagaccaagtatgaggagctgcagcagacagctggccggcatggcgatgacctccgcaacaccaagcatgagatctctgagatgaactcgatgatccagaggctgagagctga

SEQ ID NO: 199041 - DNA, 1039 bp, Gossypium hirsutum
atgtggctctgtgtcatcactcacctgggagaggagaatcagtagggagactagaaggtgggtagattgggaagctgcgctcaggtaactccagattgttggctctttccccaggacgtggatgctgcctacatgaacaaggttgaactgcaagccaaggtggacagtcttaatgatgagatcaacttcctgaaggtcctctatgatgcggagctgtcccagatgcagacccacgtcagcgacatgtccgtggtcctctccatggacaacaaccgcaacctggacctggacagcattattgctgaggtccgtgcccagtacgaggagattgcccagaggagcaaggctgaggccgaggccctgtaccagaccaaggtccagcagctccagatctcagttgaccaacatggtgacaacctgaagaacaccaagagtgaaatcgcagagctcaacaggatgatccagaggctgcgggcagagatcgagaacatcaagaagcagtgccagactcttcaggcatccgtggctgatgcagagcagcgtggtgagaatgcccttaaagatgcccacagcaagcgcatagagctggagactgccctgcagcaggccaaggaggagctggcacgaatgctgcgtgagtaccaggagctcatgagtgtgaagctggccctggacatcgagatcgccacctaccgcaaactcctggagggcgaggagtgcagaatgtctggagaatgccagagtgccgtgagcatctctgtggttggaggtagcaccagcactggaggcatcagtggaggattaggaagtggctctgggtttggcctgagtagtggctttggctccggctctggaagtggctttgggtttggtggcagtgtctctggcagttccagtagcaagatcatgtctaccaccaccctgaacaagagacgatagaagaaatgaggtcccttgagcttactgtgtcccgctgggcccagcactggtatctctgggcttacttcaatttaacttcaatcttcctcttttgggcctg

SEQ ID NO: 199042 - DNA, 1164 bp, Gossypium hirsutum
  unsure (1)..(1164): unsure at all n locations
atcttctgcgtcctgctgagctctgttctctccagcacctcccaacccactagtgcccggttcttttgctccaccaggaacaagccatcatgtctcgccagtcaagtgtgtccttccggagtgggggcagtcgtagcttcagcaccgcctctgccatcaccccgtctgtctcccgcaccagcttcacctctgtgtcccggtccgggggtggcggtggtggctttggcagggtcagccttgggggtgcttgtggagtgggtggctatggcagccggagcctctacaatctggggggctccaaaaggatatccatcagcactagtggtggcagcttcaggaaccgatttggtgctggtgctggaggcggctatggctttggaggtggtgccggtagtggatttggtttccgcgggggagctggtggtggctttgggctcggtgccagagctggctttggaggtggcttcggaggccctggctttcctgtctgcccccctggaggcatccaagaggtcaccgtcaaccagagtcttctgactcccctcagccggcaaatcgaccccaccatccatcgagtgcgggccgaggagcgtgaacagatcaagaccctcaacaacaagttcgcctccttcattgtcatggttcggttcatggatctgtataacaaggttttggtgactatgtggaccttgttgtgtttgcanttcaccattaccgtgaagcagaacctggagccgttgttcgagctgtacttcaacatcctcaggaggcagctggacagcatcgttggggaacggggccgcctggactcagagctgagaaacatgcaggacctggtggaggacttcaagaacaagtatgaggatgaaatcaacaagcgcaccactgccgagaatgagtttgtgatgctgaagaaggatgtagatgctgcctacatgaacaaggtggagctagaggccagggtcgatgcactgatggatgagattaacttcatgaagatgttctttgatgcggagctgtcccagatgcagacgcacgtctctgacacctccgtggtcctctccatggacaacaaccgcaacctggacctggacagcatcatcgccgaggtcaaggcccagtatgaggagatcgccaaccgcagccggaccgaagctgagtctt

SEQ ID NO: 199043 - DNA, 505 bp, Gossypium hirsutum
tccctttctgtgtcggtcagagaaactccgaggtgttgggtctcaacgagcactccatgcaggcgctgtcctggcgcaagctctatttgagccgcgccaagctcaaagcctccagccggacctcggctctgctctccggcttcgccatggtggcaatggtggaggtgcagctggacgccgaccacgactacccgccagggctgctcatcgccttcagtgcctgcaccacggtgctggtggctgtgcacctgtttgcactcatgatcagcacctgcatcctgcccaacatcgaggcggtgagcaacgtgcacaacctcaactcggtcaaggagtccccccacgagcgcatgcaccgccacatcgagctggcctgggccttctccaccgtcatcggcacgctgcttttcctggccgaggtcgtgctgctctgctgggtcaagttcttgcccctcaagaagcagccaggccagccgaggcccaccagcaagccccccgccagtggtgc

SEQ ID NO: 199044 - DNA, 405 bp, Gossypium hirsutum
atctctgcggctgccagcaggcagatcatgagccatcagctcctctggggccagctataggacaacagaactctcaccaaaggaccagacgcagcgggtaccatgggacagtgtcggtcagccaacgcagaggatgctcaggaattcagtgacgtggagagggccattaagaccctcatcaagaacttccaccagtactccgtggagggtgggaaggagacgctgaccccctctgagctacgggacctggtcacccagcagctgccccacctcatgccgagcaactgtggcctggaagagaaaattgccaacctgggcagctgcaatgactctaaactggagttcgggagtttctgggagctgattagagaagcggctaagagtgtgaagccagagaggcctgtc

SEQ ID NO: 199045 - DNA, 469 bp, Gossypium hirsutum
atggctgaacaactcaaccttctctgcacagtgggtccagcatcctttgaagcatgagttcttaccaggagaagcagacctttaccccaccacctcagcttcaacagcagcaggtgaaacaacccagccagcctccacctcaggaaccatttgttcccataaccaaggagccatgccacccaaaggttccacaacctggaaacacaaagattccagagccagattgcaccaaggtccctaagccaggctacaccaaggaccctgagccaggcagcaccaaggtccctgacaaaggctgcaccaaggtccctgagccaggcagcaccaaggtccctgacaaaggctgcaccaaggtccctgagccaggcagcaccaaggtccctgagccaggcagcaccaacgtttctgagccaggcgccattaaaatccttgagcgaggctacaccaaagttcctgagccaggctacac

SEQ ID NO: 199046 - DNA, 447 bp, Gossypium hirsutum
atcggcgcgatcctcgcttacgtgagagttggcccgggaggaaagatggtgctggatctggatttgtttcgggtggataaaggaggggacccagccctcattcgagagacgcaggagaagcgcttcaaggacccgggactagtggaccagctggtgaaggcagacagcgagtggcgacgatgtagatttcgggcagacaacttgaacaagctgaagaacctatgcagcaagacgatcggagagaaaatgaagaaaaaagagccagtggaagatgatgagtctgtcccagagaacgtgttgaatttcgatgaccttactgcagacgctttagctaacctgaaagtctcacaaatcaaaaaagtccgactcctcattgacgaagccatcctgaagtgtgacgcagagcggataaagctggaagcagagcgatttgagaaccttcgagag

SEQ ID NO: 199047 - DNA, 855 bp, Gossypium hirsutum
ataaatcttcagagaagaatttccccttagttctttgcaagaaggtagagataaagacactttttcaaaaatggcaatggtatcagaattcctcaagcaggcctggtttattgaaaatgaagagcaggaatatgttcaaactgtgaaatcatccaaaggtggtcctggatcagcagtgagcccctatcctaccttcaatccatcctcggatgtcgctgccttgcacaaggccataatggttaaaggtgtggatgaagcaaccatcattgacattctaactaagcgaaacaatgcacagcgtcaacagatcaaagcagcatatctccaggaaacaggaaagcccctggatgaaacactgaagaaagcccttatgggtcaccttgaggaggttgttttagctctgctaaaaactccagcgcaatttgatgctgatgaacttcgggctgccatgaagggccttggaactgatgaagacactctgattgagattttggcatcaagaactaacaaagaaatcagagacattaacagggtctacagagaggaactgaagagagatctggccaaagacataacttcagacacatctggagattttcggaacgctttgctttctcttgctaagggtgaccgatctgaggactttggtgtgaatgaagacttggctgattcagatgccagggccttgtatgaagcgggagaaaggagaaaggggacagatgtaaacgtgttcaataccatccttaccacccgaagctatccacatcttcgcagagtgtttcagaaatacaccaagtacagtaagcatgacatgaacaaagttctgggacctgggagtgaaagtgacatttgaga

SEQ ID NO: 199048 - DNA, 633 bp, Gossypium hirsutum
atctcctggttcttagaccaggctgagggtcaggaaggcacgtcctcatggagatggagagcagccacagcagcagtgccccggggacctcaggcaatagcgctgtctccgctcttcctggaattctgctgtccctgcccgtgtgttgttaggtcacattccatgccacacacagacacaagcatgatggctttgtctggaggagtgggcccagtgcgacatagaaggactgaggcctgcccccaaggtccctgactcgctttcctgtctccctgccagagccgtgtggtccaaggcaaggagcccgcacacctcatgagcctgtttggtgggaagcccatgatcatctacaagggcggcacctcccgcgagggcgggcagacagcccctgccagcacccgcctcttccaggtccgcgccaacagcgctggagccacccgggctgttgaggtactgcctaaggctggtgcactgaactccaacgatgcctttgtcctgaaaaccccctcagctgcctacctgtgggtgggtacaggagccagtgaggcagagaagacggtggcccaggagctactcagggtgctacgggcccaacctgtgcaggtggcaaaaggcagcgagccagatggcttc

SEQ ID NO: 199049 - DNA, 501 bp, Gossypium hirsutum
attgatgatggcacaggccagaaacagatctggagaattgaaggctccagcaaagtacccgtggaccctgccacatatggacagttctatggaggagacagctacatcattctgtacaactaccgccatggaggccgccaggggcagataatctacaactggcagggtgcccagtctacccaggatgaggtcgctgcatctgccatcctgactgctcagctggatgaggagctgggaggtacccctgttcagagccgggtggtccaaggcaaggagcccgcacacctcatgagcctgtttggtgggaagcccatgatcatctacaagggcggcaccctcccgcgagggcgggcagacagcccctgccagcacccgactcttgcaggtccgtgccaacagtgctggagccactcaggctgttgaggtattgcctaaggctggtgcactgaactccaacgatgcctttgtactgaaaacacgctgagctgcctacctgtgggt

SEQ ID NO: 199050 - DNA, 440 bp, Gossypium hirsutum
atctcagatctccagctgtctctgtgctaatgaagctaaaacctatcactggaacatcacagctgtcaaattgggtcacattaactttactattagtacaaagattctggacagcaatgaaccatgtgggggccagaaggggtttgttccccaaaagggccggagtgacacgctcatcaagccagttctcgtcaaacctgaaggagtccttgtggagaagacacacagctcattgctgtgcccaaaaggaaaggtggcatctgaatctgtctccctggacctcccagtggatgttgttcctgactcgaccaaggcttatgttacagttctgggagacatcatgggcacagccctgcagaaccgagatggtctggtgcaaatgcccagtggctgtggcgagcagaacatggtgttgtgtgctcctatcatctatgtgttgc

SEQ ID NO: 199051 - DNA, 382 bp, Gossypium hirsutum
atgccggatcgccttcgccgccgcccgccgcctcgcgttagctcccggcccgtcctcgcccccgccttcgccaccgcctcggcccgcagagctcgccctctccccacctgcagatatgtccgagtccaagagcggccctgagtatgcttcgtttttcgccgtcatgggcgcctcggccgccatggtcttcagcgccctgggcgctgcctatggcacagccaaaagcggcaccggcattgcggccatgtctgtcatgcggccagagctgatcatgaagtccatcatcccagtggtcatggctggcatcatcgccatctacggcctggtggtggcagtcctcatcgccaactccctgaatgacgacatcagcctctacaggagc

SEQ ID NO: 199052 - DNA, 401 bp, Gossypium hirsutum
atcgcggagcaagcgagaggtctgcgcgcagtctgagcggcgcgcgtccagtcccgaggcccacgccagcacgccctcatggcccccgcagcggcgtcggggggcagcaccctgcccaggggcttctcggtcttcaccaccttccccgacttgctcttcatctttgagtttatcttcgggggcctggtgtggatcctggtggcctcctccctggtgccctggcccctggtccagggctgggtgatgttcgtgtctgtgttctgcttcgtggccaccaccaccttgatcatcctgtacctaattggagcccacggtggagagacttcctgggtcaccttggatgcagcctaccactgtactgctgccctcttttacctcagcgcctcggtcctggaggccct

SEQ ID NO: 199053 - DNA, 375 bp, Gossypium hirsutum
atgtgaatcgtaagagaacctcagcattgtgcacgataagagaatgtgtcagtatttcagggttcgacattgtatctgtaaaatgtgacttggttttttttatcacaacagaagtaaaatgttgctttgtacctggtgtcttttattaagaatttactccccccatttctcacagagaataacagtcgggagtcattgtcacaatataatagaaatgttagcaaccagattcatgtaaggactaagtggtcctcatgaattgcattaagactctgtactgctcatattacactccatcctctctgtagtttgctgggtagtggaaggtgttaagcttaattgtagtttctggcattaacctggaaggatttttct

SEQ ID NO: 199054 - DNA, 416 bp, Gossypium hirsutum
tcggagcaaaacgaaccaagatggaaggcttaggcgtaaagctcccttcttttccatttctaagccctaatatttcatcatcatcttcttcttcgacttttcggcttggtttccgccgcttatccgcttcgacttcagccgccgttaaagaaggttccggctcattaggccaattaacccgacccgacttccccatactccatcaggaagtaaaccggtcgaagcttgtttattcagataatgcggcaacctcccagaaaccaacggcagtgtctaaatctctgcagaattattatgtagcttacaattcaaatgctcatagaggaatccactacttgagtgccaaggcaactgatgaatatgagttggcacgcaagaatgtggcagcttttattaatgcatcagattctgctgag

SEQ ID NO: 199055 - DNA, 488 bp, Gossypium hirsutum
aattgtttcaatttgcatcttccaatcactttgaaagcagttttttgaggtaaaaatcccccgataagaaggggaaaagaaacacttagctgctccggaaatggcggacgcgttttgttcggactgcaagcggaacacagaggtcgttttcgaccattccgccggcgacaccgtctgttcggagtgcggcttggtcttagagtcgcattctatcgacgagacatcggagtggagaaccttcgccaacgagtccggcgataatgatcccgtccgtgtcggcggtcccaccaatccgcttttggcggatggcggtttatccaccgttatcgctaagcctaatggtgcttccggggagttcctctcgtcctcgctgggtcggtggcagaatcgcgggtcgaatccggatcgggggttgattctcgcttttaagactattgctacaatgtctgataggttgggtcttgtcgcgaccattaaggatcgagcca

SEQ ID NO: 199056 - DNA, 418 bp, Gossypium hirsutum
atatcgagttcaccatgaattcactcagtgaagccaacaccaaggtcatgttcgatctgttccaacaggtcggaaaatcacaaatgaacaacaccttctattcccctatcagcatcacaacagcattagggatggtcctcttaggggccaaagacaacactgcacaacaaattaacaaggttcttcacttcgatcaagtcccagagaacaccacagaaaaagctgcaacatatcacgttgataggtcaggaaatggtcatcaccagcttcaaaagcttctgactgaattaaacaaatccactgatgcatatgagctgaagatcgccaacaagctcttcggagaaatgacgtttcaatttttacaggaatatttagatgccatcaagaaattttaccagaccagtgtggaatctgttga

SEQ ID NO: 199057 - DNA, 488 bp, Gossypium hirsutum
atggggacgctctcagctctcggcgcacggcccagcttccttcaaaatgtctactgttcatgaaatcctgtgcaagctcagcttggagggtgatcactctacacccccaagtgcatatgggtcagtcaaagcctacaccaactttgatgctgagcgcgatgctttgaacattgaaacagccatcaagaccaaaggtgtggatgaggtcaccattgtcaacattttgaccaaccgcagcaatgcacagagacaggatattgccttcgcctaccagagaaggaccaaaaaggaacttgcatcagcactgaagtcagccttatctggccacctggagacggtgattttgggcctattgaagacacctgctcagtatgacgcttctgagctaaaagcttccatgaaggggctgggaaccgacgaggactctctcattgagatcatctgctccagaaccaaccaggagctgcaggaaattaacagagtctaca

SEQ ID NO: 199058 - DNA, 405 bp, Gossypium hirsutum
atggcggcggtagcggctgtgttgctcgtttctctgagccatccagtgccatcctcgtcgctgcagcgacacacgcgctcgccgccgccatgactgagcagatgacccttcgtggcaccctcaagggccacaacggctgggtaacccagatcgctactaccccgcagttcccggacatgatcctgtccgcctctcgagataagaccatcatcatgtggaaactgaccagggatgagaccaactatggaattccacagcgtgctctgcggggtcactcccactttgttagtgatgtggttatctcctcagatggccaggtttgccctctcaggctcctgggatggaaccctgcgcctctgggatctcacaacgggcaccaccacgaggcgatttgtgggccatacc

SEQ ID NO: 199059 - DNA, 423 bp, Gossypium hirsutum
atgagccaggtaggggaacgcagcggccagacacctcagcgctacctggcagaactggatttctctcccaccggcggcttaagtctgactgccagcctgcctgccacagccggactccaccactccggtagcctcatggctgcaacctgtgagattagcaacatttttagcaactacgtcagtgcgatgtacagctcagaggactccgccctggcccctgttccccctgctgccgcctttggggccgatgacttggtgctgaccctgagcaacccccagatgtcattggagggtacagagaagaccagctggtcgggagaacagccccagttctggtcgaagacacaggttctggactggatcagctaccaagtggagaagaacaagtacgacgcaagcgccattgacttctcacggtgtgac

SEQ ID NO: 199060 - DNA, 467 bp, Gossypium hirsutum
atccggacgccggagcccgagccccgccgagtcccctcgcctcatgcgcccgcgtgcgatccgcgctcctccgtcccaccatggctcggggccccggcctcgcgccgacaccgcttcggctcccactgctgctgctgctgctggcggcggtgaccggccacactgccgcacaggacaactgcacgtgtcccaccaacaagatgaccgtgtgcagccccgacggccccggtggccgctgccagtgccgcgcgctgggctcaagcgtggcggtcgactgctccacgctgacctccaagtgtctgctgctcaaggcgcgcatgagcgcccccaagaacgcccgcacgctggtgcggccgaatgagcaccctctcgtggacaacgatggtctctacaacccctactgtcacccatacggccgcttcaaggcgcgccagtgcaaccagacgtcggtgttctggtgcgtgaac

SEQ ID NO: 199061 - DNA, 474 bp, Gossypium hirsutum
attcgctcagttgttgctcaagtgcgctcgctggcggagcttgtctgccctgttttcctgcaaggcctttcccagcgtgcccacgcggaaagcaactgcctaagaggcgcggcgtcgcaccgcccagagctgaggaagtcggcgccagttcgtggggctccgggccgccagtcagagccatgagctacgggcgcccccctcccgatgtggagggtatgacctccctcaaggtggacaacctgacctaccccacctcgcccgacacgctgaggcgcgtcttcgagaagtacgggcgcgttggcgacgtgtacatcccgcgggaccgctacaccaaggagtcccgcggcttcgccttcgtccgcttccacgacaagcgggacgccgaggacgctatggatgccatggacggagccgtgctggacggccgcgagctgcgggtgcaaatggcgcgctacggccgccccccggactcac

SEQ ID NO: 199062 - DNA, 581 bp, Gossypium hirsutum
cccacgcgtccgcccacgcgtccgcccacgcgtccggccgttttatggggaaagaaggaaagatgggtagggttttcgcatctcttgtgcttgttttggtggttgtgcaagctagccatgcacgtaatgtgcctagccatgtcggcctcgataaccgacaaacaacgatgccaggtgcctcaacggaggagcaaacgttgcaagccgatgcaccgaaggcggattcaccgaagggtacgagtggcattgatgacaagaagaattttatttacggtggagttggtggctttgctgggatgggtggctatggtggaattgctggtggaatcccttttcttggcggccttggtgggattgggaaatttggtggaatcggtggtgccgccggaatagccggttatacgggtatcggtggcctgggcggtttaggcggtgttggaggacttggtggtggtattggcggtggcggcagcctcagaggtggcagtggcattttcccatccccttgatgtttcgtgatttggtgatgtctagattttaggtgttgtatgttagatgttagatgttcatgtcttaagtgg

SEQ ID NO: 199063 - DNA, 484 bp, Gossypium hirsutum
atggcgccttcgcccagctcggtcagctctcccgcctggacctcacctacaaccgcctggccacgctggctccggatccgctcttctctcgtgggcgtgaggcagaggcctctcccgcccccctggtgctgagcttcagcgggaaccccctgcactgcaactgtgagctgctgtggctgcggcggctggcgcggccggacgacctggagacctgcgcctccccgcccggcctggccggccgctacttctgggcagtgcctgagggcgagttctcctgcgagccgcccctcattgcccgccacacgcagcgcctctgggtgctggaaggccagcgggccacactgcggtgccgggccctgggtgaccccgcgcccaccatgcactgggttggtcctgatgaccggttggttggcaactcctcccgagcccgggctttccccaacgggaccttagagattggggtgactggcgctggggatgctgg

SEQ ID NO: 199064 - DNA, 603 bp, Gossypium hirsutum
atcgccgcggagcctcccgaacctactcagccgcccggagccgcgcccggagcccggctatagaggctgcagtcgcagccgggagcccgcagcccgcgccccgagcccgccgccgcccttcgagggcgtcccaggccgcgccatggtgaaagtgacgttcaactccgctctggcccagaaggaagccaagaaggatgagcccaagagcggcgaggaggcgcttatcatcccccccgacgccgtcgctgtggactgcaaggacccagatgatgtggtaccagttggccaaagaagagcctggtgttggtgcatgtgctttggactggcatttatgcttgcaggtgttattctaggaggagcatacttgtacaaatattttgcacttcaaccagatgacgtgtactactgtggaataaagtacatcaaagatgatgtcatcttaaatgagccctctgcagatgccccagctgctctctaccagacaattgaagagaatattaaaatctttgaagaagaagaagttgaatttatcagtgtgcctgttccagagtttgcagatagtgatcctgccaacattgttcatgactttaacaagaaacttac

SEQ ID NO: 199065 - DNA, 614 bp, Gossypium hirsutum
gtttttcttttatatctaagatggcttacattaataccctactcatcatgttctttgttttctgttttccttcaatggttctttccgaatcgttccgatcgattcaattgccaccgaatgtcacgggtcccgaatccattgcctttgagctggcaactggacgattttacgtcggtgtaactgatggtagaattttgcaatataacggaccaactgttggatttatggagtttggttccaccggtcgaaataggactaagacgatgtgcgatggcattactgatccggatttgggtccgatgtgtggaagaccattaggtttagggttccattacgctacgaatcagttgtatgtttgtgatgcataccttggtctcatggtgttagggtccggcagaagactagcaaccccactttcgaccggtgtagaaggcgtgccttaccgattttgcaatggtttagatgtccaccaattgtccggaaacgttttcttcaccgattccaccactaactatgatctaagaaatgcttcgaaaggattggaatcgaatgattcgacagggaggttgttaatgtataaacccgagcaataatcgagttacaggggtggttaa

SEQ ID NO: 199066 - DNA, 560 bp, Gossypium hirsutum
atccgccggccgcccagatctccacctgccaccccagagctgggacagcagccgggctccggcactgggagggagaccccgccgtggcctcttctgccacccacgcccccacccctggcatggccgaccagctgacagaagaacagatcacagaattcaaggaggccttctccctgtttgacaaggacggggacggctgcatcaccacccgcgagctgggcacggtcatgcggtccctgggccagaaccccacggaggccgagctgcgggacatgatgagcgagatcgaccgggacggcaacggcaccgtggacttccccgagttcctgggcatgatggccaggaagatgaaggacacggacaacgaggaggagatccgcgaggcctttcgcgtgttcgacaaggacggcgaccgcttcgtcagcgccgcggagctgcgacacgtcatgacccggctgggggagaagctgagtgaccaggaggtggacgagatgatccgggccgcggacacagatggagacggacaggtgaactactaggagttcgtccgtgtgctggtg

SEQ ID NO: 199067 - DNA, 685 bp, Gossypium hirsutum
atacttaacagccacttgtttcatcccacctgggcattaggttgacttcaaagatgcctcagttactgagaaacattaatgggatcatcgaggccttcaggcgctacgcaaggacggagggcagctgcacagcgctcacccgaggggagctgaaaagactcttggagcaagagtttgccgatgtgattgtgaaaccccacgatccagccactgtggacgaggtcctgcgtctgctggatgaagaccacacagggactgtggaattcaaggaattcctggtcttggtgtttaaagtcgcccaggcctgtttcaagacactgagcgagagtcctgagggagcctgcagctctcaagagtctggaagcctccattctggggcctggcaggagctgagtgaaggacagagaagtggcactgaagtgggaagggcagggaaagggcagcattatgaggggagcagccatggacagagcaagcagccttccagagggcagagcaggcctggggctcagacccagggtcaggccactggctctgcgtgggtcagcagctatgacaggcaagctgagtcccagagccaggagagaacaagtccgcagatacaatgctctgggcacacagagcagacccagagagctggtgaaggcaagaggcatcagaccacacagatgaggccagagagaga

SEQ ID NO: 199068 - DNA, 457 bp, Gossypium hirsutum
attctgcctctcaatcttggataggagtctgaatttccgccgtgaccctgctactgatgtggcccgcagaaatgaccccaaatatgttggccgggtgctgagtgccatgatcaatagcaatgatgacaacggtgtgcttgctgggaattggagcggcacttacacgggtggtcgtgacccaaggaactggaacggcagcgtggagatcctcaaggactggaaaaaatctggcttcagcccagtccgatatggccagtgctgggtctttgctgggaccctcaacacagcgctgcggtctttggggattccttcccgggtgatcaccaacttcagctcaactaatgacacagaccgaaatctcagtgtggatgtgtactacgaccgcatgggaaaccccctggacaagggtagtgatagtgtatggaatttccatgtctggaatgaaggctggtttgtt

SEQ ID NO: 199069 - DNA, 564 bp, Gossypium hirsutum
  unsure (1)..(564): unsure at all n locations
aaaaagcannnnnnnttgaattcccgggatcccaggcagcagttagcccgccgcccgcctgtgtgtccccagagccatggagagagccagtctgatccagaaggccaagctggcagagcaggccgaacgttatgaggacatggcagccttcatgaagggcgccgtggagaaaggtgaggagctctcctgcgaagagcgaaacctgctctcagtagcctacaagaatgtggtgggcggccagagggctgcctggagggtcctgtccagtattgagcagaaaagcaacgaggagggctcggaggagaagggccccgaggtgcgtgagtaccgggagaaggtggagactgagctccggggcgtgtgcgacaccgtgctgggcctgctggacagccatctcatcaaggaggctggggacgcggagagcagggtcttctacctgaagatgaagggcgactactaccgctacttggccgaggtggccactggtgacgacaagaagcgcatcatcgactcagcccggtcagcctaccaggaggccatggacatcagcaagaaggagatgcc

SEQ ID NO: 199070 - DNA, 501 bp, Gossypium hirsutum
gcgcccacgcgtccgggagaactaaggccatatcaattctctttcggcaaacacagaagaattttggttagatcaacgatgcaacaaggagattacagctcctattatcaatatccttacctttcaaaccccaactccaaccccaaccctaaccctaaccccaaccccaatccagtaccctccgaatttcaccaagcaccttacgcatctgcaccaccttttagctccggttatgcctcctctgattactccgtttatcccccaaattaccctccgtattcccaaaatcttgatgctgcccctcccactgcttccgcttatactcctccgccctcagccacaaccactccaccggctccggccatagctccacaatcgtctttcaatcaacaacccatggcgccaccctcggcgaccgcggctccttcttttccgccatatgattcacatgttccctatcagcctccggcctcccagcctccttatttccagcagtatgat

SEQ ID NO: 199071 - DNA, 367 bp, Gossypium hirsutum
atctacattgcctggaggaagcctaacgaagtcaggcatccagctgcccacccctgagcccaagattcttcccaggaacacaaacgtaggagacatatgctcctggaagcaccagcctttatctcttcaccttcaagtcccctttctcaagaatcctctgttcttcgccctctaaagtcttggtacatctaggacccaggcatcttgctttccagccacaaagagacagatgaagatgcagaaaggaaatgttctccttacattttgtctactattgcatttagaagccgcaataaatcccagtgggactagcacctctgccaacactggacccactgtgacctccagtgggatcagcacagtcatg

SEQ ID NO: 199072 - DNA, 385 bp, Gossypium hirsutum
catgaggtaaacgctgtcaatttggaaaaacgcaagcgcaaacagggatcgcattaggttatcttcttcttctttttttcttttttctttttgcaattccttcaactgaaaggggaaaataaccctaattttgtctctggattggtctcccaagtgaggaaagggagaaaaagaaagaaactttgaagaataaaaatggtgttttacttcaaagcccgaccagaggttggcgattacacaattttcatgggtctcgacaagtacgagaacgaggaactcattaaatacggctttcccgaagacatttggttccatgttgataaaatgtcttctgctcatgtttatgtaagacttcataaaggtcaaaccattgatgatataagcg

SEQ ID NO: 199073 - DNA, 519 bp, Gossypium hirsutum
atgctggcttggcaggcagtacagcatccaggggagtcaagggcatggggcgagaccagactaggcgaggcgggcggggcggagtgaatgagagctctcaggagggaggctggcgcaggcaggggtgaggagcacagcaggcggcgagcgggaggcactggcctccagagcccgtggccaaggcgggcctcacgggcgacgacggagccgggatcggtgcctcagcgttcgggctggagacgaggccaggtctccagtcggggtggacgtgcccaccagctgccgaaggccgggacgccaggtccggcggacttgccgagcgggacatgacatggtccggtgtgacggcgaggacagaaggggcgcgtccggccttcctgaacaccctaggctggtggggctgcggcaagaagcgggtctgtttctttacttctcccacggagtcggcacactacagctgccctctgggctcccagaacccacaacatgaaagaatggtgctacccagctcaagcctgg

SEQ ID NO: 199074 - DNA, 552 bp, Gossypium hirsutum
atgccccagttaccaggagaggctgtgtcaaaggcaccatgagcaagatcagcgaggccgtgaagcgcgcccgcgccgccttcagctcggggaggacccgaccgctgcagttccggatccagcagctggaggcgctgcggcgcctgatccaggagcgcgagcaggagctggtgggcgcgctggccgcagacctgcacaagaacgaatggaatgcctactacgaggaggtggtgtacgtcctggaggagatagagtacatgatccagaagctccccgagtgggctgcggatgagcccgtggagaagacgccccagactcagcaggatgagctctacatccactcggagcctctgggcgtggtccttgtcatcggcacctggaactaccccttcaacctcaccatccagcccatggtgggcgccatcgctgcagggaacgcggtggtcctcaagccctcggagctgagtgagaacatggcgagcctgctggctaccatcatcccccagtacctggacaaggatctgtacccagtcattaatgggggtgtccctg

SEQ ID NO: 199075 - DNA, 380 bp, Gossypium hirsutum
cccacgcgtccgctcaggccgaaagctttctcaatctcagcagcgggcatccaccttttggcttagcttagtcagttccctgccctatggttgttgaataagaagagcttataaaaggagttggtcaacaagaccgacgaattagaactagtatccactcattacacagaagaaagagtaacgcttgaagttcaatctccccacattctatctccatctgggctattgacggctaccaacccccgctctatctcttctgagtcatcaggggtgacccgaacttcggtgtcagaggatccatctcttcgacgggtataaaggctggttgcagtgctccaaaccttatccatgttggtagtcgcttgtcttatgagtgaatc

SEQ ID NO: 199076 - DNA, 360 bp, Gossypium hirsutum
gcgagacctttgcctcttgtgtggtttgtcgtcgtctttttttccaggaaaattcgaatcctaaaccctagctctgggaaaacaaaatctgataactaaagtaaaaaaaaatggctttgttgagaggtcgtacagcttctttgaacctcttcaataggcttctccatcaatcgtttcgtgctccaaatcgcaatctctcttctgttgcggccgatgctcataatcaatcaacgattgagaatatgaaaaagagatttacttaatcttgacattaattcacacattgggagttgtatgccaattgcttcaatgcgaatcgggacctttatccacaacattgaggtgaacccgggtcaaggc

SEQ ID NO: 199077 - DNA, 420 bp, Gossypium hirsutum
caaaaaacgcataatcatggagcggtgcaagaagttcgcttttctgatggttgcaatggctctgcttcttcaagccatggtgcctccgacagcattagctgctcgtaacaatgttatggaatacaatccattggcaagcgtattctcgagggaaggccctggctgcatcgcaaaaggcgggttttgcttgtttgacctaaccagttgctgtaggccttgcggatgccttgcagggtggtgctataacattgatcatgattgcaatgagtacacataatggtcgctactgagttaaaaaaaaaaaacagctctgagtcaaaaaatgacatgggattcgattataaatgttctatatataacatatgtttttgaataaagaatctcgtgttatgtccctgtttaattgagctgtgccattgg

SEQ ID NO: 199078 - DNA, 408 bp, Gossypium hirsutum
tccacgcgtccgaaagaatatcgttttcctcatcgttgctatatctctagttcttcaagccacggtgcctccaactgcgttagccgctcgtaacgaggttatgtcctctgccgctgtatcgaaagtggctaatgattccaacggtttggctgtggttttcgagaaggtaggccctggctgcaaacctaaaggttcgttttgcttgtttgacctaaccagttgctgtaggccttgcggatgccttgcagggtggtgctataactatgatcatgaatgcaatgagtacacataatggtcgctactgagtttaaaaaaaagaaagaaaaacagctctgagtcagaaaacgacatgggattcaattataaatgttctatatataacatatgtatttgaataaagaatctctc

SEQ ID NO: 199079 - DNA, 580 bp, Gossypium hirsutum
tctaaagtcacacctgctacacgacagatggggcatgaccttccacgaacatggcgcggtcacccttggttggacacaccacatggccatgcagctctccggcgtgtgcttgtggggtattcttttcgtgattctgatgtggggtactgtcaggggttaaactacgtcgcggcattgttattgcttgtaatgaaaacggaggaagatgcattttggatgcttgctgtcctccttgaaaatgtcctagttaacgactgctatacaactaacttatccggatgccatgtcgagcaaagggtttttaaggatttgcttgctaagaagtgcccaaggattgctgctcatttggaagcgttggagttcgatgtctccctcgttgctactgagtggttcctgtgcctcttcgctaaatgcttgccttcagagacaactctgcgggtatgggatgtccttttctatgagggggcaaaggttctttttcatgtagctttggctatatttaagatgaaagaacatgaattgcttctaacgcatcaggttggtgacattattaacatattacagagaactacccatcacc

SEQ ID NO: 199080 - DNA, 767 bp, Gossypium hirsutum
atggaggtgtctaccaacactgccatgattcagaccagcaagacagagatcacggagctcaggcgcacgctccagggcctggagattgagttgcagtcccagctgagcatgaaagccgggctggagaacaccgtggcggagacggagtgccgctacgccctgcagctgcagcagatccaggggctcatcagcagcatcgaggcccagctgagcgagctccgcagcgagatggagtgccagaaccaggagtacaagatgctgctggacatcaagacgcggctggagcaggagatcgccacctaccgcagcctgctcgagggccaggacgccaagatgactggtgtcccttcctcagcaggaagcgtcagcccccgaagcacctctgttaccacaacttccagtgtctctgctaccaccacctctaatgcctctggccgccgcacttctgatgtccgtaggccttaaatctgcctggtgtcccctccctctgtcttcagcacccagaggaggagagagctggcagttccctgcagaagagaggaggggctgctggacccaagcctcaatccctctgctttcaggaccccacatcccgactgtctcctgaggatgggccctctgtgctcttctcttcccattggatctctctcctctgtgacctggatactctttggtttctcaacttctctaccccaaagaaacgataattcaataaagtttcctgcctttctgcaaacgtaaaaaaaaaaaaaaaaaaaaaaagggat

SEQ ID NO: 199081 - DNA, 499 bp, Gossypium hirsutum
ctcagccaaaggccggtagctcgtttatcaactgagcgaatacttagttgagcccttacaaataagtattcgcttagttgataaagagttgatcttttgtgtatgtacataagggttgataatgtgaagcaagtacgatatcgtaaatttgtgcatatgaaattatccgtttagctatatgaatgctatacttttgttgtgctggaattccttgctcaaaacttactaagcataaattgcttactccgtttcattgctcctctgttttatagatttggttctccagctatcggactcgggatcttgaggtcaaagtcgcccacactatcaaagcccccccttttggtacaattttggttgaacttcgaaatggcatgtataggactacccgtttgttgtgggtcgtggaccctttggacttgtataaattttggatagccatgcgaaaatggcttatatgtgtttgagtatattgttataatcaattggtgtggatatg

SEQ ID NO: 199082 - DNA, 624 bp, Gossypium hirsutum
tcgaggtgaaccagatggataagccttacaaggtgaaactgaacaagtatgctgatatgaccaaacatgagttcatgagtacaaggagctcaaaggttagccattaccggatgctccatggtccaaggcagatgactgatttcagacatgataaaactgacaacctacctcctttcattgattggaggacgaaaggagcagtgactggtatcaaggaccaaggcaaatgtggtagctgctgggcattttcaactgtcgttgcagtggagggtataaacaaaataaaaacaggggagcttgtgactttatccgaacaagagctggttgattgtgataaggagaaccaaggttgtgagggaggattgatggaacaagcatttcagttcatcaagcaaagtgatggaataacaactgagaattattatccctacagagccaaagatgagtcttgtgactcatccaagttgaatggtcctgtagtgatcattgatggctatgaaatggttcccgaaaaggatgaaaaagctctaatgaaagctgttgcaaaccaacctgtgtctattgctatagatgctggtggtacggatttccagttctactcggagggagttttcattggagact

SEQ ID NO: 199083 - DNA, 409 bp, Gossypium hirsutum
atctggccggcgcggcgctcccctgctctctggctccgggctgcggcgccgcggctggagcgagcccctgtcccggcgcggggcggcggcgggcggccggcaggcactgccttgcgtgtgagtgcacctcactcacatgtgctggagaatctggtaaaagcaccattgtgaagcagatgaggatcctgcatgttaatgggtttaatggagacagtgagaaggcaaccaaagtgcaggacatcaaaaacaacctgaaagaggcaatcgaaaccattgtggccgccatgagcaacctggtgccccccgtggagctggccaaccctgagaaccagttcagagtggactacattctgagtgtgatgaacgtgcctgactttgacttccctcccgaattctacgagcatgccaa

SEQ ID NO: 199084 - DNA, 468 bp, Gossypium hirsutum
attgtatgtggaggtgcggtacagtccgcacctgcttgccaattccaaagtggagccaatcccctggaaccaggctgaaggggacctcaccccagacgaggtggtggccctagtggcccagggcctgcaggagggggagcgagacttcggggtcaaggcccggtccatcctgtgctgcatgcgccaccagcccaactggtccctcgaggtggtggagctgtgtaagaagtaccagcagcagaccgtggtagccattgacctggctggagatgagaccatcccaggaagcagcctctttcctggacatgtcgaggcctaccaggaggctgtgaagagcggcattcaccgtactgtccacgctggggaggtgggctcggccgaagtagtaaaagaggctgtggatatactcaagacagagcggctgggacacggctaccacaccctggaagaccaggccctttatgacag

SEQ ID NO: 199085 - DNA, 393 bp, Gossypium hirsutum
cttgcttgggctgctttaatggtagtctttacattttccctttcactcgtagtatggggaagaagtgggctctaggggtactcctaattggggttgaggaatcaaaccgtatcaattgttttctagatcgttttgcaaagcctttttttattttaactattttattagtcttcatttcgaaattcttggatgctagtggagtaatgtattctatgaataacaccttttcaatcaaaatcaaataaacatttcaataatccccatgttcgtatttcgaaagtaaaagggatccggatgataggcaataaaaaaaaagaattcttcctaaattttctattttgatgaaccagctcttaccagagttatgaacggacaatgagggacaaggaaacc

SEQ ID NO: 199086 - DNA, 353 bp, Gossypium hirsutum
ataaaagatgcagacttcattaattttattttgctttatcactttctccttgactaaggaaagcctcaggtgttgaaagttagagtaaaaatgcatttgcagcagaggtagaatgaaacatgatttagcttaatttgtgtactggattctacatttaaacattaagttatttaaacctttagttttttagccatatttgtccatttagcagaacttgaaatattcctttggaaattaaaataatttagcaatccagtcacctgcaaaaatttaatatttttgtttacttactgcttttattctagttggtagatcttaaggccgaactcttccgaaagcaagaagaattcaaa

SEQ ID NO: 199087 - DNA, 404 bp, Gossypium hirsutum
cccacgcgtccgagatgaccactccggtttgcccattcgtgaaagcggctcgaccggacgataatggttcggccaaaaaatccaccgtcggcggcagcgaagcaacaaggaaagattccggtgactccgccaccgtgtctccgaaatgcccttttggttacgattccaataattttaagctcggtcctctcagttgtatgatctgtcaagcacttctctttgactgcaccaaatgtatcccttgttctcatctcttttgcaaagggtgtatatctcggtttaaggattgtccactatgtggagctgacatagagaaactggaagctgacaccaatcttcaaagcatggttgatcgatttatcgaagggcatgctaggatcaaaagggcacatgttggcgttaat

SEQ ID NO: 199088 - DNA, 588 bp, Gossypium hirsutum
  unsure (1)..(588): unsure at all n locations
tggacattggggaggattgtggctaaggacgtcgaggcagctgcggtagcagtaccggtggctgcttctccggcgaagccagatcctgtggctcctgggattgaattgggaacagtggttccttttaccacaatgcagggtgctgtgagtaggaatatggtcgagagcttgtcagtgcctacgttccgagttgggtacaccatcaccacaaatgcacttgatgccttgtacaaaaagatcaagtccaagggtgtaacaatgacagcattgcttgcaaaggcaactgcacttgcattggttcaacatccagtggtgaactcctgctgtanggatggcaacagctttacatacaatagtagcatcaatattgctgttgctgtagctatagatggagggttgattacaccggttctacaagatgctgataaggttgacatttatacattgtcaagaaagtggaaagagttggttgataaggcacgggccaagcaactgcaacctcatgaatataatacaggtactttcaccctgtctaaccttgggatgtttggtgtggaccggtttgatgccattctgccacctggaact

SEQ ID NO: 199089 - DNA, 403 bp, Gossypium hirsutum
  unsure (1)..(403): unsure at all n locations
aatgctcccccctccccccgagcgccgctccggctgcaccgcgctcgctccgagtttcgggctcctgctaagctagcgccgccgtcgtctcccttcagtcgccgtcatgattatctaccgggacctcatcagccacgatgagatgttctccgacatctacaagatccgggagatcgcggacgggctgtgcctggaggtggaggggaagatggtcagtaggacagaaggtaacattgatgactcgctcattggtggaaatgcctccgctgaaggcccagagggcgaaggtaccgaaagcacagtaatcactggtgtcgatattgtcatgaaccatcacctgcaggaaacaagtttcacgaaagaagcctacaagaagtacatcanagattacatgaaatcaatc

SEQ ID NO: 199090 - DNA, 458 bp, Gossypium hirsutum
cacctatggtacatggtttggagtgaaaggattggtggctgccagaaagaacttcaataacttgtctagtatccagaaggcctgcaattttctgctgtccaaacagctcccctcaggtggctggggagaaagttatctttcatgtcaaaacaaggtttactcaaatgttgagggcaacaaaccacatatggtaaacactggctgggctatgttggctctaattgatgctgggcacgccgagagagatccaacaccactccacaaaggagctaaatatttgataaattcccaaatggaggacggtgatttcccgcaacaggaaattatgggagtgttcaacaggaattgtatgatcagttactccgcgtatcgcagcattttccctatttgggcattaggcgaatatcggactcgagtgttgcagctgcggacaacgtcgtagaacaatggtaataact

SEQ ID NO: 199091 - DNA, 524 bp, Gossypium hirsutum
atgtcctcgtggaagtgacatcgtctttaaaccctgcgtggcaatccctgacgcaccgccgtgatgcccagggaagacagggcgacctggaagtccaactacttccttaagatcatccaactattggatgattatccgaaatgtttcatcgtgggagcggacaatgtgggctccaagcagatgcagcagatccgcatgtcccttcgagggaaggccgtggtgctgatgggcaagaacaccatgatgcgcaaggccatccgagggcacctggaaaacaacccagctctggagaaactgctgcctcatatccgggggaatgtgggctttgtgttcaccaaggaggatctcactgagatcagggacatgttgctggccaataaagtgccagctgctgaccgtgctggtgccattgctccatgtgaagtcactgtgccaggccagaacactggactcgggcccgagaagacctcctttctccaggctttaggtatcaccactaaaatctgcaggggcaccattgaaat

SEQ ID NO: 199092 - DNA, 382 bp, Gossypium hirsutum
atcgagaaagtcgagtggccaacgagccggcagagacccaccgagcgtcggcggagggagcagcgccggggcgcacgcggccaccatgacccagacgcccgccttcgacaagcccaaagtggaactgcacgtccacctagacggagccatcaagcctgaaaccatcttatactatggcaggaggagagggatcgccctcccagctaacacagcagaggggctgctgaacgtcattggcatggacaagccgctcaccctgccggaattcctggccaagtttgactactacatgcctgctattgcgggctgccgggaggctatcaaaaggatcgcctacgagtttatagagatgaaggccaaagagggcgtggtgtatgtggag

SEQ ID NO: 199093 - DNA, 402 bp, Gossypium hirsutum
atgccaccttgtaggctcagggctcaggtggagggttgtgggtttgggcgatccagagggaggacgaacgccctgaatcttgtggctagtaatatctcccctagagacctctcagacaggcagacaggcaagacagacaggcacccgatgctgctgtctcttgagctgggggcacagctaggaggcactagagtctagcccaggggctccaagtgacaagccgaggcactcccccagaggaacaggtaggcacctgccctcagttaccctctgctcatggccacctctctcctttctcccaggatgactggtgtcccttcctcagcaggtaagagaacagccccatggagtggggggaggcggagttaggctcctgttcactggcccaataaaagtgggagc

SEQ ID NO: 199094 - DNA, 426 bp, Gossypium hirsutum
atgtccgcctgacctacctcaggaaccagctggcagagaaggacgagttcgacatcccggacctcaccgacaacagccggcgccagctgttccgcaccaagagcaagcgccgcttctttttccgcgtgtcggaggagcagcagaagcagcagcgcagggagatgctaaaggacccctttgtgcgctccaagctcatctcaccgcctaccaacttcaaccacctggtacacgtgggccctgccaacgggcggcccggcgccagggacacgtcccgggctctggaagagaagggccgagtttctcgcggctcctctggcccacagcggccccacagcttctccgaggcgttgcggcgcccagcctccatgggcagcgaaggcctcggtggaaacgcaaaccctcagaaaaggaaaccttggacaatcc

SEQ ID NO: 199095 - DNA, 719 bp, Gossypium hirsutum
atcccgcctggggcctccggacattgctccctgaaccctcggaggtggcggtggatcttactccttccagccagtgaggatccagcaatcttctccgtgcctccccccgcgcctgttggttggaagtgacaaccttgaagatcggccggttggaagtgaagaccttgaagatcggcgggcgcagcggggccgagggggcgggtctggcactaggtcccgcccctgcacgccaggaaccccagaggaagtcgcagttcagcccagctgagtcctgtctgcagaatccacaccaaccagcatcatgtccatgacactggggtactgggacatccgcgggctggcccacgccatccgcctgctcctggaatacacagactcaaactacgaggaaaagaagtaccggatggggcacgctcctgactatgacagaagccagtggctgaatgaaaaattcaagctgggcctggactttcccaatctgccctacttgattgatgggactcacaagatcacccagagcaacgccatcctgcgctacattgcccgcaagcacaacctgtgtggggagacagaagaggagaagattcttgtggacattttggagaaccagcttatggacagccgcatggagatggtcagactctgctttgacccaaattttgagaaactgaagccaaaatacttggaggaactccctgaaaagctaaagctctactcac

SEQ ID NO: 199096 - DNA, 501 bp, Gossypium hirsutum
atacacagcccattctgctccatataccagaaaaaaaacacatttgaagcatgaattcccagcaacagaagcagccctgcaccctaccccctcagcctcagcagcagcagcaggtgaaacagccttgccagcctccaccccaggaaccatgcatccccaaaaccaaggagccctgcctccccaaggtgcctgagccctgccaccccaaggtgcctgagccctgccaccccaaggtgcctgagccctgccaccccaaggtgcctgagccctgcccttcaacggtcactccagcaccagcccagcagaagaccaagcagaagtaatgtggtccacagccatgcccttgaggagccagccaccggatgctgaaccccctaccccattctgcgtatgagtcccatttgccttgcaattagcattctgcctccaccaaaaaagaatgtgctatgaagctttatttcctatacactctgagtctctgaatgaagctgaaggtcttag

SEQ ID NO: 199097 - DNA, 443 bp, Gossypium hirsutum
attgcgctttcagaccgtaaggagcgtgctgggagcccggaagggaaactacgcagcgaaggtgaccggggaccaagcatttcagatctgcttggtagacctggtgcaccaccaccatgttggctgcaaggcttgtgtgtctccggacactaccttctagggttttccacccagctttcaccaaggcctcccctgttgtgaagaattccatcacgaagaatcaatggctgttaacacccagcagggaatatgccaccaaaacaagaattgggatgcggcgtgggagaactggtcaagaactcaaagaggcagcatttgaaccatcgatggaaaaaatatttaaaattgatcagatgggaagatggtttgttgctggaggggctgctgttggtcttggagcattgtgctactatgggttgggactgtctaatgagattggagct

SEQ ID NO: 199098 - DNA, 642 bp, Gossypium hirsutum
cccacgcgtccgcccacgcgtccgggaggaagttttagaagccacacaacttgctgagtttcaacgctgcatggtacccttattccaccagataggccgttgcttgagtagctcgcattttcaggtggcagagagggctttgttcttatggaacaatgatcatattgaaaccctaataaaacagaatcgaaatgttatacttcccattatcttcccctccttggaaaagaatgctagaagccactggaatccagcagtgcagagcttgactctgaatgtccgcaagattttctcggataccgaccctgagctctttgaggagtgcttgcataagtttgaggaagaccaagcacaagagaacgaggtcaaatcgaaacgcgaaaccacatggaaacgattagaagagattgctgcaatgaaagctgcaagtaatgaacccgtgctcgtctccccgaaagcaactactcgcaacccatcttgctaggacaagagattgccgttttagctacctgacattttcattgtcaagaacggctcggggaaccatagggcggtggacatgatggtttcaagaacaaaaatgaagatgaagcggagttttccatcatatcaagtgttcactcacaccttctgaaaatctgg

SEQ ID NO: 199099 - DNA, 374 bp, Gossypium hirsutum
gataccttgtaatgtgtcaataaaccattccacagaggttgtttgctaagaactttggggtttccaagaattacaataccatatcgagcacgtgttaaggcaacattaagcctgcggggatcatctagaaatccaataccctaaaaagtttatagaacagtttaaaaagtagcatgttagtttggtccataattaaagcatatagagagagagaggacagagagggttaaaatattagtattagacttggaatgaacaccataactagaggttaatccaccaaacaaatgaaaaatatcacaaagaaaaactttcaacaaacttatgaatagtgcagaaattgaatattagtttgacataagactgagattcaa

SEQ ID NO: 199100 - DNA, 386 bp, Gossypium hirsutum
tagatggttagaccaaaccatggatcttattcacaggttcctcaacctcgtagctcctacattcaccttcttttcattggtctttttatggccacccttttatgtctccaacttcttcctttccatcttacgctccgttttcagtgagaatgttgctaggaaagtcatcgtcatcacaggcgcttcttccggtataggagagcatttggcatacgaatatggtagaagaggagcaaggttagctctgacagcaagaagagagaaatcactgcaagaaattgctgatagagctcgtgatttggggtctcccgatgttattgtaattcgtgctgatgtttctaaagttgatgactgtagacgacttgttgaggaaaccgtgaatcatt

SEQ ID NO: 199101 - DNA, 647 bp, Gossypium hirsutum
atgggcagttggacgttggagtctgaaggacaaaagcaacgtattggcttgagctggggaggggacagccgttggtatagaggcagaaaccgaagctgggagggaacggattcatcccgcacttgtatttagggtaggagaggagacagcccagggtgggcagagggtacgcctgcttggatgtgggcctgtggcatgggagtagcagaggaatagaagcctcaatggccaccttcccacccccttacttcctcctactgcccctccctgccctactcatgctcctttccctgccatcctacccttgggactccctgagcctcccttgggctgtcagatcacccccaggttcagtgtgttagaacatacaaggcactgcagccagatgagctgaccttggagaagactgacatcctggcagtgaggacctggaccagtgacggctggctggaaggggtccgcctggcagatggtgagaaggggtgggtgccccaggcctacgtggaagagatcagcagcctcagcgcccgcctccgaaacctccgggagaataagcgagtcacgagtgccaccagcaaactgggggaggcccctgtgtgaggggcagccgtggcctgggacagcacctccatgcctggttcccggat

SEQ ID NO: 199102 - DNA, 504 bp, Gossypium hirsutum
atctttgggatgggcatctcgacccctcgctcggtacccacgtttggcccccaaatcctgaagagggaaccagaaccagcgccccgccgcggggcgggccggccagcgcacctcctgagggtcacaccgacaaatctgaagcgggtttgccagaggagtgtacccgtctccctggcctgggccaccgggtccacagggatcccatttccggccctacaccccgctccacgatcccatacgggcgctgcagctgtgttctgcaggctgcagggacgcgctgagacgaatccccggacgaggtgatggctgggccggcggaggaggcgggagcccattgtcccgagggcctgtggcctctgcccccgcaggtgtcaccaagagtgacctacacacgagtgagcccaggacgggctgaggatgtcaacttactataccacccctgtgcccaaccctggctgaagctccaggtttgccttttggcctatgcttgtatggctaaaccct

SEQ ID NO: 199103 - DNA, 559 bp, Gossypium hirsutum
gcgcctttctctggttttgcgcgcttcctttcaccctgagaggatgacactgtccatgtgcttctctgccaccacggctgctcatcctattcccacttcagatccgcatgcaccccattcatccgactctcaatcactcgtggctgtttccttctgcaagtttgttgatttcacagaccattcatccgaccatgctgatttccatcttgacattttatttgttcatattccatgtagtttatatttgccatcttgaaaacaactccaccaaaaatttcaacagtctttttatattgtattttttttcaaacgccatttttcaaatctttttctttgaatttcggatcccttcagagtgctgaaaaatattcacgtgctattggctggggtttacaaggagctacgtcaggcatggaggatgccaaagagcaaatcgaacaggagtccaaaaattccaagccaccatctcaagatgaggaggcagctataaagaaaaaatatggagggattattccccagaaaccagcactaatctataatgaccatgaacgggcctact

SEQ ID NO: 199104 - DNA, 731 bp, Gossypium hirsutum
  unsure (1)..(731): unsure at all n locations
caccatttttcccaaagagagaaagatccctaacactccaccgatctctccatctcccctaaatctgatgcacccaccatttccagtaaggtggagagagagagagatataagtgaagtcttttaaaagataccattttctttttgatactttacttcttctagtaacaataagaatcctagcttttttagctttcagggtgataaaaataaacaatggaaccgttttttaaacacccttttttcatctgctgtatgggctttattcaggtttttctttgaagggcgggtctgaaggcctttggtaaattaaacctcgttcagactttgttgaaaggaagatgaaaggcgaggatcaagcaaggtctttgtttggaattccccttacagataggccaaaatggcaacagtttcttatttgttcgtctgggttcttctttggttaccttgttaatggcatttgtgaagaatatgtatataataggcttcaattcagctatggatggtatttcacttttgtacaagatttgtttacctgatattgataaggcttcaaggctttaccacgaagcanatggtgaatccatggaaaacatatgtgaaacttcagctgttctattggttctcatggattaccaaagttcttggcttaccttactacccagacaaatatgttaaattacaaagtgctgctgtataatatggtgcttaatcctggcttaaaggaaatct

SEQ ID NO: 199105 - DNA, 577 bp, Gossypium hirsutum
atcaaaaaagggccagaatggataggaaaggactcccaaaatctgagcataccagccgcttaaggagaaatgttgctagacaaccatagttgaggttagaaagaggaaagaaggaagagttagtgggctagagaggggaaggatgtgatttgagcagatagttctcattctcctctgtccagagtacctgaactatgaggatgggaaattctctaagagccggggtgtgggagtgtttggggacatggcccaggacacggggatccctgccgacatctggcgcttctatctgctgtacattcggcctgagggccaggacagtgctttctcctggacggacctgctgctgaagaataattctgagctgcttaacaacctgggcaacttcatcaacaggtgggaattggtaaggggtcagagttagcagtgagctggggtggggctcattttccctcaggagatgggaatgtggagagaactagaaaatgggcaggaggctgtgaggacagtgtggaaagttgatttctattaattgggatctgttcctagcacatatgaggctatgtatgcttgatgg

SEQ ID NO: 199106 - DNA, 706 bp, Gossypium hirsutum
cacttactgcacttcaaaatattaaaagcggaacaaaaaaaaaaaaaaactacccattttttctgttcaccaagttctagataatcggagatatggcttggataacacgattcttaacggcggtagctttcttggctgtcggcataatattctcgccggagactttcggatcaaaatcggatggtacaaaatctccaaatctctcctcattcattaagctggctcatctcctgagcttctcaaccgcctggggcgctgccctttgggtcactttcatcggcggtatcatcatgttcaagaatctgcctaggcatcaatttggtaatctacaaagcaagatgttcccggcttatttctcgatggtgggggtttgttgtgccatatcggtggcggcatttggttatttgcatccatggaagtcagcgacgatgccggagaagtaccagcttgggtttttagtctctgcatttgccttcaatctatccaatttgttcgtttttactcccatgaccatcgagatgatgaagcaaaggcacaaagtggagagagaagcaaacattggtgatgaaattggatggtcgaagaatcaggaagctgcaaagactaatccaaagcttgcagccatgaacaagaaatttggaatgattcatgggttatcttcacttgctaatattatgtcctttggcagcctggccatgcattcgtg

SEQ ID NO: 199107 - DNA, 584 bp, Gossypium hirsutum
atgacaatctgtctgtccgtctgcagctgcgtgactgtctgtctctgccatgtctctctccccatgccgggcccagaggggcttcagctctcgctcagcctgttctgctcgctcaaggggctgcagcaggggaggcttcagcagcaggagccttaattcctttggggggtgcctgggaggctctcgtgggagtacctgggggtcagggggaaggctgggggtgcagtttggggagtggagtgctgggcctgggctctccctgtgccctccggggggcatccaagaagtgaccattaaccagaatctgctgaccccactgaagattgagatcgacccccagttccaggtggtgcggacgcaggagacccaggagatcaggaccctcaacaaccagtttgcttccttcattgacaaggtgcggttcctggagcagcataacaaggtcctggagaccaagtggcacctgctgcagcaacaggggttgagtggcagccagcagggcctggagcctgtctttgaggcctgcctggatcagctcatgaagcagctgcagcagctccagggagaacgaggggctctggatg

SEQ ID NO: 199108 - DNA, 725 bp, Gossypium hirsutum
ttgtttttccgaagatttctctccccatttcttaaatctcatcgccgtcatttccttttatatataaagctgaaaactaagcctgggttttgctttaaacctccattaaaatggcttcttcaatctctgttccatgccctaagatctcttcttttgttaaaccaaagcaaacccaaaagatctcttttgctcttcctcattgttccaagtcttgtttctcatttggatcttcaattaaggtccctgcattttctggatgccagtggcatactgagaagaaaactatggccttcaaagcacgtgcaaagcttaacgaggttgcagcagagaaatcttcgaattctgtaccggtagttgacatgaagtctaaagctgcattgccaaaggaagatgataaatctactggcaatacaataccggatgttgcagcaatctcggctttcatgacacaagtatcggaccttgttaagcttgttgattcgagagatattacagagttgcaactgaagcaatcggattgtgaacttataataagaaaaaaggaagctttgcagccaccggaaacaagcacccccagttttcatccgccacagttacattgcctcatcatgccatgtttcaaaccccatttccggcagcagccccaacagcatcaccggcaccttcaaacccagcccctccaccactagcactgccctcagctgcatccccccccccccccccct

SEQ ID NO: 199109 - DNA, 475 bp, Gossypium hirsutum
atagaaaaataaagtagggcaaagtggataggaagtggtgggtggtagtgggacggatcctttatacagggtggttcaagggaggctttgctgtgagggatatgccatatgcatatttgggggaagagcattcttggcattgataacagcaggtgccaaggccctgaggtgggattgtgtttagagcattcaagcaagaaggccagggaggctggattaaataatctccaaatgcctcttaaaggaggtggtggtaactctaatttaaatgtcagataaatggttgaaagaaagttttcactctggctaggtgggaatcctaaatcatctctttacaatcaatactttctgattaatgtatctaattaaatatatcagagagagttgtctggcatttattacttcgaggtctgtaattcaatgccaatttgaatttcttccaatgtttctatagccaaaatgatttttcagcttt

SEQ ID NO: 199110 - DNA, 401 bp, Gossypium hirsutum
atcagctgagcaatgcacggagtggacctgtaggcgacttgcatcatcttcaacatgaagatagccacagtgtcagtgcttctgcccttggctctttgcctcatacaagatgctgccagtgagaatgaagatcaggaaatatgccatgaatttcaggcatttatgaaaaatggaaaactgttctgtccccaggataagaaattttttctaagtcttgatggaataatgttcatcaataaatgtgccacatgcaaaatgatactggaaaaagaagcaaaatcacagaagagggtcaggcatttagcaagagctaccaaggctactgctccaacagagctgaattgtgatgattttaaaaaaggagaaagagaaggggattttatctgtcccgaattttatga

SEQ ID NO: 199111 - DNA, 686 bp, Gossypium hirsutum
tttatttttctgaaggtgggagaaaagataaaacttattattaatttaatccaaattagagtttgaaactcatgtaattaaccccttttggttaacccgagacaaatcaatagatctatgagaaatctcattcaattggatatatggtagggtaaaaaaatgggataccaaaagaattgactgccgagccgtatgaggtaggaaactctcaagtacggttctaagggaaggaattgaaccgcctatttcgaccggggagaacaggccattcgacagggggattctgaaatagcggaggcttggttcgatcaagccgctgagtattggaaacaggctatagcgcttactcctggtaattatattgaagcgcagaattggttaaagatcacgcggcgtttcgaataagaacaagagctctctgtttatttattattattttagttttaggattcgaaattcgaattagaaattagagaattctatttaattctatttctatttaatttctattaaatccatttatttaatatttaatttaattaaataaattacggtactatttaaattattaaattcgattttctagtcaatttgaatatttaaattaaatagtaaaaaatattaatttaattggaattgttaattgtgtaatggtttggtttcgtggacccatgggtcaaataaaa

SEQ ID NO: 199112 - DNA, 378 bp, Gossypium hirsutum
atgtcatttcattggcgtttgagtcagcaaagaagtcaagatggccaaagttccggacatgtttgaagacctgaagaactgttacagtgaaaatgaagaagacagttcctccattgaccatctgtctctgaatcagaaatccttctatgatgtaagctatggcccactccatgaaggctgcatggatcagtctgtgtccctgagtatctctgaaatctctaaaacatccaagctgaccttcaagcagagcatggtggtagtatcaaccaatgggaaggttctgaagaagagacggttgagtttaagccagtccatcactgataataacctggaggccatcgccaacgactcagaggaagaaatcatcaagcccaggtc

SEQ ID NO: 199113 - DNA, 424 bp, Gossypium hirsutum
gaaactgatggtgatcgtggaatgtggtcgtaagtattttgtcgctcgatttgccttaagctgtgaatcaatgacctagtaagccttgaattggttcattatccttcccccattctttagaatattttactatatatttactaacgctcacatgctactttgtatgtctggacttaagagagcctttaagaagaaaaacttggtaacaaaattttgtgattctagtctaaccaactcagcataagaatgattacctgactacaatatggggtaactaagttatgcgtcctataatattcttttgcctttttttcttaatctttctcttagtaagttacctgttgtggttattacattacaagaaaaagtggtgccaatgtttatagtggcattggctattggtacgtttttacttttagatata

SEQ ID NO: 199114 - DNA, 817 bp, Gossypium hirsutum
cccacgcgtccgcccacgcgtccggcatcatctattgaccatgttggttctgagtactctgatgcaactctagctgctggacgatatacttccagcctttccaacacttacaattcccacaagctacggcctgctgatacattcatcaggtcctcctggggttctcctagcaaagaaaatcatgccatttgttcgtctgaatgggagaatgaatttccagcttctgttgtgagggctgtgatgaagtttgggatgaaacgttttgcagtagatgaggacgggcggtgacacctacaaccactcatcgacttctggacatgagcaacgttggtttaagtgcagaaaatggttatgctacaagcttggcacgttttgctgcaattattggaccagtttggaaaattgctacaaggaaaattgaaagtgttttgcctagtggactcacgtttagtcctggatgggttggagaaaacaggacagttgagcagccacaatgttccttttctgataagcagagatctccgaattctctatctgataaccctccttttgcaggtatagaagacatggtagctgttagaggcctaaattctcaaaatgactcgactttggaaccttcttatcagttacagcaaagtcttgtactgcactcaagtatcaatggttctattggtgggtttgggtttggttatttctctcaacggagttgtaaccaatgtgtaattactgtctgaaagacttagtgccacttcacgcttgtatggttggggctttgatttcttcaagaggcaattgccgatgttaacgttacttttga

SEQ ID NO: 199115 - DNA, 672 bp, Gossypium hirsutum
ttgacgcgtgggcggcaagcattggccttgggaatcttgggtttttctgcaaaaatgttggcggtttttgagaaagcaacaggaaatccaccggaggagctcaggcttccttcagttggattggattctgacggtaagggaactcgagaagaaatcttgcagactttcaggttgctgtggccagagtcgaccttttaccacctttcaaatggaaatttcatgacactgtcacatggagctcagagtcctttgcatccaaggtccatggttgtcatggatgacatcttctgcatctttattgggactcttgtgaacatttgcgaactcaggcgacattacggcttgtccagacaagcaacagaagccatgcttgtggttgaagcttacaaggttcttcgagaccgagctccatatccacccgaccaagtcattaaagatcttgaaggaaaatttgctttcattattttcgatgctaaatctggtaccctctttgtggccagagaccgtgaaggaagcattcaacttaaatggggaatggctggagatggctccctggtattatcagatgatccaaacaccatagaaaaggcttgtggaaaatcctctgcttcgtttcctccaggctgcattttcatgaatggcaatggccttataagcattgatcatccactc

SEQ ID NO: 199116 - DNA, 563 bp, Gossypium hirsutum
  unsure (1)..(563): unsure at all n locations
caacatttggatcattgatggtccttgctcatatgattggagttagcattaatctcctctcgctcacaacaggtgtttcctgaagatcttcttgttcaactgatgaaagcaatgttgcatcccaatgttgaggtccgtatgggagcacaccacatattttcagctcttcttattccaagttctagtcatcctcgacatgaagttgcatctctgcgttccggttttgtctatgaaccaagaagatggcgttccaccaatgcttctgcatttgcatccatatcagcgttgcttgaaaagctccgaagggaaaaggatggcatcaaattggagaagaatggttgtaatattcatgaagattttaaaggaaaggacaatatggaggaggactcgaaacaaggccttgtcgtgaagagtccccgaacatctatactataacctctattattgaccgaacggctgcatcaaacatggttgaggcagaaccatacatcatgaagctgacggaggatcagataatgcagttactgtcaggtttctggatacagaccaatctntctgataat

SEQ ID NO: 199117 - DNA, 613 bp, Gossypium hirsutum
atcaaaggtacagggtgagcttgatgaaatcgtcggaaaatcagggccgctgacggaaccaggcgttcaatcaatggtttacctacaggctgtgctgaaggaagttctgaggttgcacccacctggtccacttctatcatgggcccgtttgtcaatcatggacacaaccgttgatggacatcacgtgccatctgggaccacagccatggttaacatgtgggccataacaagggacccagatgtttgggtggacccactcaagttcatgcctgagagattcgtgtccaaggacagtggtgacgtggaagtagtgtcagtgttggggtctgacctcaggctggcgccattcggctcaggccgtagggcttgccctggaaagactttgggtctggcaaccgtgaccttttgggtggcctctttgttgcatcagtacgtgtgggtgcaatcagatgagaaccctgtcgttgatctctctgaaatgcttaggctctcatgcgaaatggctaacccacttaaggtcaaagtgcacccgaggctcagataaaaaagaacaggaccaaatcaataagtgaagagataatcataatatggtcgagataaaaatgtaaattta

SEQ ID NO: 199118 - DNA, 522 bp, Gossypium hirsutum
gggctgttatctcagtttttgtgatgctagccatgtttcaattcgtggtgaagcaagggcaggccgccgtaacttgcaaacaagttgatgatgcattggcagcctgcgttccttaccttaccaacggtggggttccttcgactccgtgttgtaatggtgtaggggaactccggaatagtgccgaaaccacggcagacaggcaagcagcttgcaactgtgttaaacaagccgccgctcgtatccccactatcaaagaagatgacgccgcaactctccctgcaaagtgccatgtccaagttgatttcccaatctccaagaacaccaactgcgaggacattcactaagatggaagccatcaagacgcaaatataatgccagtaggcgttgccgccatctattcaagtattattagccatatgtcgtacttgtgtcagaatagtaatgaagcacgcacatgtaagagtttttacaagcctttgtattagtaataaaaaggaatttgatgaaaaattcctgcacttt

SEQ ID NO: 199119 - DNA, 393 bp, Gossypium hirsutum
agagaggaaactgaggaaaaaagaacaaactagttaagagcaatggaagatgatgcaatggcaaccgaggctcctttagcaccagtcacttgtggaaggagagtccgaaatgacttggaagataaacttcctaaaccttatatggcgagagctttggtggctccggatgtcgatcacccgaacggaacgccgggccattaccataacggaatgagtgttcttcaacaacatgcggcatatttcgaccaggacgacaatggaatcatttatccttgggagacttacgccggttgtcgagccatgggatttaatccgattgcctctctttttttcaccattcttattaatggatctatgagctatcctacacttccaggatggttaccttcaccg

SEQ ID NO: 199120 - DNA, 698 bp, Gossypium hirsutum
  unsure (1)..(698): unsure at all n locations
aagacatttgccgctggaatcattgtaccaaagtgttatatatggcctgtagatggagctctttacttgcaaccttctacctctattgtcttggatgctcacaaagaagggctagaagtttttgcgtcagacttttataatgatgttccattcagcttcaattactcatatgacccagtagctgagtaccttcagtttgttgacaatggtaaattctctgttggtgggggttttaaccgacttcccaataactccagcagcagctatagaattgttttgctcacataggaaaaaatgcttcaaaacaagcggaccttttggtcatatcaaataatggagcaagtggagactatccggcgttgtactgacatggcatatacaaaagctatcagatgggnnnnanatgttcttgactgttcctgttccaatgacaaangatgtaatacctaattgcttgggctctataaatcttatacagagcaccgacattgtcccgacaaggctttagccatcttacaaaaactgtgccanaaattatccaagcagtggaatatttaccacaacctgtntggagtgatataaaagttgaaaccgtatatcaaccacagcacagtcaaatgttccaatcaaagtcaaatgccgactactaagttttgattttagctgcaaccactactttttatggctaatactaaaat

SEQ ID NO: 199121 - DNA, 471 bp, Gossypium hirsutum
ataatgaccgtccttattaagcgtaataccaccattcctaccaagcagacacagaccttcactacctattctgacaaccagcctggtgtgcttattcaggtctatgaaggagagcgtgccatgaccaaggataacaacctgcttggcaagtttgaactcacgggcatacctcctgcaccccgaggtgttcctcagattgaagtcacttttgacattgatgccaatggtatcctgaatgtctctgctgtggacaagagtacaggaaaagagaataagattactatcactaatgacaagggccgtttgagcaaggaagacattgaacgtatggtccaggaagctgagaagtacaaagctgaagatgagaagcagagggacaaggtatcatccaagaattcacttgagtcctatgcattcaacatgaaagcaactgtcgaagacgagaaacttcaaagcaagattaacgatgag

SEQ ID NO: 199122 - DNA, 563 bp, Gossypium hirsutum
atgtggagcaagatggctgtggagctgggcgtgctggttgtccggccctggcccggaaccgggctgggcagagtgatgcggactcttctgctgctactgtggttggcgacgcgcggaagcgcgctctactttcacatcggagagacggagaagaagtgctttattgaggagatcccggacgagaccatggtcataggaaactaccggacgcagctgtatgacaagcagcgggaggagtaccagccggccaccccggggcttggcatgtttgtggaggtgaaggacccagaggacaaggtcatcctggcccggcagtatggctccgagggcaggttcactttcacctcccatacccctggcgagcaccagatctgtcttcactccaattccaccaagttctccctgtttgctggaggcatgctgagagttcacctggacatccaggtaggtgaacatgccaacgactatgcagaaattgccgctaaagacaagttgagtgagttgcagctacgagtgcgacagctggtggaacaagtagagcagatccagaaagagcagaacta

SEQ ID NO: 199123 - DNA, 385 bp, Gossypium hirsutum
atggcacgattgactttttcgacattggataaaatctacaaatcagcccttgagttattcaatggtaactgacaactaaaatatttccctagaaaggaagatgaaaggagtggagtgtggtttggcagaacaactgcatttcacagcttttccagtcaaattggagcactgaacgttcagatgcataccaaattatgcatgggtcctaatcacacctataaggctggctaccagctttgacacagcactgttcatctggccaaacaactgtggttaaaaacacatgtaaaatgcttttaacagctgatactgtataagacaaagccaagatgcaaaattaggctttgattggcactttttgaaaaatatgcaacaaatatgggat

SEQ ID NO: 199124 - DNA, 391 bp, Gossypium hirsutum
atgcaaacatggagagaatcatgaaagctcaagccctaagagacaactcaacaatgggttacatggcagcaaagaaacacctggagataaaccctgaccattccattattgagaccttaaggcaaaaggcagaggctgataagaacgacaagtctgtgaaggatctggtcatcttgctttacgaaactgcactcctgtcttctggcttcagtctggaagatccccagacacatgccaacaggatctacaggatgatcaaacttggtctggctatcgatgaagatgatcctactgctgatgataccagtgcagctgtgactgaagaaatgccgcccctcgaaggagatgacgacacatctcgcatggaagaagtagactaacctccggctga

SEQ ID NO: 199125 - DNA, 409 bp, Gossypium hirsutum
cggacgcgtgggctgaaatataattacgatgaggatgagctgtaatggctgcagggtcctgcgtaagggctgcaccgaaaactgcaccattagaccttgtcttcaatggatcaagtcctctgattctcaagccaatgctactctcttccttgccaaattctatggccgagctggtctcctcaacctaattgaagccggccccgaaaaccttcgccctgctatttttaggtcacttttatacgaggcctgtgggcgtgtggtaaatccagtttatgggtcaattgggatgctttggtccgggaactggggtgagtgccaagcagccgttgatgctgtgctgaaaggctcccccataacccaaacttcatcatctttggaatcagttgaagaagagcaaccgatttcccct

SEQ ID NO: 199126 - DNA, 367 bp, Gossypium hirsutum
cttaacccattcaggtatagtctcagaaatacattagggtcttggcccatattagatacagaatgcagatacagtaaatcaaaatcctacccaccagcctctacacaccatctccgttcaaccctatacaccatgtggggattaaatcaacccacccatccctacacaccatgttataccgaaatgcggcacttaatcagaaggttacagctgagctgccagataacaagcttaatagcctttcagacacttcttccaaatatcaacccaccccgatgcaatgaaacatacaaaatatgtcatgtcattatgtaattaatagtacatacattcggatatcataagtcatgctcggtatagaaatcaa

SEQ ID NO: 199127 - DNA, 421 bp, Gossypium hirsutum
gtatcgaaggaagaaaaggttcctccgcccaaattcccattttgaccatgcctaatgatgatataacacatcctacaccagatcttactggttatattactgaagggcagatctacattgatagacaacttcacaatcgacagatatacccaccaattaatgtactcccttcactctctcgattaatgaagagtgctattggtgaggggatgactcgtagagatcatgctgatgtgtccaaccagctctatgcaaattatgctatcggaaaagatgttcaagcaatgaaagctgtggttggagaggaagcactttcttctgaggatctgctttatctggagttcctagacaaatttgagagaaaattcgtgactcaaggtgcttatgatactcgcaacatcttccagtcgcttgatctaac

SEQ ID NO: 199128 - DNA, 376 bp, Gossypium hirsutum
atgccggcgccttcaaccactcggacctggacgcggagctgaggcggctctttcgcgagcgctacggctgcaccccaagtttgtggcggccgtgcactacgagcagcccaccatccagatcgagctgcggctgaacacgtcgcataaggccgcaggtgacgtggacatcggtgatgcagcctactactgcgagagggacgtcaagggcgagtctctattccagggccgcggcggcctggacttgcgcgtgcgcggtgaagcccctgcaggtggagctgcacgctcatctattacctggacgagattcccccgaagttcttcatgaagcgccttaccggcgggcttatcggcgtcatcgtggtggtggtggtggccc

SEQ ID NO: 199129 - DNA, 664 bp, Gossypium hirsutum
gcgcccacgcgtccgtattttcatttcagtgaaggacaagaaaaaaatttttaaaaaaaaaaagaaccctctgcagccatggctgagcatcaccagcaattgcgccgaactgatgacatgaagaatttcttccatgaaaatggaccctcaacatcaaaagttcttatggttgccaccctccttcctgttggtggcatcctcctcttgcttgctggtttgagccttattggatccctcataggtcttgctattgccgccccacttttccttattttcagccctgttttggtacctgctgcttttctcattgcgggttccatagccggattcttgacctccggagcatttgggatcactggactgtcatcgctgtcgtggattgctacttatattcgtggaagcaggggctctatgtctcaggggctagacccagtgaagtggcccttgccggacacggcagtgagtatggagcagaagatccagaataggagccaaggaggaggaaggatctctgagggaggcagagaacaggaaggtggcaagagtaagacacaagaaggtggcaagagtaagacacaagaaggtggcaagagtaagacacaagaaggtggaaacaagactgtgggttgaagtttcctattgtagcagtcggctgatatgctag

SEQ ID NO: 199130 - DNA, 767 bp, Gossypium hirsutum
  unsure (1)..(767): unsure at all n locations
naaggttgcaatgaaatacatcaagctcatgtcttcatcaacgagttttagatagagcactctgcccaaattcacgagcatatgcttcctctcaagggccacaatccagaaagcaaactgggattggataaactttgtttcaaacatctgtcatttattcctcatctgctctcctaacatcaatcattgccatctttattcccttcaccttaacaccagtaatttcatgggaacttcatttgttggtgagaaagacgatatccaaaccacccataatctgcaacttcaattccagtagagtattgaatctgtgtcccgcttgactttcatgcatgttttatggaattgcctatggcaagaactgttgcgcggaagcgtgtgaaagagtaaaattattgtactggaaaatcacactaagttcaattcccaggaaagagaggtggatcacgtggatcgcttacttaccaggtctttcctagccagaatatccctctatcgtaatttaatcgcacaataaatcactacaatcactctcgcaaaatatgcagaacaaacaataaagaacactggaattttaacgaggttcagcaaattttgcctacgtcctcgggcactaccaaatatatttcactccaaaaatacaagtgaaaatttacaaataaagagagaaaataatgccttgaggagagaatgtcaaatgtgggggataatcaaaatgagaaatggttaggcctatttatagttgagatttagggatcaacttgcaa

SEQ ID NO: 199131 - DNA, 410 bp, Gossypium hirsutum
atgcagaagccatagttcataatggtagggatacagggtccttcgtaacattatcagtgtggcctatgttggaaagtctggtgacctctgattttgtcttgcttctgggtctttgactttggcactctttgccatattagagttcctgggcctagggctgagcaggattcataggtgcagctgcttttgctggaggtagactgcatccaagaaaggaagtgtgctgggtgagttctgggagtagagattctgactggggtcaccgctgggctggccaccggtcttccttctgacccagggttaaactgtggcttgggactgactcaggtcctctcttggggtcggtctgcacataaaaggactcctatccttggcagttctgaagcaacaccaccacaatgcttaaagtg

SEQ ID NO: 199132 - DNA, 592 bp, Gossypium hirsutum
gaggaaccatggcatggttcggtatggatggagtaactagcctcgttccattttatttcctattgtgataatgttattaatggatggtagtgcattgcttatgacttactgagttataaactcactcggtgtttccttgtcacctattctaggtttcttggactcgtctctttttgcgtggtcgggccgtcatcgaagtcattacaccggatagcaagttttggtactttcttcttagttggcttaggagaacatttcggcatgtataggctattatgttgggttggaactttggtatgtaatctttcagccatgcgaaaatggcataaatgttaatttggactttgggtcctatgatacttagttataaaacgtagtaaatgggttttataatgtggtcatgactgatattgggccaattcggttttggttgaataatagttgaggcctaatcgatttttatgccatatgtcatggttgattaattttggtgttaaaattcatgatatggcaatagtgtaatagggagatgtttgtcaatgattagcctttggcatggctagccatgatcataatttgtgaaatgcatgat

SEQ ID NO: 199133 - DNA, 445 bp, Gossypium hirsutum
ctttgtttcctaatcactcgcccgctgcgcaatcaccgatcaaagctgaagatgggaagccttggaaaagcaatatacaccgtcggattctggattcgggagaccggtcaggctctcgatcgcctaggctgccgcctacaaggcaactattttttccaggagcaactttctaggcatcggactctgatgaacgtatttgataaatctcctctggtggacaaggatgcatttgtagcccctagcgcatctgtcattggcgatgttcaggtgggaagaggatcatctatttggtatggatgtgttttaaggggggatgtcaacagcattagtgttggatctggaactaatatacaagacaactcccttgtgcatgttgcaaagtctaatctaagggggaaagtgctaccaactaacattggaacaatgtactggaggcatagtgctg

SEQ ID NO: 199134 - DNA, 397 bp, Gossypium hirsutum
acaagaacaaagaagggtttgattttgatttgagagagaatcgaagaaggaatggagaagcctaggcaaatctcagcaatggaggcattcgagaaattggagaaggtgggagagggaacctacggaaaggtatacagagcaagagagagagcgacggggaagatcgtagccttaaagaagactcgtctccacgaggacgatgaaggcgttcctcccaccactctccgcgaggtctccatcttgcgcatgctctctcgggatcctcatgtcgtcagattgatggatgttaaacaaggacaaaacaaagaaggaaagacggttctttacttggtatttgagtacatggatactgatctcaagaaatacatccgctcctttcgccaaactggggagaaca

SEQ ID NO: 199135 - DNA, 350 bp, Gossypium hirsutum
cccacgcgtccgcttatccattatggtatgaattgtttcatatctgcaaaaataaaatatagcattgatggtaaccatctctggaaggattcatatgttgcctggtactatgagttgaggttctaagccattgagtgcttggtggtgattggtaaaacccctttgctttcgaacctcttggcctctgtctctatggttttctgatttcagccctttattcttaaaaatcaaatctctaatttggttaaattatattgattgcggaaatttgtgatattaccattgaaaaaacaatatgtgtagttatttacacaatgtataaccatgattatagtgaatttgttattttt

SEQ ID NO: 199136 - DNA, 311 bp, Gossypium hirsutum
ggaagatttgggagaaaaggtgttgccatcaactttgtaaccacagatgatgagaggatgctatatgacatccagaggttttataatgttgtaattgaggagctgccatcaaatgttgctgatctaatttgattctggttcgggctggctaggtaaacggctctctgggaatgacaaagcttaggaggtccggttacaactgggagggatttcgttcctgcacatttagttgagcttccattaccatataaaaaacccaatgttcaaaatttgatttggtgtgtgtctaagcaagaaatatctgtagtatt

SEQ ID NO: 199137 - DNA, 375 bp, Gossypium hirsutum
atttcttccgaaattcaagtcgaaaaaagtctttattcactctatctcttaatacaatcgctatcaacgtagaccaccaatgttaagtttcatcttttaacaataacaagacacatctcaaacaatcattaggggtacaagccatttcatcgaaaactctctatgtgttctctagccaatattcaaccttgaccgaataatcttccgcttttcctcacaactctttagccccacattttttgatcttatctattgaaggttgttttacactttctgtattatgaggatgaagggttattaggtgaagcacaatagggaatggagtttgcgacgtcataggattagttcttataaattcagtaaaccaccgattca

SEQ ID NO: 199138 - DNA, 399 bp, Gossypium hirsutum
atagttgatgtcccgctgcggagagatgctccacatccgccaccggctgctccgccaggcgctggccgaatgcctggggaccctcatcctcgtgatgtttggctgtggctccgtggcccaggttgtgctcagccggggcacccatggtggtttcctcaccatcaacctggcctttggctttgctgtcactctgggcatcctcattgctggccaggtctctggggcccacctgaaccctgccgtgacctttgccatgtgcttcctggctcgtgagccctggatcaagctgcccgtctataccctggcacagacgctgggagccttcttgggtgctggaatcgtttttgggttgtattatgatgcaatctggggctttgccgacaaccagctttttgtttc

SEQ ID NO: 199139 - DNA, 684 bp, Gossypium hirsutum
ataactccctaaaaaaacacatttcaaataggcttcgcactgaactctataatttatataacttagtgtaaaccaggaattggcacactttttaaaaaatgggccagaaggtaaatatttatgcttcatgggccatacagtctgtcacaactatagcatgaaagcagctgtacacaatacagaaatgaatgagtgtggttatgttctaataaaactttatttataaaaacaaggggaggctgggtttaacctgtgggccatagtttgtcaaccactggtgtaaaaccttagttatatatgttctgcattttcttgaactgatcatgaaaacctataaacctaatagacaagccacataatatttagcttcattatgcaataatcacattgcctttgtgttaatagtcacatacttacctttggaggaatgtatgggttctcagactatctcaagcagagtcctggatgtaggcaaaagtaatttatgaagtaaactttagtcgcttaatcaaactaatgatagtctaacaactgagcaagaatgctcatctgagaggtgcttaaatgggatccccagagaccattaaccactactggaactggatctagctacttatgccttactttgagtttatgcttcagaatacagtggtttgccctgggcttgaacatacccatatttgg

SEQ ID NO: 199140 - DNA, 529 bp, Gossypium hirsutum
caaaaatcaatggtactcagcttgctgctattctgccacttgctgtggtgcataccttgggcaacctctttacgaatatgagtcttggaaaagtggctgtttcgttcactcacacgattaaagctatggagccatttttctcagttgtgctttctgcactggttctaggagagttgccaactctttgggtagttgcttcccttgtaccaattgttggaggagttgcacttgcatccgtcactgaggcctctttcaattgggctggattctggactgcaatggctttcgaatttgacaaaccagtctcgtaatgttctcagcaaaaaagtcatggttaataaagaggagtcaatggacaacattaccctcttctcaataataacagttatgtctcttatcttgctagcccctgtggctatcttcacagagggtgtcaagtttacccctgcctatttgcaatctgctggcttgaatgttaaagaagttgttgtaagatctctacttgctgctctttgcttccatgcctatc

SEQ ID NO: 199141 - DNA, 390 bp, Gossypium hirsutum
tttttcttcttttctcttaccatcatcataatcatgccgatcaacgatcaaaacagacccatggctcaaaagctctacgactcagctccgtcgtctcgccaggtggctaagttcttgaccgcctcgacgttgggcgcaacgctgcttttcttgtctgggttaaccttgaccgggacggtcattgccttgataatagctacgccgttgatggttatcttcagtccggttctagtcccggccgggataaccatattcttggtgacgacggggttcttgttttcgggcgggtgtggggtggcggcattaacggcgttgtcgtggatatacaattacgtgcaagggaaacacccaccaggagctgatcagctcgtttactcaggaaacaagctg

SEQ ID NO: 199142 - DNA, 801 bp, Gossypium hirsutum
cttcctgcagagaaagaggatcgagaaggtaaaacctctgctgatcgggaagtagttgacatgtctgacctgtacacagacgttataaggaggtcatacatagatggcattcctagagcctcgagtttatctagtattgattcaataatgactcctagccgaatgtctggaggcgagatggacacttctagtaatatgcatgccagcactgaaccatctgaatatgtacgagggccttgatcctaagactaaacggctgtcatctagcagaagcaatgtaacagctgacctggaagttattcatcctcagttaccactctcatcgactctaaactggcctcggacccagatcaaaatcaaggacagataaaggatggagtggattgactgcagcacatgatccttcgagatgtccttggggtaatgctgcaacaaatgatagagaggatatatcttcaacattgtccgatcctggtccaatttgggatgctgaaccaaagtgggacactgaggctaattgggatgtggaaaatcctatcgagttaccagggccatcagatgatgttgattcaggaataaataaggaagttgtcccaagacttgaagataaatgggttttgaccaaggggccatttcttggcatcattgtgtgcaaccatgcatgcagaactgtgcaaagttctcaagtggttgctccaagagctgaacatgatgacaataccatggatatgctcttagttcatgagagtgggcggttgaagttgatgagatttttcttgctgctacagatgggttaacacc

SEQ ID NO: 199143 - DNA, 491 bp, Gossypium hirsutum
atgctatgtgtaaggaaaaactggaaaaggaagcagctgaaaaaaaaaagaaagaggatgaaaacaggagcaatacgggagaaaggagcaatgacaaagaggatctgtgtcgtgaatttcgaagcatgcggataaatgggaagcttatctgcaccagagaaaataaccctgttcgaggcccatatggcaagatgcacatcaataaatgtgctatgtgtcagagcatcttcgatcgagaagctaatgaaagaaaaaagaaagatgaagagaaatcaagtagcaagccctcaaataatgcaaaggatgagtgcagtgaatttcgaaactatataaggaacaatgagctcatctgccctagagagaatgacccagtgcgcggtgctgatggaaagttctatacaaacaagtgctacatgtgcagagctgtctttctaacagaagctttggaaagggcaaaacttcaagaaaagccatcccatgttagagcttct

SEQ ID NO: 199144 - DNA, 416 bp, Gossypium hirsutum
atgtccagcagcggtccagagcgcgcgaggttcggggagctcggcgaggctgctggtacctgcgtccgcccggcggacggctgctctggtttgtgacttccggacacgacggccatcctctccagaatgaagatcttcttgccggtgctgctggctgcgcttctgggtgtggagcgagccagctcgctgatgtgcttctcctgcctgaaccagaagagcaatctgtactgcctgaagccgaccatctgctccgaccaggacaactactgcgtgaccgtgtctactagtgccggcattgggaatctcgtgacatttggccacagcctgagcaagacctgttccccggcctgccccctcccagaaagcatcaatgttggtgtagcttccatgggcattagctgctgccagagctttct

SEQ ID NO: 199145 - DNA, 397 bp, Gossypium hirsutum
cccactcgtccgagaaacccttctccttccttcttctacttctgttgagcatgaaacctttgtatcagccgtactagagacatattttctcccaatatcgtaccttcctaagatcacagtctctttctgaaatgcgagttcatcgggctcataaacatcacagacccggactctgcctttccctctaaccaccatgaatgttgtttctcctctcatgatttatcaaaatctccactgcatgcggcgcttcctctatccagaatcgaggatgctcgtagcgccctccttctttcgccatcgtatgagccgctttgttggcctcccttgagttcagtttacgtattatggttaacgcatccccttcaatgcagacttcctagaaccccatatcttcagc

SEQ ID NO: 199146 - DNA, 404 bp, Gossypium hirsutum
atcgccgagatgcgggtcatggcgccccgaaccctcctcctggtgctctcaggggtcctggccctgaccgagacctgggccggctcccactccttgaggtatttccacaccgccgtgtcccggcccggccgcgggcagccccgcttcatctccgtgggctacgtggacgacacgcagttcgtgcggttcgacagcgacgccgagagtccgaggaaggagccgcgggcgccgtgggtggagcaggaggggccggagtattgggaccgggagacacggatcgccaaggcccacgcacagaccgaccgagggggcctgcggatcctgcgccgctactacaaccagagcgaggcggggtctcacaccatccagaggatgtacggctgcgacctggggcccgacgggcg

SEQ ID NO: 199147 - DNA, 364 bp, Gossypium hirsutum
ctgcctttggatcggagaagcgaatgtcgactaggtcgacaccaaattaacaggtgagagagccttcttctcttttttttaatatattagtatgacagatcaaagaaaaaataaataaataagaaatgaaagagaaaaataagagagcaaaaatagtgaatgaaccaccttgaagtatttacatcttctatttgattgctttgtatgcgtatgcgtaaaaaaaaaaggatacattgatgtttcttggctttttatagccacaacaaaagagaaaaaaaaaacaaaggttctgcttggttttttgctcttgttgctgtgtccgtcccttgtttgtcttcttttgcaggtacggaggcaacgtggc

SEQ ID NO: 199148 - DNA, 604 bp, Gossypium hirsutum
  unsure (1)..(604): unsure at all n locations
aattaattaagtaaataagattagttcatccaagtatcggggtcgactgaaaacaaaacccaatatataaaaccctaaaccctacctttcttctttcgctattcctctcttcaaaggtggcctctttgtagcattgagtaaaatgaatctcaacaacctcaaagttcctaagatgcctggaggcggagcacttcctgctttgcttaagattggagtcattggtgggcttggcctctatggagttgccaatagtctctacaacgttgatggagggcaccgagcaattgttttcaatcggattttgggcatcaaagataaggtttattcagaggggacgcaccttatgataccatggtttgagaggcctatcatctatgatgtccgtgcaagacctcatttagttgagagtacttccggtagtcgtgatctccagatggtcaagattgggcttcgtgttctcactcgccccaagtcaactcagttaactgaaatttatcgaacccttggtgagaactataatgagaaggtcctgccttcaatcattcatgaaactttaaaagctgttgttgctcaatacaatgctanccaactcattacacagaga

SEQ ID NO: 199149 - DNA, 510 bp, Gossypium hirsutum
aaacaatacaataataaaataaacaaaccaaatcctatttattatattaattctataatttgaattttcaaaataggattttagaaatagagatagggataggattctttttagaaatattagaaataaggaataaagaaatcatggataaatccaagcgactctttcttaaatccaagcgatcttttcgtaggcgtttgcccccgatccaatcgggggatcgaattgattatagaaacatgagtttaattagtcgatttattagtgaacaaggaaaaatattatctaggcgagtaaatagattgaccttaaaacaacaacgattaattactattgctataaaacaagctcgtattttatcttcgttaccctttcttaataatgagaggcagtttgaaagaagcgagtcgaccactagaactactgctcttagaaccagaaataaataggcttaccccttcaaaagaatcccatccggttgggttaagaaatgaaatccgaaagcgtggg

SEQ ID NO: 199150 - DNA, 680 bp, Gossypium hirsutum
cggacgcgtgggggagaccgctggtgaacttttgcataagtgccatgtatatgttaggattcatcttaatttggtacttaaagttgtagtgatcaattgaaatgaacctacctgttaattatttccgatattctgccaatttgattttggatgacttgctgaagtcaaggcctgcaatagacggatgtcacatgctcattttgctttcattgcctagtatattgttgattttcaatgtaagtaacggacaacttctcaaatttatgcagaaatgtatctcgaagtgggttaacacccgcccccccgtcccaaaaaattttagttgcagcagcggcaaggagcaaatttgcataggtctcctcggtcctttgttttatttttctctttatatatttttttacctctactttggtgattgattataagattataacttgcatgctgatgaacctatattcactgaaattgatttgtgaagaaatctggaaaaagagtaaaccagaggaagaaaaccgctgaatctgtatgtgactgtctgacatagagtgctattatttccctctgcttagagatgaactaaaaagaaaggaatgagaaaaaaaaaaaaaaaaaggaactattgactatgggctaaccttttgtcaggttttctttggagtggccagtggttatgttggttg

SEQ ID NO: 199151 - DNA, 394 bp, Gossypium hirsutum
ctctcatactcatttcgattcacacatacatcctgcggcgccagccgagccatttgtcttccacttgttatatccctcttttgccttccgaaaagagcagcaaaatcaagtaaggttgatttaaacccagcttctttatcacagagcttcttcctttctgttcttatctttttgatcaatcgtctctgcttgataatggcaactaggcttcaatttgaaaattcatgtgaagctggagtcttttccaagctgaccaatgcctactgcttggttgcaatcggagggtcagaaaacttctatagtactctcgagtcggagctggcagatgccattccacctgctaagacctctattgctggcactagaataataagacgtctatgtgctggaaata

SEQ ID NO: 199152 - DNA, 396 bp, Gossypium hirsutum
cgcttatgggcctattgcacaaggtgcccttaccgggaaatataaaccagaaaatccgccatctggacctagaggccagatttacactccggagtttttaactaagctccaacctctccttatcagaattaaggaaataggagggaattatgggaaaactccaacacaggtggtactcaactggttaatagcacaggagaatgttgtgccaatcccaggagccataaatgctgcacaagctgaggaatttgcaggtgcccttggctggagactaagcaacgaagaagtggacgagctacgctcactggcatcagagataagtcctgttatcggttttcctggggagaaactgtaattatttttgctccaattaaagatgacttaactcttgaatga

SEQ ID NO: 199153 - DNA, 420 bp, Gossypium hirsutum
cccacgcgtccgatatactattacttttctttttcatcatccatggctgaccgtgacacgtgaccctgaccgcaaccagcctcaagagagtcagctacttcaccctccaccccactaccgtcaaacagatccatcaagcacccagattgttgctgtcctcactctcctccctgtcggtggctcattgcttgctttggcagcgcttacactcaccggcaccctcatcgggcttagcatcgccatacccctcttcattatcttcagcccagttattgtccctgccaccatcgccatttccatggcggtggctggtttcttgtcgtcgggagcattcgggttgacggcgctgtcttcgctcaactatggggagaagcacatgataagggctaacgcccgcgccggagttggaaaagggcaggc

SEQ ID NO: 199154 - DNA, 521 bp, Gossypium hirsutum
  unsure (1)..(521): unsure at all n locations
atccgggatgtcgagaactgcaagaccacgtttgggcgtggaaatatgaacaggcgctttgagagcagccagaagtacaaagaggggaagtacatcattgaactcaaccacatgatcaaagacaacggctgggactgacccccgctccccgacgcatgtggctccagcccggcctggccgccagggagcgccaccggcttccctccgcccaaagggagctctggaccctcagggcccccgcagaggacggatccagctcctgtacatatattttattgcatgcactgtgaccttggggggagaacagaagggggacgacgcccccgcacctcctgcgatctggctggcttggatctcgtttttaaccccctccttccccgcttgccctatagatatggcctgtgttctgctctcctggccccagtgcaccgtctgctctgtgaactcctnccaccaagcccctctgaccccacgcgtgtctgtccccctcgttctgtagcgtttgtacataataaaacaat

SEQ ID NO: 199155 - DNA, 448 bp, Gossypium hirsutum
ccagctgaggccggtccgcaatttccgggatgcaagatggccgttgaaaaagttgagaagccagatactaaagagaagaaacccgaagccaagaaggctgatgctggtggcaaggtgaaaaagggtaacctcaaggctaagaagcccaagaaggggaagccccattgcagccgcaaccctgtccttgtcagaggaattggcaggtattcccgatctgccatgtattccagaaaggccatgtacaagaggaagtactcagccgctaaatccaaggttgaaaagaaaaagaaggagaaggttcttgcaactcttacaaaaccagttggtggtgacaagaacggcggtacccgggtggttaaacttcgcaaaatgcctagatattatcctactgaagatgtgcctcgaaagctgttgagccacggcaaaaaacccttcaatcagcacgtga

SEQ ID NO: 199156 - DNA, 680 bp, Gossypium hirsutum
tcgtccacgcgttcgcccacgcgttcgcccacgcgtccgcaggaaaacaaaatttcaagcttgaaattttgattcaaacacttttccttttcattctctcataaaactcaaatcccaagttcttatcaatgggtctctcagtcgagaattcggtaacacaatcccacacgcgaacccacaaaatcttcttaatcagcaattaccttctattgggagccgcctccagttgcatcttcctcaccctttccctccgcttattcccttccctgtgtggattcttccttatcctcctccatgtcatcaccatcgccgccgtcgtcttgggttgctccgtcgccatttcgggttccaacaaacgctacttggcttacatggtgtcgatggtgctgacatcaatattcgaaggctctgtttcggttcttatcatgacccgaacgtcggatttcttggggtacttgaggtcttatgtgagggacgatgatggtgtgttgatattgaaactggctggcgggttatgcgtggctgttttcttcttgcagtgggtggttttggggctggcgtctgtgttaaggtactatgtcttggtggaaagccacggggtgggcaatggcggttcattaaaacaggggaatgggaaagttgcatatgacgatttgaagacctggccttgggacttccac

SEQ ID NO: 199157 - DNA, 402 bp, Gossypium hirsutum
cccacgcgtccgaatcaatccagttatatatatcaaaaaacgtaccatggcaaagttcgctctcctcgtagccactttcgctctcgctttcttcctcgtcaacgcctccatctaccggaccacggacggcgacgaagaaaactggtaccgacacgatcggcgatcgtgtcaagaccagatatggcagcaaggctacctcccaaactgtcagtggtacatgaacgaacaggccggccgcagccacagcggatatggcacccactacctcaactcgtgctgctacgagctccagaacctaaggcaggattgccggtgccaaggcttgaaacaggcgttaggacaacagctgaagctgcaaggagtacggtgggagagtcgagaggcttaaaatatgtgtgaagc

SEQ ID NO: 199158 - DNA, 382 bp, Gossypium hirsutum
atcacccgggccgagatgtctcgctcagtggccttagccgtgctggcgctactctctctttctggcctggaggctatccagcgtactccaaagattcaggtttactcacgccatccaccagagaatggaaagccaaatttcctgaattgctatgtgtctggatttcatccatctgatattgaagttgacttactgaagaatggagagaaaatgggaaaagtggagcattcagacttgtctttcagcaaagactggtctttctatctcttgtactacactgaattcacccccaatgaaaaagatgagtatgcctgccgtgtgaaccatgtgactttgtcagggcccaggacagttaagtgggatcgagacatgtaagcagcat

SEQ ID NO: 199159 - DNA, 434 bp, Gossypium hirsutum
atgaaaagatggcggctgccgcacaatcccgggttgtccgggtcctgccaatgtcacgttctgccattactgcaatagccacatcagtgtgtcatggcccgccctgtcgccagcttcatcatgccgtcatacctcatgggaaaggtggacgttcctcagtcagtgggatcgtggccactgtgtttggagcaacaggattcctggggcgatacgttgtcaaccaccttggacgcatagggtcacaggtaatcataccccatcggtgtgatatatatgacaccatgcaccttcgtcccatgggtgacctgggccagcttctgtttctggaatgggacgcgagagataaagattctatccgacgagcagtggaacacagcaatgtggtcatcaatcttattggacgagactgggaaaccaaaaacttcgattttgat

SEQ ID NO: 199160 - DNA, 434 bp, Gossypium hirsutum
ccatcatgtctgagggtgttgtttgaaatgatgatggtttgcagcctagatttcaaaaaactgtatgccgcgtggaagacctcctataatggatctgaaaacagcttatgatgctgaactcagtggatctagaattcagcatgaactatggccattagatgaaattgctccggggaaagcaaagtttccttgctggctggtttggaccccactcccagttgtctcatggttggcaccttctcattggccacgttggcatttgccgagaagctggcccgattctggactgttcaggatcatattttgcgaatgtcgaggattttgcttttggtgctgcagctcgatacgttcaactcgatagagaaaagtgctgctttcctcccaacctggctggtcacaaatgcaagcacgggtatcagcatgaagagtttggg

SEQ ID NO: 199161 - DNA, 741 bp, Gossypium hirsutum
ctcaaatgcaaaatctcaatcctttctcaagtgtaatgcacgcatatacgaactcgttgccgagcactttgttgacatcaactgttcagactgcaagggagccagatcttccatattcaccctttcctgtgactcagtcgatgccaacaagatacaagaatgccaacctcttccattaggggtccaaccatttctatgccagaggctctaagagcaactggtattttctgcagcgcagccccacacagcagtcactgcctcgggcgagtgttgctacaggacctgcacttccgcaacatctagccatgcaccctttttcccaacctacacttccattgggacactttgccaacatgattagttatcctttcttacctcagagttacacctatatgccatcagctttccagcaaacatttactggtaataataactatcctcagtccctggcagcaatgctcccccaatacaagaacagtgtttctgtaagtagcttgcctcaatctgctgcaattccatctggctatgggtttgggagctctaccaacatccctggaggacttcctctgaatccacctactgcacctgcggggacaactattggctacgaggatgttcttagttctcagtacaaggacaacaatcatttaatgtcactccagcagaatgagaattcaggcatgtggattcatggccccggctcacgaacgatgtctgctgttcctgcaagcacatattaca

SEQ ID NO: 199162 - DNA, 497 bp, Gossypium hirsutum
gttgattttcgattatctcgtcatatatatgcggactagcgattataaatgcttctccagctgctaaaacaaatctatggacgaattttttcaggcaatttcgtgggaggagcctcatccctctcagaagttccccagcgaaagctgctctgatgctgatgaagatgtgatcaagtctaaggtttttttttcccagaattggagatcagcttgtccgtcgctacaaccatgggatcctggatcttttctgtaccccgactgggctcagagccataatcagcctggaataagcagtggaggagttgtcccaaaccagatcagtaatcatcctccaaccctaaaggaacttactaataatcattctattttgaaaaggaacctatcaagcgtatctggatcagagcgagctctaaggaaaaagagaatcgatcaggcatatcgggaaagatgtaagaatcacaaaatggaaatgcaatcaaatgtggagaaccttaaag

SEQ ID NO: 199163 - DNA, 583 bp, Gossypium hirsutum
tttttccatttttgttctctttgttttgatttttggaaatgtaattcaagcccaaaattcaccttctccatctcctaaatccactccaaccacatctcctccctccaaatctccttcatcatcgtcccctgcgagttctccaacaacatcatcgcctcccgcgagttctccaacaacatcatcgccgcctgcagcatctccgactactcctcctcctccacagatccaaccaccggctgcgactccgccttcttcttctagcccatcgatttctcccccaactgcttctcctccggcggccactccttcaagctctccgccttcattgactccaactagttcgcctccttcaatgactccggccggggctccacctgtttcggctgatattcctttcgagttcaacgacgccggccgaaagtcccggggttttcccgtcgagcagtagtccaccgagtcctactccgatcggttcgtcccctgagagtgcagcgggcccggctgctaatgatgattcgggttcaagatccggatacgaagtcgggttcgttctaagctttggtttggttattggggccccatt

SEQ ID NO: 199164 - DNA, 462 bp, Gossypium hirsutum
gtatcctcaaaatacctaagtgattctctctgcgccgaccgtttcatcatcatctgcccctctctccctctttttgcatacctttcagaagggctcacaccttcaaaacacagggagggacactctcaaaagataatggaagattggataacaaaatttcaaaatgaaatattcttttttccccttctttttcccaaaatcgattccccccacttttttttcccaaaccctttctcccctaccccgattccctttatttttccccccaatttccccaaatcggcagcccttcttttatttttcccaaaccatttctcccctaccccgattccctttgtcacctcctttctccgaccacccaaccttcgcctcatctctccgcttccaacgttactttctccttttctattccctcgcctcagtgtttggaggattatggtctgtgtacagagagtttgagct

SEQ ID NO: 199165 - DNA, 466 bp, Gossypium hirsutum
atcgccgccggagggtcgtcttaaagggcccgcgcgccgccgccccctcggcccgccatgctgctatccgtgccgctgctgctcggcctcctcggcttggccgccgccgagcccgccgtctacttcaaggagcagtttctggacggagacgggtggacttcccgctggatcgaatccaaacacaagtcagattttggcaaattcgtcctcagttccggcaagttctacggtgacgaggagaaagataaaggtttgcagacaagccaggatgcacgcttttatgctctgtcggccagtttcgagcctttcagcaacaaaggccagacgctggtggtgcagttcacggtgaaacatgagcagaacatcgactgtgggggcggttatgtgaagctgtttcctaatagtttggaccagacggacatgcacggagactcagaatacaacatcatgtttggccctgatatct

SEQ ID NO: 199166 - DNA, 357 bp, Gossypium hirsutum
cccacgcgtccgggatcttcactttacaggcattttaatcccttaaatctctctcaaccaaaaaaatgtcgggacgtggaaagggaggcaagggtttgggaaaaggtggagcgaagaggcaccggaaagttctccgggataacattcaaggcattacgaagccggcaatccggaggttggctcgtagaggtggcgtgaagagaatcagtggtttgatctacgaggagacgcgaggtgtgctcaaaatctttctggaaaatgtgattcgtgatgccgttacctatacggagcacgctaggcgcaagactgttacggccatggatgttgtttatgctctcaaaaggcagggcaggacac

SEQ ID NO: 199167 - DNA, 402 bp, Gossypium hirsutum
aacgaatgggtcttacctttgaaagagtcaagtattggttatcggttggggcacaggcttgagagccggtgcaacgcatccttttccgagctggagtattgcctccgccacccatggtggcaatgggacgcaagggtggaccacgcgacacgcgtcccgttgatcctatgaccggtcgtgttttaaacgaagagaaaccaattgctggcaaccaagaaaaaagtggcgaagatgaggctggtgatgagtcaaactctgcatgaaaagtttatattatccctaagactcctcactctgcaatatctaaaagtcgggaaaaatgaaaagggggattatattggatgattggaaatttgtgtctgaaaaatgacatttgccatttgcggaaactgccagcttatt

SEQ ID NO: 199168 - DNA, 408 bp, Gossypium hirsutum
aactcggaaaatggacccaactgcaccctccgcgtcggtcgtcggcggcggctgtggcggcggcggaggagggccggcacctttccttatgaaaacattcgacatggtggacgactcatcgaccgacgacatcgtttcatggagctctaacaaaaagagctttgtggtttggaaccctcctgattttgctcgccttttgcttcccacttatttcaagcacaataatttctccagcttcatcaggcagcttaatacctatgggttccggaagattgatcccgaacgatgggaatttgccaatgaagatttcgtgaaagatcaaaggcatcttcttaagaatattcatcgaagaaaacctattcacagccatagtaatccacagggttctttgatagatcatgaaagagc

SEQ ID NO: 199169 - DNA, 730 bp, Gossypium hirsutum
tagccctttactgcaattgaaattcacaatcttttcccaaagcaaccaaaaacacaatttctgtttattgtttaaaattttttttatcgtttttccatggctaaacttgatgacactggaggtgatattagttgggacattgaagttagtgagttaaggcgtgacaatatgggtgaggaagatgttagcgatgaagagatcagagcggatgaattggagagacgaatgtggaaagattctgttagactcagaaggattaaggagagggaaagggttgcggctcaacaggctgcggaactgaatcaaacctcggtaactggctcggaggaagaagatttcccgagcgcaagatgggattcttaagatcatgttgatgttaatggaaagtttattatgcgcgtggatttgtgtacggtattggtcctcgatatggtttagtttgtttatattgctttatatatcctattatcttggagtatatataagttaacatatttatatactgtattacatcttatattaattattagtccattaatattctatctatatattttacgatattgtaattattatatctttattaaattctttattaatatatgttatatatgatatttcgtatacatatctaagcttttattatacatcactaatacatttactatattaattctaccttgttatatatatgatcaattagactttaactatataattcattatattt

SEQ ID NO: 199170 - DNA, 453 bp, Gossypium hirsutum
tcccacgcgtccgcccacgcgtccgaaaaaaagaagaggaaagccaaaactccatactttctattttgcttttttattatatttttttttggttcaattcagtttcgccatttcctttgcatgtagatgctctttggttagtccctatcgccgctacttggactcactttccgctgctatcttttttccggctttctcatggctaataacaccaacgaggcccccgccgccgatgatttcctcgagcaaatcctcggcctccctaactttgcgccctccgaaacgggcttagctggatccgacgctggattggctgcaaccgctgctggagctggagctccaatgtttttgcagctcagctccggtgatggcgccgctcatatcggtggaatccgcggcggtggaggcggtgcgtttcatgggcaggttttccccttgggcttgagcttggag

SEQ ID NO: 199171 - DNA, 592 bp, Gossypium hirsutum
cttgtgaatgttagcaaagcaggggagaatattgttataaatgctgtggatcagactgaaactattcaagaaaatgggacatctttgttaaaagttgatccaaatggaaaaccaaataaaaaaagagctgctcctgatccagaccttgctacgacaagaagcacgaatgatactggtcacggagagaatgttgatggagttctcgtcaatgatgatccgagtgagcctaccatggctgagaaacttgcaagtttaaatttaatagaaaatggaaaaaatgaaaccaatgaaaaccaagaaagaaaagaaccctctactcatggtaagcctcccatcgcggattcagttatggttctgcttaagcaggcactccgtgctgacgatcatgcacttctgttagattgcttatacactcaagatgagaaggttattgcaaattcagtctcccaattaaatccatctgatgttctcaagcttttacaatctcttgtatctataactcaatcaaggggtgcagtattggcatgtgcgcttccttggataaaaagtttacttcttcatcacgctagtggaattatgtcccaggaatcct

SEQ ID NO: 199172 - DNA, 738 bp, Gossypium hirsutum
cgatggtctccgaggctccccacaaccaagggcctagtttgccggtggtgtccgatgctcccgcacatccatgcaccaaggtgcagatggtgctcgaggctcccgcacatccaagcatcaaggttaccgatggtggctgaggctcccacacatccgagccaccaaggtgatggaggctcttgttgcaaaagcggagggaccgggaggattcatccattgttggctatccgaattctacccttggattggggagggaccgggacaactcattcattgttgagtaccgaacatataatgatattcgaattctacctttggtattggggagggactcgattcatcgttttcgtatattctgggatacctcaccgggatggattgtcggagcaccgccgggaacctaaccggtggtggggggcactgacgcccgggcatgcgatgggcgtgggcattgccctggataacccctgctcgctcaatgtctcctcccccctaaagagctaaaaaaacttggtccatgcgctaccaggagacgtacatgtgtctgaaatagggacacttttttttttagtttccatatgtccgaaacagggacactttttttagcccaatgcttccgcaccaacaggggccgaagttgtcgatggtgctcgtggctcccgtacatccgaggcaccaaggtgccgacagtggggagctcccccacatgtctgaaacggtgacaattttttttgtgcc

SEQ ID NO: 199173 - DNA, 359 bp, Gossypium hirsutum
aattactctctcctctctgtaactcttctcctcgaagaagaagagaaagaggaggaaaagaaaaaagcttacatagatattcaaaaagaaaggagaaaaaacagttataaagaagggtaagaaggaaagtcaacatttgtaaaatggggaaacttctctgtgatccaaccgccgttgcggagacatttcaaacgtcttctccgacggtcacttggagggagcctaacgccgccactcttgaagccgttgatctagttgaccagaccctcaccgcggctgccggcactacctgggacgacgtgattggcctagaggaccaacagagactgcatctctcgaagcttcacgccaagggggtg

SEQ ID NO: 199174 - DNA, 369 bp, Gossypium hirsutum
gcctgagacacccattgattggccaacaaggatgagaatagcaaagggtgttacaagaggtctgatgtaccttcacactcaagaaaacatcatccatgggaaccttacatcaagcaatgtcttacttgatgaggacacaagtgctaaaatatcagattttggcctttctcgtctaatgacagctgctgcaaatgcaaatgtaattgcgaccgcaggagcgttaggttaccgagcaccggagcctttcgaagctcaagaaagccaacacaaaaactgatgcctatagccttggtgttatcatattagaactcctaacagggaagtcccccggagaggcaatgaatggagtggatttgccacaatgggttg

SEQ ID NO: 199175 - DNA, 382 bp, Gossypium hirsutum
aataacagagagcctttgctctctccttctcccttcctccttgcagctagggtttcgacctcaaccttggagcgtcacctcaccaccatcggactcggtggccgaccacgcgaagaaggaacgcaatgagaggccggaggtaaggattattctccttttattctctttatgcaaaagaaaagaaagaaagactaaagaatagaaaagaagtgagattcgaaaactaaaaaaattgaaatcgcaaatcaccttttgaaactaattttttttatttcttttcgtgtttaatacaatcttttttttccaaaatcccccctttttttcatagccgaatccctatttattttgctacccatttctatttggtgcttctggttttcta

SEQ ID NO: 199176 - DNA, 660 bp, Gossypium hirsutum
  unsure (1)..(660): unsure at all n locations
gattcgatttataatttgtgtagaattaacaaccgaaaaagaggaaaagatgacgagcagtgatgaacccggggaggacatcattgtgaatggggatacacccgggacggggaaaccgcgattcagaaaagtagcaaaaacgaaggagatgttgtctaaacaagcggttcaaacgaagaagatgttgtcgaaacatgctgttaagatcgctaaacaagctgaagaacacgagcgctttatcaacaaggtgactcatcttttgggggttcttggatttggaggggttttgctttctcttgggagcaaggccacaagatattccttatgtgtactgtgtgttctatgtcaccttcgttccccttcggtggatatactaccgctttaagaaatggcattactatcttctggatttctgctattatgccaacacaatcttcttggttgaccttcttctgtatccgaagtaatgaaaagcttttcttggtttgcttctcatttgccgagggccactagcatgggcactcanttgttggcgttgtagcttggttttagttctgttgaccaaatattagcgtncttatcatcttttactggtatgtntgcgatcttattgcactgcatactctatgcacttgatcagcaagttgtttttggttcatt

SEQ ID NO: 199177 - DNA, 785 bp, Gossypium hirsutum
  unsure (1)..(785): unsure at all n locations
acgcccacgcgtncggggattcatatgggacggcgaaccggtggttcaaaaatcgagccgagcaagaagcgaaaacaaaagagatttgtgccaaacaagcggttcaaacgaaagaaatgttgtcgaaacaagctgttaagatcgctaaacaagctgaagaacacgagcgctttatcaataaggtgactcatcttttgggggttcttggatttggagggttttgctttctattgggagcaagaccacaagatattccttatgtatattgtgtgttctatgttacctttgttcctcttagatggatatactaccgttttaagaaatggcattattatcttctggatttctgctattatgccaacacaatcttcttggttgaccttcttctgtatccgaagaatgaaaaacttttcatgatttgtttctcatttgccgagggaccgctagcgtgggcgctcattgtttggcgttgtancttggtttttagttccgtggacaaaattataagcgtccttatacatcttttaccggggatcgtttttttcacaattcgatggtggaatcccgcaacctttgaagccatgcatcccgaaggtactcctcacaaattttcatggccttacgtaaaagacaaatcttacctatggacttggctgttcggggttcccttanctgcttatactctttggcaagttctttatttcctcattgtcaacgtgctacgtcgccagaggctgctaagagatcccgaagtcatgacttcttacagggaactttctaaaaat

SEQ ID NO: 199178 - DNA, 531 bp, Gossypium hirsutum
atggctgtgtctgcagcgctcttgtctactgcggctctcggtgcccgctccttttcgtttccggaaacatggcctccggtgtggctgtctctgatggtgtcatcaaggtgttcaacgacatgaaggtgcgtaagtcttcaacgccagaggaggtgaagaagcgcaagaaggcggtgctcttctgcctgagtgaggacaagaagaacatcatcctggaggagggcaaggagatcttggtgggcgatgtgggccagactgtcgacgacccctatgccacctttgtcaagatgctgccagacaaggactgccgctacgccctctatgatgcaacctatgagaccaaggagagcaagaaggaggacctggtgtttatcttctgggcccctgagtgtgcgccccttaagagcaaaatgatctatgccagttccaaggatgccatcaagaagaagctgacaaggatcaaacctgaattggcaggcaaccggttccaggaagtcaaaggaccgttgacccttggagagaaattggggg

SEQ ID NO: 199179 - DNA, 385 bp, Gossypium hirsutum
cccacgcgtccggaacaaataagaaaaaatggcaaaagcttcacagagggccctggtttcaatggcaatctgcttgttgccttccctcgttggcttcgcctatgccggcagtctcggcaacaagttcgtcgtactcggcaaagtttattgcgacacttgccgcgtagagttcgaaaccaaactcagcgaacccataccaggtgccaaggtgaagttggagtgcaggaaagaaggggacgaaactgttacgtacagccacgaaggcggaacagacgcaaacggtgtgtacaagatcccggtggaaggcgaccactaggaacagatttgcgcagtgagcacagtgagcagtccaagggcagattgtaacgagaagatggaagcattt

SEQ ID NO: 199180 - DNA, 622 bp, Gossypium hirsutum
atttcatcacaaaaggactccaaatttcctctctgtacttttcttcatttttattttctttatatttgttagtttagtatcaaatccatgtcggtttctggtatccatggccatgttctcgaggttactgttgttggatgcaatagattgaaagataccgaatggctttcaaggcaagatccttacgtttgtcttgaatatggcagcactaaataccgtactagaacttgcactgatggtggcaaagcacctgtattccaagagaggttcacattcacattgattgaagggcttagagagatcaatgttgtggtttggaacagcaatacattgacttatgacgattttatcggcagtggaaagattcaattgcagaaggttctttctcagggttttgatgatactgcttggtcacttcagactaaaaccggaagatatgccggagaagtacggctgataatgcattacggaaatgccaaaccgccaaccacaacatatgctccgacagcaccacaatatacagctcctcctccacatgtccctcaatattccgcacctccggcaacttatccagcttcttatccaccaccggctacaacatatccatctccatcaccatatc

SEQ ID NO: 199181 - DNA, 403 bp, Gossypium hirsutum
atgggagctccagcccttctcacactcaacccgcagaaaccacccaccttcaccatgtctgacgaggaagttgaacaggtggaggagcagtacgaagaagaagaggaagcccaggaggaagaggaagttcaagaagaggagaaaccaagacccaaactcactgctcctaagattccagaaggggagaaagtggacttcgatgacatccagaagaagcgtcagaacaaagatctaatggagctccaggccctcatcgacagccactttgaagcccggaagaaggaggaggaggagctggtcgccctcaaggagagaattgagaagcgccgtgcggagagagcggagcaacaaaagattcgtgcagagaaagagagggagcgccagaacagactggcggaggaaa

SEQ ID NO: 199182 - DNA, 404 bp, Gossypium hirsutum
atgtcccgcgcgctcctccgctcgctccactccgctcggccccgcgccgtccgtcaacatgatccgctgcggcctggcctgcgagcgctgccgctggatcctgcccctgctcctactcagcgccatcgccttcgacatcatcgcgctggccggccgcggctggttgcagtcgagcgaccacacccagacgtcctcgctgtggtggaaatgttcccaagagggtggcggcagcgggtcctacgaggagggctgtcagagcctcatggagtacgcatggggtagagcagcggctgccatgctcttctgtggcttcatcatcctggtgatctgttgcatgctctccttcttcgccctctgtggaccccagatgcttgtcttcctaagagtgattggaggtctccttg

SEQ ID NO: 199183 - DNA, 306 bp, Gossypium hirsutum
atgttactgaggtctccagcgtcttctccctcctgtgtaaaatggcaactcttaaggaaaaactcattgcaccagttgcggaagaagaggcgacagtcccaaacaataagatcactgtagtgggtgttggacaagttggtatggcgtgtgctgtcagcattctgggaaagtctctggctgatgaacttgctcttgtggatgttttggaagataagcttaaaggagaaatgatggatctgcagcatgggagcttatttcttcagacgcctaaaattgtggcagataaagattattctgggacttgcc

SEQ ID NO: 199184 - DNA, 572 bp, Gossypium hirsutum
atgaaatattcacatttctgttatttcttgtttttaagctctgaattattccagttttctgtcctgcatgctttcaacagtgtgcttttacagaggcagtttatcacagtgaatgtccctgccccacactccatatggtcctgttgtcctgaaaatacactccaggtagcacagacttgttattttgcctggctggttacacacatgctgtcttgctttgctgctcagccgcctccctctgaggccaacttaggccaacctacctgggactccatctgaagtcagacgccagagaaactgagtggcgaccacgggtctgcttttctctctgatcctaggggacttgttgacatgggagtatctgttcccacatggaaggatgtgggttgctctctcatctctgaatagatgtaatgtatgacaagtctagtggccatggtttaaaatgttgctgtgaggattctccatgctgtataagaagaatgactttcttcagattataatcgttattaaagctgtttgtaccctttacttaaaaactattaacagtttttcatgttgcactggtcatt

SEQ ID NO: 199185 - DNA, 457 bp, Gossypium hirsutum
taggtcccactatagaacaagtaggtgcaacaaagcaggctgctgccgccgccgtaattcccgggattcccagcggagcctgagaagaggctgaggacggcgaaacatggctgctctaggactccagagtatcaactggcagacggtctttaaccgacaagcgcatcacacacacaagttctctagccgggagctcatcttgcggagaggccaaaacttccaggtcttaatgctcatgaacaaaggccttggctctaacgaaagactggagttcattgtctccacagggccttacccctccgagtcggccatgacgaaggctgtgtttccactctccaatggcagtagcggtggctggagtgcggtgcttcaggccatcaatggcaatactctgactattagcatctccagtcctgccagcgcacccataggacagtacacaatggcccttcagatc

SEQ ID NO: 199186 - DNA, 774 bp, Gossypium hirsutum
cgctctgctttttctcgtgtgatcggaaaaaaaatcaacagtcatctaacggagttggaactcgatgggagaccgtggaggaggatgctgccctccgatggatctgttccgttcggaggcgatgcaattggtccagctcattatccccatggagtccgctcacctcaccgtgtcttacctcggcgacctcggtctcattcaattcaaagatctcaattcggataagagtccatttcagcgaacttatgctgctcagattaaaagatgcggagagatggcacgcaagttgcgttttttcaaggagcaaatgctaaaagcgggcttctcctcttcagcaaaatccttgggagaaactgacaatggttttgatgacttagaggtgaaacttggagaacttgaggccgaactggttgaaatgaatgcaaatggtgacaagttgcaacgtggttatactgagctgcttgagtataagcttgttttgcaaaaggctggtgagttttttacttctgctcagcgcagtgctacagctcagcagagagaaatggaatcacagcaaatgggtgatgaaaccctagaaactcctttattgcgtgagcaagaaaccgcaacagatttatcaaagcaagtgaaattggggtttattactggtcttgttcctagggaaaaatctatggcatttgagaggattttatttcgtgcaaccaggggtaatgtgttcctcaagcaagttcctgcagaggaacccatcacagatcctgtttctggagagaagat

SEQ ID NO: 199187 - DNA, 403 bp, Gossypium hirsutum
atgcagtttgggacttacgaagtagtctgttggatagtttagttctcaagattctcaaggctaagtagaaccagatccaagcattagtgatttgaggatgatccttggcgtttgtaaacaactttatgagattgctttcctagtttcctcccactccataatctctccactacttcctggttccctgggctccctttcttggttggtcctctggccagaaacttggggatctagttactctactctgttgctatttcatacctttatgactgggcctgcattctgacccatgtggagggggtacagagagaaaaaaaagcaacagggttgctgtacccttttaaaaccataactcgaccaaacagaaatattcccctccctcaaagttttagttcctgtgggc

SEQ ID NO: 199188 - DNA, 372 bp, Gossypium hirsutum
gcaccttcttgtttcttgtgttcgttgggtttaaaagtgtgcacaattcttcctcggtgcgacacaaatcagttggtgtctcgtcacttttttggactcctagtgcaattaggattctttggtagttacggttcatactctttctaattgattgatatagactctactaaagaactcacaagactgaattctacctctttgagaatttgattttccttttggagtgattaacggtgaggtttgttaattttttttccgagtgttgagtgttcgttttgcaggtattccaaaagaaaaaaaataagatgcatagactgggtcaagttgatgatgaccataatgatgtccatgataaatttaaagagatccaac

SEQ ID NO: 199189 - DNA, 339 bp, Gossypium hirsutum
ataaaatagttatcctggggcctacagccataccattttgaaggtgtcttatctcctcggatctagggaggtaagcagggtcggcctggtagtacttggatgggagaccacctgggaataccaggtgctaaaagctttaagaataaaaaattgtgatcttactttgcgtttatcccatgttgagttctgcgctgggcagagggaacacacggtaaatgcgttgtggggaattacaggctacttgagggagtgacagtctggtcgttactcccgccttcctccatcaatgccacgttggcatcctcttacacagtcaggctttagggctgatgggttcag

SEQ ID NO: 199190 - DNA, 497 bp, Gossypium hirsutum
atcgccagctccgtttggggaccagagccattcagaacctgagtcctggaatgcagcccagcactgccaacagggccggtcccaagggggctggggccaccggctggatggcttcccacctgggcggcctctctccagaaaatctgaaccaaatctgccttcctgaccgtcagcatgtggtatatggtccctggaacctaccacagtccggctactcccacctcactcgccagggtgagaccctcaatttcctggagattggatattcccgctgctgccactgccgcagccacacaaaccgcctagagtgtgccaaacttgtggggggggatacccttgacaaatactgtgaccgggagtatgccgtgaagacccaccaccactcatgttgccgacaccctcccagccctattcgggatgagtgctttgcccgtctggctccgtaccccaactatgaccgggacatcttggccatcgacatcagccgagtcaccccc

SEQ ID NO: 199191 - DNA, 648 bp, Gossypium hirsutum
cccactcgtccggtgaaactggcacatgtgaagcagaggagaacaataatgatcttatatgggttgatcctgcttcatgctgctatgcattattttcgaaactagatgctaagaagatgctcctgcagcagtcacctttggcccttgctaaagccttgtccgatccagttgagttggatggattaaggaatgcacatatccgggatggtgcagctgttgtgcagtatcttgtctggttggataaacagatgcaagagatttatggggcttctggctacttcttggaggggaagggagcaagcaaaaaaagattcagagagactatgaaactgactgaggtgactgctagtgataagttggagggatttcgtgcaacaaaagagcactttagaggcctaagtttccctactatttcttcggttggtccaaatgcggccgtcattcattactcacctcagcctgaaacatgtgctgaacttgatccagataagcatttatctatttgattcaggagcgcagtatctagatggaacaactgatataactcggacagttcattttggaaagcctttagaacatgagaaggcttgctatacctcagttcttaagggccatattgctctgggaaatgctcgctttcctaatgga

SEQ ID NO: 199192 - DNA, 506 bp, Gossypium hirsutum
ctgctatcagttgcaatggtggcggcgacagttggcctgagaggcttatctttatgtaccttatcgcttcccatcctccgtagtgcgaagattaagctgcccattcactcatttccaacgagtcgaagcctaaaacctctgttttcccctttcaatcctaccattctcaggggttttccctcgttttgtgcgtctccggacgtcaacgtggaggccaccgccacagctccgccggctacggaggcggaaaattctcagtcggcggacgatataaagaacgcagccaacctcctcgacataagggttggccgaataatcaaagcgtggagacatgaagaagccgattctctatacgtggaagaagtggatgtaggcgagcctgaacccagaatcatctgcagcgggcttgttaaatacatgcctttagatcttcttcaggatgcgaaagtggttgttcttgctaatctgaagccgaggaacatgcgaggtgtgaagtcttgtggaat

SEQ ID NO: 199193 - DNA, 511 bp, Gossypium hirsutum
ctaatacgtgtcactatagaacaagctggtacacatgagcgtgctggtaccggttctgagtttccgccataccggagcgtgtgtatgcagcctgtgcatttggaccatgcttgatctgatcgcagcagacacccgcttcgccttggtcctgttcctggccttgagtgagcacaatccggctggaaatatcttcatctctcccttcagcatttcatctgcgatggccatggtctttctggggaccagagggaacacggcagcacagctgtccaagacttttcatttcaacacggttgaagagattcattcaagattccagagtctgaacgctgagatcaacaaacctggagcgtcttatattctgaaacttgctaatagattatatggagagaaaacttacaatttcctccctgagttcttggcttcgactcagaaaacatatggtgctgacctggccagtgtggattttcagcatgccactgaagaggcaaggaagaccataaaccagtgg

SEQ ID NO: 199194 - DNA, 677 bp, Gossypium hirsutum
cggacgcgtgggcggacgcgtgggcaaagctggtaacagactttggatcactcgaactttcacccaccgatggtcgttccctgactgactttatgcatctaaggggactaaaaatgcagtctttgggtcgcgtggttgaacttgctgagaagctgcctcacatacaatcactttgcatacatgagatggttactcgagctttcaaacacgtactcaaagcaatcgttgcatctgttgacaaattcgaggacttacctgcagctatagcttcatccctaaatttcttactcggaaataatggatcagaagataatgctgaaaatgcaaatgatgactatttgctaaaattgaggtggttaaaaaggtttctttctgcaaaatttggttggaaactacgagatgaattccggcatttgagaaaactatccattcttcgagaactttgccataaggttggtctagagttggttcctaaagactatgacatggaatgcaaagaacctttcaaaggttgcaatattattagcatttatcctgtttgtaagcatatagtatgcacttctgccgatggcagaacattgttagagtcatccaaagcggctcttgacaaaggaaaactagaggatgcggttaattatgggacaaaggcattagcaaagatgatagctgtatgtggt

SEQ ID NO: 199195 - DNA, 378 bp, Gossypium hirsutum
cggacgcgtggggaaaccctaaaacaacaaaaatgaaaccaggagggcaaagcttagctctaaccaccaccaccatagccattcaaatcttaaccttcagcctaatcttttcgttcagcttcgctctcctcgaaaccccacaagaaccaaccatacaccaagtcactgaaaattcagatatcccaactctgaagaccaaattctcgagaaaccacgtccacaaacagttccgagttttcatggtaacgtacggaaagaactattcgaccagggaggagtacatgcaccgcctcgggatctttgcgaagaacttggtgagggctgctgagcaccagctgcttgatcctatggctgtgcatggtgtgactcagttctctg

SEQ ID NO: 199196 - DNA, 1005 bp, Gossypium hirsutum
gtgctctaaaatctaaataaactaaaactaccatttcttttatttgtctcttttgcttttgcatacaaagatgatagcttacttggggcgactcgtacacgacaacgacgccgagtccaagctcgacgacgatgtttccagcatatctaaatccctcgacctacatggcagcatcgaaaacggtgatgttagcagtctacccagtaaagatttcggcggtctttattcggttaagcccttgttcttaatcaaaccctctggagcggaagatataagtcgggtcgttaagctcgcatcgaggacctccaatttgacggtggcggcaaggggtaacggccactcaattaacggtcaggcgatggccgagggggggctcgtgataaacatgccttcgacggagaaaaaccatttcgaattcttgccaatcaatggctctcattatatcgatgtttccggcggggcattatgggaagacgtcttgacacggtgcgtctcgaggtacggctatgctccaaggtcgtggaccgattacctcaccttaacggtgggtgggactttatctaacgctggcgttagtggacaagctttccgttatggtccgcaaacgtcgaacgtcacggaattggaagttgtaactggaaaaggagaaataacggtttgctccgaaacgctaaactccgaactctttttcggagtcctcggcgggcttggtcagttcggtgttattacccgagcaagaattaagctccaacaagctccagacatggtaagatggatcagggtagtgtattctgagtttgaggaatttactcgggatgctgagtttctggtgactcaaaaagaaggcgagtcgtttgattacgtggaagggttcgtattctgtaacaacgatgacccgttcaatggttggccatccgtgccattggactcgggccatgagttcaacccgactcatatctctcaaaccgccggctcaatcctgtactgcctcgaagtggctttctg

SEQ ID NO: 199197 - DNA, 569 bp, Gossypium hirsutum
  unsure (1)..(569): unsure at all n locations
gcgtccgcaataatattgacaccatcatctccaccactgagaagctaattgagatatacgaagataaagacaatgctaggaaagatgaaattgctgctcttggaggtcaaacggctactggaattaatgtctttagtgcattttatgatagattgaaggagattcgtgagtaccatagaaagcacccggctgctcgacttgtcaatgctaatgaagaggatgaggctttactcaaggaagaaccagttattgagttcagtggcgaggaagcctttggtcggtacctggacctgcacgaattgttcaatcagtacattaattctaaatttggatccaaaattgaatactcagcttacctcgacgtctgttcacagccgcacaatatcccttggaaattgaagtcaacacggcaattcagggagtacatggagaatttgctggagtatcttatttacttctttcagaggactgaaccactgcaagatcttgacagaatcttttccaaggttgaagctgattttgangagcantgggctaatggccgggtacaaggatgggaaaagcaaggg

SEQ ID NO: 199198 - DNA, 425 bp, Gossypium hirsutum
atgcgcgccctaaggagtggcactttttaaaagtgcagccggagaccagcccacagccgcctgtatctgtgtccagcccgggtcccgcctgtcccagctgcgctcgcccctcagtcccgcacccgttcgacccaggctaggttagccctcaccatgccggtcaaaggaggcaccaagtgcatcaaatacctgctgttcggatttaacttcatcttctggcttgccgggattgctgtccttgccattggactatggctgcgattcgactctcagaccaagagcatcttcgagcaagaaactaataataataattccagcttctacacaggagtctatattctgatcggagccggcgccctcatgatgctggtgggcttcctgggctgctgtggggctgtgcaagagtcccagtgcatgctgggact

SEQ ID NO: 199199 - DNA, 471 bp, Gossypium hirsutum
tatttaggtgacactatataacaagtttgtacaaaaaagcacgctggtgccggtcccggaatggcgacatcaaagagccagctggcccgcgatctatgggggcatagacgggggcggcacacggtccaaagtccttttagtctcggaggatgggaagatcctggcagaagcagatggactgagcacaaaccactggctgatcgggactgacaagcgtgtggagaggatcaatgagacggtgaacagggccaaacggaaagcaggggtggatcctctggtaccgctgcgaagcttgggcctatctctgagtggtggggatcaggaggacgcggggaggatcctgatcgaggagctgacggaccgatttccctacctgagtgaaagctacttaatcaccaccgatgccgccggctccatcgccacagctacaccggatggtggagttgtgctcatagctggaacaggctccaa

SEQ ID NO: 199200 - DNA, 328 bp, Gossypium hirsutum
ctttttaaaatgtctgccaaatcaaagctttctacacttattttaaccctgtctcttgtgtttctctatgccggctgcttagcctttgctaagcaagaccctgagctaaaacaatgcacccaccaatgcagagtccagcaacaatacgatgaaaaacaaaaggaagagtgtgtgaggacatgtgaagagtaccaccgtgagaaaaaggatagagagtcccttaaagaagttgggcaagaccctgatgtcgaatttcaccctggcgacggattgagtgagtgccagagccggtgcgcgggactagcaggagaggtgcggcagctgtgcc

SEQ ID NO: 199201 - DNA, 415 bp, Gossypium hirsutum
atgcagtcgttcggctcaaaaacgaccaggctaactactcactcaacacagatgacccgctcatcttcaagtccaccctggacactgattaccagatgaccaaacgggacatgggctttactgaagaggagttctaagaggctgaacatcaatgcggccaaatctagtttcctcccagaagatgacaagagggagctactcgacctgctctataaagcctatgggatgccacctccagcctctgcagggcagcacctctgaggacaacacccctccaagcctttgccctgtggagtcaccccaattctgtggcgctgagcaacatttttacatttattccttccaagaagaccatgatctcaatcgtcagttactgatgcttctgaagcctgtgtgtccatttctgcacacacct

SEQ ID NO: 199202 - DNA, 406 bp, Gossypium hirsutum
atcgccaagggagcaggacggagccatggacccggccaggaaagcaggtgcccaggccgtgatctggaacgcaggctggctgctgctgctgctgctgctgctttgcagaggagcgcacgccctggagtgctacagctgcgtgcaaaaagcagatgacggatgctccccacacaagatgaagacggtgaagtgcgcgccgggcgtggacgtctgcaccgaggcagtcggggcggtggagaccatccacggacaattctcgatgggagtgcggggttgcgggtcgggactccccggcaagaatgaccgcggcctggatcttcaccggcttctggcgttcatccagctgcagcaatgcgctcaggaccgctgcaacgccaagctcaacctcacctcgcgggcgctcgac

SEQ ID NO: 199203 - DNA, 526 bp, Gossypium hirsutum
atggatttgatggcgtgatgtctcacagaaagttctcggctcccagacatgggtcgctcggcttcctgcctcggaagcgcagcagcaggcatcgcgggaaggttaagagcttccctaaagatgatccgtctaagccggtccacctcacagccttcctgggatacaaggctggcatgacccacatcgtgcgggaagtcgacaggccaggatctaaggtgaacaagaaggaggtggtggaggctgtaaccattgtggagacgccacccatggtggttgtgggcattgtgggctacgtggaaacccctcgaggcctccggaccttcaagactgtcttcgctgagcacatcagtgatgaatgcaagaggcgtttctataagaactggcgtggatctaagaagaaggcctttaccaagtactgcaagaaatggcaggatgaggatggcaagaagcagctggagaaggacttcagcagcatgaagaagtactgccaagtcatccgtgtcattgcccacacccagatgcgcct

SEQ ID NO: 199204 - DNA, 602 bp, Gossypium hirsutum
atttcaactagaaatatacaagaggatgattctggaggctcatctctttatgataataacttacataaggatgccaattcctatcagcctcaaaggcatgcttttgagcatgatgaagccgaagatggttcttcatcggttgctgtgaatatgcagcaacttaatttgcataatgatgaccaggaggcatcatctgaagaggataatccatctgtgatcataccaaaccacctgctagtccacaccccggactgttcacatttgagttttggaagttttggacctgcaattggttctgccttttccggatcatttgcatcaaggcccttgaagaataatttggatgaagctcctgaatcagctgatatctcttctattgggcactctgagaatagaaatcccgagtattatggggacgaacatctcagaagtaatgcagagggaaatataatgattagaagtactgtcaacactggaaattatgaagctactgaagattctcaaccagcagtactgaaacaggatgcttctgaagctgcccaagggaaccaatatgcatttccttcatctgcatctggttatagctatgagaactctcaaca

SEQ ID NO: 199205 - DNA, 588 bp, Gossypium hirsutum
attttaaggaagagaactgcagaatggttaagaaggatgcatgcattattgagagcacaagcacgtgctcgtgctggccgggcccaaatttccgagtcttcccaatcaagctgcaaatcgtctcacttccatcatccggatccagcaacccctgaaaaatttgaacatgttattcgatccaagggtacaaaatatgaacaatcatcaatgttgaagagaaatggatcgaagtcaagtggaaggactgttgataatcaagagaaattacactcaggttggtatcgccgtgttgatgagcaaacatgggtgcattcaacaagaattggtcctaatgatgatgaaaagaatgacaaaatccttgaagttgacactgggaaaccaaatttcatctctaaacggagaaacctctttcattcaacacatctttctctgaattctgatttatatagctgtagtttcactaattcgagagactcacaccaaacagctcctagtccttcatctggtgaagttcagtctttaactccattgatgctgtctcactctgaagcaatacaggaaagccctttctgcgatgctgttgatgat

SEQ ID NO: 199206 - DNA, 430 bp, Gossypium hirsutum
gcgacaccatctaactagagggaacgctgaagcgcgctcaggccccgccccgatatccccgatccgtgccacacactcggcacggtgaacagcacgtcgttgttgatgatggagtgcgtctcaaatgggagccaaatctatacaaactgccaaggctagcgaaatgagccatcaaggttgaaatcgaagagagcagcgtttaaaaggtactaagccttttacaaattgaccagtacctgaccatcacatctagagcaggggcagctcgtcccacatagacagtgcgaagaagaaagctctcaacaaagaatctacttcacgcacacagatttatggatgatcagacctgtcagagagagacacattctctagtgaaccctgtgttatatgaagcgcttgcctacactagacacagagcgtaaaaacaact

SEQ ID NO: 199207 - DNA, 748 bp, Gossypium hirsutum
catctcaattcaatttgcagttccaatagtaatcgtggctcaaattattttgcattttagtgtgtgacgcagcagcgaggaaggatccaaaacagcagatcaaggtcgttttcaagatctcgtcttgccgttgagggattttaaatctttttcgctctcttttttctttaaaagaaaaaattatcgtactcttaaaagcttactagcgatctttctccggtaaccatggcgactaacggtgaacgtgaggttcaaaagaactactggatggagcactccattgatttaacagaggatggtacgatacttgattccaaggacgcagatctcgacaaagaagaccgactcgaagtgctctccctgctcccgccatatgaagggaaatctattttggagttaggagctggcattggtcgatttaccggtgaattagctcagaaggctgatagtgttatagctttagacttcattgaggatgttatcaagaagaatgaaagcatcaatggacactataagaacatcaaattcctttgtgccgatgcgactgccccagatttggatatttcagaaggatcaatggacttgatattctcaaatttgctgctgatgtatctctcagatgaagaggtagagaatttggcccaagggatgatgaaatggttgaaagtcggaggacatattttcttcagggaggcttgttttgatcaatctggcgactgcaagcaaaagcatgacccttctctctacc

SEQ ID NO: 199208 - DNA, 791 bp, Gossypium hirsutum
tcggaaaacgccctcgctccgattacgttgtctctggtggccatgagctctctggttattattcacgggacgatgataaaagaacaatgcgggcaaccagagatagtgactccatcggagaatcttatgatcgttaccttcgcagcacgcaactgtcatcatatagtaggagtcagtctggtagaccaatgagtggtggaatgcccggctgtgctgttgatgatcctcgaatggtgggtattggtggtcttgatcctggacaaacaataaaagataggactataggatttggtagtggaaggcccgaacctcgccttccccctgatgcatccagtactctttttgttgagggtttgcctcctgattgtacacgccgagaagtttctcatatttttcgcccatttgttgggtacaaggaagtgagacttgtaaccaaggaaccaagatatgctggaggagatccaataaaactttgttttgttgattttttaagcccatctcatgctgctacttcaatggatgctttacaaggtactatatctactgaagttcgcccactgtgaatgttgtttttttaaagtttcagctacagaggcttcataggcggttaagaaaacacgggaatagggttgaagagtaactagatggagtttaatgctgagttgtctgcatgtgaagtgctatagaatttaatgcactcacactgactgatggtgtctttttttacttttgtggagctaccttacattaacgagccaataaatttttttatacaatgtttagaactattc

SEQ ID NO: 199209 - DNA, 393 bp, Gossypium hirsutum
atggagccggagcgcatagacctcgcagacctcgccggcttcacactcacctcggtgtctgctgcacccgccgcttcttctcctaggccacgagacccagcggctagaaattcaccatgtctattctcaaggtccatgccagggagatctttgactctcgtgggaatcccactgttgaggttgatctcttcacctcaaaaggtctcttcagagctgctgtgcccagtggtgcttcaactggtatctatgaggccctagaactccgggacaatgataagactcgctatatggggaagggtgtctcaaaggctgttgagcacatcaataaaactattgcgcctgccctggttagcaagaaactgaacgtcacagaacaagagaagattgacaaac

SEQ ID NO: 199210 - DNA, 402 bp, Gossypium hirsutum
cggtctcaaagctccaacctttcgcccaccaaatggggttctttcttttctttttcctttcgcttcgcgctttagcttcttcagcttccagagtggatcagaaaaccttcatcgttagagtccaaaacgaagccaagccttccgttttcaccactcacaagcactggtatgaatcttcactttcctctgttctctccccatcaactcctacccaacttcttcacgtctacgacagcgttttccacggtttctcggctaagctttcgccgactgaagccctcaagcttcaaacgcttccccatgtcatcgccgtcatacccgaacaagtccggcacttgcaaaccacgcgttctcctctcttcttaggtctcaaaaccaccgacagtgctggccttttgaaag

SEQ ID NO: 199211 - DNA, 606 bp, Gossypium hirsutum
  unsure (1)..(606): unsure at all n locations
atgtggactcccaggaccccagggtcaacctggtgcagcagggatccctggtgacccgggctccccaggaaaggatggagtgcctggcattcgaggaggaaaaggagatgttggcttcatgggtccccggggcctcaagggtgaacggggagtgaagggagcctgtggccttgatggagagaagggagacaagggagaagctggtcccccaggccgccctgggctggcaggacacaaaggagagatgggggagcctggtgtgccgggccagtcgggggcccctggcaaggagggcctgatcggtcccaagggtgaccgaggctttgatgggcagccaggccccaagggtgaccagggcgagaaaggggaacggggaaccccaggaattgggggcttcccaggccccaggggtagtgatggctctgctggttccccggggccacctggcggtgttggtcccagaggccctgaaggacttcagggccagaagggtgagcgaggtccccctggagagagagtggtgggggctcctggggcccctggagcccctggcgagagaggggagcaggggcngccagggcctgcttgcccccgaggcgagaaggg

SEQ ID NO: 199212 - DNA, 412 bp, Gossypium hirsutum
cttgttctagatcgcgagctcacccacatcatagtttctgagaaagagagctagctagggttttataaccctttcagccccacactcccaactccattcattctctctcttttcttttgcttaatacaaatggcattaatggcagatcaccattccttggcagttgcatttggtgtcttaggtaacatcatctcagtccttggatatctggctccactaccaacattctacagaatatacataaagaaatcaacggaaagtttccaatcactgccttaccaggtggcattgttcagctcaatgctatggctttattacgcgttaatgaaaaagggtgccttccttctcatcaccatcaactcctttgggtgtgttgtagagactatatacatagctatgtacatagcttatg

SEQ ID NO: 199213 - DNA, 536 bp, Gossypium hirsutum
ctcttttttattttttcttttgaataatcccagttgtccaatccaatctcagctctccgtctctcttcattttcacactctctcaagttgcttcgctttttgcagatcgaatcctgaaattgaacttggatctctatcggaacaagaaaaccagttgtctcttttaacaaaatcaaaataatgggtcaaattcaatactctgagaaatacttcgatgatacttacgaatacaggcatgttgttcttcctcctgaagtggccaaacttctccctaagagtcgcctcctctctgaaaatgagtggcgtgcgattggagtacagcagagtcgtggttgggtccattatgctattcatcgccctgaaccacacatcatgttattcaggaggcctcttaactatcagcagcagcaggagaatcaggctcagcaagctatgcttgccaagtaattaaaatagcttttggtattttgaaagaaaaaagggaggaaaacccgaatatggttatatctgcataaacaggatggatgttatggaat

SEQ ID NO: 199214 - DNA, 464 bp, Gossypium hirsutum
gttttccttaacatcaaacataatctacactaagcattttcataatttatcattatcaagcatttcctcaaccgttccacaaccataccataagatcatttacacaaaataggtatattgctatacatgccatacttaaatttacaagccatttaccaaaagtcttccggatagtgtgactgagccttcgacctatcccgactcctgagctggcttgtccaaaactacaatgagtaagaaggagggagtaagcataaatgcttagtaagttcatatgcaaataataagtaacataacaaacagttataccaatcaacattagcatacatcactaaaacacatatcacatttctgatcatttttcatcatcttattaccttatagtggttgtatcaatactcaacccgagggttaaatacatacctgtccaaaataaccatttcacatcactcaccaatacaaac

SEQ ID NO: 199215 - DNA, 679 bp, Gossypium hirsutum
aggaaaaatggtgataggaatagaatatggtacggtaaaacagcagctagaagaagctgaggaagccatcatgcagctatttgatgtcaatcgcaaactgatgacacacgttgaagatcgttctcggtctctagatgggaaacctgcattagaatctgatgagagtggttcctttaggaggcggagagtatcagaacaagttcgaagagggtctgaaaaaatagtgcggttgcaattggaggtgcagaaaatacagttcatgttactgaaacttgacgaaaaagaaagcaaaggacaaaccaggatcatggagcgtaaaacaagagttgtattgcgggactatctttatggcgggataagaaagaaccacacgaggaagaaagcaaccttttgtgcatgtgctaaacccccaacgaaaggagattgagccaattacttatcagcggcacaaaatcagtgcagttttctggtactgagattttagttgcgttgtccataaatctgccttcctaagtttttgtttcacataattattttcttttagaggtcatcttcttctttagtttagacatcctgctgtatatttcaggcaccatctaatctaaagaagctgtaactttgtagcctaaaacttcccttctctgtacgtttaacttggcataaatatggatttcgttgg

SEQ ID NO: 199216 - DNA, 379 bp, Gossypium hirsutum
atccactagctccatctagtctattggggaatgcaggtggggggtgtcaccatattttttctgagctgccctttttttctcattagattgtctacgctatataccacctgcctcttttgccctgttgaatagagttgcacacagcacacgggcaactgacgcagggttgagggactctctctctgtctctctctgcctctgctgatgggacccttttccctcaccctctgcccttctaggtcatagactaggtaggaaggccctgtattggtctgcagcatctactgaggcagacctgcaacagatgtggcattcagtccccagcagacatgagtgagctcaccccagcactgctgttgggaaggtgactgcaggaaac

SEQ ID NO: 199217 - DNA, 370 bp, Gossypium hirsutum
caattgtggtccaaatgtatatttgaaactttaattttgatttaatcatacacatttaaagaaataaatacatcaatttatttttatattggataaatataattattcatgtatgcaatatatagacataaaatgatgttatatcaataattgcattaataatttacaagaattagatcaaatcaaaatttcatgtataaaattgcacaaaatcaaagttcatgtatacaattgcacattaaaccatagttaatgtataattttggtatgtatccctaattaattaatttaaaattaaaaaaatctaattttacttaaaagtcatgagataaatgattagattatatatgaattttattttggtacaatt

SEQ ID NO: 199218 - DNA, 385 bp, Gossypium hirsutum
atctgggcaagagggccagacactggctcaaccagctaacttaacagcacaaataactaccacgtatcagctcaacccaccagcctcttgctctgcatgtacagataccatgtatggagggctctgggctagatgcttgggaatccagagaggaaacatcaacagttcttccccatggcgcacagtctacacgaggctttttcctttggcatctggaccacacctcctctgagggctaataatgcagcctgtggtccaggcaacaccttgccattctatcaagaaaaggctcactgtgcccatgctgcagtggctagaaagaatggctagcagcagttcccaaccagtagcaattttctttctcaggggacctttgtcaatatct

SEQ ID NO: 199219 - DNA, 358 bp, Gossypium hirsutum
cggaatcgagctgacttcactcggattaaatttgaattcatcggaaaatctttacaagacatttggttctccatggtctgatgaaccagctaagggtgacccggagttcactgtgccacaatgttattacgctaagcaaccacctcctttacaccaaggttatttttcaaagttcactgtggacacattggtctatatattttacagcatgccaaaagatgaagctcaattatacgctgcaaatgaactttacaatacaggctggttttaccacatggagcactggggttggttcataagggttcccaatgtggagccactagtgaagacgaacacgtacgagagaggttcttatcac

SEQ ID NO: 199220 - DNA, 378 bp, Gossypium hirsutum
cccacgcgtccgcccacgcgtccgcccacgcgtccgcccacgcgtccggagaaggaagggtaaaaaggaaatgcactgcttggaatattttggcatcgggacagactacacagtactttcggaggggctgtttaagagtttcttactgattgttagtttgattgaagctatatagacaatgtttaggactgcatgtttgactcgcaattagagttggttttggtgtacgaaacgaagaagaagaaacgagttgtgaaaagtcttcgtttgaatgtaccaggctgtttctacctgcaattcaattagaataattttatgattatagggtcataaacaattaactatcatgaatcgcattttccactaattaaaatttag

SEQ ID NO: 199221 - DNA, 385 bp, Gossypium hirsutum
cggacgcgtgggctcctctttctcccatggctgcctccgttgatcctctcgttgttggtcgtgtcattggcgatgttgtcgacatgttcgttcccaccgtcaccatgtccgtctactatggttccaagcacgtctctaacggatgtgacattaagccttctatggctatcaaccctcccaaagttgccatcgatggccttcctgaccagttttatactttggtgatgactgaccctgatgcgccaagtcccagcgagccaaccatgcgtgaatgggttcactggatcgtgtctgacattcctggaggaaccaaccccactcgagggaaggaaatcctggcatacatgggtccacggcctccagtaggcatacatcgctacatact

SEQ ID NO: 199222 - DNA, 310 bp, Gossypium hirsutum
cccacgcgtccgaaataaactaagatccattgagtcataaaatgtaaattactggattgaaaatacaaaaatatgtgctgaagataactaaaaggggacaatttaacccataagtagggagaaaacatatgttctttctaggactatcacaccccctaacttgagttgggtcttggcctcaagtaaaacaaaaactggcaacgctatacaagaattcactaaggtaaatgatcattctagcaactttaatcacctaaaattccaatgaattattcacattcagatgacagaatattgcatcgacaatgca

SEQ ID NO: 199223 - DNA, 710 bp, Gossypium hirsutum
  unsure (1)..(710): unsure at all n locations
ggcaaagtggccttggcacttgtcctgtgccttggcttcggcatcatcagtcaacccggcacggacgccaaagcgaaacaccctccaatcccatctcctctcttccttcttccctccaaataccctaaatgctgcccccccacatttttatttgaaaccgaattattgaaaaacaaagtcaaccccagatcattaaaaaggaaaaaaaaaatcattggtctttctcgattggtgggtctttgagatatgtcgtcggagatcgaggtggtggaaggaggctgtaccctttgaagcatttgagtggccgctgtagcgaatggaaatgacatatgggggagggcatcgtggggtggtcggtgaatgttgccgatgatgagagcttgaagaacgatgtctataccgctgctgcttatggggatttggagaaactccagaggttggttgagtccgaagggttgctctctttccgagcctgatggccttggttactatgccctccagtgggctgctttgaataatagaaccgcagctgctcaatacatcatcgagcatggtggaatgtcatgccgtgatataatggcagacagcctgcactggatgcagncgtnggcatacagtnntgagttactcccaaggtgcttgtaacctctagaactgtccaaaaactgtgttgccaatgggaacattttctttagtgtgtaagggacggc

SEQ ID NO: 199224 - DNA, 400 bp, Gossypium hirsutum
atgtggtggggtcgccctgaatgctgtggacgacctaagtcccgactgcttgggccatgcaggacttgtgtatgagtatacattgggagaagagaagttcacctttattgagaaatgtaacaacctctcgttctgtcacattattgatcaaaggaccaaacaggcacacactcactcagatcaaagatgcagtgagggatggcttgagggctggcaaaaatgctattgatgatggctgtgtggttccaggtgctggtgctgtgggaggcggcaatggcagaagccctgattaaatataagcccagtgtaaagggcagggcacagctaggagtccaagcatttgctgatgcgttgctcattattgccaaagatcttgctcagaactctggttttgaccttc

SEQ ID NO: 199225 - DNA, 799 bp, Gossypium hirsutum
  unsure (1)..(799): unsure at all n locations
cccacgcgtccgtggaaagcaagaacctagaaatcaagaaaataaatgatgagaagaaggcatccatggctgctcagtttgcagctgaggccactctgcggagggttcatgctgctcaaaaggacgatgatatgcctccaattgaagcaattcttgcacccttggaggctgagctgaagcttgctcggcaagagattgcaaagcttcaagatgataacaaagctctcgatcgtctaactaaatcaaaagaagcagctttaattgatgctgaaagaactgtagagtttgcattggcgaaagcttccatggtagatgatctccaaaataaaaaccaggagttgatgaagcagatagaaatttgccaggaagaaaacaaaattttggacaaaatgcatcgccaaaaggttgcagaggttgaaaagcttacgcaaacagtaagagagctggaggaggctgttcttgccggtggtgctgctgcaaatgcagttagggattaccagcggaaagttcaggagatgaatgaggaaagaaaaactcttgaccgaaagctggcacgtgcaaaagtaactgcaaatagagtggccacggttgtagcaaatgagtggaaagatgctaatgacaaagtgatgcccgtaaaacaatggcttgaagaacggagattcttgcagggagaaatgcancagcttcgtgacaagcttgctataactgagcgaactgcaaaatctgaagcacagttgaaagagaaatatcaattgaggcttaaagttctggaagagagcttgagaagatcttctaacac

SEQ ID NO: 199226 - DNA, 492 bp, Gossypium hirsutum
atgcgcaggctcgaagctgcgcaggcgcagggcccgcccctgggaccctcggggccaggcggtttggcccctcatcgcccgggcgtcggggcgggagaagaccagaagaagggaggccctccaggacccaagtttcttcaccatggggatgtggtccattggtgcaggagccctgggggctgctgccttggcattgctgcttgccaacacagacgtgtttctgtccaagccccagaaagcagccctgggagtacctggaggatatagacctgaaaacactggagaaggaaccaaggactttgaaagcaaaggagctatgggaaaaaaatggagctgtgattatggccgtgcggaggccaggctttcctctgtcgagaggaagctgcggatctgtcttccctgaaaagcatgttggaccagctgggcgtccccctctatgcagtggtaaaggagcacatcaggaccgaagtggaggatttccagccttatttc

SEQ ID NO: 199227 - DNA, 403 bp, Gossypium hirsutum
gcgatggcttcttctttccttcttttccttctcattttcctttccgtttcttctttcatccttttatctgaatctcaaaagacttcgaagccgaacaggttcgttttgcagctgcaaaaagatccgaaaactaaactttatgtgactaacatatacaagagaactccttcacagaaagtcccatttgttgtggacttgaatggaaggttactatgggttacttgggagaaaaggtaccggtcgtccacctaccatgcccctcggtgccactcgactcaatgctctagagctggcagtcattattgccacatatgctccaccagggatggaccagggtgccataacaacacatgtggggtcatgtcaatgaatcctgtgacaggcctaaccgccatgagtgagc

SEQ ID NO: 199228 - DNA, 446 bp, Gossypium hirsutum
  unsure (1)..(446): unsure at all n locations
tcggccactcgtggggccacgcgtncgggattcatcatcacatttgacaaagagcaaaggccacaagggaacacagagggtgaaagagagagagcaatggaaggaatacggcataagatggtgaatgtcaatggtatatcgatgcatgtagctgaaaaaggagaagggccggttatcctcttccttcacggcttcccggaactatggtacacttggaggcatcaaattcttgcactaagctctctcggctaccacgctgttgccccggatctccgtggctatggtgataccgaagctcccactgctatcactagctactcttgcatgcacatcgttggtgacctcgttgcactcattgactctcttggtgtaaagcaagtctttctggttgctcatgattggggtgccattattggatggtacctttgctttgttcgtcccgatag

SEQ ID NO: 199229 - DNA, 350 bp, Gossypium hirsutum
ctcttcggctccttcattaggcattggagctgccctaggactgggcattagtgacttcaatctgtgatactatggacctctgccctcatttcaattctagcaacgcaatatttcctctacagctctttctgtgggttactatctctgcgaggtgtcttgctactttttatgtctctacttgggtttaagcttgcttgcattttttttatcatattatggaataccattggattcctggttgtcattgactgcggctttatatgctttgtctggaactgagtttcattttcctagcaatgcttaatcctccaactaatataagttaaactgtggcttaccaagggtttttg

SEQ ID NO: 199230 - DNA, 456 bp, Gossypium hirsutum
  unsure (1)..(456): unsure at all n locations
gttgaatccccctggaaaagccaccattcatgttgaaaatgttgatgaattcaagtggcttaattcatcctattcccctgtcctccggcagcttgagactgctgcgatgaaggagtactacttcaaggcggatcagccaaccgtttctggatcttcgaacttgaagtatcgaaacccgaagtatctctcaatgcttaatcacttgcggttctatctgccacaggtctaccccaagttagataagatcctctttcttgatgatgacattgttgtccagaaagacttgactggattatggtctgtggagctccatggaaaagtgaatggtgctgtagaaacttgcggtcaaagctttcatcgttttgacaagtatcttaacttctcaaatcaccatatntcacgaaactntgatcctaatgctngtggatgggcgtatggaatgaatatgtttgatct

SEQ ID NO: 199231 - DNA, 350 bp, Gossypium hirsutum
ttaaaaagatcgtagtttaaaatcttttcaaattctcgacactaagacatcaaacaatcaatttggtaccgattttgggcgttacgagggtgctaacccttcctcgtgcgtgaccgactcccgaacccgttttctcaaaattcgtagacctaaaatcgttttcaaggtgatccgatcacaccccaataaaagatcagttgcgactccaatttttgttttaaaaaatggtttcgattggtatgaaggaccctttcgagttgtgaagagagtaggaagggtggcctacaaacttgagttattagcaaagctcaaagtccacccagtgtttcacgtgagcatgcttaagtcat

SEQ ID NO: 199232 - DNA, 577 bp, Gossypium hirsutum
aaacaaagaaaagggtttaattttctgggtttttcttctgtttgggttcctggaaaagtgttagtgagagatagagagacaaggtgaggatgttgttttgccggggattttctaggattcgtacaactcccggaaagagcttgtttggtttcgttctctctcgtcgagctgacccttctctattccttctctctaatcaatatgtttactctactataaaggttcgtagtggcagagaaactctttcttggagttttccttcattgcttggtcttggacggcaaattcatcagagtagctctctaatagaggaacaacttgacccattttcacttgtttctgatgaactgtcacttgtcgctaacaggttgcgggctatggttattgctgaggttcctaagcttgcttcagctgctgagtacttcttcaaattgggggtggaaggaaagagatttcgtcccacggttttgcttttgatggctacagctttgaatgttcatatacctgaaccagttggtggtggtgtaggagatactgtggcaactgaattacgtacaagacagcagtctatagctga

SEQ ID NO: 199233 - DNA, 658 bp, Gossypium hirsutum
attactgctcaaaaacctgagcagcgatacgaagacagtgacagtgaacatgacagcctggaccatcgtctacaatggcacacttgtacatgaagtgtggaaggactctgccaccatgtccctggaccctgaggaagaggcagagcatcctgtaaagatctcgtacgctcagtatgaaaagtacctgaagtccgacaacatgatccggatcacagccgtgtgcaaggtcccagatgaacctggggtggtggtggagcgggacatcatcctggacaaccccaccttgactctggaggtgctggatgaggctcgtgtgcggaagcctgtgaacgtgcagatgctcttctccaatccactggatgagccagtgagggactgtgtgctgatggtggagggaagcggcctgctgttgggtaacctgaagatcgagtgagtcctgggcctgagtggccggtgcgggagggtgggagggggcgggggggggccctacagatcctctgggtgggacagacagagctccctctgaccttaagttctttactcttttgggggccttggaactctagaatctgcatttgcatttggtttgggggttcaccaaacttgaactcttgagaagtccaggtcatcagagctaagagctggtcttcagggctta

SEQ ID NO: 199234 - DNA, 492 bp, Gossypium hirsutum
atgaggcctacaagaagggcctaattgattatgaaaccttcaaagaactgtgtgagcaggaatgtgaatgggaagaaataaccatcacgggatcagatggctccaccagggtggtcctggtagacagaaagacaggcagtcagtatgatattcaagatgctattgacaagggccttgttgacaggaagttctttgatcagtaccgatccggcagcctcagcctcactcaatttgctgacatgatctccttgaaaaatggtgttggcaccagcagcagcatgggcagtggtgtcagcgatgatgtttttagcagcacccgccatgattcagtaagtaagatttccaccatatccagcgtcaggaatttaaccataaggagcagctctttttccgacaccctggaagaatcgagccccattgcagccatctttgacacaaaaaacctggagaaaatctccattacagaaggtatagagcggggcatcgtcgaca

SEQ ID NO: 199235 - DNA, 583 bp, Gossypium hirsutum
ccacgcgtccgaagggtatttaataatttggtaaactaaagtattctaaacagggataacaatacgaatgggcctaaagcccttctcggcccaaatgggcccacacgctcgtgtgacccttttagcccaaatctagccacagatatgagattcacctagcctagtccaatatttactacacaatcaaacaacttatccaattgggcccctaggcccattgggcccacatggcccctttcggcccatcgcggcccgaagttgccatcctacagctagagtagtgagaaatacacacctgataggagactagagttaatccgcgctccgagcactcttagccgacgcccaacccaaacgagcacgccatacagcgaaagggatcagccaagaaaggtacctctactctcctcatgttctctctatttaaagccagcttcgcatcccctcttatgttagcttcctgatgtgggatccctccatcatcagagtttaaattcaacaccaactcttgccgccccctgttagcaaaataaatgctccttgcttgccatgggattcgaacccatgcctcccctcagatgct

SEQ ID NO: 199236 - DNA, 483 bp, Gossypium hirsutum
  unsure (1)..(483): unsure at all n locations
atggcccgggcggcgggcgcaggcccctgcggcggcggcggcgggatgtttgtgcaggaggagaagatcttcgcgggcaaggtgctgcggctgcacatctgcgcgtccgacggcgccgagtggctggaggaggccaccgaggacacctcggtggagaagctcaaggagcgctgcctcaagcactgtgctcatgggagcttagaagatcccaaaagtataacccatcataaattaatccacgctgcctcagagagggtgctgagtgatgccaggaccatcctggaagagaacatccaggaccaagacgtcctattattgataaaaaagcgtgctccatcaccacttcccaagatggctgaggtctcagcagaagaaaagaaaaaacaagaccagaaagctccagataaagaggccatactccgggccaccgncaacctgcccttctacaacatggaccgggccgcggtccataccaacatgaga

SEQ ID NO: 199237 - DNA, 385 bp, Gossypium hirsutum
ataccagacaagctccagcagctggcccttcacatccagacttgcctgagaggacccacccctgggtgtccggtggtcagtcgccccaggatggggactacagtcagagcagccttggtcttggcctatttggccattgcttctgctgcctctgagggaggcttcaaggctacagggcagaggcagctgaggccagagcactttcaagaagttggctacgcagctcccccctccccacccctatcccgaagcctcctcatggatcaccctgacagctctcagcatggccctccctttgagggacagagtcaagtgcagcctcctccctctcaggaggccacccctatccaacaggaagagctgatgcctgcccaactgcctgctg

SEQ ID NO: 199238 - DNA, 401 bp, Gossypium hirsutum
  unsure (1)..(401): unsure at all n locations
tcgcggacgnnnntggcgaagccatttcttccctaccccgattccctttatttggtctgcgccaatttccccaaatcggcagccctctacatctcctcaaagggtacagattcttcttctcttatagttaaaaagctgtcattcttcaaccaaatccaaaccctaaattgcgtctctcccaatttcttcttcactttgagggtttcttgcaatagtttatagagaggtgagaccaagttattttgggttacaacagaggaaccaaagtaacgaaaaaggtggatatatatgggatattgggtaaccgagattcgaagctaggcaaatcaagcatacccaggaaacgaccnnaggttaaaagaagaaaaacatggttggctatacttggtgtcatcctcaat

SEQ ID NO: 199239 - DNA, 390 bp, Gossypium hirsutum
atcggcgggcggcggccgatatgaggcggcggcggcggcggcggcggaggccggcggcgacgacgcccgctgcgtgcggctgagcgccgagcgggcacaggcgctgctggccgacgtggacacgttgctgtttgactgcgacggcgtactgtggcgcggggagacggccgtgcctggcgctcccgaggccctgcgggcgctgcgggcccgcggcaagcgcctgggcttcatcaccaacaacagcagcaagacccgcgctgcctacgccgagaagctgcggcgcctgggcttcggcgggcccgcggggcccggcgccggcctggaggaattaggaacggctactggaccggtctctacctgcgccagcgcctaggcggagcgaccgcgccc

SEQ ID NO: 199240 - DNA, 506 bp, Gossypium hirsutum
gaaatgtggagagggcattgtggctgatgaagatatcaagcatggagagtttgtaatagaatatgtcggggaagttattgatgacaaaacatgtgaggagaggctttggaacatgaagcatcgtggagaaaccaatttctacttatgtgaaatcaatcgtgatatggtaattgatgccacatacaaggggaacaaatccagatatataaaccatagttgctgccccaatactgagatgcagaaatggataattgatggtgaaacaaggattggcatatttgcaatgcgagatataaaaaagggggagcatctgacctatgattatcagtttgttcaatttggtgcagatcaagattgtcactgtggttccgctggctgcaggcaaaaacttggggtcaaacctagcaagtcgaagatgtcatcagatgctacattaaagctagtagcatgccaagtggcagtgtccttttcaacattgaaagctgtgctatttggaaaagaaaatg

SEQ ID NO: 199241 - DNA, 483 bp, Gossypium hirsutum
cgaaaaataatacttgtcgttggcttaataataaaaaatatcctctctttttttgtcaacatttcattttagtacaaaaatgctattaaggagttcgtcaataccgatacgtgactcatgggtctcacactcgaagaatttctctcctgcgccggagttatggcaccagagttccctgacccgaaccgtttcatgttcgcgctccatttctgcagggtcgatcgacgattcgagttggaggatgatgaggacggtgtcggatacggatttgagggatctggtcgtcccccagatgaaaaccgctaagaataataacgtgctcttggatgggatctgtgtccaggaggaagaggtggaagagtgtgggataggcggtggtgggggaaaaaactttggcggacgaagaggaagtggtggttcggactgtgaggataacgaatggggcttttgggattcgaaaaacggaaatgatagtactgattt

SEQ ID NO: 199242 - DNA, 416 bp, Gossypium hirsutum
ctaatttcaaaaatcttcaatgtttttcccttcttctatttcaaatctaaattttcgattcttcttgattcatcttttgttttaatttttcttctttaaatacttttctaagcagtttaacagtatagcacgactgttaattgtttaatctcttgctattttgagaattttattgtgaattttttcctttggattgctcttgaagttttctgttttttccgagatttctcgtttaaactggggaagttgcaggagtatttctaggttctgcaagatttgaagcaaaattcgtttctaacgatggctacggaggaccaaattgaaagtacagcatcacctactgctctcaaatccggtgtgtgctgttccataggcagtggacaatctgagacattgactcaattgcaggagttata

SEQ ID NO: 199243 - DNA, 376 bp, Gossypium hirsutum
aagaattttctttttctttttgtttgagaaaaatcttggaagagaaacgaacaatcatggaggaggctgtcaaagaacaacaatctgctgctcaaatttctgggagtgcagggaagtcgaagctacgttatccacttcgatcctcaatgaaaccaaaggagcagaagcctcccgcgcctgatttatccaattcttcttcatccagaagggggagggcaacacccagtgtaagcaagagtgtgggtgttctagatctttcaaaggagaaatctgggtcaggaaagccgcccaggaggctttccatcccaaccaaatcaacagtgactgcatccccaaaatttgttgggacaaccactcctatattcgagggtagagc

SEQ ID NO: 199244 - DNA, 731 bp, Gossypium hirsutum
atgcaagaattccctggattgtgaaatagtcagtgccaaatcttccgagatgaatgtcctcattcctacagaaggcggtgactttaatgaattcccagttcctgagcagttcaagaccctctggaatgggcagaagttggtcaccacagtgacagaaattgctggataagcgaagtgccactgggttctttgccctcccttcacaccatgggataaatctgtatcaagacggttcttttctagatttcctctacctttctgctcttaaaactgcttctctgctctgagaagcacagctacctgccttcactgaaatatacctcaggctgaaatttggggtgggatagcaggtcagttgatcttctgcaggaaggtgcagcttttccatatcagctcaaccacgccgccagtccattcttaaggaactgccgactaggactgatgatgcattttagctttgagcttttgggggttattctaccaacaaacaaacagtccattggaaagaaaacagtcccaggaattaacagatcagaatgttcacactggttaatctttttctaacagtgagcatgaaggtagcagaagctggtgtgtttccagatggttcttctaaccaaactaattttcactgttgacaagtgaggcaagggttgcactggaccgaaggctgaggcttggccatctagcattccatgcagaatggtttcccataagcattccttttattc

SEQ ID NO: 199245 - DNA, 384 bp, Gossypium hirsutum
atgtttctccaggctggaccagtagtcaacacccgcgtgccaaaggatagagtcactggccagcaccaaggctatggctttgtggaattcttgagtgaggaagatgctgactatgccattaagatcatgaacatgatcaaactctatgggaagccaatacgggtgaacaaagcatcagcccacaacaaaaacctggatgtaggggccaacattttcattgggaacctggaccctgagattgatgagaagttgctttatgatactttcagcgcttttggggtcatcttacaaacccccaagattatgcgggaccctgacacaggcaactccaaaggttatgcctttattaatttgcttcatttgatgcttcggatgcagcaattg

SEQ ID NO: 199246 - DNA, 489 bp, Gossypium hirsutum
taacctaaagatactagcacatcaaacatgaaagaaagcgaaactgtggaaagcgattcggtcaggtttttcagcatctagagtttctgtcaatgttggagaagagtgctcgaaagctcgcggaggttggaggtcattggagcatcatcacactatcctctagctcattttgggtatatatagtaaaatcattttggtctaatgccatgtataggctagcttggccatagatggcttaaatatgtggtttgtaatctagccattggaatggctagtaatggttgtttttgatatacttgtaatgtcatactatggtagctatatacaagttaaaagatgtgccaaattatgcctatcatatggaatataccaaggtcagattctaaacatgtatgcatgtaatgatatgccatgttgaatgatagagcttgcttaatttgaatgcttgaaatgggtggtatgtagattgaggttaagtgcagatcattg

SEQ ID NO: 199247 - DNA, 501 bp, Gossypium hirsutum
  unsure (1)..(501): unsure at all n locations
atgtggaatggagattcagttttcatttggttcattaattctataaggtcataaaacaggtaatataaaaagcttccatgattctatttatatgtacattagaaggaacttccaggtgttactgtaattcctcaatgtattgtttcgacagcactaatttaatgctgatatactctagatgaagttttacattgttgagctatcgctgttctcttgggaactgaactcactttcctcttgaggctttggatttgacattgcatttgactttttacatagtaattgacatgtgccagggcaatgatgaatgagaatctacccccaggtccaagcattctgagcaactcttgattatccataaagagtcaaatggtaggcattttctatcacctattntcattcaacaagagcactacattcatttagctaaacagattccaaagagtagaattccagtgaccgtaattaatttcaaaaaacttttaataataataataattt

SEQ ID NO: 199248 - DNA, 391 bp, Gossypium hirsutum
atgaaatgtggggccaaacctgcggggtccggcctggtctcctgccttctgggcccagccctggggcctgtgcccccagaggcctacaggggcaccatgctgcactgcccgctgaacttcactggcaccccaggccccttgaagggccaggctgcactccccttcagccccctggtcatcccagccttcccagcccacttcctggccactgcgggcccctcacccatggctgctggcttgatgcacttcccgcccacgtccttcgacagtgctctccgccacagactttgcccggcctcatctgcctggcatgcaccaccagtcacaacctatgcagcgccccacttcttccacctcaacaccaagctgtaggccagcacatgtggagtcg

SEQ ID NO: 199249 - DNA, 362 bp, Gossypium hirsutum
acgtgcaccatcatatctcatttaattcggctctcttgttcacatagtgaacacttagtaccactcatgcgacctagccgatttgtctcgtacctctcttgactacatggtgtccttcactcggaatcacgcatgcgacctaactacattgatctctcacgtagctctcttgtctacatgggatacatccagtctcacacatgtgacctagctactacatagtatctcgtagctttcttgtacacatgatgtgcactcagcaccatacatgtgacctagctatgctccctctattttattcgatctttccgaatgttcaaccaggatctctctctctattacttacttcgattcttccgata

SEQ ID NO: 199250 - DNA, 402 bp, Gossypium hirsutum
cttgtcgcgtggggtatatgtatatatgtattcgtatcttcttcaatctccaccccacttcctccgccctcgcgtccctttccattgaaaagaaaaatcttaagaaacagtgatggaaggtatttcagcgaccatgtacaagaacttgaaagggtactggcaaaggagaggctacatcaagctaaatggtacgaaaggaggaggacggcggagcaaggtggagcttgggtcgtcgcgacggaggcgattctggaagataagggtgaaagcgaagctgagattaccttcgcccaagaagttctttgtttggctacgtgatgcgtacgtgaaaatgatgctggggttggctaactacgcgatggttagtaccggctacggtggagctatgggggaccatcatgg

SEQ ID NO: 199251 - DNA, 469 bp, Gossypium hirsutum
agaggttgaaaagcattgggatgattgatagtgtgccagggatgaaggcactggaggggaatacagctgaggatgctatagtgaggctgactagggaaattgtgcctgggatgattgtcaccgggatggaagttgctgagattgatggatccccaagaatggggccaacatttggagcaatgatgatatcagggcaaaaggcagcccatcttgccctgaaatcattaggattgcctaatgcaattgatggaacatatgtgggaagcattcacccggagctgatcttggccgctgcagattccgccgagaccgctgacgcttagttgcaagggtcatagttgctaaactgctatggagataggaggaattggaataatgcgcagtcattggtaggatttggaataatctcctgtaacttagtagcaaaaccttagcattttggagcttgttgatcttctccttgcatgcc

SEQ ID NO: 199252 - DNA, 501 bp, Gossypium hirsutum
acaatctgtacattacccaattgtccctctcgcaattctcaagtggactgcacagtctctctctcatatcctatctcttcgtcttgacaaaaatagtaattttttgctctctttatccctccctttctttgcatgtccccagcgtttcatgtaggtgaaagtagagtactaaacaaatttctttttaaaaattggtgggaaggattaaacggtaatttccggatgttctggcgggaatcccatcggccctcgaatctctccgttctctgtagcattcaaccttcaaatagactaaaaaacagaggctatctcggtgccatgattgtttgtttgttaattgaataagcaaagcatgccaattgctgtctttcctaagcctttctacttcaaagcatggcaacacgaatccgccgcctcactaccagaagatcaccacctaagcttctttttctcgccctcttgatgcttacgccagtttgcgtgattggcttatataactat

SEQ ID NO: 199253 - DNA, 383 bp, Gossypium hirsutum
ttaatattttatttatcaaataatctaaaagattttgaattcttatgctttaggtagataagagttgttttttaattgttttcttaaattatttatgattatattagttgcaataatgaaaaaaataatttcatttatgtactagtaggttaaatggtaaattcttttatatagttgctttggctcgtaagcttacctggttatgtggtaacttgcacagattctagtttttctttttctgggaataggtagatcgttttacattagttaattatgtatgtccctgggtagttttaccttaatgatttggtttattggtattccattacttgaaatcagcttttgagctggtttcttattttcagtcagcaacacggatcttg

SEQ ID NO: 199254 - DNA, 497 bp, Gossypium hirsutum
atcggcgagggcgagagcggccccatgggcaacatcatgatcgatcctgtcctcggtaccgtgggcttcgggtctggtctccatgggtgggccttcaccctgaagcagtttgcggagatgtacgtggccaagtttgctgccaaaggggagggccagttggggcctgccgagcgggccaaaaaagtggaggacatgatgaagaagctgtggggtgacaggtactttgacccagccaacggcaagttcagcaagtcagccaccagccccgatgggaagaagctgccacgcaccttctgccagttgatcctggaccccatcttcaaggtgtttgatgccatcatgaatttcaagaaagaggagacagcaaaactgatagagaaactggacatcaaactggacagtgaagacaaggacaaggaaggcaaacccctgctaaaggctgtgatgcgccgctggctgcccgccggagacgccttgttgcagatgatcaccatcca

SEQ ID NO: 199255 - DNA, 619 bp, Gossypium hirsutum
  unsure (1)..(619): unsure at all n locations
cttcgctccaattttcccatctctttcgcaagagaaccaaaagagaggaagaaaaaataactactaaaaaatgcttgagcttaggctagttcagggttcgcttctaaagaaagtcttggaagcgattaaggacttggtcaacgatgccaacttcgactgttcggcgacggggttttctctgcaggccatggattcgagtcacgtggcgctggtggccctgttgctgagatcggaagggttcgagcactatcgctgcgacaggaacatttccatggggatgaatctcggtaacatgtccaagatgctgaaatgtgccggcaatgatgacatcatcacaatcaaggctgatgatggcagcgatactgttatttcatgttcgagagccccacccaagacaagatatcagattttgagatgaagctgatggatatggatagtgaacacttggggatcccagagccggagtaccatgctattgttaggatgccttcagctgatttgcaggantgaagggatcttgcagcatgtgacaccgtgtatctctgtacaggaaggtggaaagtttcacagggtgaatcggactgcaatatgtctaggcaaaacactgagataaccgaga

SEQ ID NO: 199256 - DNA, 374 bp, Gossypium hirsutum
atctctattacaccccacattctcttttctttaattcttgtctgttctgcctcactcctgagctctactgactcccaacagagcacccaagaggaaaatggccataagtggagtccccgtgctaggatttttcatcatagctgtgctgatgagcgctcaggaatcatgggctatcaaagaagaacacgtgatcatccaggctgagttctatctgaaccctgaccaatcaggagagtttatgtttgactttgatggtgatgagattttccacgtggatatggctaagaaggagacggtctggcggcttgaagaatttggacgatttgccagctttgaggctcaaggtgcactggccaacatagctgtggacaaag

SEQ ID NO: 199257 - DNA, 580 bp, Gossypium hirsutum
aatactatgaagccttgcaactgaaagtaagagaaccgaatcttgggccaaagttgttcttgggtggtgttggtgttcaaaagactgggacggagatagctacagccctgaataatatagatctgagcagtgagtatgtcctgaaactaaaacacgaaattgaagagcagtgtgcggaggtctttcctgcgccaactgaaagggaaaaggtaaaatcttgtttgtccgagttggctgacttgagcaacactttcaagcaagcccagaatgcttgtatggagcaactagcagcaactgtgacacctcaaatccgtccagtactagacagtgtagcaaccatcagctatgaactatcagagtctgaatatgccgagaacgaggtgaatgatccttgggtacagagacttcttcatgctgttgaaatcaatgtggcttggctccaacccctgatgactactaacaactacgattcatttgtacatttggtaatcgacttcattgtgaagaggttggaagtgattatgatgcagaaacggtttagtcaactcggtggccttcagcttgacagagatacccgagc

SEQ ID NO: 199258 - DNA, 634 bp, Gossypium hirsutum
  unsure (1)..(634): unsure at all n locations
cagagatatcaattcttcgattntacctgcgattcttcaatnggtttttttttacctaccaaggaaagcttcagtggttcagtttcctgcaaacttacatatcccacacagagaagacgatgaaggtggccaaacattcggattctgttttttggtgaatcagtatttaagggttttcgatcctttcatttgtcttcatcgtcgtcaaggttcggcccatgtctttggatgcaacaaaaagatcgaaatagttctgttctgttgtggggttactgagttttgtgttcgtttggagaaatcaaattgtgaggaaaaagggcaaagaaaagaggttttgggagattggtagaatggggacaagagaagtatatgaggaaaagctaaggaatggaaatttgcaccacgatccaaccatcaaccctggcttaggttccgctcgttgtcctcgttgcctttctctcttaaaccctgattccgacaaagctgaatggacaattacttcagttttggaggatgccactgcagtggctggctctggtatcgggggaatgcttagtgcagtacatggctttaatactgggatccctttcctttagaatcacatcaagggacctaagtggctcccttttgtact

SEQ ID NO: 199259 - DNA, 397 bp, Gossypium hirsutum
caatctttaatgaagtggtcaactgatctgcacttatagcaggagcggtcatggaacctacagctccccgaatgccatctaccgcaatgccgacactccgttctgtctcgacgttctttcccaacactggcgaccgaagtgcctcgtgtacccacagggggtcgatcacgatctcgtctaaaaaggcccgaagtgcctctagaccggcccacatcatctcgaaatttcttcgatgcctgttgaagagactttcccgaggatcttttacgaaactctccagttcccacatcaactttttgtttttcttttctaagctcttcggctttacaagctcgctcgacaagtactacgaactctcgtatttcaagaatgccaacgaacatttttatatcttcat

SEQ ID NO: 199260 - DNA, 461 bp, Gossypium hirsutum
atctcgcccgacccgccggtcaccagctacgccccgtccgatgtgccctcggggatcgcgctgctcctcaccatccctttcgccttcttcctgccggagctgatatttgggttcctggtctggaccctggtagccgccacccacgtagtattcccattgctgcaaggatgggtgatgtatgtctcaatcacctcgtttctcatctccttgatgttcctgttgtcttacttgtttggattttacaaaatatttgaatcctggagagttctggacagcctgtaccacgggaccactggcatcctgtacatgagtgctgccgtcctacaagcacatgccacgattgtttctgagatcatggacccgagaatttactacattaacacggcagcctcgttcttcgccttcatcaccacgctgctctacatcctccatgccttcagcatctattaccattgatgcac

SEQ ID NO: 199261 - DNA, 417 bp, Gossypium hirsutum
atgcagcagcggctgatcaatgacctgactgcgcagagggggcgcctgcagactgaatctggtgaattttcacgccagctcgatgaaaaggatgctctggtgtctcagttatcaaggggcaaacaagcctttactcaacagattgaagaactaaagaggcaacttgaagaggagataaaagccaagaacgccctggcgcatgccctgcagtcttcccgccacgactgtgacctgctgcgggaacagtatgaggaggagcaggaatccaaggctgagctgcagagggcgctgtccaaggccaacaccgaagttgcccagtggaggaccaaatatgagacggacgccatccagcgcacagaggagctggaggaggcaaagaagaagctggcccagcggctccaggctgctgaggaacat

SEQ ID NO: 199262 - DNA, 965 bp, Gossypium hirsutum
  unsure (1)..(965): unsure at all n locations
aattgatctgtttaataatagaggaactaatttgattcggcgacttcccaggcgctttaaccaaagtaagtagtcattaaaagcacgtggcaaaatgaaaaccgctgatcgaaacgatctcatccattaccgccatattcgaaacgctactgaaatccaggccctcccagcagagccagggagccgagccgatccctctagaaaaacccctgaaagtaatggcattattacacttacgccacctaactcatcaatctcttctttcaacttccaaactccatcatcatttccgtttctctcctcttaaatcccctcgcttctcctgctcagcctctgcttcaaccacaatggctaaacaagttttggtgccgatcgccaacgggacggagccgatggaagcggtgattacgatcgacgtgattaggagatcgggagctgacgtcacggtggcttccgtcgagaaagagcttcgcgttgacgcttgccacggtgttaaaattgttgctgatgctctcgtcgctgattgtaagaacaccgttttcgatcttatcgcgcttcctggaggcatgcctggtgctagcaactttaaagattgtggagttcttgaaagtcttgtgaaaaagcaggctgcagatgggcggctttatgctgccgtgtgtgcttcacctgctgttgcgcttggttcatggggtctattgaagggactgaaagctacctgttacccatcatttatggagcaactgcaatcatgtgcaacagctgttgaatcaagagttcancaggatggcaaagttgtgacaagtcgtggacctggcactaccatggagtttgctgtaacactggttgagcaattgtatggaaaagagaaagctgatgaagtttctgggccattggtgatgcgtcctaaccatggtgatgagtatacnataacagagctgaatcctctggaatggaaatgcaatact

SEQ ID NO: 199263 - DNA, 456 bp, Gossypium hirsutum
atgttgagtaggcagaaaaaggagcctattcattaaggattaaaaggtataggccagcacgtgtaccatcgacttcaagatttctgaatccatatgtcgtatgtttcattgtcgtcgcaggggtagtgatcctggcagtgaccatagctctacttgtttactttttagcttttgatcaaaaatcttacttttacaggagcagttgtcaactcctaaatgttgtatatattagtcagttaaattcaccagctacacaggaatacaggactttgagtggaagaattgaatctctgattactagaacattcaaagaatcaaatttaagaaaccagttcatgagagctcatgttgtcaaactgagtcaagatggtagtggtgtgagagcggatgttgtcatgaaatttcgattcactagaaataacaatggagcatcaatgaaaagcagaattgagtctg

SEQ ID NO: 199264 - DNA, 476 bp, Gossypium hirsutum
atccgggagtgggatcgcagttcttgtttgtgtgtcggtggcatcgccacttgacaatgcagatcttcgtgaagaccctgactggcaagaccatcacccttgaggttgagcccagtgacaccattgagaatgtcaaggcaaagatccaagataaggaaggcattcctcccgaccagcagaggctgatctttgccggaaagcagctggaagatgggcgcaccctgtctgactacaacatccagaaagagtccaccctgcacctcgtgctccgcctcagaggtgggatgcagatcttcgtgaagaccctgactggcaagaccatcaccctcgaggtggagcccagtgacaccatcgagaacgtcaaagcaaagatccaggataaggaaggcatcccgcctgaccagcagaggttgatctttgctgggaaacagctggaagatgggcgcaccctgtctgactacaacatccagaaagag

SEQ ID NO: 199265 - DNA, 451 bp, Gossypium hirsutum
cttgagactgagcctgagcttccacctcgtagcaattgcgtaacccttaatattgtttcttcattcaaataaacaaaaacatgaaaacactttgaaatttttcttcttctttcattcttttacatttcatttccattcagatccgattcttaaacgcattcccatttaaacccctctttgatttcatcctcattccgatacaaaaacccaagggcttgctctggtttttagcctctcaattcttcgtatagtcgatctaagtcatagagggagcttaagtgggatttgatgtgccaggcaaggtggaagcaagttcattggaggtttcaagggaacataacacttggagcgtttgtgatagatttggctacattgcaggatgcatagagtggagtagaagttagtccttttttattcaattgatccaatatttgcttcagaagataggata

SEQ ID NO: 199266 - DNA, 405 bp, Gossypium hirsutum
ataagcattagaatctggttgtccctatgtaaatactgatatgctaaagtggcccaaaattaattctagcttaaaactctcctttacattgggattctaggtgctgtccaaccctgagtttctggcttagggaacggccctcaatgacctaaagtacccacacagggtactgattggaggggatgaaactccagagggccagacagctgtgcacgccctgtgtgctgtatatgatcactagcttcccagagtaaagatcctcaccactaatacttggtctttagagctttacaaactggcagcaaatgcttctcttgcccagagaataagcagcattaattccataagcgctctgtgtgaagcaacaggagctgatgtataagaggtagcaacagcaattggaat

SEQ ID NO: 199267 - DNA, 418 bp, Gossypium hirsutum
ttcacgcgtccgcttcctttgaggatgacactagcattccatgtggagttgccttgaagaggatggctggcctactggacaagtcggaaaggagcatacagaggcttatcaaactgaggaattcagtaatccgttcttatcaggagtgtaagattccagttgattggatgcttgattccggaatggtgtataaaataaagcaggcttctatgaagctggtcacaatgtacataaagagagtgggaaccggaccttcaattggtacgcaagtttagacaaggaatctgcacaagaggcactgcttcttcaaggcatgcattttgcaaatagggctcaccagtttgctggagatcttgattcagaaacactgtgtgcttttgaagagatcaaggaatgcattccaggacacctggtagga

SEQ ID NO: 199268 - DNA, 863 bp, Gossypium hirsutum
tttcaagctaagaagaagaagcacaaagagaaccctaatggatcttcatttcgtcgccattttagctctcattatcttccttatcaccccaaacggcgtatatggtgcttcgttcacattcatcaaccggtgtgattacactgtatggcctggtatattagcaaatgcaggtactcctagtctgggaaccaccggattcgagctcccaaaagactcttctcgttcattccaagctccgacgggttggtccggtcgtttttggggtcgaacggggtgtaaattcgacggatccggctccggaacttgtctcaccggcgattgcgggtcgggtcaagtagaatgcaacggactcggtgctgctccgccggtgactctagctgagttcactcttggaaccaccggtggtcaagatttttacgacgttagtctcgtcgatggttataatatgccgatgatagttgaaggccgtggtgggtcgggcctttgttcttcgacgggttgtacgactgatttgaaccgaaaatgcccgtcggaactacgggtcggtaatggtgatgcttgtaagagcgcgtgcgaagcgtttgggagccctgagtattgttgtagcggtgcgtatggtacacccgccacttgtaaaccgtcggtttattccgaaatgtttaaggcggcgtgtccgagatcttatagctatgcgtatgatgatgctacgagtacttttacctgtaccggtgcagactatacggtgacgttttgtccctcctctcctagtaaaaaatcttccaaagatgctacaccggttccggcagtttcggaagaaactaccccgacgacaggttcaacaccacaaggatcagggtcggaat

SEQ ID NO: 199269 - DNA, 395 bp, Gossypium hirsutum
aaaaaataaagagagagagctctaaaggtctctcagagctccggccagtggccgtcctggctcgtctcggagcaccaccgccttcggccatacgcgcttcacgcgccaccgtctgaaccaccgtgcccggcgggtagggctttaaaattttctttttctctcacgaatcaacaggtttatacacgatgattgcgacggaggtgagggcatgctgattcaggcctttgattgcggcgcaacatgaggttgatgtcggctggaagcttacggcgcgaaccctagctagggtttctcagaagctgaaactccttaagttaggtgggcctgctgggctgtgtttgtttgttggatcaaaagggtattttgggctgattcgggttgtgaatttaggtatg

SEQ ID NO: 199270 - DNA, 677 bp, Gossypium hirsutum
  unsure (1)..(677): unsure at all n locations
ccctgttcttctccttcttccttgactaggggtttccatttcccagttcttctcgtccctttcttaaagtcggcatcttcctttgctttctccagttttctcctacccagcaccttcttcaagggtttgttcttatttgaatagcctttgttgtagctatttgcaaaatgctggctcctagtgttactgctcccttgcggccttcattatctaccggacatcgattagagtcacgaattgaatgcagtagccgttgtggctcagttagaattccgaatcggattaagccaagggaacttggcttgcaatcacaacctagggtaggaagaagtagaaaacaatcttcatccattgcatgcaccgcaactgctttgcagaacgcaacttgcagtgcatcaggacaaactcaaactgttactcgtgaggcaccaacgatcacccaagctcctgttcattcaaaggagaagtcactgcagctagatgatggtgattcaggatttcctccccgtgacgataatggtggtggaggtggcgggagaagtggtgggggcaactggtcaggtggattcttccttttcggattcctcgcgtttctaggcttcttanaggataaagaaagcgaaaaggattaccgggacagccgaataagatgatgagattctctacatattgataat

SEQ ID NO: 199271 - DNA, 453 bp, Gossypium hirsutum
atgcaaccacatcaagctgtcgggcagcaacccctacaccactgtcaccccgcagatcatcaactccaagtgggagaaggtgcagcagctggtgccaaaacgggaccacgccctcctggaggagcagagcaagcagcagtccaatgagcacctgcgccgccagtttgccagccaggccaacgtcgtgggcccctggatccagaccaagatggaggagatcgggcgcatctccattgagatgaacgggaccctggaggaccagctgagccacctgaagcagtatgaacgcagcatcgtggactacaagcccaacctggacctgctggagcagcagcaccagctcatccaggaggccctcatcttcgacaacaagcacaccaactacaccatggagcacattcgcgtgggctgggagcagctgctcaccaccattgcccgcaccatcaacgaggt

SEQ ID NO: 199272 - DNA, 357 bp, Gossypium hirsutum
taaaaacagagagaaatggctctacacgagccaaattcggcgagaaagaaagccactgttatagccatggatgaaatcccctgcccgaaccttcacatttctccggcattcgggttctaaatcactaagacccaggtacgtgcgtgagtgcatcactgatgtggcatggtggagcagcgcatgacgcggaggaagcgcgagacgtgcggtgcctggagactgccctgggttgtgacggctgatgggggttttggttttggttttattatttttttgggctgttggggtttatgtaattgggcttggtttgtaattttgttttaggtgtttgatttggggtgtgatttggacttaaat

SEQ ID NO: 199273 - DNA, 411 bp, Gossypium hirsutum
tcgtccacgcgtccggttgcgtcgagggggaaagaaacttcccatggaagatgtttgctattatcaatggcctcttcccggcattgatcagtttggagtgtttggtatctgtgatgggcatggtggtgttgaggctgccaaatctgcgagcaagattctgcctgagatgcttgctaccattttatcggatcctgttataagagagagggttttgtcacagcatgatgcctcagatgttcttaaagacgcattccttcgagcagaagcgagcatgaataactattatgagggctgtactgcaacagttcttcttgtttgggctgatgctgacgaaaatttctatgcacaatgtgcaaatgttggggattcagcatgtcttatgaatgtcggagtagcagataagatgacaga

SEQ ID NO: 199274 - DNA, 542 bp, Gossypium hirsutum
aaatgctgttgcaaaggcacaaggagcattaaccagagatgggtttatggggggtatgaagcctacacatgtatggagacgggtttacatggtaaatttcatccctgaacttgatagagaaaaatacccctttgctgcattaaaattagatgatggtgttaaacctccaccttgtttattgtctgggtacatgcaggcaatccctgttgcctggacggctaaacatcacttaaaagaaaacacagatatcattctacgcattaacaagcgtacatggaggaccaggtataattatcacaaaaatcgtgattgtggagggctttctggtggttggaagtgttttgtgaatgacaataatttaatagaacatgatgtgtgtgtatttgagccttccaatataggaggaaaacctatcatcctggatgttatcatcattcgggttctggactcagcagttcaagcaccagtacctctgaccataacacaccctgcctcttgctaaatcgcagcagttaactctcagaatctgccagaaatgaaat

SEQ ID NO: 199275 - DNA, 504 bp, Gossypium hirsutum
gtgaggcagcggggagagatgggagagatgggagagaggagaagaaagcagtgacgccattgagggaaatgacaccagagaggatttttgggaagatgggtcacttgcagaggttgttagatcggttcttgtcatgtcggcctacaggattggcaaagaattgtaggatgatcttgattgctttatatcctgttgtgaaagagagttttcaattatatgcagatatttgcgaggttttggctgtgctgcttgataagtttttcgatatggagtacccagattgtgtcaaggcatttgatgcatatgcaagtgcagcgaagcagatagatgagttgattgcattttataattggtgtaaggatacgggtgtggctagatcgtcggagtatcccgaggtgcaaaggatcactagtaagttgttggagacattggaggagtttgtgagggatagagctaagaggccaaagagtccagaaaggaaagagctcccttcttcacctaaag

SEQ ID NO: 199276 - DNA, 515 bp, Gossypium hirsutum
  unsure (1)..(515): unsure at all n locations
ttctactagaggggatcctttagggaatgctggaaaaaccttaaaggaagaaattcataagaaaattgaaaaatggcaagaaccacctcctgcaaagcagcctaaaccacttcctgttcctgattctgaacctaagaaaaagaggggtggtcgtcgcttaaggaagatgaaagaaaggtatgctataacagatatgaggaagctagcgaacaggatgcaatttggagtacctgaggaaagctctttaggtgatggactaggtgaaggttatggaatgcttggtcaggctgggagtggcaaactgcgtgtttcaattggtcagagcaaacttgcagccaaagttgctaagaagttcaaggaaaagaattacggaagcagtggtgccacctctgggctgacttcaagtttggcattcacacctgtgcaggggattgagctcacaaatcctcaagctcatgcacatcagcttggcagtggaactcanagtacttacttctcagagacaggaacatttt

SEQ ID NO: 199277 - DNA, 664 bp, Gossypium hirsutum
  unsure (1)..(664): unsure at all n locations
ctaattgttggaagaagaagcagaagagaagaaatggagatgcctactgttgatttgagttttctctttcattttctctattgattttctcgacatccaaacaatggagagattatacctctgcgctgccgcttccttcagcttcaacccccttcttttttcctgatctcttctctcatccccttctcatttttggtagctagctttttctggtccctacgatccattccagccctaaaccttcaaccaaacaaaaattgtgcctcgtgagggttttggtacaaagaattcatgtctctggaagtatctttggtgctctcccaatcgaaagaaaacctaaatttctcgctaggtttaataaccctcattttaggctttttggatccgaggtactgctcattaattgcagctagcttatccaattccttttccctttccctctcagctagcttatccaactacgcccgctctcgagctttggcttcctcctccctctcacgttcacggttcctccggtcagattcacaatccctctctcactatcgttcgtattcacggcggtcgtangagtcnaaggaaggcttancantataggaatcaaaggtattgttgggggtggtgttanaacancngaggtctttgangcggcacttctgcagggtgc

SEQ ID NO: 199278 - DNA, 458 bp, Gossypium hirsutum
gggctgctctggtaaaaaaactattctctattccgcctcaacccgaaacagctttctcaatcaacgaccatctgcgagtaatggataacatagtagattccttaaacaaagcctaccaagaattcgttgcagcagcagctaatgtcctcgaaactaagggatcttcggctgcccaaaagacggaatccaccgatacggcattggaaagctttaaacaaaaatgggaaacattcggactggcttgcgatcaagctgaggagtttgttgagtcaatcaaacaaaggataggatccgagtgcttggtcgatgaagccaccgggaattcgtcggagcggttgactggcctgccccccatcagtgccgtccgtttggagcagatgagtaaagctgttagatggcttgtgattgagttgcagaacggttcgggaactgccgccgcccacccatcgacacctttc

SEQ ID NO: 199279 - DNA, 868 bp, Gossypium hirsutum
  unsure (1)..(868): unsure at all n locations
aagcattcattaatggccgctctctgcaactgaaaacttgaacaattctcttttaaaggtctggtctcagctcaaacactttgagtgggaagtaaaaggatgttgacagctgattcgggttctgtgttaaggttagtggagatagaaggaagaggaagggctctcgttgcatcgcaaccattgaaggcggggcaaatcgttctccaggattctcctatcgttgtttactccgcttttccgttggttaaacctcaatcttcggcatcttattgtgataattgctttaggatactctcctcatcggcaaatgtagtgccgtgtccattatgttctcatcatctcttttgcggtccaaattgcctaaccgcggcaacagcttcctctcattcaccttgggtctgccaggcttttagtcgtcttcgggattgcccttctctttttttctcaacctctcgaacagcaagtgcaagctcggtttcttatagctgcatataatctancccttgtttccccttcggatttccaggttttgctttctcttcaaggtcaatattccccttccgatgctcctgctgccgaattcctacattccctcattttgtcggtctgtcctccgccttcgttaccgatttctatcgaactcacagctgctttattggcaaaagataagctcaatgcttttggcttgatggaacctttctctctacaacaagacggagagaggtccgtccgtgcttaccggatctatcccaaagcatctttcttcaaccatgattggcttccaaatgcttgcagattcgattacctcgactcagcttcgggccagaacaccgacatgattgttaggatgattcatgatgtccctgta

SEQ ID NO: 199280 - DNA, 355 bp, Gossypium hirsutum
ctttttgacgaatttgcagccagtttttgagtcttgtttgcagctcaaggtgttaaaattacaagcatgcaagtatctggcggactcatcattggagcccctttacaaggaaggtgctttacgagaactccgggatttggacttgtcatatggtaccctgtgccagtctgccatagaggagcttcttgcttattgcacgcatcttacccatgtgagcttgaatggatgcataaatatgcatgacctaaattggggttctactggtggtggatttgaatcacttaacggatctagcatgtttccttttgagaacatgaatgactcaattgagcaaccaaatcgtttactgcagaac

SEQ ID NO: 199281 - DNA, 250 bp, Gossypium hirsutum
tcggttcaattaatcaatcacacctggaatcgctaatagcccgtgagtggattagttactcatggaatccctaaacataataaactcgctcatagtgctatgcatgaaaaataaatgaagaatcagtggtagagaatcgtgattgctttcgacagatgaatgcgcaaaactcattcaacggttgactagccctacatatcaagtgctccgagaacacgaatgaaaagaatcgcaacgaaatatagaccct

SEQ ID NO: 199282 - DNA, 360 bp, Gossypium hirsutum
  unsure (1)..(360): unsure at all n locations
acgcggacgcgtacgcgtaggcgggcgcgtgggcggacgcgtcggatctccagctagatccacgagaacgcggactggcttgcacggttggattggaatctgtcgcagacacaatgaagaaaaaaaaaagcccctgtgatgagaggatgagctgaacttggcaaggcgtaagctaatgatgtggaacatgatcccggttgtggtgtagcgaanaccacaccacctcgtgttcttgggcgagtctattctatgcaaaggtaaatataggagctcatctttttttttctttaatgtagatggacagagagaaacaaaatgctttgattaaagggagggggagaaccaattaaaaggagtggg

SEQ ID NO: 199283 - DNA, 630 bp, Gossypium hirsutum
atgccaaccaggccatagctaagcatttaactcaatttaattctcgccaaaaatagggtcaagtttagtgtaggggatttcaacagtggtgggttgtgagttaaagtggagggtaagcaaagaaatggcttgtcacgctcaatggtcttaactaggggttaatcatggaggtagtctttgcatggcatgagtgggttaatcgtaagtgccttaatcattttgacatatcaaatcaaatggtgtggtctcgacatgcataatcaagcaagttctagaataacagttcaatactgacgcactcaaagcaataataaaagtgagcatgaaaggattaatagatgctcaaaaggctcaaaaatctcacaaaaattatggctttttgatgtttaggctcatgaattccaattcaaagtaatacctagacttggggaaacaatctataattttcaattcttaaaaatcaacttatcatgcttgattctctaatgtcttaaagtttaaacaatcaatgcataaatccttatgttttaattcaagatatatcaatcaaaatcataaatcaattaaaatttatcctaaatatgatatgagagctttttcaagagaacaaggcaatcattcaaggatttt

SEQ ID NO: 199284 - DNA, 378 bp, Gossypium hirsutum
  unsure (1)..(378): unsure at all n locations
cgaaaaatggctgatttgagagacgaacacggcaaccctattcaactcaccgacgaacacggcaacccgggtcaactcactggcgaacaccggaaccccatttatgtcaccgggtttgccaccaagcatcccacgacgacaaccgcactggcgggtttaatgggatatggcaccggttccgccgtcgccactgatcagtcacaacagcagctgcagccaccgcctccgcagcaaacacagccgctgcattacgaggtttccggcaaggaaaagattcaacgctccagcagcttcaactccagcttcagctttagcttcgtngaagattaatggattggccgtagaaggaagaaagggctgaaagagaaagtaaaggag

SEQ ID NO: 199285 - DNA, 383 bp, Gossypium hirsutum
cccacgcgtccgcttaaacccttcctttcattccttctacctcctcttcattattatctttcctttaagctttggcaattaatttctttgctttcaaagagatgtgtggtggtgctatcatttctgaattcatcacccggaaaggcgcccatggcgtcactgcttctgacatctggcccaattcccctttcgtcaaaaatggctttagctctgactcaactcaatccttccatgatgactcactcgccctctgtaaaaggaaccgaccccaatcctcagatggggtgcatgtggagaagaaagtgaaaaggcagagaaaaaacctatacaggggcatacgccagcgtccatggggcaaatgggcggcggagatccgtgacccg

SEQ ID NO: 199286 - DNA, 369 bp, Gossypium hirsutum
cccacgcgtgcgctcatcttggagaaactggcaatcgctgatctggtacattttgattttatggacccacctgctccggagacattgatgcgtgcattgcaagtgctgaattacttgggagcattggctgatgagggtaacttaacagagactgggtgagagcatgagtgaattccccttggatcctcaaatgtcaaagatgctcgtagctagttctgagttcaactggtcaaatgagattctttcagttgccggcatgcttatcagtacccaattgctttgtacggcctacggaggcacaaaaagctgcagatgaagcaaaagctcggtttgggcatatcgatggtgatcatctcacacttttgaacg

SEQ ID NO: 199287 - DNA, 424 bp, Gossypium hirsutum
atcagatttgggtggggaattaatgctaatagttaaattaaaagtagattgtttccatttctctgtaggatgttgttgataaatgcttttgtataatcacctatttccttggaaacacctatttactaaaagagacaaagtaaaaatatatttatactttatgaattgttttcagtgactaatttctttgtaaaacttaaatatttttaagtttgtaggtttaaactgttaacttaccggtgtatttaggcaatttaatttgggttatgtatctagatgtagaaaaacttactgcattttgcccagtatctaatttacactaatacatttatgctgaaacctgtaccgtaaaacatttttaaataggtatattgagatcttcacacatagcaggagggaaatcaaaggtattttattatccacc

SEQ ID NO: 199288 - DNA, 357 bp, Gossypium hirsutum
cccacgcgtccgcccacgcgtgcggtgattttgtttttaaaaataagacttgatttttagttttaatatatctctttttgactattttggggtaaatttttcgttagtttttttttgggtcttcggaattggaattttcggggaatggaggtttcggtaattaggagttgttctcaggcaacaaaccctaaaacagaattagggtttaaggattcaaggtttagtttcgggaaatttaatgagaaactatttttccggaaaccaaacagtgtttcgtttcagagtccattaaggaggggaaaatcttggctcagaataacagcgcaagctgcccaatctgatcccctccctaaatcg

SEQ ID NO: 199289 - DNA, 610 bp, Gossypium hirsutum
tgacgcatcacctaagcgtatcagaaggggtcggggtttcagtgagcgctactcttatgcacgaagatacacaaccccttctccagatcgttctcctgtgagggcctctcgcttcagtggcaggattgatcgtgagaggtattcaagttacaggcggtattcacctaggcgctatagaagccccccaagaggaagaactcctccaaggtatagaggcagaagaagccggacaagaagtctgtctgtatcaccgagcccgaggtatagaaatcgtcgctatggtcatagccgcagtcgtagtcgaacctctattcgcagccgtagcccaagtcgaagtcgaacccctgttcgcagccgtagtccagttgattctccaagggctggacggcgaaggtccccttcacagagcaggagccgatcagaatcaaggtcttcgttgaactctcagtctccaaagaaggtgagcaaagcaaagtcaaggtcatcatcaggaagtccagacggtggaaggggactggtctcttatgatgatggttcacctgactcaggaaggtgaaatcgagtgaaagttggttgaagatttttgcttagtggttgatgagccccatct

SEQ ID NO: 199290 - DNA, 404 bp, Gossypium hirsutum
tcggtgggctgcctgcgccacaaggctgagatggtgatttttgaagctgcaagagcaatcacagagctcaatggtgtgacaagccgagaattgacaccggcaatcactgttcttcagcttttcttaagctcttctaagccagtgctgagatttgctgcagttcgtacgctgaacaaggttgcaatgtctcatccgcgggcggttactaactgcaacattgacatggagagtttaatttctgaccaaaatagaagcattgccacacttgcaatcactacccttctcaagactggaaatgagtctagtgtggatcgtctgatgaagcaaataaccgtattttaatgtctgatattgcatgatgaattcaaaattgttagttggggaagccataaagatctctatgc

SEQ ID NO: 199291 - DNA, 676 bp, Gossypium hirsutum
  unsure (1)..(676): unsure at all n locations
anttttnccaagttgtagagaaataggaatggttcagggaagattcagagcagtggcagccacagtgctgctctgctgcttgttgctccactttgaggtggctcaatcagcaagtttcactgttggaggaagaggtgggtggacctttaacgccgctgcttggccaaaaggcaagccctttaaggcgggtgacactctcgtgttcaattacaacccttcaatccacaatgtggtagctgtgaacagagcaggatacaaatcatgcaaagcaccaaaaggtgctaaagttttcaagtcaggcaaggatcagatcaagcttaaaaagggccaaaactttttcatctgcaattacattggccattgccaagcaggaatgaaaatagcagtcactgctgcctaatccgagattaggcattgccatatgatatcttcagtttgcttttaagtattaatgtaagattcggtgtcacaaagtctactctagtgttagatttgcttgctttgagtgggtaggtggtgctccaaacactaaatctatactataataatgatggttttaagtggaaatcttttgtgtaatgctttgtggctaaggttttacttgtactcccttttgcaataaaatatataaagatgcttctaccacgtttatttaannnaaaatatttnaatcatt

SEQ ID NO: 199292 - DNA, 538 bp, Gossypium hirsutum
cgctaacacccttccctgaaagccgtggtgttcgtccacagaaattccctgcagctggagcagcgccttatgttcccatcagacaattaaggacaccttgctgtggcattgctccaccagtgacaataagaactgcagtgcctgttttctctgcacctccgcgtccagcaccagctgcagtatctcctcagccaccgacatcagcggttcctactcatccccctcaaccagcacaatctgttcttcctcctcatcaactgccagcgacactcccctctcaagtgctgcgagctcctccagtacgaattgcccaagcagtcaccattaggcaagtagttcctgtatttgctgctccaccggtacggagaagataaacaatccgttcctctcagaaatgaagatatcacaaccgctactgctgctcccccgcctaaccaatcacctattcaagcagaggaagcagcaagcacaatatcgaagaacctgcaagaatctgagacagtacagagtttagaacaactcaaaatctgatggcaag

SEQ ID NO: 199293 - DNA, 408 bp, Gossypium hirsutum
atcgcgcagttcggcagcagcagccgcggagctgtagccgccgtgggagggagccatgaagcactaccaggtggagattctggatgcaaagacaagggagaagctgtgtttcctggacaaggtggagccccacgccaccattgcggagatcaagaacctcttcaccaagacccatccgcaatggtaccccgcccgccagtccctccgcctggaccccaagggcaagtccctgaaggatgaggatattctacagaagctgcccgtgggcaccacggccacgctctacttccgggacctgggggcccagatcagctgggtgacggtcttcctaacagagtacgcagggccccttttcatctacctgctcttctacttccgagtgcccttcatctatggccacaaatacga

SEQ ID NO: 199294 - DNA, 598 bp, Gossypium hirsutum
aaaccctttttggagttgcagaagccgagcaacgcagtcgcttttttggggttttttcttcttcttctagacaaaccttattcgtcgaagatgccgaagtccaagcgtaacaaaatagtttcattatcaaagacaaagaagaagggtaaagaacataaagaatcaattgtgaatgccataagggaagctgcggaagattacaattccatctatgttttctctttcgagaacatgagaaatcttaaattcaaagagtttagagagaagctcaaacctaccagcagatttttccttggttcgaataaagttatgcaagttgctaaggccgtgtctgtttctgatgagattagaccaggtctttacaaagtctctaagcttctgcgtggggatgctggactttttctaccaacatgcccagagatgatgtcgtaagctgctttattaaatttgaagataatgactattgcaggacaggaaccattgcaactgaaaatgtggatcttttagtaagtgtctatgggataagtatacacatgtaatggaggctttattgcgcaatcaaggcttgcttgtctggttgaacaatggtgtgcgtatt

SEQ ID NO: 199295 - DNA, 482 bp, Gossypium hirsutum
aaaatatcaggcatatgttctctcattgctgaagactttcctatggtagaccaggcgccagtacgtaaaggtggaagtggaaaatcggctgcccgtctgaagtgcccaaaaaatactttgatttctaatgtgaaatttgctagcttcggaaatcctacaggaaagtgtgggtcttacagcatgggggagtgccatgatcctaactcaacattggcagtcgaaaaggtctgcctaggtaagaatgagtgtgccatagaactaacagaagagaacttcgataagggcttgtgtcctggtactactaagagacttgcaattgaagcagtttgcagctaaagttaccccggtatatgttccgacacaaatgttttggctgcttcctgaagaagaaaacggaagaaaagagcatcctgctccgttttctttcgggcacgagctgtgtcttattttctcaacatgatgcccctaattttatttttctt

SEQ ID NO: 199296 - DNA, 557 bp, Gossypium hirsutum
aaaccccgtacttcaactcctataacccttatgctctaaacgaacatttcttcttcatcttcatcttcttcttctctttgttgtattttctctgtacttagaagggtattttcagttttcagttttcagttttcacttcaagttcctacctctcactttcttttcttgaagcttaacaacacagtagaaaaattttgttttgtttttttggctatggattttctcaggaatgtgtcagtctcgggtgaatatcatcaaccagagcaagtcctttcatcaccatgctctaaactgggcgcctctattgatgaccttttccccactcaaaatacggaagtggatgtgagtttggaggggttgtctatatttgtagaagacggcaaagctgtcagtgttgatacgcctctgtttgtgattgaaccttgaaataagactgtcgagtagcagagtaaaaggtaggaaggacaggcaggcaagcaggttgagttggtgggatttttcttcctggtaatgtagtttggattcattaaatgggcagtattatatactcctagtct

SEQ ID NO: 199297 - DNA, 541 bp, Gossypium hirsutum
tctcccacgcgtccgcccacgcgtccgaaaacatgtttccatggctctttcgcgttcttcgtggctgaattcaccaccacggatgcagcaagaacgttatcagaaaagatagcgtaatggtaaagcttcggatcctcgaattccggaggcattggtttccatgtggtgacggacaagatgaatcttggggcaatgcacgttatgttcaaattgaaagattataatggagctcatattgaagtgaaggcggtagaggattataagtttttgaattcatcctatgttccagtgttgagacagttagaatcggctaatctccagaagttttattttgagaacacgctggagaatgccacgaaagatacgactaacatgaagtttaggaaccccaagtatttatcaatcttgaatcatttgaggttttatttaccggagatgtaccccaagttgcataggatattgcttttggatgatgatattgtggtgcagaaggatttgactggcttgtggaagattgatatggatgggaaagtgaatgggg

SEQ ID NO: 199298 - DNA, 392 bp, Gossypium hirsutum
cggacgcgtgggaaaaaaggtgtttcctggtactttgcccttttcccttcagaatcccttcgttttttttttctcatccgtctcttagtctctgaaattttcctatttattgaaaaaggagaagaatgtcgggatctgagacgggaatgatggcgagtagagagccctacagcttgggcatgcaacagaagagtccggtggcgtcacaaccggcgatacagaacatgcgtttagcctttagggctgacggaacagctgtgtacaagcccatcacttccgcctcactcacatatcagccagcttccggcgatggtggggccgaggggtccgctggtggacctgcggtcactcaagaacaagggcaagctttgaacatgagcatgagcatgggg

SEQ ID NO: 199299 - DNA, 616 bp, Gossypium hirsutum
caagccgaagggcctcagaaaatcgataagcacttgacgtcgaagcggaaacctttttcagtttcgtcttctctcctgtttaagttcaaaacccttgattattcgcaacttctacctaatattttctgatataataaaataattttatatgcgaaagatgggttcatcttcgtcggagacgaagctactgcaagaattgatcttatacgccgccagcgctgcccttagttgcttggtcctcttcgcggggctccgacacctcgacccaaaccgggaagcttctaaaaaggctttggagcacaagaaagaaattgccaagcgtttgggtcgtcctctaatcaatactaatccctacgaggatgtaatagcatgtgatgtcataaatcctgatcacattgacgtggaatttgagtctattggaggattagaagccatcatcaagctctgtatgaactattgatacttccgttacggagaccagagttgttttcacatggaaagcttcttggtcctcaaaaaggggttttgttatatggaccccctggtactggaaagaccatgctcgctaaagccattgcaaaggagtctggagctgtttttatcaatgtgaggatat

SEQ ID NO: 199300 - DNA, 421 bp, Gossypium hirsutum
atcccggccaggcacccctgcaacatggcctggaacaccaacctccgctggcggctgccgctcacctgcctgctcctgcaggtagctatggtgattctcttcggggtgttcgtgcgctacgacttcgatgccgacgcccactggtggacagagaggaagcacaagaacttgagcgaggtggagaacgaattctactatcgctacccgagcttccaggacgtgcacgtgatggtcttcgtgggcttcggcttcctcatgaccttcctgcagcgctacggcttcagcgctgtcggcttcaacttcctgctggcggccttcggcatccaatgggcgctgctcatgcagggctggttccacttcttagaaggccgctacatcgtcgtgggagtggagaatctcatcaacgctgacttctgcgtgg

SEQ ID NO: 199301 - DNA, 408 bp, Gossypium hirsutum
  unsure (1)..(408): unsure at all n locations
atcatgccctcagtttcacagttaccttaaataaaaatgtgaaaaaaattttttttcaagttggactacatagtcaagtccacaaaccatcaagcactcctccttaattatggcactagataaaataaacttcaaattaggaagtgtttcctaggaggaaaattccattagagagtgacaataggatgaggtttcttcagggtaaactagcaacgcctgagcctgaatcttaatttggggtctcagttaaatctcctgtggagtcaaggattcttctnattctagtttgtgtttagtgatagatgtaatcttgacgaatattgcttactgggaagggtgaggaatatcacactcactttttcctttaccagtgtggttttgacttaagaaagccaaactttctaaagt

SEQ ID NO: 199302 - DNA, 419 bp, Gossypium hirsutum
atcttttggccaagtgtttccttgaccataagacactgtactatgacacagaccctttcctcttctacgtcatgacggagtatgactgtaagggcttccacatcgtgggctacttctccaaggagaaagaatcgacagaagactacaatgtggcctgcatcctaaccctgcctccctaccagcgccggggctaccgcaagctgctgatcgaggtcagctatgaactctccaaagtggaagggaaaacagggacccctgagaagcccctctcagaccttggcctcctatcctatcgaagttactggtcccagaccatcctggagatcctgatggggctgaagtcagagagcggggagaggccacagatcaccatcaatgagatcagtgaaatcaccagcatcaagaaggaggatgtcatc

SEQ ID NO: 199303 - DNA, 684 bp, Gossypium hirsutum
acggaaattaagagtagcattgcagtttcctcaatattgtgttggcaacatcgccaaactttttcgtttactttcatcttcggtccctccgaagatctttaccaaacacaaaaaaaaaccctgaaattgaacttttgttttagctcaagttttgcatgaacttatcgatacttatctgaaatctgctttacttggattttattctttttcattctttaggcaaacgcagatgccaaaatttttcctttctgctgttttaaagagtgtttattggttacttcattttaattttttggtattgttgagtgtaaatggccaatgcatctgggtttttcacgccttcagttccaaggctgaggagcaagattcagccttcaataggcgtttctcgatctgggttttgcttctctgctggaatctcgaggagggtagtgtgctcaagtgccattgaaggtgcagagaagcatgtttccccttctgaatctcgaatgcccaagcttgtcagtaaaggctgtaagttagttggctgcgggtcagcagtgccatctctttcagtttccaatgatgatctttcgaaaatagttgatacatctgatgaatggatctctgtccgcactggaatacgaaatcgacgggtaatgtcaggaaaggaaagtttgaaaaagctagcagttgaagcggcac

SEQ ID NO: 199304 - DNA, 678 bp, Gossypium hirsutum
gtttgtgtcttttcttggaggcatgtaatgggagtgcttgctcgccaggttggttgttcagttgccgcttttgatcggcctggttggggattgacttctaggcctagccggaaggactgggagggaaaagagttgcccaatccgtacaagcttgaaactcaggttgacttgcttctttccttttgctctgagatggggttttcttcagtagtgcttgttggccatgatgatggaggcctgcttgctttgaaggctgcacaaaaagtccaaacttcaatgaattcgttcaatattacaatcaaagcagtggttttgctaaacgttagcttgtctggggaagttgttcccgcctttgcaaggatactcttgcgcacttcacttgggaagaagcacttggttcgtccgcttctgcgaacagaaatcacacaagtggtgaatagacgtgcatggtatgatgcaaccaagttaacaacggaagttttgagcctctacaaggccccactttgtgcagaaggttgggatgaagcacttcatgagataagcaggttgtcatctgaaacaatcctttcaccacaaaatgcaacatcactgctaaaagctattgaagagatgccagtattagtcattgctggtgctgaagatgcccatatttctcttaaatcttgccaggccttggct

SEQ ID NO: 199305 - DNA, 366 bp, Gossypium hirsutum
aatcagtcatctaaaataaaactaaaaaaacctaatcactcccctttctcttgcgccggtgggtgcctttatcctccattcgactccgattgcgacggagtagaaggaagatcggccaccaggtaagctcgttctcctttcccttttctttttccttcacttttctcttcttcgtataaaaaaacaaaagaaaacagtaaagaaacgcacagtaaaaaaatggtgaacccttctcaaatctgatttcttttcctttttgattgattttttttttgtatttcaatatgcgtggaaaaaaagatcctcgaaacaatacagaaatggggttttataaccccaaaaatacatccatttttccttctattt

SEQ ID NO: 199306 - DNA, 366 bp, Gossypium hirsutum
cccattcttgaattcggggccaaaggataaggcacttcctacgtccttgatccaaccattctgcgcgccctgtggcatcacagacaaaaaggtgcagtgcttccaatgaattaaggatgctgaagcatatacactggttctagttaaccgagccgaaccagtgaagaccttctgcctccaacgctgacaggaatgcttccctagcttcatgactgagcgtgcctgcaaaggagcacaaaggttttctccatatgtgcatgaccacaaacaaatgcaccatacagtttgggaactctaattagatggcttaaccagagcttaagacaaacggttcttacggtctatcacagaatttgagaacagagg

SEQ ID NO: 199307 - DNA, 323 bp, Gossypium hirsutum
cggacgcgtgggattagctatcatgtttgatgcttattttatgtatatatgcatgtgtgaaaatttcatatttgaattttgttaattctaggtgaattttagtaaataggacttatgtgagaaaatttagaaatgtgctaggcaaatgtaaagtggccggggaatgcatgttgtgaaaatgatgggtttgcatgtcaaattacccaaaatttgagctagtggctggccatgctatgggtggaaacatgttgggaacatgttggcctagtgaggtatgtaggaaaaaaataaaataaggggcatgggcataaaataatgaaaag

SEQ ID NO: 199308 - DNA, 575 bp, Gossypium hirsutum
cggacgcgtgggaagcaatcgcggagctcattcctaatgaagtgccaaccatagagaaaagaagaaaaaaggaggagaagaagccttccattgttgttgtccaaggtcctaagcctgggaaacctactgactgttcgaggatgagacagatactagtgaaactaaagcacaacacaccttctcacctgaagcactctccgccaccaccaccagcagctgctgctgcaaaagatcaagatgcaaaaactggtaatacttcttctgtcccagctgctcttccagtcacaagcacccctgaagctgtagtagctgcttagatagttttcattttaacttatcagcttctgtaataaaaaaaaaaaaaagtatctataagactatatcttgtgagtagactgatgtttagctggtcgtcatcctcagcagtagtagggtacatagttggttttatgaggttataaattaagagtttgtctatgcacgaaactttgtcgtttggatggaatgtagtaataatgtacgccgctattttactcaaattcggatatatctgatgcgagtatatgtttggaatg

SEQ ID NO: 199309 - DNA, 359 bp, Gossypium hirsutum
ggaaactggcgcgcgaccaattcaaagcggggttctcgcgaagcacacccgactctcaaatcgtcgtgtgagaggagagagatgagaggaccctgagcgactatggcgatgcttgaaagcattgtcgttttcactctccttctccttatgttgatccttatcattatcctcattctcttcgccttcaaaccatggcgtttcttctcctcccttttatctttcccttctcgttctcgctccatcaaggttgaagacgtagagaggcctctggtatcagatgatgtcaatcacaggcaagatcaaagcaatgatttgacaggaaattatgacttagagggtgcatgttaccaaagtgaagc

SEQ ID NO: 199310 - DNA, 376 bp, Gossypium hirsutum
agctgagctcctcccctgcacggtccggtatcgccatttcgacccacgcctcccgaagattccttatgtgcttatgcaagtcaagctgaaaaggaggaagtggattcccgctcgatttatgttggtaatgtgaggtttatcaaccctttcctctgcctgatatatgtttattcaggcaaattggctcatttaccttacttgtggtccaattattatcttaatgttaaaaatttacttgtaagttagctgaaagtatgattgtgcttttgtttggccagtaagggtatcggaaagcttttcatttccaaatttatgtcagtgcatatcatgttgtgtgaaatgcgtttttatgtgcatgtaatcgcatgaaaaatca

SEQ ID NO: 199311 - DNA, 408 bp, Gossypium hirsutum
atctgatggttgtttttagttgataggggtgtcctggtggatgtaaatgtattaggcttggttggaaggcaatcccacattaaaattcccatcagtagtagccatatcgaattttctggggcttcaaaggtgaactagtaagagtactttccagaatctagtgagtatatttttctgtttgtcagtcggtcaaaatagcgccttttgttttagcttctctctgttaaggggaaagaaggaaagctgtaattgccatacaattgctgagcctccactgccttaaggatcccctctgctctgattatgtctccttttgggtttcaacagccaagcaggttgagtatctgatcaatgaaaagcacatctacctgctgccaagtggtcgaatcaacgtgagtggcttaacca

SEQ ID NO: 199312 - DNA, 403 bp, Gossypium hirsutum
atgttgggcccggcgcgatccgaaggagcctagagagcgcgggactagggtgcagagctcgggacgtggatcggagccggcgcgatgggcggagagcaggaggaggagcggttcgacggcatgttgctggccatggctcagcagcacgagggcggcgtgcaggagcttgtgaacaccttcttcagcttccttcgacgcaaaacagactttttcattggaggagaagaggggatggcagagaagcttatcacccagactttcagccaccacaatcagctggcacagaagacccggcgggagaagagagcccggcaggaggccgagcggcgggagaaggcagagcgggcggccaggctggccaaggaagccaagtcagagacctcatggccccagatcaaggagc

SEQ ID NO: 199313 - DNA, 559 bp, Gossypium hirsutum
  unsure (1)..(559): unsure at all n locations
gtaccttttcacatcaacgtgtaaatccgaagctaaaactgagctccaaaatcgcatgggaggtttagctttctgttttttttcctgggaaatccatttggacttcaattgagctttcaattacccgttgaactctaactatcgctacagcgtcctttcatggcttctcttgtttcaatttttgttctgctttttacctgttcgttctccaatttctcagccgaaagccggaaggagttgaaggacaaggaggatattcatttgagacatttggttcaatccaatgtaattgacccttcacgagtgatgcaactttcatggcggccaagggtctttcaatatagtggctttctaatggacgaggagtgcgacctccttatttctttgggccatggagcaaaagaaggaattttggggatcaatgatgatcgagctattcttgagacacgcaggcagcttgcaagttcagaaactttgctgaatacaaatgataaagttcttgcaatgattgaggaaagaatttcagcttggactttccttcctaaagagaatagtanat

SEQ ID NO: 199314 - DNA, 610 bp, Gossypium hirsutum
  unsure (1)..(610): unsure at all n locations
ggataatctaatctaatctaatcatcaggccatggctgttgttgagaatgcttcgaatcaagacacggcggctgcaacagtgacgtcaaacgaccaagatcagtcaaagcttcggtcaacaaccgatctgagcttacacgacaacgagcaagggttgtacaacaagatcggtggaaccaacggtggtggtggtaaagatgagcatggggatagtttcaaaagagatatgagagagttacaagaactgttctctaagcttaaccccatggctgaagagtttgtacctcactcgcttgttaacaatggactcaatggctgggtttcacactaacaatattgcttttcaaaacaacaataacaacatctcaaggaattgtaatgctaattgcaatggtggtggtaaaaggaagaaaaatttaggtcaagggaaacggaaatcgaacagcaggacaagtatggctcaagagaagaggtatccgtagactgttatgtgtctgaatcgaccccaggtcacggagacagcttgcccgttatttgtggtgtggcagtggtgactgtccaatgtgtgatctaacttgacttgtttgtttatcgattaccgtgagaagcn

SEQ ID NO: 199315 - DNA, 382 bp, Gossypium hirsutum
atgccaggggtcctcctacgctgtgctcccggcagcggcgctctgccaggtggggccggagctgcgaggaggggtcggcgccccgcgggcagctccattcccccctctccagtggacttggccgcagaatccgggtcccgggctcctggaacttgttccggccaggccgcggcaaggagatctctctggaccccattcctccccttctcgtcctcatggcggacaagaaaactggtgggggttttcggaggcacaggtgcccagggtggctccgtggcccgcacgctcctggaagatggaacattcaaggttcgagtggtgacccgaaaccctgggaagaaggcagcaaaggagctgaggctgcaaggtgcagaagtagtga

SEQ ID NO: 199316 - DNA, 728 bp, Gossypium hirsutum
ttccacgcgtccgtccgtaaaaaaaacccttgtttttctctttgaaagatgtgggcaagttcagagggaggtgcaccagaggttactctagaaacctctatgggtgccttcactgttgagctatattacaagcatgcacccagaacttgtcggaacttcattgaactttccaggagaggctattatgacaatgtcaaattccatagaattatcaaggttagttctttttaagttttctctcatttggtaattttttttctaatattagctttcttcaacctgtatctgattgttatgatgtaggattttatagttcagggctggagatccaactgggactggaaaaggtggagaatctatttatgggcctgtattcgatgatgagataaggtccgagttaaaacatactggagctggtattttatctatggctaatgcgggtccgaattcatatggaagtcagttcttcattactttatctccagcgccgtcattagatggtaaacacacaatatttgggagagtatgtaggggaatggaaattatcaagaggcttggtagtgtccaaaccgacaacaatgacaggcctattcatgatgtgaagatcctacggacttcagtcaaagactagcaccggagttcggaaactgcgaattgtagttctatgaaatgcccatcgtttccccggatattttgaaattggatcattcataaacgtgttatatacc

SEQ ID NO: 199317 - DNA, 671 bp, Gossypium hirsutum
gtttttattttttttattttctctctctgtgttatcaagaatggcggaaatatcgccatctcccatgtgcacttcaccagatattattattaatacccactgggtttaagttcccttgtttttctctgcccttttcatctccctaaacgatgtcgcttgtctatgataggaataatgaaaatagtagttcaatgagacgctcggggtttatccacgggatgcagtgtatctccgtctatgattcgccggaggagaaaagagatgataggttgcggttgctttcgacggaggaagaggaggaagagagagacgatgatgagtcggggtcttgcagttcgtcgtcgataggaaggaacagcgatgattccggtggatcaccatcggatgatgatgactcaccggaacctgaagtacaaagccagcttaaaggacctttggatacaatggatgctctacaggagattttgcctttgagaaaaggcatatccaagttttataatggcaaatcaaagtcctttacaagtttagccgatgcggctgctgtttcctctgttaaagattttgcaaagcctgaagatccctacaataggaaacgcaagaacttattagctcgcagttcttcattggacaagaaacccaacaatcttttgggaaacattggaactaaaata

SEQ ID NO: 199318 - DNA, 432 bp, Gossypium hirsutum
catttctaacgtattctttgaatattatttctataataatatcaaagccctccctggttttctctgattttccctcattttccgggaaaatcttttttcttcctcattccgctaatctcatttactttcttgattccttatttttattttcttctttttttttgtgtttcaagatctgcatggtgaagtccattttcgcagcataaattttgttcctttacatagaaaggaaaaatccaactttaaatctattaaaaatattcttctgaagggatcggcgtggggattttggaggttaagggtaaaacggaagtgctgctcccggttgtaattgagtcctctactgcttcttttgagggagtagccggggcctcggcctcggcgggtttaaagctcccacctttgaaactatcaaatctaccttttttttcg

SEQ ID NO: 199319 - DNA, 459 bp, Gossypium hirsutum
ctcatttcctttttttagccgcaacctatattttctcttcaaagacaccagcccaccgcaaggtacggtgaccggcgctcacaggcttcgaagcatggctcctttcagtcaccgacttccctctgaacttcgatttcgacgaagtgaaagggaatcgacggcctaaactcaaaggaagtgccatttttctttctttttttttttgaatgtaaatgatgaaaaatcggaggaaataaaaaatagagccgaaaatggagatcaccttcttaagaaattactttttttttttcaatctatgtgtattgcgtctgtattgctttctcttggggtgcgtaaccttacaactgatgaaatcccttggctttacagccgaaggggtaaaatgattgaaaaataaatcaaaatacaatattctttggtgtttttttttgattggttgctgcgcgttcgttctttttt

SEQ ID NO: 199320 - DNA, 507 bp, Gossypium hirsutum
cccgtttcaattcctctgctagggttttaagccccccattttgctcagtcatgcgaccaccgcgccaccaccgtgtttggtggccggtgatacaccgaaatgagtcgctcggccttgttccaagaggagctcgaaggcctggccttctttgagtcagaaggaaacgaggaaaatggatccccacccctttgtagtcccgacgacagaggggagacctccggcgacgcaacagcgaacgattcaggtggtgtcagatgcgcgtgaggcctgcgattggtggtgtatgctgtggccatttggtgaagagtggcggcagacaaggtaggggttagggttgctgaaacattttgcgtagttgggctattagggttagtttaggtaatgggctaacaggattttggtttgggcttgtttaataattgggttatttgtaaattaactgtttatattttttgaactctttttggtattttgggtctattgacttgggccaaaattgggcatttc

SEQ ID NO: 199321 - DNA, 498 bp, Gossypium hirsutum
gtagaatgaaaagagagggtattctggatatagaaatttcatttatctccgccaagttctaacagttctatatttttctacaacttcccttttctttgtatttctatcgacttagccaatgcttgctcactttcactcattcccctaatcactgcaaacaggatcgcttcttcttctccgatcaccggtgtctgctcagcgccttattttgatcggataagttacggttccaacgttatatctctgtctgaattgcttttttcctctccttttttttaaattttattccccaaaaaatggcgtctgaggatgtgaaaagaagcgagtcggcggtctcgacgatcgtgaatctggcggaagaagcgaagatagccagcgaaggagttaaggcgccgagccatgcgctgcttagtatttgcaagtctcttgttgctggtggtgtcgcccgtggagtgtcacgtagtgctggtgctcccctagaaagattaaaaaatttac

SEQ ID NO: 199322 - DNA, 581 bp, Gossypium hirsutum
  unsure (1)..(581): unsure at all n locations
tcgtccacgcgtncgtttcagtttcagtttgagggaaccattttataattcgactgtccagagagttggaaccatgtctttagtaaggtctgcggaaccagctactgcgtcatgtagaaatacgaagctctattcaatacaggatagcagtgacagtactggcatggccattcgaatgtttggttctgataagcataagcctgtttatgttatggattcttacagcagcgagagctacgagaagtacttccttgattctcctacagatgagcttatacattcatctagttctggaatttctggaagttcggttcgcctacaagatgtctcttcttgccagataagagattactcggaaatccaaagcccagatacgctagactctgattcggataagatgaaactgaagcttcaagaactggagagagctctgcttgctgataatgacgttgatggggatgatgacatgtttggcactggtctaagcatggaagtaaatggtgagtggtctgatcctatcaagatgggttctcatcacgactcgccaaaggagtcatcatcctcgggtacttatctcgata

SEQ ID NO: 199323 - DNA, 739 bp, Gossypium hirsutum
  unsure (1)..(739): unsure at all n locations
cccacgcgtccgatttcaagctttgttatagagaccgaccgaaaagaagactaatagaagattttagattcttctttcttacactttactttctgtttcgcattgattttctctggaaatatacaaatcttattcctccattctttttttccagatccaaattccaatatcaatttcgtagtttttaagatattggaaaaagatggaggcatcgtcgacgagtcaacctgagtttgactatttgtttaagttgttactaataggggattcgggtgtggggaagagtactctgctcttgagttttacttccgatacctttgaggaactcaatcctaccattggtgtggattttaaggtgaagcacgttaccattggagggaaaaagctgaagcttgccatctgggacactgctggacaggaaagatttaaaacgctaacaagctcatactacagaggagcacaagggataattatggtttatgatgtaactcggcgagacacatttacagatttatctgacgtatgggctaaagaaatcgatctgtactcaaccaatcaggactgcatcaagatgcttgttggcaataaagttgataaggaaagtgaaagagtggtcagcaaaaaagagggcatcgacttcgctcgggaatacggatgccttttcattgagtgcagtgcaaaaacacgagtaaatgtggaaaaatgcttcgaagagcttgtcttanagatattggaaact

SEQ ID NO: 199324 - DNA, 424 bp, Gossypium hirsutum
gccatattgaactggctaagttgcattcctcctcgtataggtggtccacttgcgattttaaatccatcagatcctccagaaaggcttgtggagtacttacctgaaaattcgtgtgatcctcgggccgctatttctggtgctttagatagtagtggcaactggaagggaggtatttttgacagggatagctttgtggagacgcttgaaggttgggctagaacagttgtgacaggaagggcaaagcttggaggaatccctgtaggaatagttgcagttgagacacagacggtgatgcaggttatccctgctgatccaggacaacttgattcccatgagagagttgtccctcaagctggacaggtatggtttccagattctgctacaaagacagctcaggcaataatggatttcaatagggaagagc

SEQ ID NO: 199325 - DNA, 591 bp, Gossypium hirsutum
gaggaagtgaaaatgagtggggcgagactatgcacattacttgcggatttgggatacgaaggggcagagaaattggaccccgatagcttcgaatggcctttccaatacgacgacacccgcaccattcttgactggatctgctcctccctccgcccttccaatgtcctctccctctctcaactctccctgtatgagcaaatcgtacaagaagggaagctgttggagggggaagacttggactttgcttatgatagcttttcggccttctcgtcgaggagggaccaccaccacgcggtttttggagctgaacagggattgaaacatcttgcggatgcgactggggcatgtggagctgagccttgtgagctacagaaacaacttgggcgtatgcggtctcagttgtacatgctctcggtcacgatgcatcttatttggctcgaagaacaatttatgttgcacctgccgagagggaactcgtggtggtgtcaccgacgtttattatctgggaccgaatggctggaataagctctcaggcgatgaggttggagaacttccctctggataccttccggttatgcctacctcggtatc

SEQ ID NO: 199326 - DNA, 1076 bp, Gossypium hirsutum
  unsure (1)..(1076): unsure at all n locations
tcgagctgttggagggggaagacttggactttgcttatgatagcatttcggccttctcgtcgaggagggacaaccaggaggcggtttttggagctgaagaaggattgaaagatattagggatgcaactgtagcatataaagctgaagctttagagctacagaaacaacttaggcatttgcagtctcagtttgacatgcttacaggtcaggcttcagctttgatccaaggcagacgagcacgggttgcagcaacatctgctgctaatggacaccttacaaccatagatgccggtctctcgggaaggaacttgcagatgaacgaagttcttggaaaaatagcatctacagcacaagagctggcgcattaccattctggagatgaggaaggcatctacttagcttattctgacttccatccgtacttggttggagattcatcctgcataatggagttaaatcagtggtttgctaagcaactagacacggttccttttcgattggttgctgaagagggtaaatcaaaatgctcctgggttagtcttgatgatgtctcaaacagcttagtaagagcagatctagaaaagtcccatcatcaacgtgtatctgaattgcagaggcttcgctccatattcggaacaagtgaaagacaatgggtagaagcccaggttgagaatgccaagcagcaagccattctcatggcgcttaaatctcaaatatcatcagatgaagctcatattcatcttgatcttcattcccttagaagaaagcacgctgaattggtgggagaggtttcaaacctttatcacaaagaagagaagtttttaactgagactattccagatctttgctgggagctggcgcaactccaggacacatacattttgcaaggtgattatgatctaaaggttatgcggcaagagttctatattagcagacaaaaggcgtttatcaatcatctgatcaatcatcttgcaaggcatcagctcttaaaaatagcttgtcaattggaaaagaagaatatgcttggagcatattcattgcttanagttatcgagtcagagcttcaggcatacctg

SEQ ID NO: 199327 - DNA, 646 bp, Gossypium hirsutum
tcggtgagtcatagattcttcgatcgtaaaccccaaaatggtgctgattgaaccccactacgttgatgaacaacaagaacaaaaagctacgaatgccactctaacatcatctgaaacgacatccgcttccgccgcctcttcaaatgtgaacggagaagacgccgcctccgatggattcgaaacagcgagcgagcgtgacgtcgatgacgacgaagaggaacaccacgtcaataatcaacagccatccgaacagaaagcttccgattcttatcaagatgccttaaacgacgagcaattgaaagagaaagctttggcacaagcaaatgatgcgaaaatggaaggaaataaattgtttggaaacggacaattcgaggaggcattgttacagtatgagattgctttgcaaattacagcggagatgcctactgccgttgaacttcgttccgtttgtcattcgaatcgagctgcttgctttctgaaacaggggaaatatgaggataccatcaaggaatgtacgaaagcattggatcttaatccttcttatataaaagctcttgttagacgaggagaagctcatgaaaagcttcaaaattttgaagaagctattgctgatatgaagaagatattggaatttgatccttctaac

SEQ ID NO: 199328 - DNA, 891 bp, Gossypium hirsutum
  unsure (1)..(891): unsure at all n locations
cggacgcgtgggcggacgcgtggggttatgtgagagtgctgataatgaattgccaattagaagcagcaggtcacagggcatgaatttatcagtttggggtagaatcggtagctccagaagtagaatagaagcaaaagataaaattgatcatttaccctcagaccatcttgagaatgaaaccaagaaggaacaagaaccatttcctagctcacaggacacttcctgtcaagttaagcggatctgcagtgaggacgatggctccaaagttatggatttgtcattgaagtcacagatttattcgcatagtcgcagaaaacctactcaaaaggcactccgtacactgtttgtcaatgggattccccagaaatgcaacaaaagagaggctcttctgtctcattttcgtaaatttggagaggttgttgacatttatattccacaaaatagcgaacgggcattcatccagttttcaaggagggaagaggcagaagctgctcttaaggcacctgatgctgtantgggtaaccgctttattaacttctggtgggctaatagggatagcatacctgatatgnngcgtgaacagtggctgnccagttctccaaagtggtctaacagcttctgggtgttccacctanacctgttgctaataaaggaaaggataatctncaatgtattgctcagagaagtagtggtngtccatgcgactgatgtgccttctttgaaatccctanatctggtatacgaatggtccccagctcacctctgntgcaannaattagagtcttggagcaatgaagaggactacgcagaacangaaatctggacagaagcgatgacttcgcgcagttgacaactgagaacatcagtatgtcaggtgatcactgctgaccn

SEQ ID NO: 199329 - DNA, 428 bp, Gossypium hirsutum
atttcctccacctccactcctctcctatcccaggttatttctaaatatgtaactggttaattttaattttaattgcagaaaatatttagtactcacaaaattaactacatttaccgcaatttcagcatttcgtcgttaatcctattttcttgtccgatcccatcccatccacactcttcgctctctttcctttaatctgttttcattttctgtcatttgcaaattgaatttttggttcttgaattctaggtttagggttttgagagatggggcaacagacgttgatctacagctttgtggctcgtggcacggtgatcctcgctgagtataccgagttcaccggtaacttcacaagcattgccggtcaatgtctccagaagctccctacttccaacaacaaaattacctacaattgcgatggccacacc

SEQ ID NO: 199330 - DNA, 621 bp, Gossypium hirsutum
tctggttaattttgccggctgaaaccatctagtgataataaaacaaaaaaccgagcgggtctgttttaagcaagagattcttttgcagatagagccatttggtgggtttatttattttgtgaattgggtgattgtatttattgcaggattttgtttaaagagagatccaaaaatggcagggaaaatatcggctgcatcagctcgggctcacactagaaaatctaagcaaaacacttccttcaagcttctctcagggatattcacaaagacactattggtcttgtttgtgggagctttggcatgggcttatcaggccattcagccgccgccgcccaagacttgtggctctcctgatggtccacccgtcaccgcgtctagaataaagctcagggatggacggcacttggcctacaaagagcatggtgttccactaggggcagcaaagtataaaatcgtcaaagtccatggatttgattctcgtaggcttgatgctgttcctctgtccccggaactcgttgaaaggttagggatctatggtgcgtctttcgacagaccacgctactgagagagtgatcctactccgaaacgaacagtgatgagtatggctatagatattgaaga

SEQ ID NO: 199331 - DNA, 892 bp, Gossypium hirsutum
gcctatttcttcgtctcacctgaccccttatcgtgttgtcatcattctccgtctcatcattttgggctttttcttgcaatatcgtgccacacatcccgtgaaagatgcatatccattgtggctaacatctgttatctgtgagatttggtttgctttatcttggcttctagatcagtttccaaaatggtatcccattaaccgtgagacctaccttgacaggctagctttgagatatgaccgggatggggaaccatcacagctatcccctgtagatgtttttgtcagtacagtggatccactcaaagagcctccacttgtcacagcaaacactgtcttgtcaatccttgcagtggattacccagtggacaaagtagcttgctatgtttctgatgatggttcagctatgctgacttttgaagcccgctctgaaactgctgagtttgctaggaagtgggtgcctttctgcaagaagcacagtatagagcctagagctcctgagttttattttgctcaaaagattgattatctaaaggacaagataaagccttcttttgtcaaggagcgtcgtgcaatgaagagagaatatgaagaattcaaggtgcggatcaatgcccttgttgccaaagctcagaaaatgcctgaagaaggttggacaatgcaggatggaacgccatggcctggaaacaacccaagagatcatccaggaatgatacaggtgtttctaggtcatagtggggggcttgatactgatggaaatgagctacctcgccttatctatgtttctcgtgagaagcgacctggcttccaacaccacaaaaaagctggagccatgaatgctttgattcgagtttcagctgttcttaccaatggggcatatttgttgaatgtcgat

SEQ ID NO: 199332 - DNA, 826 bp, Gossypium hirsutum
ccagcgtctattgaggcttcactcctttttaaagggacaaatattcagtgtacccaaactgagctttatctcttttgaaggacgaattagcattccaaatccaattcaggctccaactagcttgtggtgtaataacagagattgttgaaggcgaaactttggttgataaggtagttcgattcctctcatctcatctgcctgcgctttaaatcattaaaaaatggcttcatattccaaatttccaatatgtttccatttatcaaagcccttcctttccccttctaagccctctaagttttcattctttcacaacacatccatctctttccaaaatatccctactaaatccccacctccacttcaatcatcttcctcgagttccacccagctccagcccatagaagaactccctccaaagctccaagaaataatcaagcttttccaatctgttgaagaacccaaagccaagtacgagcagctgatgttttatggaaaaaacttgaatccacttgatacacagttcaaaactaaggagaacaaagttgagggctgtgtttctcaggtttgggtcagggcttatctcgataaaaataaaaatgttgtttaccaagctgattctgattctgttttaactaaagggcttgctgctttgcttgttaatggattgtctggaaggcctgtccaaaaagttttgagggttttctcctgattttgcagtgctccttgggctgcaacagagcttgacaccttcaaagaataatgggttcttgaacatgttgaagttgatgcaaaggaaagcacttgaactgcttattgaagctgaaaa

SEQ ID NO: 199333 - DNA, 426 bp, Gossypium hirsutum
cccacgcgtccgagcaatgggacctactgttggccaaatgtatcctcctggcgctccacattttggacagcaactcttctatggtcaaggccctcctgctatgatttcaccccaacctggatttggatatcagcagcaactagttcctgggatgatgccaaactttttcatgccaatgcttcagcctgggcagcaaaatcagcgccaaggaggcagacgatccggagggggcccaatgcaacaaacacatcaaccacttcccttcatgcagccacagatgattcctaagggccatggctatcgttatcccccaggtcgcaacatgcccgatgttcctggacgtgtgcttcctgttccttacaatgtaggaggaatgccattccgagatgctgcattttcacaacccatggcaactggagctctcgc

SEQ ID NO: 199334 - DNA, 326 bp, Gossypium hirsutum
  unsure (1)..(326): unsure at all n locations
cttggttcctgtagatcttgttattgatcattcagttcangttgatgtggcaagatcggaaaatgcaatgcaagcaaacatggaacgtgaattccaacggaacaaagaaagatttgctttcctcaagtggggttctaatgcatttgataacatgcttgttgtcccccccggatcaggaatcgtacatcaggtcaatttagagtatcttggaagagtcgctttcaacacaaatggcgtgctttaccctgatagcgttggttgaacagattctcatacaactatcattgatagtttgggtgttgctagctaacgagcttggggggtag

SEQ ID NO: 199335 - DNA, 472 bp, Gossypium hirsutum
  unsure (1)..(472): unsure at all n locations
tctcttaattggagagcacattgactatgagagtgatactcagtgttgcctatggcggtcagccttgacacaattgtggcattccgtaaccacaatgaaggggtggctgaaaagctcctaaaaatggctaaggtccatgatatgtgtcctacctgtgcttatcctgctgatcctaacccggaaattgacttgaagaatcataaatggggccactatttcatttgtgggtataagggtttttatgaatatgccaagtcaaaaggagtgaatgtaggtaagccagtgggccttgatgtccttgttgatggaacagttcctacaggttctggtctatcaagctctgcagctttagtttgctcagctacaattgctattatggctgcttttggtgttaacttctcaaagaaagaaattgcccaactaacatgtatttgtgaacaacatatnggaacacagtcaggtggaatggacc

SEQ ID NO: 199336 - DNA, 774 bp, Gossypium hirsutum
  unsure (1)..(774): unsure at all n locations
gaaagctcggccgcctgcacgtgcccgtacttactggtcggtcgactcatccggtccttttatgcgtacggaatggaaggggaagagattcacgctgctcctaataaccatcctttcgccgtcggcgatgagagctactcgaattacggctcttactccaacttcaccgatgaccagctgtttaccggggacgggggcgaagtggcggtagatgacgtcactacctctgctgatatcttcggattcggatcctctgatccaactcctgcctactcgcaatctccattcggtactgcgattcctgttgagaacggaaatggaaccaatggatttgatcttggaaacgatagcgttttcgcttctgatggaccggtgcttcctcctcctactgagatggagcctgaggaaggcttcgttcttcgcgagtggcggcgtcaaaatgcgattctgctctaggaaaaggagaagaaggagaaagagttgatgagccacatagtcgaagaagccgaatgtttaaacgggctttctatgagaaaagggagaaaacaattgagaccaacaaaactaattacagaggaagagaaaagctgtacgtggctaaccaagagaagttccataagactgcggaccaacaatactggacagcattagcagaactcatttctcgcgaggtccctaatatcgaaaagaaaagaggaagaaagacaanagattaccctcattactggcttcatgaccaaaacccgaaaacactgtctttattatcgggccttt

SEQ ID NO: 199337 - DNA, 528 bp, Gossypium hirsutum
tttacgcttgggcggacgcgtgggtgaaaatgggttggaatggagattgctactacaaggggttgccctgacaagcaagtgtcatggtttccattaaacctcagagtattagactgggaaaatacccacagatttccatgtacgttgagtgtccggaaactagtgatgagtaatcaaaggttggcttatttgagtatagattctggtagaaagcaacataggggccctattgtctgtaagacatatgccatccatgctggtttggaggaatcctcatctctacagtcagaagatccttttactgaagatgagcatacttccgaagattcaccagagcagcttcttgctaaaccactaagcagtgaagagcagctgaaatccctactggctgactctgagagggcaaagctcaccaaaaaactaagtgaagctaaccagcaaaaccgcttcctaaaacgacagttacatatgaaagaggaagcactagtcaacttcaaaagtgaacttgctgtcatggaactagaaatc

SEQ ID NO: 199338 - DNA, 445 bp, Gossypium hirsutum
cccacgcgtccgcccacgcgtccgtgaaaaactaaggtgatttcatatttattttttcgtgttctgatttagtttttttttctttgttcctacatatagatttttcacagaaaaataaggagaaaatgacttaccttaatgctggctccttcatgtctttgctggcttcgtcgtaattggagcctaagccagaatcttgaagcttctgagtggactcgtggtcgaacaaggccagattatgccttcatgcgatgttcatttgccgaatatggggatagatcgacagttgaaagatgccttaagttcggtcgaatgaataaagaggaataagctttaggtttttttattttttatttgcttttaaggggatgagtgttaattttagggttttcttttcctttcttttgatctggtgttaacaaagtgaaacagcatcgtttggaaa

SEQ ID NO: 199339 - DNA, 466 bp, Gossypium hirsutum
ctcttttttaatctcttcccttcatttctttcaccatttccattgattttttgaacggtggcggcaacttccttaaccctctcatgattcctctcaccggccgccgccatttcattatccagcaccaccaagctttcctctaaatcccttcctttaaagttctcctccgtttcttccctttccttcaacctccaccgccgccgcgtttcaaaacccatttccttttccaccaaaacaacccaaatctccgccgctatctccggcggagataagcttcctgacgcaacactttcctacttcgattccgatggtgaactccaaaccacgacgatctcttcccttaccgccggcaaaaaagccgtcatcttcgctgtccccggtgcttttacccccacttgttcccagaaacaccttcccgggtttcgtgagaaatctggggaactcaaagccaaaggggttaacacca

SEQ ID NO: 199340 - DNA, 485 bp, Gossypium hirsutum
aaaaaaaaaaaaaaagagctaatcagattttctcgccggaatattccttttctattttcaggtgagtgaaacaaaagaagggttaaattctaatacaaaccatcgtttgtgtttgtctgttgtcatgcacctcattcgtgagaatctatttattggaaacataggggatgctgcacaagttcttcaaaatggtagctcggagatcacgcacattctatcagttttgagctctgcgtcaatatcgtttttctctgaatggcgtagtggtatcacaatcccagccgaggaaatcaaaaaggtttttgtaggtgggtctggtgatgctgctgcagctcctgagggtcattccgatgatggttctaagagttgtttgtcaccccagaagctgttgtacttgttggaatatgctgggaaggatttaaagctggtgagaatggcggtgccgattagagatatggagagcgagaatttgttggattacctag

SEQ ID NO: 199341 - DNA, 421 bp, Gossypium hirsutum
gtggaaaaagagaaagtaaaacagtccactcagtgcataaatctcttcttttttgccactttctcgaacaagagaggaatctgtgaaatttttttaggttatgggtaagatatggcgatgatgttccagagaaaattgttgaggagaacctttggggaaggcaaagcaatactcaacttcaattctaaccctgtactttctccctgcacttccttctctaccgttacttccgctgccgctacaccattccacaatgcgccacgtcagcttccaccgttcgattaccagccgacaccgtacaacggaccgtgcgccgatcaaatgcttgagaagcggaagaagttcttgggcccctctctcttctactactaccaaaagcctatgaatattgttgaaggaaaaatgcaatatttgtatgatg

SEQ ID NO: 199342 - DNA, 605 bp, Gossypium hirsutum
ttaatatctctctttttcttcttcatttttcaacatcaccttctcaagcgccgccgccgcctactcttccgccggcgggaaatatccattcccttttctttcccttccctctcctcccttttattaaaaaaagaagaaaaaaaagtcaccaaaacaaaacaaagtttggttctttaggaaaggtttttttcaaaagcacttgagattttaccatatcatttattatcacaattattttactcgttagggtttgtttgattaataacaagaggagagggaagaaagaagaaaaaaacccaaaaaaaagaaagagaaggaaagagaaaaaagagtttttttggttgggtttttagctgttgttttagggtttacaaagatggcgcatgttcaagttcagggacacagtgggggcgttaacaatggatctggtggagccaataaccaggtttgtaacctcgctatatgttggggatttggatccaagtgtgaccgagactcagctttatgagtactttaaccatattggtcagctgcttacggttcggttatgcaccgatttgtcgacccggaggtcccttggttatggttatgtcaactatggcaat

SEQ ID NO: 199343 - DNA, 431 bp, Gossypium hirsutum
cccacgcgtccgaaaaggttaaacaaccaaattcggccttccgaaagagttaaacccctaaaaacacttccttcttccatctctcttctcccttaaacaacaagcttaaccctagcaacaatggcatccatgctgcaaccccaaatcattcttttgaaagaagggacggacacatcacaggggaaggcgcagctcgtcagcaacataaacgcttgcaccgcagtggctgatgtggttagaacgaccctgggtcccaggggcatggacaagctcatccacgatgacaaaggaaatgtcaccatttccaacgatggcgccaccatcatgaagctcctcgatattgtccatcctgccgccaagatccttgttgatatcgccaagtctcaggactcagaggttggtgatggtactacaactgttgtactgctagc

SEQ ID NO: 199344 - DNA, 413 bp, Gossypium hirsutum
cttcgtttaaatctttttgggagcaaataataacaaaaatggctgagttgaaatctgacaatttgcttgagatgatgaagtttcatttgggtactgatgctggtaaagagcttactaagaagattggtcttgtttaccaactcaatattgcccccaagaaattgggggttgatgaggttacttacgttgttgatctcaagaaaggagatgttatcaaaggtgaatatgaagggggaaagcctgatgttatattttcattcaaggatgatgattttcttaagattgccactgggaagatgaatccccaggttgcttttatgaggggtttaatgaagattaaggggagcttgagtttagctcagaaattcactcctgatattttcccaaagcctgctaagatgtgaactaagatg

SEQ ID NO: 199345 - DNA, 387 bp, Gossypium hirsutum
caccctcgtcttgattttttcatcaatggccaagtacggcgaaggcgacaagcgctggatcgtggaggaaagacccgacggtgctaacgtccacaactggcactgggctgaaaccgattgcctcccctggtcgaaaatgttcttcaccaaatcgctttcggatctcaccatccttgacggccaaggcaatctccgcatcaagaccaagaaggtcgaaaaggtcgacggcgaagcctatgttaatattcgcaagggtaaagtcattcccggatatgaaatcagtttgagtgtatcctgggaaggcgaagccaaagatggggaagggaagacgctgttgaaaagctgaggtaacctcgagaatccgtacatttcggatgaaaatgctga

SEQ ID NO: 199346 - DNA, 450 bp, Gossypium hirsutum
taaaccttcctcatttcttgttcttatgctaagagtacaaggtttatcaaaatgagctgcaatggctgtagaattcttcgaaaaggttgcagtgttaattgcatgcttagacaaagcttacaatgtatagagaacccacaagctcaagcacacgccaccgtttttgttgctaagttctttggccgtgccggacttatgtcatttctctcctccgtcgccagtcctcaaagacctgctttgtttcagtcgcttttgtttgaagcagtgggacgggcaattaatccggtgagtggagccggggggttgttatggacagggaactggaacgtctgtcagtcggcggtacatacggtgctccaaggcggcacgttgcagccgttgcctgaatttagtggtggggtttcaggatcggattttgaggatgttggagaaacggtcggtgttggtggc

SEQ ID NO: 199347 - DNA, 528 bp, Gossypium hirsutum
  unsure (1)..(528): unsure at all n locations
tcggttcagtcgaagcatttgttgtgcaaagttgaatcaactttcaacattggaaaccctcttctctaacctaaagctaaggccttatgctacacctctcattggtccattacagacttgtgaatccagaatttacagcagggagaaggctgaatatgcgaatgtgaattgggatgaacttggatttgctctaactaagactgattatatgtacgtcatgaatttcactgaagaggaacaaaagttcttcaatggaaccttaactcgctttggcaacattgagatgtgcccttcatctggaatattaaactatggccaggggttattcgagggactaaaggcgtataggaaggaagacgaggggattctgctcttccgaccccaagagaatgctctgaggatgaagatcggtgcggatcgaatgtgcatgccatcaccaaccggtgaccaattcatagatgctngcaaaaagactgtgctggccaacaagagatgggtacctcctcatgggagaggatcattatatat

SEQ ID NO: 199348 - DNA, 718 bp, Gossypium hirsutum
  unsure (1)..(718): unsure at all n locations
acctacgcattatgatttatattggaaattttggattctcgggaggatccagcagcaggagagggagggaaaaaaaaatctttggcctttgtttaacaaatctagctcgctagaattgaacggcagccactaaaaaaatacgttcggtgattaatagattttttttactcaagaaatggcgggaagagctcaaattccgacaagtaattcagcactaattgccatgattgctgatgaggatacagtaactggatttttgatggctggagttggaaatgtggatttaaggagaaaaacaaactatctaatcgttgattcaaaaacaacagtgaaagcaattgaagatacattcaaagactacaccacaagggaggatattgcaattattttgatcagtcaatatgttgcaaacatgataaggtttctagttgatagctacaataagccggttactgcaattctggaaatcccttccaaagatcatccttatgaccctgctcatgattccgttctctcccgtgtgaagtatctcttttctgctgaatccgttgcctccggaaaggctttatgaataagttccccccggtttcctaactcaaatccccattattattatagcacaaccaatgtttctcccaatgctctggcatatcttcataccccaccatgactgtactttcgctgtgattgatctttccttctcntgcagtccgagtat

SEQ ID NO: 199349 - DNA, 369 bp, Gossypium hirsutum
tatctatccgcccttcctatttttcttaagactgtttcttacatacctgtgtttcaccactcggattatctcttcggcaacgtcttcctggtggtggaagtggtgaacactgacggctaagtaacaagttagcaaaatgggacctggtggaccgggaggagggccgggaggaccaggtggaccgggaggatggggaggaggacctggtggttggggtcctggccctggaggacctggcggatttgggcccggaggtcctggttggggtccgggacctggaggtccctggggccctggatttggaggtcctggtttttggcctggtgggttctttggcggctttgcagatggtttgtgcaatatgatatc

SEQ ID NO: 199350 - DNA, 538 bp, Gossypium hirsutum
aaaagagggaaggaaggtaggaaggaaggaaggaaagaattaataaaataaaataaaagaaaatcgcagatcagacagagaaaaaccctaacctaaatctaaatgggtaagaagaagaaaagagttccgtcaaaggtatggtgttactattgcgacagggaattcgatgacgagaagatcctggtgcagcaccagaaagccaagcacttcaagtgccatgtctgccacaagaagctctccaccgccggtggtatggccatccacgttcttcaggttcacaaggagtccgtcaccaaggttcctaatgcaaaacctggcagagaatcgactgacattgaaatatacggaatgcaaggaatcccgcctgatgtgctggctgctcactatggagaagaagaagaagaagctccatcaaaagcggccaaactggatatcccatctactcagcttgtgggaggattgatgccagggccacttggtgttggatatcctcctcagtcaactttaggagcagtgcagccaatgtataatgctgcag

SEQ ID NO: 199351 - DNA, 666 bp, Gossypium hirsutum
  unsure (1)..(666): unsure at all n locations
cggccgcgtcgaccttttttccttcaccagtttagcttttgaatggcttctacagttaaacccattttcatcctccttgtattcatttcattccatttctcaccgttagcatcgaaacccaatgacccaacaccatcaacatggcctcttcaattccactccgttctcttcatgaacaacagtggcactctccagaaagttgatctctggtacgactggcctaatggccgcaatttcaacattattcagaaccagctcggtaagctcctttacgaccttgaatgggacaatggcacttcgtttatctacactctggattccaacaaagaatgcagaatcttgcactttgatgtcggtattctccgtcctaattggcttgatggagctaattacttgggacaacaacaaaaagatgggttcctttgcaatgtttgggagaaagtcgacttcatttggtactatgaagatgtcgtcactaagagacctgttttctgggctttctacactgggtacactgctcatgtaatgacatttgaagtgggagctgttcttgaggaatctaaatggcaagcgcctgtttattgttttcaggaagctgatnggaaaaagaantcaactttgaatgaatctttgggatcaaatgatctntctcatgggaagctgaag

SEQ ID NO: 199352 - DNA, 436 bp, Gossypium hirsutum
cccactcgtccggccgtatccacgagaagcgacttttggacctcaatctctgtctttgtgtttctctgttttgtattattttttcctttgtgtcatcaatggcgagcagatactgggtggtgtctcttccggttcagaactcagcctccacttggtatatctttcaggatcaattctccatgcattccttcgtctctcctctctaccgattcattttacccaatctccgtgttggtactcctgattcccttcttgctctcagtgatgatctcttgaaatccaatacctttatcgaaggagtttcccacaagatcaggaggcagatcgaggaactggagagggcatctggcttggaaaccaatgctctcactgttgatggagtgcccgttgattcttatctaaccaggtttgtttgggatgaagcaaagtacccaac

SEQ ID NO: 199353 - DNA, 529 bp, Gossypium hirsutum
atctgattgctaacatttcgttgggtatggtttgggatgtcaactaagtagaagaaaacatcagaaagaagaaaaaaaaatgggaattttggcaggcataggggttttgttgccattcccattttactacttgttatggacatatccacagtcatgggtgaacctttgtgggaaaggaagggacccatcaaaggtgatggcccttgtctcccatttcatcaagctaattcagttcgtttctctcttttccgtttcttccttctcttggcctccccctctttacttttggcccctctttgccttcggtcagttcctcaacttcagggtgtatcaattgcttggtgaatctggaacttattacggtgtacgctttggaaagaatattccatgggtaagggaattcccttttgggttcattaaagatccacagtatgttgggagcatcatgagtcttgtagcttgtctatcttgggtaccgtttcaatatattctctttggtcgttgggctatctattatgatccacatcga

SEQ ID NO: 199354 - DNA, 419 bp, Gossypium hirsutum
cccacgcgtccgatttttagagaactatcttctttatttgccgaaacttcaaacaaagggaggaatgtgtttttggattggacgtgctcaaagaacaaagataaaaacttgaatgagatcatgacttggcttgagtggatcttatctcacacgcttttgcgtactgctgagagcaacccacaaggtcttgataatttctggcttaagcaaggggcagcattattgctaagcttaatgcagagctcacaagtggatgttcaagaaagggcagccactggactagcaacttttgttgttattgatgatgaaaacgcaagcatagatcgtggaagggctgaagcagttatgcgagatggtggcattcggcttcttctgaacctagcgaagtcttggcatgaaggacttcaatcggaggctgc

SEQ ID NO: 199355 - DNA, 592 bp, Gossypium hirsutum
cgatctcctcagatctgctctggaatccacaccatctgaatagtcaatatgggaggagggttcagagtactgcatctggttaggccatttctttcatttctgcctgaggttcagagtgctgacaggaaaattccttttagagagaaggtcatctgcactgtcgtctccctcttcatctttttggtgtgcagtcagcttccactatatggaatacactctacgacaggtgctgatcctttctattggatgcgtgttatccttgcatcaaaccgtggaactgttatggaacttggtattacccccattgtgacatctggattggtgatgcaactcctggctggttcaaaaatcatcgaggtggacaacagtgttcgtgaggatcgagcactcctaaatggggctcaaaagttgttgggcatcctgattgctgtcggtgaggcagtggcatatgtactgtcaggtatgtatggcagtgtcagtcagcttggtgttgggaatgctatcctaattattattcaactttgctttgctggaatcattgtgatctgcctggatgaacttctccaaaagggatatggtttgggctctgggt

SEQ ID NO: 199356 - DNA, 609 bp, Gossypium hirsutum
  unsure (1)..(609): unsure at all n locations
attttcagaacattgaagatctaaacattttttcttctttctgagttgaatccaaagatgggtttttgtttctgggtttgttttatttgtttgttaaacttctacagcttgagttttgtaagttcacaagctgatgcaagtgctgaagggactgttttcattgatggaaaagctccgattggtagaatagatgatgatttcatttgtgctactttggattggtggcctcctgagaaatgtgattatgggacatgcagttggggccttgctgggcttctcaatctggatcttaataaaaacttattcttgaatgccgttaaagctttttcaccattgaagattaggttgggcggcacattacaggacaaagtcatatatgacactgatgacaatcaactaccctgcacttcatttgtcaaaaacacttctgagatgtttggttttacacaaggatgtttgccaatgaataaatgggatgaccttaattccttctttcaaaaagcaggagctaaggttatttttggattaaatgcacttgctggtcgaactatancccctgatggttcagccgtaggtgcttggaactacaccaatgccgaatcttttata

SEQ ID NO: 199357 - DNA, 579 bp, Gossypium hirsutum
ttatctctcattgaaaaaattgactaaaaagcttcaatttttttttcttagttttgcttctgtttctctttgaattcccaaatgggtttgtgggaagcttttctcaattggcttcgaagcctgtttttcaagcaggaaatggagctatctttgatcggacttcagaacgcgggaaaaacctcactagtaaatgttgttgcaactggtggatatagcgaagatatgatccctacggtcggattcaacatgaggaaagtgacaaaaggaaatgttacgataaagttatgggatctcggaggtcaacctaggtttcgtaccatgtgggaacgatactgccgtgcggtttcggcaattgtttacgtggtggatgccgctgatcccgataacttgagcatctcaagaagtgagcttcatgatttgttgagtaaaccctcacttactggtatccctctcctgctgttaggcatcaaaatcgacaagccagaagctttgtcaaaacacgctttaactgaagatatgggactcaagtcaattacagatatagaaatatgctgcttcatgatatcatgcaagaactcc

SEQ ID NO: 199358 - DNA, 975 bp, Gossypium hirsutum
  unsure (1)..(975): unsure at all n locations
taatttttctttttcttttattttcttctctgtcccatccctcccccttctagaaaacagaaaagtaaatcaatcactccaaaatttatctcatctgcaggtactgttatatgatgctgtgggaggcagggtaccgaatgctgtagagtaataaagaagttgctatttcttctaggaaataattgcaaggaaagaaaatgaagagtaacatgtccaagattaatatgtgcaacatcaacatgtacaacatggatatgttgcaacattgaacatgtacaaggattgacacttaactgcagttctagggatctcaacttttaggagactgttcctgtagttcgggagaaggttagactttctattcgtttttacggcagaactattggttttaaacctgttgatagggattgatctaggcagaaatggaagcaccgaacgccatgctattggatagtaagcctttggttctacatggcatgaagaggaagcgggaaacacagcatacatcatattttcctggggcctcgcatgtgataccaccactgtttccagcttgtgtttagctttccagaaacatgacaagcgcaggagattggaggattgngaagcaganttgtgagttgtggttatacttanaaagatctttgntactttgctattcanattttaagaaaacaggcattccaagcgcatnatgttctatgagaaagggtgatggactgattttcaaacgatcttattgcctcaatcggaaagatctcgtcacnagaagccagctatgagggtgagatagacagtcaatcttttgtgctagatttcttgcatatgttcgattgagctgaaactgcatgagactccaatgctggattgttaaccaagtgtgtctttcctgattttactgtaagataccatccggctgaaanatatggcaatacannaatcatgtatgattagccntcttgacactctttgaag

SEQ ID NO: 199359 - DNA, 654 bp, Gossypium hirsutum
cccacgcgtccgctctttccttgtttttcatcgccgcttggcggacttctccacgttctttctttccctatttatactgtttccctcactttctttccttccaaacactcttctttccttaatctaacatggccttaactacccaaacttgtttccttcaaaatccattccttccttcgccttctctttcccagccttctgcatttcctgctccggcggctcttccttctcgaaaactccgccccatttctgtccagtgctccctggcttccgccccctctgtggcggtgacggcgtccaaggagtgcaaggtgaaatcggtcaaggctaggcagatcattgacagcaggggtaatcccacggtcgaggttgatttgatcaccgacggtctttatcgatcagccgttcctagtggcgcatctaccgggatctatgaggcccttgagctcagagatggtgacaagagtgtctatggcggcaaaggtgtgctctttgccgtccaaaacatcaatgaaattttgggtcctaagcctattggcattgatgtcagaaatcaagcggatgtagatgctgtaatgctggaaatcgatggtactccaaacaagtcaaagcttggagctaatgcaatattgggagtgtcattgagtgtatgct

SEQ ID NO: 199360 - DNA, 702 bp, Gossypium hirsutum
  unsure (1)..(702): unsure at all n locations
tcggtaaattgaaacaaaggtaaattaaagtcctttcttttcttatatttatatattactaattatttgttaaccccaaaactttcattaaatcaaagatctaaagcttctgccaggatgagaattactgtaatgactgcagatgaacagatccttagcttggatgttgatcctcatgaaactgttgaaaatttgaaagctttgcttgaagttgagactatggtgccattgcagcagcagcaactgttgtttaatggaagggaaatgaacaactctgagaaattgagtgctttgggtgttaaggatgatgacctagtcatgatggtctctggtgttgcttcaagtggcagtgcatctaggaatgacttgaacttgaatcctgatggatctgccgtgaatcctgcagctttccaacaacagattcgacaggattctaatctaattggacaattatttcagaccgatcctgagcttgctcaagccgttgtcggaaacgatctcaacaaactgcaggagattctccgagctcgtcatcaacgaagatctgacttgcgacggcnagaggaggaggagcttgctcttccttcaagctgatccttttgatgttgaagcaccnaagaaaattgaggctgccattcggcagaaagggattgatganaactgggctgctgcctttaaaatataatcctgaaggctttgcgt

SEQ ID NO: 199361 - DNA, 456 bp, Gossypium hirsutum
cggacgcgtgggcaacatccaatataaagtaaattcaaacaaaggtaaattaaacccaaaactttcataaaatcaaacccttcagctaacaagagacgaagaagatctaaagctactgccgggatgagaattactgtaatgactgcagatgaacagatccttagcttggatgttgatcctcatgaaactgttgaaaatttgaaagctttgctagaagttgagactatggtgccattgcagcagcagcaactgttgtttaatggaagggaaatgaacaactctgagaaattgagtgctttgggtgttaaggatgatgacctagttatgatggtctctggtgttgcttcaagtggcagtgcatctaggaatgacttgagcttgaatcctgatggatctgccgtgaatcctgcagctttccaacaacagattcgacaggattctaatctaatgggacaa

SEQ ID NO: 199362 - DNA, 394 bp, Gossypium hirsutum
cgcctggtagtgcttcaacttatcaggtaactgaagaagcggttgttgtgtgtgatgtcatgggcctctccaatggagattgaccctaaacctgattctgaaaatgccgccctcgttctcgttaagcaaggagctgaagctagagttttcgagtccgtattcgctggaaaaaggtccatcgtcaaagaacgcttctccaagaaatacaggcaccccgctcttgattctaagctcactctcaagcgtttaaacgcggaagctaggtgcatgaccaaggctcgacggcttggcgttttaactccggttctttacgccgtcgaccctgtgatccataccctgactttcgagtacgtcgaaggcccttccgttaaagatgtttttctcggaattgggt

SEQ ID NO: 199363 - DNA, 790 bp, Gossypium hirsutum
aagctgacctccattcctctctgcaaatattctaccttcattaattctctaaccatgctctcttcaacctctttgaaccccatcaccaatcccaaaattcccttcttttcttctttttcaatccaaagcccatctcttttatcctttcatcttcctttctcaccttcaaaaaccctcttaaaacccatctcagctactctgatcccctccactcctccgcctcaacagcaacaactttatcaaccttttaggccacctccatctccactccctcctaaattccggtcacttgacgctcaaggtcgcttagatgtcttagccaaccggaatggcctttggtttgaatatgcgccacttatcccttctctttaccaggaaggtttctcacctccttcaatagaagaaataactgggatcactggggttgagcaaaatacactgatagttgcttcccagcgttatcatcctgttaaacaaattcatggagtactaatcgggacttgaaattagaaggtaacgcctgaggttaggaagaaagatttcaagcaatggaagtttccttatgtggcacttaatctctaaacaaggttattgcataattgtggtatacattgcatattaattcaaattctcttggagaggtttgatgacactagatcaaaggattttcatactggttctttgtgtctttgtattgatcatggctttggagttgggatgtttttctctacagcactttgaaaaacagagaagcacgtgtttaaatgagagtaggaagcattgatggatc

SEQ ID NO: 199364 - DNA, 548 bp, Gossypium hirsutum
gcaggagctgagaaattcgtggaagctgataatgcggaagccataataacaagaatcgagcacaaatccaggaagatcgagagcttacttaaacagaataagcccgttgaagctcttaaaactgcgctcgagggatcttctcatatgatacgtgacgagcgatgcaagtcagcgaattggatagttgtgcatagagcgctaatggctataaaagatgtcgaaggaatgttctcttctttggatcctgagtactatgatatccttatgaagtatttgtatagaggattgtcaaccggagatcgccccacatgtgatcagtgccttaggatccatgagaagctgacggagagagctggtttgggctgcatacttcgttcccttgcagatactgtgaatgcaatttgactccaataggcccttcactttggaaaatgttttcaagtgcttgttgttcttaaatcattgaagtgctttagaagcttttatgttacagcttttcttccatgattcgtatttccagatcagagttgcggtcacatgggttatat

SEQ ID NO: 199365 - DNA, 397 bp, Gossypium hirsutum
agcagttactgtgtgtcctttgtttgcatttgcagctttcttcttctataaatgcgggctgaaactccagcttctctcattccattctcattcgttttgttaaacccctccctttgttggaaaaatggcagagcgtgtgatcacccgagtacacagcctccgggagcgtctggatgacacccttattgcccatagaaacgaggttttggccttgctcacaaggatcgagggtaagggaaaagggattctgcaacaccatcaaattatcctagagtttgaagccatccctgaagaaaccagaaagaagctcgctgatggagcattttctgaaatattgagatccagtcaggaagcgatcgtgttgccaccatgggttgcacttgcagttcgtccaagg

SEQ ID NO: 199366 - DNA, 769 bp, Gossypium hirsutum
  unsure (1)..(769): unsure at all n locations
ggatttgcatcttttgtttcccattcccatccgcatcccttttataactcacctgccatttctccttttcctcaacattccaatcttcttttctgggtgtattttgctttgttgaattcatcatatcttcttcactaatcatggctatggctgcttccgagactaaattccatgttcttgctgttgatgataccctgattgatagaaagctcattgaaaagcttctcaagacttcttcttatcaagttactgcagtggattctggaaccaacgcattggagtttcttggattgaacaacaatgatcatcaagatgttgaagtgaacctgatcatcacagattactgtatgccagggatgacaggctatgatctcttacgaaaaatcaaagaatcttcatcattcaaagacataccagttgtcatcatgtcttcggacaatatcccatcaagaatcaacagatgccttgaaggtggagctgaagagttctttttgaagccagttcaattatcagatgtaaacaagcttaggcctcatttgatgaaaagaacgcaaacaaatgtaaacaagagaaaggcgatggatgaaattgtgtccnctgatagaacgagggccagataccatgaactggaagtgaattgaatcaccaaatcatcaatatttctgattattatagatcatcaatagggaaagaaatctggactctctcttgcttaccaaatcatgttaggaaagaganagagctatgtaatcacctaggaagaattacn

SEQ ID NO: 199367 - DNA, 810 bp, Gossypium hirsutum
  unsure (1)..(810): unsure at all n locations
atttcttttttttttttggattttgagcatttagggttttgattgtcggttttccgcgtcaatttttctcagggcttgtgctgaacggaatggcatcgctatcaagtcagccgcagttccgctacactcaaccaccgtcgaaggtgctgcatttaagaaacttgccatgggagtgtacggaggaagagctgattgagctggggaagccatttggtaaggtcgttaataccaaatgcaatgttggcgccaatcgaaatcaagctttcatagaatttgctgatttgaatcaggctattgctatgatatcatattatgcttcatcttcggagcctgctcaagttaggggcaaaacggtctacctacaatattctaacaggcaagagattggtaacaacaaaaccacggcggttttcgccggaaatgttcttttgggtacatccgaaggtcaagatgcgcggccttgtttccattggatggtttgcatcttggtattttcagcttttggatttgtgcattagattcctacctttgagaggacagctggatttcaggcattggtgcacgttttcagatgcagaaacagccacatctgcaaaaaatgccttggatggacgaatcatccctagtatctgcttctgaaacatatctctggtaccctgtatacatatctgtcatacagattgggggaatcagacccaggaccggacttacaatccctattcgtgccccttcgtataaagagacaccgcaatttggggatgaagaacaactccaaagttgttctctttgaaccaatatggncctttgggg

SEQ ID NO: 199368 - DNA, 370 bp, Gossypium hirsutum
gactgttttgggggaatccaaaaccagtccaccaccggcggtttccttcattttctcactgtttctcactgctgcatgcctctttacaccattgggagctcaacagcagtcacccatcaagaccatagtggcgttggtgatggaaaacagatcctttgatcacatgctcgggtggatgaagcacacacgtcaacccttcaatcaatggagtaactggagatgaatgcaacccggcttcaacaaataacccgaacccggaatccatttgcttcaccgacgatgctgagtttgtggatccggatccaggtcactctttcgaagctgttgaacaacacgttgtttggttcttacaccattccttccatgtctg

SEQ ID NO: 199369 - DNA, 564 bp, Gossypium hirsutum
caacacccaaaatggcctacgccttgattacaattctactcctagccatttaccgaccacacggcccaaagtgcagcaccaccaccagcaaccacagctccaccatcaatgctgccaccagcagccagagacttcctccaagcccacaaccaagcaagagctgcagtaggtgtcgcacctctcaaatggagccaacaactagccaatgcttcaagtctcatcgcaaggtaccaaaggaacaaaatgggttgtcagttcgcaaacctgacaaaccacaagtacggagcaaaccagttatggggtagcggagccgccgtgacgccgctcatggcggtggaaacttgggtaaaagagaaagattattatgatgatgggactaatacttgtgcaccgaatcataaatgtggtgtttatactcaagtggtttggaagaattcttcggatttgggttgctcacaagctacatgcaaggatcaagttactttaactatttgtttttataatcctcctggtaattatataggtgagaaaccatactagaacaaaaccagctatatatatgtt

SEQ ID NO: 199370 - DNA, 575 bp, Gossypium hirsutum
  unsure (1)..(575): unsure at all n locations
cacggtcaaattccgaaaactgtactcagtcgttcaattgaagtcacccagtcgacgatggactccagctctggagaagagtcagatcttagtgagtctgagatcaatgaatacaaagaaaagccatatgaagagattaggtctgggaagtacaaagtaaaggccttaaatggtagcttaagatgccccttttgtgctgggaagaagaaacaagactacaagtacaaggatctgcttcaacatgcttctggggtgggtaaaggatctgccaacagaagtgcaaaacagagagcaaaccacctggccttggcaaaatatttggaaattgacctagccagtgaagcagatgagacctcccgaccaactgtaccacaagctgtggacgagactccagagcaaactgagctttatgtctggccatggatgggaataattatgaacattgttgctgagtcgaagaatatagacacattgcatgataaagggtactggttgaagaggtttgctaaatataaacctaacaatgttcaatgtttctggaatgaggtanatctgactggccaagccatagtatc

SEQ ID NO: 199371 - DNA, 1135 bp, Gossypium hirsutum
gaacattgtggttaaacccgagatattgaagaatgttggcaaagcaatcacaaccctcccagataattttaagcctcatagagcagtgaagaaggtttatggattacaacgagcgaatgaataagtacatgaaggagagatggtctaggcgacgccttcaagcagttgaatttttgggtggatgttgcaaacagtgtgggtcaattgaatcgttggaatttgaccacattgacccaaacccaaaccctaactcgctttccctttgattttttgctgacgctgactcattgagtccaaaattccaccagctccttccttcatcagccatgagccggttcagggtaactgacatcttcgacccttactctccctctctctgtgttaaagaaacctccattctcgctcacaagcccttagcttttccctcatttttcgaagcagaacatgaacttagctccgccctcgacctactgagtcctttcccttgctttagccccttcgatatctacgacaacgtcactgatctggtccaaatcgagagaacgccgtcgtttcgttcgtacaagagggtacaacgccgagtcgaacccgagttttctattcaaaccttgtgcgaccgagttacggcgctggagtctaaattcgaccgtctcgttaacgggaggaactccggaggggacaggaagtacacgtggactgcggagatcaaggggccggttgaaaggaagtacaaatgggtagcggagatcaaggatgggaagaagacagaagaggtgaaagagaaaaagtataaatggacggctgagattgaaggaaagggaattgatgggcctatctcgagaaagtacgtgttctcagcatccactggtggcgatgcaagtgaatgtagcaaatcggagaagaaggaaaagaatgagaagaagcatcagaaaaaggacaagaaaggagagaatgtcccgcgtgtagtggagatcgaagagccgtcagatcacggagctgtcgttttaagacaggcttttgccaaaagagctggagttataagaaatagcaggggcaagaagaaggaattgtctcctcaagatgctgctttggtgatccaagtaacattcagatcttacctgatccgtagatcaca

SEQ ID NO: 199372 - DNA, 477 bp, Gossypium hirsutum
  unsure (1)..(477): unsure at all n locations
gctcactctcttattggactgatcgaagtccaagtgcttcttcacttcatcggcgggtattttcagattggtattttacaaattagagataattgtcgaaggatagagccatgagttgtgttggctgttgtgaagaagataatatccacaatgccacagacaatggaggccaatacatggttaaaaactcagcaggaaatgttgggggttaccatacatctgaaactgcatcgaagagtgctcaaaccgtgaaggttcagcctattgaagtccctgctattttggcagatgaattgaaggaaatcacagataactatggtaacgatgctttgattggagaaggttcatatggtcgagtttattatggagttcttaaaagtggagaggctgcagcgataaaaaagttagatgccagcaagcaaccagatgatgaattnttagcccaggtttccatggtatcaaggttgaagcatgaaa

SEQ ID NO: 199373 - DNA, 433 bp, Gossypium hirsutum
  unsure (1)..(433): unsure at all n locations
cgattttcgaattgaattttnggcgttgcgtggtaatagctgaggggttaagggatgtcggagaagttctcgccgactctcagaatcggagatctcagtgatttcatagcaccgtctcaagcctgcgtcgtttctctcaaaggactcaaagcgacccctaagaaacctgaacctcaggctttagctggtaagagtcagcaaactgaaccagtaaaaatttcactcaaggattgcttggcatgtagtgggtgcataacctcagcggagactgtgatgcttgagaagcaaagcttaaatgaattcctttccaatattaataaagggaaagctgtaattgtatacctgtctccacagtcaagggcctnccttgctgctcactgtggcatacctccactaaaggttttcaagaaactcacaacttttttaaagtctt

SEQ ID NO: 199374 - DNA, 589 bp, Gossypium hirsutum
  unsure (1)..(589): unsure at all n locations
aaacactctctcaacttctctctgagtccctgtcttctcttctctggggctcgcctcttcnattctttcctttcctttccctccactttctctccaattttcctttctctttccctctctttctcaggtccttgcaaatggcggaagcttctaaagtcattcatgttcgcaacgttggccatgaaatttctgaaaatgatttgcttcaacttttccagccatttggagtgataacaaagcttgtaatgctccgtgcaaagaatcaggctcttctccaaatgcaagatattccttcagccatcaatgcaatgcagttctacactaatgttcaaccaactatcagggggaggaatgtgtatgttcaattctcatcacatcaagaactgacaaccatggatcagaatgctcaaggacgaggtgatgagccgaatcgaatcctcctggtcacaatccatcatatgctttatcctattactgtggaggtgctacaccaggttttctcacctcatggatttgtggagaagatcgtcacatttcagaagtcggctggctttcaagccctgatccagtatcaaggacgccagaatgc

SEQ ID NO: 199375 - DNA, 609 bp, Gossypium hirsutum
  unsure (1)..(609): unsure at all n locations
gataaagcttgcacagcgcatgacttataacttctgcgctggagtttgtgcatcgagcattcataaatgggacaagcttagtgttggtaatgttggcgaaaatgtcagggtgatgacccggaagaatataaatgatcctggtgagccacacggggttgtgttgagtgctgctacttctgtttggatgccagtaactcaagaacggctgtttgatttcttgcgggatgaacggatgcgaancgagtgggacattttgtccaatggtgggccaatgcaagagatggtgcatgttgccaagggaatgggtcatggtaactgtgtctctctccttcgtggcagcgccattaatgcaaatgagaacaacatgctaattttacaagaaacatggagtgatgcctctggtgcattagtagttggcgcacctgttgacatatcatcaatgagtgtggtgatgaatggtggggattcagcatatgtggcactcttgccatccggatttgcaattctttctggtatttcaccaagttatcacggtgggcgaagcgagtgcaatggagcactggtgaaacctgaaattgatgtgaagcatagttaggggatgtctacttt

SEQ ID NO: 199376 - DNA, 552 bp, Gossypium hirsutum
cccacgcgtccgctagttacaacagccatcccttcctctgtctcacaataatttaagtaaaagttttctttttcaaactctctctctctaatatatagatttccatcttctgtactttaaattctgtctcaaaagataagttccaggcaaggtgtttgattcattgttgaaaagagatgaggggtgctgctcttgtagccattgctgctacaattggtaactttttgcagggatgggataatgctaccattgctggagcaattgtgtacattaagaatgacctcgatctaggaactagcgttgaaggtctagtggtggctatgtcactgataggagcaacagctattacaacatgctcaggggctatatcagattggcttggtcggcgtccaatgctgataatgtcttcaatgctttattttgtcagtggtttggtaatgttgtggtcacctaatgtctatattttgtgcctagccaggctattagatggatttggaattggtttagccgtgactcttgtcccagtctatatatctgagactgccccatctg

SEQ ID NO: 199377 - DNA, 460 bp, Gossypium hirsutum
tttttaccctgctatatatatccttcatatgtagagtatattttccattttctcttcatatttagcgatcaaaatttgcttacttttccatatccaatcatttacaccacattagcaaacttatggctaaaatttcaaaccctactttgcatcccttcttaagaaaataaaaaagcaaaatgttttaattttgtttttaagtacataatccctgacaattgtgctatagtttagctacgtaatataacataattaaataattgctttcccttttaaagaacttgattcaaagggatcaaattaggattttttttctattttctttttttaaatttctattgctattgttgttaatttggagaaatggagaagaaaaaggtggctttaccgttagtgtgccatgggcattcaaggccggtagttgatttgttctacagccccattacccctgatgggtatt

SEQ ID NO: 199378 - DNA, 530 bp, Gossypium hirsutum
cccacgcgtccgggaaaacaaagccatttttagtggtttcgctctctctccctctctctagagaagaggcattcccttcgtcggagtgcgcttctgctgagtgtttctttcgttttcttttgttttaagttttggagtaaagagtgtttcaagcttcttagtcctattggctgcttaacgacctaagctagccccgccggatatagttatcaggtgctcatcataaaaaatgactgtcacgccaggaatttccatcaacgatgggaaccttgtggttcatgggaagaccatcctcactggaatgcctgacaacattgttttgaccccaggatccggtgtcgggcttgttgctggtgcttttataggtgctactgcttcggatagcaaaagccttcatgtctttccaataggtgttttagagggcctccggtttatgtgctgtttccgtttcaaactatggtggatgactcagagaatgggaacatgcgggaaagatgtccctttggagactcaattcatgctcgtagaga

SEQ ID NO: 199379 - DNA, 562 bp, Gossypium hirsutum
  unsure (1)..(562): unsure at all n locations
cttcatcaaagggcacctcaaaacccagagaccccgtttactcaaccgttgatggcgactttcctattgcagatttttcccgagaaaaaaaccaatgcaaacagcggaggacatccgtaatctcccaatcgacatcacattttctcgtcttggagaatggttggtagatcggaagagaataccgtctgattggagaaagagattggcggcgatacgatccaagatatcgaaggtgttctcggcgttgcctaaggatattgatccctaattttcaaacccttgaccccttgattggattgggtacttagagggccaagaaatatttttgatattctttcttaagttgactccagaaagccgaacatttttggtcggtttcagggctgctggatcttggaaccattgggcgttctttagaaagatcattatacttggcgagctgctcaatatatcagaagtaacatgaatccattnagaaaacaggcanagatcacacactgctgactgacgcggagctgttaaagagtgcgtttcgtgtaattctagctgcagactggtgagg

SEQ ID NO: 199380 - DNA, 628 bp, Gossypium hirsutum
ttcttagagtcctaataaccgaccaagaccgagctctgaaatctgtggtggcggaaatctttccaaatccacttcattgcttcttcctgtggcacgtattaggaaaggtttctgagaaccttggtcatgtaatcaaacagcatggaaacttgagcgtccggtttgagaaatgcatctacaggtcttggacagatgaagagttcggcaaaaggtggtggaaaattcttgatagatttgaactcaaggatgatgaatggattgaagtcgttgtatgaagaccgcaaaaagtgggtgccaacctatataatgaatgttctgttggctgggatgtctacggttcagagagccgagagtgtgaactcattctttgacaagtacgtacataagaagaccacagtgcaagattttttgaaacattatgaagcaattttacaagataggtatgaagaggaagcgaaagcaaattctgattcatggagcaaagtgccagcattaaaatctccatcaccttttgagaagagtgttgtgggggtatacacacacacattattcaagaagtttcaaatcgaggttgtgggtgcaattgcttgtcatccaaagccggaaaatcatgattcaacatgcagca

SEQ ID NO: 199381 - DNA, 265 bp, Gossypium hirsutum
aaaacgaaaaggaaaagaaaatgggagaaaatgagaggacgatgaacaacatcgagggcatgggagttgcagagcgttcaagagctaaccacaattacagtggtgaagacgaagacgacgacaatattaccagtttctcttttccttccgtcaaatccagtcctcgcaacgcttcttccaaatacgacttcgtcaaggtgagggtctggttgggtgataacgccgatcactattattgtttatccagatttttgctcagcagaat

SEQ ID NO: 199382 - DNA, 809 bp, Gossypium hirsutum
  unsure (1)..(809): unsure at all n locations
accaaaaccaatacaccaagtatctctaagtgaagaaagatgcgatcttttgctgttgtgtgtttctgagactcgtgaactgttacttacttcctaatgaaaggcttctggcgaccctttgctaggcttgggggtgctaggagctattcagtgttaagcaatgatcaactgagaattaacggggttaaagatgtaattgctgttgcttctggtaaaggtggtgtaggcaagtctaccaccgcagttaatttggcggttgcattagctaacaagtgcggattgaaagtgggcgtgcttgatgcacatgtgtatggaccatctgttccaaccatgatgaacatccaccaaaagccagaagttaataatgatatgaagatgattcctattgaaaactatggagtgaagtgtatgtcaatgggattcctgctggataaggatgcaccaattgtctggagaggccccatggtaatgattgctcttcacaaaatgtccaaggagattgcttggggaattcttgatatccctgttgttgaaatgcccccctcgcnccggttattgcncacctaactttgtccccaaaactccattgttcaggtggataataaaattttaacttcctttttttccctctcttttggaagaaaaggtttttggttctgttgccttaaaactaacatatccnacccagaataagcttggactagtcctctnaacttgaaattacctctctggcctgggataggtgtttcccctcgctctgtttaattccaacttccctcattccgacctccctttgtgtcatcctcctt

SEQ ID NO: 199383 - DNA, 785 bp, Gossypium hirsutum
  unsure (1)..(785): unsure at all n locations
cttacacataaacaccataaagaacctcttcattgtgctcttcttcctttcatgaaactgtaagttaaataaaatcgaatcctcatggccctttcaatggcggtttcacggcttaggaacccagttctctcaagagccctcccatctctgttgagagctcgttttctatcttccttcgcctcacccacaccactttctcgcagttcaaatgtggaaaggcctttcaaggactgggatggatcttgcttaagaggtccaatgctttgtccaccataattggagtatacggtaattcatcaaagttcaagttgcagattggagttcgtcatttctcttcttcagaccttccggagcatacagtgctggggatgcctgctttgtctccaacaatgagccaaggtaacattgcaaaatggaagaagaaagaaggagataagattgaacctggtgatatactgtgtgaaatagagacagataaagcgacacttgagtttgaatgtcttgaagaaaggtttttggccaaaatactattacctgaaggttcaaaaaatgtgcctgtggggcaacccattgcattaatggttgaggatgaanaaaatatcncgaagaatccttctacacttggggctggattcgatgttgaagaaaaaacagctcatcacgatgtcagaaactccgaaaaggaagatgaacccagttctactaacattaaagcatccgatcttcctccacacattgttattggaatgccagcactctctccccccaatgaatccgggtaactt

SEQ ID NO: 199384 - DNA, 494 bp, Gossypium hirsutum
  unsure (1)..(494): unsure at all n locations
atcannagttttatccaatcgttcgtctctatggcttttcctctctttctggtgaagaagagagtgaacaaaaatggagatggttaagggtgttaggagtggcgctgattctgggtctttgccacgtgtccatggttgcaccattggaggagaaggagtgtcacagatggacttacgtcgtgcacatggctaaatccgagatgcctccgagtttccagcaccatactcactggtatgactcctctttgaaatcagtttccggctcggcggcaatgctctatacctacgacaacgttatccatggattctctactcagttaactgacaaagaagctgagcaactcgagagccaaccagggatcctcgcggttttacccgaagtaagataccaattacacacgactcgtacacctgagttccttggactcagtcaagctgctgctttgttccctgagtctgagtcggcgagtgaagttgttattggtgtgttggat

SEQ ID NO: 199385 - DNA, 478 bp, Gossypium hirsutum
  unsure (1)..(478): unsure at all n locations
caccgactaaagttnaaacccacacctttgaatcttcatgaaactgctcgaactaaccgaacacctacacccagcctatgtgttattgggtgtgtggcttccaanctacaatcatcgatctccgaggctcgaaactaaccaatccgtaatacactcccgcgggttacgtggaagccaatccacaagcatctggcagccatggcagaagatggagtcgtaacactctacaacaacacggtcatcaccgactccaagaaaaacccagtctcgatcaaagtgggcctggcacaaatgctccgtggcggagccattctcgaagtttccaacaccaaccaagccaaaatcgccgaagaagcaggcgcctggtgtgtagccatcactggacccaaccgccacggcatttcacgcatgccggatcctgctctcatcaaacaaataaagcgcgccgtttcgatccccatcatgtctcgttcccgtg

SEQ ID NO: 199386 - DNA, 425 bp, Gossypium hirsutum
ctcatgcgtccggagaaaatagaaatactaattgcgggggaaatttataaacttcttcgctctctccttccgcctttctctccatgcgaatctctacctagggggagaaaaatatcaagaaagagccaatctcgaaatttctgcgaaaatatgggcgatacctgaaattctccgcttcaagcgacgccctgcaagcgactggtttcacttcgacgatgtctctttctggtgtctttgcaattgtcctatgatttgggactttgcaggaaccaggtatacaagacaaaatttaagattgtacttggaagggggaagttgggtttgagtgagctctgacctctcatctcgggcttcgttcctgcaacagcatgaacaggatgtttggagaagttcactctccaacaaattgtacaggccaatgcatt

SEQ ID NO: 199387 - DNA, 1052 bp, Gossypium hirsutum
  unsure (1)..(1052): unsure at all n locations
ttcttttttcaatctctcgcaatcccttacccntaagatacacaccctaatgcgaatggcgacccgaattcgatttttctcatacaatcatattatgtgtgtcaatcaaatctcacactctcttcttacattctgcaaagagaaaaaagagagagctaatggggttcaattttgagagagaaaaacatttaatgtcaacgaatatctgctaagaaacaaattatgctcaatctttatcaggtcgcgagaggttttagcgagggaagctataaaccactcttttaaggcgctaaagacgcggcttttaattgaagaaggagctcatgctcctgcttatattgctctttacaggcctatcatctaccagggttcggaatggaaagagaaagcagaaaacttggaaatggaacttcaacaatgttacaaagcacagtctagattgtccgagcaactagtggttgaagtagctgaatctcgagctttaaaagcttctctacaagagaaagaaatggctattgccgaattggagaaggaattgaaccaaaccagggatgagtgctctcagctaaagacagatttagaagaaaaaattcgagctttggaattgttgatggtcgagcatcaagaactgaaagctcaattagaacaaatggctattaaagctaaaaacgcagaggctgaaataagatgttagttgatcgttggatgcttcanaaatgcaggatgctgaacggcttaacgaggcaaatgcgctntacgaagatatgattgagcggctaaggcgcantggtttagaaaaacttgcccgagaacaagtggatggtattgtccgtagaagcgaagacggtgctgagttctttgcggaatcaaccgttccttctgtttgctcacacaagatcaatgcacatgataggtgtggtgcttccatactgtttgagtacaatttccgccaaattgatcagtgngngacagggatcatcagtcaaatgtgggattccggtaccggatctttacccataaactttcggttgctttgtaatccctgactgcan

SEQ ID NO: 199388 - DNA, 462 bp, Gossypium hirsutum
aaactatggaacagcctcttctctcagaagagaaaagaagtgaaattgatgagaacgagaggctgagctcgtatcagtatgttggcagaacagggtcggtgattccaactgcttcgttggcgggtatggatgttagcatcgaagagattcgatcagccacttctttttctactccttacccgccatccattcatgctcctttgatcagctcccctgagccccttcctaatgagccagctattcctaaccaaagtccttacgcagcagattatggcccatactccaatgactttcagaggcaattattggatgaggtagagataagagagttgctcatcgatcatatcggtcatcgatgttgttgggggagtcgccctgctcgtacctggaagattcatgctgttgaggattgcaatgtttatgtgggaactcttgaaactttcttagaagaaagggaagtga

SEQ ID NO: 199389 - DNA, 774 bp, Gossypium hirsutum
agcgaggcgtgcgttcgacattggcccaaaaaaagaagtccaaaacaattggagacagcgagacatggcagatccagtagtagcatcacacttgagcttagtgctcaaagctccccccactatttcttcgccttcccaatttttactgcaacaacactcaaagccaatggcttcctctctcaatagcgccgcctctttgcgtctcttcgcttcttcatcttcttcctcttcctccgccgccgctagactttctctccgttccacttccctttctttctcttcttctctcaaatccctcgctttctctactctttctcgccacaagaggggatcggctgtcagtgtgtcgagtaccggagggtttagctctgtagccagtccgaaatgcgctgcttcggatcctgatcagttgaagagtgctagagaagatatcaaggagcttctcaaatccaaattctgccatcctattctggttcgtctagggtggcacgatgctggtacctacaacaagaacattgaggaatggccacgaaggggtggtgccaatggaagtcttaggtttgaagtccagctgaaacatgcagcaaatgctggtcttgttcaatgcattgaatcttcttcagcatatcaaggacaagtactctggtgtaacttaatgcggatttgtttccagtttgggctatttgcgactgctattgaaaggaggctgggggggatcccaaattccaatgaaatatggaagagttgatgtctctggtcctaatgagtgtcctt

SEQ ID NO: 199390 - DNA, 552 bp, Gossypium hirsutum
  unsure (1)..(552): unsure at all n locations
aaaaaggaattctctccagatgaaaagctaaaaatttctcattttcttcagcttaaagtgcttttggctgaaaattgaccaaattaacttgtcgtcttctcccacaaactttcttttccctcatctgctggttctttggaactgtcttctcccacaaacgtgcttttggccgaaaagaacagaaatttgatttctcattcaggataactgctactgctttgaggcaaccctccagtgcttaaaagcttaaaagatacccaggagaaggtgctggaagaacatgaacaacttggttttatcccttgctcctaaatttaccaaattgctaactctcgtactacgcctaagaaaatccgcagcttgaggacactgctgttgagacgattgcgaaattctgtcatgatctgcaagatctggacctcagtaaaagtttcaagaaatattggtataggctattggtgatctangagttatgagtctagcatatggatgccctgatctcagatgccttgacttgtgtggctgtgtccgaataataaaacggaaggcaac

SEQ ID NO: 199391 - DNA, 419 bp, Gossypium hirsutum
cccacgcgtccgcggacgcgtggggtgctggaagatacaatgaacaccacttggttcttattcccttgctcctaaatttaccaagattgctatactctcgtactatcgccaaagaaaatccgcagctttgaggacacctgctgttgagacgattgcgaaattctgtcatgatctgcaggatctggacctcagcaaaagtttcaagcttggtgatcgctcattgtatgctttggcccatggttgccctaatcttacaaaacttaacatcagtggctgcacatcattcagtgatgaaggtcttggatattttgactcaattttgtcgaaaactaaaaatattaaatctctgtggatgtgttaaagctgcaactgactgcgcattgcaggctattggacagaactgcaatatgttgcaatct

SEQ ID NO: 199392 - DNA, 806 bp, Gossypium hirsutum
  unsure (1)..(806): unsure at all n locations
attggagcatacgaccaaaaacacgggcgggtagaaatgaatatctaaatcctcactagaatcctaattcacgtttgaacgcgtcgataaaacgcttgcgctctctaagttatcgtccgtccggctccgattataataagtaaaaaacgaaaatttagctaactcttcattttcgttgcttttcatctatttgtttttatttaggccgacgcacatggagaataataatagctccgacgaaaggccgacggtgatggtgacgaacgacgacggaattgacgccccaggactccgagctctagttcgcgtcctaatctcctccaatctatttcgcgtccttgtttgcgctcccgtttcggagcaatcagctgttagtcatagtatcacatggcgtcaccctgtttctgtaaagcaagtagatatcaatggagccattgcttttgctgttttcggaaccccagctgattgtacttctttgggtatctcaaaagaactattctcttttgttcctgatctggtcatcagtggcataaacatgggcagcaactgtggttatcatgttgtctactctggcacggttgctggtgctcgagaagccttcttcaatggcatacctgctgtttctgtatcatatgattgggttggaggtaagaacagtgttgatgactatatgcttgctgccgaggcttgcttgcaaatctttagggcaatactagctgagattaagaataanagttatcctctanatggctttttgaatatagatatcccgacagatattgccaaccacaaggggtattatttgt

SEQ ID NO: 199393 - DNA, 485 bp, Gossypium hirsutum
tttcgtacgcgtgggtttttatctcttttcatttctcttattacacgcccgctcaactattggcaaaaggactcaatcgttaagattttctcttcgagatacttaaacaaaatggccgtgaaaccaacagtagctttgagggcttttcttgtaggaggggtagctgtttttgcaaaagtagcaggtgcaatgaaggctgctggtggtgctaaactgggtgcagccgcagctgctatgactgtagcggcttctgctgcaatgacgggatcgaagcaggagcaaaaagatggatctaagcaaccttcaaaatgatcttccttttctttcgttctttctttcagcaccttgtaggcatttttaatgtaggtggcgtagtcagttgctcatgggagcttgtctagagaagatggctatgtttggaattctattttggtcatcacagagtttttttttttttaaatgacttgaaataagaaaaacctaca

SEQ ID NO: 199394 - DNA, 348 bp, Gossypium hirsutum
caaaaaaaaggaagaaagggctccttttttctctgctagggtttcgaaaccctagcttttgcgccgccatcgcctgcccaccgctcttccaccatggacagtggtcggagtttggcaaatcaaggcctttagcccttgtttcagccccacttgaaagctaagtatacttagcccacgattggaagaggaaagctttcccctcgtcccctttcgattttgtttttgaagacggagagaactccgacgacgtaacccgtgaggcgattcaggtaacgtcagagtaggtgagcaaaagcgatgggacgggcgtctgttcgggcgcaaaatgcgctgacaccatgtagggga

SEQ ID NO: 199395 - DNA, 669 bp, Gossypium hirsutum
gaaggaacatggttgatgctttagaacgaattggcctcaagaaatatttccaggcaataatttctgaggaagatggtatggagtcaatagctcatagatttttgtcagcagctgtgaagctggatcgtaaaccatctaagtgcgtcgtgtttgaggatgatccacgtggcattactgcagctcataactgtacaatgatggctgtggcattgattggctcccaccctgcgtacgatctagggcaggctgatcttgcagttggtagctttaatgagctttcagtgattaatcttcgaagattatttgctaacaagggttctactttcatggaccggcaaaagcagatcatagagaagactcctccgaaaaggaagcttacagttgataccatcttctgaatcattttcaccttcctttcatttcaaagttgtccctgtattttaagcgagagcgcagtttaggagatagttgtatgagccatgagtacatagttgcatgatccatgttactcttcattttcatggtatggagatacatacatgtatctggggctgagtccgagtaacataggttcacagtttactttaaaatttgatttagttaggaaaatgttgccccatatatcattcaactgattgtacagcagattgagttgtcatcatgtgaact

SEQ ID NO: 199396 - DNA, 675 bp, Gossypium hirsutum
ttattgcttgtttaaattgacatttatacgttaatggctacttgctttttatcatcatattggttaaagcaacagttcatcattgttgtctttctctttaccgtaatatccagcatcagtttaccggtgaatggatgtttcacatcgattttcagcttcggggattccatgtcggataccggcaactcaattgagatttcagttttggaaaccggcaagcttcctgacggtgcttttcctccaaatggccgcaccttcttccaccgtccaactggccgcgcttgcgatggccgcttggttatcgatttccttgctgaagctttgggattgccatttcttccaccatattatcgatataaaaatggaacatcagataaatttgaaagtggtgtgaattttgcagttgggggtgctggtgcactcaattcttcatttcctggaatctataatcccaacaccaacgtatctttagtagatgaagtgaattccttcatacagtttcttaatttacgtacagatttcaaacagctcctacggaactccttgattgtgaatgggagaaattgggggaaatgattacagtcatgcccttcaagcaaggaaaaagcattgaggatgttcgaaactttgttcttcctattgttgattctataacttcatcaatcaatgagttga

SEQ ID NO: 199397 - DNA, 673 bp, Gossypium hirsutum
ccaaaactgaaaacaagcgttcagaacacaggcattatcaatagcttacatcatcattctcttccatttcaattcagtttctcacaaaaccctaaaccctgcctttccctccctcaatcatccaatggcggagctgaaactctccgagagccgagacctgacccgaatcgaacgcattggggctcattcccacatacggggcctaggcctcgactcctctctggagccccgtgacgtctcggaagggatggtgggccaagcacaagctcgtaaagccgccggtgtcatcctccaaatgatcaaagacggtaaaattgctggccgtgctatcttattagcgggacaacctggaactggcaaaactgccattgccatgggcatggcgaaatctcttggccttgaaacccctttctctatgctctctggcagcgaaatcttctcccttgagatgtcgaaaaccgaagctttaatgcaagcgtttcgaaagtccatcggggtaagaatcaaggaagaaactgaaataatcgaaggcgaagtcgttgaaatccaaattgaccggccggcagtttctggggcggcttcaaaaactgggaaattaacgcttaaaacgacggacatggagaccgtttacgatttacgggcgaaaatgatcgatgcattacggaaagatacc

SEQ ID NO: 199398 - DNA, 687 bp, Gossypium hirsutum
  unsure (1)..(687): unsure at all n locations
aatttctgtttcttccatcaatttttgcctcaaacgctgattcggtctctccttcactggaagtgctattgcccacattgatattggcttcttagggtttttgtttgtttttgaaggataaaccagtgaagttaatctcatgttgaagatcttcaagaagaaaacatctcccaaaggtattttagatttgattccatcgttgctttcttgctctcttttttctttttcctgcattttgcggtcattctctaattgctcacttcctctgttatgtggtcattggtttgtggcacaacaccatgtatgatatgtggttcaggagaaattgaaggagccttattgaaatacttgggggttgagcgcaatgaggtaacaaagacggtttattctctggtggagaaatggaatgtatgggatgttgtgtaaatgctcctatgattgcagttgctgattacaccaatggatttgaaggatataagtataattactatgaagatgttactactcaatgagttgttgagatagttgcagtgggattttgccaagagaactgatgcctcaaagtgttactgcaaggcttccaacctcagaggagctcgatgcctatgcacatgagcaatgggagctttgtaagcaatgtttcttgctgcaacttataagttcangacaagctgaaaaatcaacgag

SEQ ID NO: 199399 - DNA, 609 bp, Gossypium hirsutum
  unsure (1)..(609): unsure at all n locations
gcggagtcctagctgcagggacagaaaaggagcgtttgatatcaggagaagatgcggcttgttgcatttgcttggctaactacgtggacgacgatgagctgagagagctgccatgtgaccatgtcttccatgtggagtgtgtagataagtggttgaaaatcaatgcctcttgtccgctgtgttaaagcgagattggtgagagcagcgctgcttcaccattggctagagattcgaattaacaaaagcatgggaagaggatgggcaaggaaaaccggttggagatgggacaatgtgtttaatgcttttggtgctcggctcctgctgcagtttatgcgtgtgtttaacattacattacatgcaaaatccttgaagagctttactttgttctacaaattcttgcattttttagctcaattcgagcttcatacgtcggcagagtgagtctctcccatgcgttcgacgcggtgagtatatatcatccaacaaggtttgtagntcccttgttcacatttcttttntccttccaaatgcgttattggcttacccaaaaaaccattaccatcttgtagttaaaacttaatgtccttaatttatttggaatttttgggg

SEQ ID NO: 199400 - DNA, 473 bp, Gossypium hirsutum
ctctcgcgttcgcccactcgtacgaccacgcgtccgctgtgatttttcgaaattgataggattatcttacgtttgcgatcggacgtttctcatcgggatcaccgctcgtttgttcttattcggatcggagcgattcctctctaaatttaaagttcggtattcaataaaatgcactttaagcttaataatattgttttcttcatgttgttgcttgaattatttgtttaggtaacgtgccaagcaaatgtttttgtttgaattttagtgattccttgaatttttatttagttttccgtttggtttatgagagaatttgagagaaacggaaggaaaaaaaaagtgattgaaattattcgtttccttctctagaggacaaacatgaacgttttgggaactaggagagctggtagattattgaaacggtggttcctatttagcttaagatcgtgaaattttgattgattgttgatttt

SEQ ID NO: 199401 - DNA, 798 bp, Gossypium hirsutum
  unsure (1)..(798): unsure at all n locations
gcgttgggtcatgtatattattatatcctccaccatttgtaaggaggaaaacagtagacaattctttctgagttccttccctatctcacctttcttctgagatagcgactggaactcggtgtttgtcttcccttgaatcttctcatcctttcttttctaaaaggaagatggcatttagtgggacgacagataaatgcacgatttgtgataagactgttcatttcattgatttattaactgctgatgggattccttatcataagacctgcttcaaatgcacccattgcaatggcttactcgtgatgagcaactattgttcaatggaaggagtgctctattgcaagcctcactttgaacagctcttcaaagaaactggcacttataccaagaatttccaatccaaaaaatccgacaggccaaatgggcagacaaagactccgaacagacttgcagccttcttctcaggcacacaagataaatgcggagtctgtaacaaaaccgcgtaccccttaaaaaaggtgacagttggaggagaanactaccacnaatcctgcctcccgtttttcccacaggggtggcttgcttacaccatcaacatatgctgccatggatggtatcctttactggcaacatcactttggctcactgttcatggaaaatggaatgctcagtcccctttgccagccagcctgcattaagaaaaacttggcaagattctcctctgtatcccaaccccaagaatcacttgaattcggaaaagaagcgaatcccgaagcgctaatcccaaacccaatcccc

SEQ ID NO: 199402 - DNA, 467 bp, Gossypium hirsutum
cccacgcgtccggccgagtcagaagaagagtgtgctcggcttgtacggctccttcctccaaccgaagctgctctactggattgggcaataaacttaatggctgatgttgtacaagtggaacatttgaacaagatgaatgcacgcaatgttgccatggtgtttgctccaaacatgacacaaatgtccgatcctttaactgcattgatgtatgcagtccaggtgatgaattttctgaagacccttattattagaacacttaaaggaagagaagattctatggtagactctgctcctgtctctcgcttagagccgtctgataagaatggacagcaaagctcttcacaactactcaaagatgccagtgaggaggttaaaaacgaaagcaaaggagagaaagcttttgttgctcaagaacctgccttagagagccctacccactctgctgaagagaatttgacaactgaaac

SEQ ID NO: 199403 - DNA, 415 bp, Gossypium hirsutum
aaaaaagtcccagaagctgaagactagtttgaaacgctccccacacaccacaagcaagccacacccaattacaccgaatcagctatgaggctatcggccctcggcttcttctgtttcttcttcgctccctctctctgcagggtaccatctgaaacacatgtaaagactgaaccagaacatgctagcaccccaccaagaggttggaactcttatgattccttttgctggaccatatccgaggaagaattcttgcaaaatgctgaaattgtttctaaccgtcttaagccgcatggatatgagtatgctgtggtggattacctttggtatagaaggaaggtggaaggggcttgcactgattctcttggatttgatgtgattgatgaatgggggaggccaattcctgacccaggaagat

SEQ ID NO: 199404 - DNA, 405 bp, Gossypium hirsutum
cggacgcgtgggctgtgaacaccaaggcagctctcaaacaagaaaactagtttttatttcaatccaagtttatgagtataggttttgcatggggttctattaaaaacctaaacaaatttcattcaatagctatttgatctcatcataaggaattcagcaagcaatgttatgatggagatagaatccaataaaccagcagggaatgggatggtgatcggtggtttaagtcctttaagtgaaaccttatggagagagaagactaacaccgagtttgtaggagatgtatcagcccgactcactttggaaagaatctcaccgtaatggtaactctcaacaatggtgaaactcaaaaagtacttgaaggactcactggttatgctgaaccaggtactttaacagctctaa

SEQ ID NO: 199405 - DNA, 434 bp, Gossypium hirsutum
attatctttcagcgtcccagaccctaccttcgaatcgtggctccgagactccggctacctagacgtcatcgacaaccaacagaccgccgctgctgccgctcccaccaccggtacttccacgattagcgacccaacaataaccatcccaatcagcagcttccttttccgatatttggtctcttttttctctcatttatggacgctactctctctactcacgttcaacccattcgccaagctcaccaccaacgatttctccggtgaaactccgtcgtggactaaagggttcttcgcggatttcttgtcctattcgtttccagcttcggcttctcaagcgaggcttcagggttcaagagaatgttaagcgttatgctcggaattaatgcttcactttttatcctcttcttcgcttgggtctctggatcagctgccac

SEQ ID NO: 199406 - DNA, 566 bp, Gossypium hirsutum
  unsure (1)..(566): unsure at all n locations
gtttaagcttttccagtttagcttgaatcaaccaaaactcccaaatcttggaaattgggagaagatggcagcaccaacgctggagatggagccagttgagcgacagtcattgaagaagctcagccttaaatccctaaagcgcgctctcgatctctttagccctatccatggccaattctctgctcctgaccccgaaagcaaaaaaattcgcatgagccacaagataaatgttgagtattgtgggattaaaaccgcctcgggtcagacttctaggcaatctaattccggtgcagctgataccgggaatcaaggttctgtgccatcgaatgcccttgctcttgcaggtccagctgattctagggattcacagaagggaggagctcaaaatgctttanttgttgggccctctttggcaccccaaggaacaaattgttcttccggcaaaacaattgccttacttctggctctgcaccctttttctgagaagggtgacaacctctgctattattgaaaaggttcccnnccaattggccccgtcccgtgttggatcgtccctggaagaactt

SEQ ID NO: 199407 - DNA, 719 bp, Gossypium hirsutum
ctttgtttgtgaaagaaattctaattccatttccttttctttctagattttttgtgggttgtgtccattaaccttctccagcaattaccccaaaacagctagacaaagcttttatagtctttgacgcgaaagctaaagctaaactacataaagggtaagagtgtggtagtcctactccggcccccacgatgtccaattcagagactgctgctactaacggatcgttaatggacccaccgagacatcaggcgccggcagccaatggttcactcgccgttaaaaagcctcccaccaaagaccgtcacagcaaagttgatggtcgtgggagaaggatcaggatgcccatcatttgcgctgctcgtgttttccagttgacccgcgaattgggtcataaatccgatggtcagactatcgagtggctgttgcgtcaggctgagccttctattatagccgccactggtacagggacgactcctgctagtttttccaccgtgtcggtttccctccgcggagctaattctacttctttgtcgtcgaccacttcttcgtcgtctttggatcataagcctcttttgggtcctaccccgtttatacttgggaaacgcgtccggtccgacgacgataacgccggaaaggacgattccggagggctcactgttggaccaggagtgggttccattgtgggaccgaacgggacacatccgggtgggttctgggct

SEQ ID NO: 199408 - DNA, 583 bp, Gossypium hirsutum
gctactcttgcttctagacccttctctcccatcactttatgggtttcttttttccctcttttaaaagccacccctgaaacacacccagtgtcttttgtcaccccacaaatagctttgctgtcaacattttactcaagattttcctctttttctttcctcccaaactaactatgtatcgttttgcttcaagccttgcttctaaagctagggctgctaggaacactacatatcagactggtagtaggctgagttggaataggaactatgctgcaaaagatattaaatttggggtggaagctcgagctttgatgcttaaaggtgttgaagagctcgctgatgctgttagagtaaccatgggtcctaaggggcggaatgtggttattgaacaaagctaccgtgctccaaaagtgactaaagatggtgtcactgttgcaaagagtattgaattcaaagacaaagtgaagaacgttggtgcgagtcttgtgaaacaagttgcaaatgccaccaatgatgtagctggtgatggaactacctgtgcaacggtgcttacacgagcaatttttaccgaaggatgcaagtctgt

SEQ ID NO: 199409 - DNA, 662 bp, Gossypium hirsutum
ctttcccacaaatttcgatacaggaacttgtcgtgactttccggtcgccaaaacacttttttttttctctattttattttaggtcaagttatacttgttcccattgcacattgacttattagtattatataaacataaaaatattaatcgaaccctaagagatttttagatgatccaaaagaatccacccttttcttatctcttgttgattcatcaagcaaaatgttgactgatacagacaaggagttcttatctctaactgctactgttacagcggggtatcagttatttttctttttaatcgcggctgttttccagtttgataaactgactgattttgcaggaagcacgaatttcgtgataatcgctttattgactctggttaaaaaaggatcatggcatttacgacaggtagtcctgacggcgatgatagtaatatggagcacacgattggcactatatctcttttttagaattttgcgatggggggaggataagcgttatgataggatgcgccataatgtggggaacttagcagttttctttatatttcagggtctttgggtgtggactgtgactttacctgtaacagtggttaatgcaagtgacaaagatccatccattcaggccgaagacatcatagggtggattatgtggttttt

SEQ ID NO: 199410 - DNA, 504 bp, Gossypium hirsutum
gcacgttatggtcaaatcacgtgttaccttgtagaccttcaggaatcacattagatatcaagaaatcatctcataagaagttatcaaagtggctgcaagccaaaacatctactggactgataacagtaaaagaagacaagtacaagaaagaagctatgttgatttctgttaatcgaggtcacccagagggcttgcaatttaagccagaaaagccacccgtagagaaaggtggtcaggccggtgaattctgctgctagggaaggccgctcacagaaggcgcttgaagtggtagaggtctataagtcaagtgtgcatgttaatcccatttttgcttctgttggagctgacactgggaaactgtactcagcttctgaagctactgatattgtcttcaagtacattgagaaagaaaatctggtgaagcaaacaaacaaagccactgtggtattagatgcaactttgtgtgatgcgttatttaagggagccatcaagaaaggatcaaca

SEQ ID NO: 199411 - DNA, 458 bp, Gossypium hirsutum
gcaagaagagatctgcagagtcagctacaaagacccctgcaccagaaaagaaggcaaagctagtcactccccaaaagacagatggcaagaaagtgggtggacatacagcaactcctcatccttcaaaggaagccagaaaggcatcggctaccaccggtcaagtgaatcagagcgcaaagccaggcggttcatcattcccttgcaagtcttgcggcaggtcatttggctctgaaatggccttgcaatctcattccaaggcaaaacatggaactgcagtgtaaaaatcaatcagtctaacaagtaatatctttgcttaactattaccattcctggaatgggcaaattgaacataattagttaaatgttttaggtgactataattgatgatttatgtgtttaatgagtagtatttgcaaattattaggttatcttaaatgaaattgtgttctgcctatagc

SEQ ID NO: 199412 - DNA, 673 bp, Gossypium hirsutum
ccagttttgaattatattctctcaagcttaacatttcgtctttttgtgaacaatctttcttcttcttttgattttttcaccctaaaaaaaatttgaagccttctgttcaatgcaagctcgcttcgattctttaatggcgagttttctcttcattgggtcactgcttaatggcctttttttcttctctaaatctgttgtataagcattaatcggagtctggttttgtctctgaagaatatatggatttcgagaaaaagaagagatggaaactggtggtgccacgtattttgaaaatcaaatcagcatctcgttgttttttccaaaaggtgaaaccaactaatttcaatccgggctgtgcaccagtgtttctcaacgtctatgacttaacccctatgaatggctacttttattgggcaggcctcggtatctttcattccggtgtggaagttcacggtgtggagtatgcatttggagctcatgactacccaacaagtggtgttttcgaggtcgaaccacgacagtgcccgggtttccagttccgaaaatcaatattcattgggacaacatcgttggatcctatcaaagtacgggaattcatggagcgtaattcgacaaggtatcatggagatacgtatcacttgatcgtcaagaaatgcaaccatttctgtaagga

SEQ ID NO: 199413 - DNA, 718 bp, Gossypium hirsutum
cagtcatcgaacggcttgagaggaagttttccactatggctgctgaacatccttttaaggcagtcctgaccagtcttccaaagccaggtggtggcgagtttggaaagttctatagcttgcctgccctgaatgatccgaggattgataaactgccctactctatcagaatcctgcttgaatctgcggttcgtaactgtgacaacttccaagtcaagaaggaggatgttgagaaaattattgattggcaaaatacatcacccaagcaagtagaaatccccttcaagccagctcgtgtgctcttgcaggatttcactggagtgcctgctgtggtcgaccttgcttgtatgcgtgatgctatgcacaagcttggcagtgatacaagcaagattaatcctctggttcctgtagatcttgttatcgatcattcggttcaagttgatgtaacaagatcagaaaatgctgtgcaagcaaatatggagcttgagtttcagcgaaacaaggaaagattttcattccttaaatggggatcttctgccttccgtaacatgcttgttgttcctcctggttctggtatcgtgcatcaggttaatcttgaatatcttggtcggcttgtgttcaacaccgatggcattctctaccctgatagtgtggttggaactgattctcatacaaccatgatagatgggctcggagtagctggctggggagtaggaggtat

SEQ ID NO: 199414 - DNA, 514 bp, Gossypium hirsutum
cccacgcgtccgccattttccctctcttcaaagatccttgctttccttttcaatgggtttctttcttttcttcttcctttccttactgtctttagcttcttcagcttccagggatcatcacaaaaccttcatcgttggagtccaaaccgaggccatgccttccattcgcaccactcacaagcactgggacgagtcttcccttgcctccgttctttccccttccactcccgcccaagttctccatgtttacgacaccgttttccacggtttctccgctaagctttcccccaccgacgccctcaatctccaaacgcttccccatatcctcgccgttatccccgaacaagtccgccgcctgcacaccacgcgctctcctcacttgcttggcctgcaaaccactgacagcgccggccttttgaaagaatccgactttgggtcggatcttgtcatcggagtacttgacacgggtgtctggcccgaacgtcaaagcttcaacgaccgtgatttggggcct

SEQ ID NO: 199415 - DNA, 756 bp, Gossypium hirsutum
acgcggacgcgtgggtttttcacttctcaatccatttgcgcatttcccatagtttcggctgcgactctctcaattctctacagattttaacttaatttacaatctacattgttcttcgatatcccgatctgcagccgccgttgataaatggagaaagtgattttagaggaaaaggatgcagttcattggatctatagaggagaaggagctgctaatcttattctcgcttacactggatcgtctcccgcatttattgggaaagtgctgcgaatacaaaagtcgcaacggaacggcaacagtggcgtgaaagaaggcagagctttaacaacgcatgaacggcttctttggcgagaaaataaggagctaacggcgtcgtcaaacagagagattctagaacagctctacgtcaaacatgttatgatcccattgttaggcccaaaacatgtccgatgttgggattcgtgttcttgttactaaggaattccttaagtccgttgataagaatgtgacttgtcaccggcctgcttggcgagttcactcatcccaggttgatgttaaattcggattctggggctatcttatctgatcattcatactttccgatggtaatcttaaaggggaaaccttgttaacttgttgggattagtctcaatgtggttatctcccatattaaaatcattactgagaaaagcttgttagagaatgtttccgtttaaattgtccatctttaaatggctataaattatatcaatttta

SEQ ID NO: 199416 - DNA, 598 bp, Gossypium hirsutum
gtaaaattagtcttcaaaagtgtttcacaaattcatgcaagctacagacgattccccttaaattgctgcatcttttgactaagaaataaaaccgccaccaccaatactgaaaatgttgccgttcgacacaatcgaggaggctgctacattcttgggacggaacctaacggcggccgagaccatgtggttcaagtactcggctaaaaagtcggattactatctttactgccacaacatcttgtttttgttcctcatattttctgtggttcctttgccgctcgtttttgttgagatgatgagatctttgggtttcgataaatacaagattcaacccaaagttagcctgtcgttgcccgagatgttcaaatgttacaaggatgttatgcggatgtttgttcttgttgtgggtcctttgcagttagtctcttatccttcaattaagattatcgggattcgaacagggctgccattaccatcgttgtgggagattgtggcacagttgactgtatatttcatgatagaagattataccaattactggattcacaggttcctccatggtaaatggggctacgagaaaattcatcgggttcaccac

SEQ ID NO: 199417 - DNA, 578 bp, Gossypium hirsutum
aatcctcctctgctcttgaataaacagccctgaccttccattccatccattgtgaatcaactagcatttgcatcacaccatgaaattccgatacgccatggctcgttcatccttcctgaaccgtagcatggaggcccactccctcctcaagaagcagggtttcgatgtttcctcctacggaaccggggctcacgtcaaactccctggtccttctctcagggaacccaacgtttacgagtttgggaccccttacaagcacatgttcgacgacctccgccgcaaagacccagagctgtataagcggaatgggatactgccgatgcttaaaagaaacttgagtgtcaaattggcgccccagcgttggcaagacaatgctgctgatggttgttttgacattgttttcacttttgaagagaaggtttttgatatggttcttgaagatctgcacaaccgggatcaagttctcctgaaaagtgtgctggtgatcaacttagaggttaaagataatcatgaggaaacagccataggagctcgtattgctttagatctatgtgaacagatcgaagctgttgagtcaa

SEQ ID NO: 199418 - DNA, 868 bp, Gossypium hirsutum
  unsure (1)..(868): unsure at all n locations
cccacgcgtccgacataacctatatcttactttccaacctctttcttccatctccatctccatctccatctcctttctgcaattattcccaactttccatggcttccttcacacccaatctagaacctgcccctgacacctctcttcagttcaagcccaagaaacccaggataacccttcaaaccccttcctcttgtcctcccaatcaacgcatccaaagaattaagcgatggcggacccaacgagaccaacacatctactcctccaagctcttccaggctctccgtcgttctcgtcgtacctccgcctccagggaagtccacgaaacggctgacagggttctcgccgtcttggccaagggcaccactcgttggggcagagccattctcaccgctcgcaaggtgaccaaacataagaaagccaagctccctactaataacaggttgaggaagcccgatatttacagagagaggaggaaaacgccggctgttgagcggaagttgaaggttttgggacgtctcgtcnccggttgccggaaactatccttctccaaccttatagaagaaactagcgattacatagcggctctagagatgcaagttcgagccatgacggctattaccgagtttctctgcggcggaactggcggtggaccgcagccgccggctgatcgccttccctctaatgtcaactcttgaaaaggtgtttattattaataattattattatttttggaaactgtttatcggtgagatttttaagttgctgtattttattgtgtatacacgactttttctttctttttgagctccacttttgtttattttatttatttatttatttattttcggtttgttaaaaagtcgac

SEQ ID NO: 199419 - DNA, 649 bp, Gossypium hirsutum
  unsure (1)..(649): unsure at all n locations
aatcagcaaagaattgcgatatgtaatgcagtggctgtggccaaaattctgaatgccacgcttatcttgccagtgctgaagcaggaccagatttggaaagaccaaaccaaatttgaagacatttttgatgttgatcatttcatcgactacttgaaggacgacgtgcgaattgtccgtgacatacccgggtggtttactgacaaatcagaattatttaccagtataaggcggacagtgaagaacattccaaaatatgctcctgctcaattttacatcgacaatgtgctgcctcgggtcaaagagaagaagataatggccctaaaacctttcgtcgatagacttgggtacgataatgtccctccagaaatcaacaggctaagatgcagggtcaattatcatgctcttaaatttctcccggagatagagcaaatgtcagaattattggtatcaaggatgangaaccgcacgngaagtccgaatccttacatggctntacatcttaggtttgagaaaggatggtgggcctatcattttgtgattnntgtggaactaggggagagaaagctagaatggcagaatcagacaaaaagaatggcctcgacggtataagaacggacccatctgtggcagctggctctgcaaaaaagan

SEQ ID NO: 199420 - DNA, 748 bp, Gossypium hirsutum
gattacttttccaacctgcagaggaggggggtgctggtgcatctcacatgataaaggaaggagctttaggtgacgctgaagcaatatttggaatgcacattgattatagcacattgacaggaagcataacactggtttcagggccagtcctagccgctacatgcatctttgaagccaaaataaaaggagttggtgggcatgctgcgggacctcattcaactgtagatccaatacttgctgcatcctttgcaattttggcactgcaacagctaatctctagagaagcagatcctctccacagtcaagtgttgtctgttacttttattagaggtggatccgcattcagtgtgatcccatcatatgtcgaatttgggggcactttgaggagtctcaccactgagggcttgcataaactacaacaaaggttgaaagaggtcattaaaggacaagcagccgtacaccgatgcaaagcttttattgacatgaaagaaaaagatcaccctctctatcctgctgttgtaaatgatgatggcttgcatcaacatgttcagaaggttggtagccttttgcttggtcctgagaatgtgaagaagggcaaaaagataatggcaggagaggacttcgccttctatcaagaaaaaatccctggattcatgctaagcattggaattagaaacgaagaactgggttcaattcatcctccccattccccgtatttctttctcgatgaagagtccttgccatcggt

SEQ ID NO: 199421 - DNA, 420 bp, Gossypium hirsutum
gagaaaatgatgagaccatagccttgccaagagagagagagagagagcaaaagaaaccacagaggaagtgaatcgaaggcttaaacttaagcttaaaagatgctgagatttactcttttatggcttctcgttttctttttatctctcggttcatcttcagctcggcccgcaccttttgctatgcgcataagctgtggggctcgtcaaaatgtccgaacagcaccaacatatgcactttggtataaagattttgggtatacaggtggaattccagctaatgcaacaactccaagtttcattactcctcctctaaaaacactccgatatttccctctatctgaaggtccggaaaattgctatgggattaatagagtaccgaaaggacactatactgtgaggattttctttggataattaaac

SEQ ID NO: 199422 - DNA, 476 bp, Gossypium hirsutum
gaaagagactccaacagcaacagaggcttaagggtttgaccggattggaattcagacacagtgaacttcaacctttgctgtttcctgtttctcgagaaacaaacagagaagagaaaggatggtgctctccgcatctctgcattcgctttgcataatcccccatacctctcaatctaaaatcccaagcatcttcaacctcctaaagtctcccttagccaaaccccacctcaaattcaaccccattttcaaaccctcttccctttcccttttccctcaaccatccaagctcagaccaaaaacccaaaatttccgtacccccaccatccgctccctctttaccggtatcgtcgaagaaatgggtgaaatcaagcaactgggtatggccgatcacggcggattcgatctcaaaatacacgccaaaactgttatagaggatgtccacctcggtgacagcattgcggttaatggaacttgcc

SEQ ID NO: 199423 - DNA, 678 bp, Gossypium hirsutum
gttttttttttcaatcacttatcaaccagaactcgctctttccttcccttttttcccactgatcattacgtgtttgtgtttttgtctcaatgagtaacatgaaggaaaacagtgatgggttcgttagagcagatcaaattgatctcaaaagcttagatgaacagctcgagaagcatcttaacagggtttggagcagtgaaaacaagactaacaaagatgacggtggtggtgatggtgatggtgatggtgatggtgatggtgatggtgatcatcctcgtggtgatcctgatgatcacgctgatgggaagctcaacctcgctgattataccactaacatagctaccactttcacctacagggaaatactataatgggagactcacccttcttagctcgtcatctccaccgtccgtcgctcgtggtacttttgggaccgcccatcgtggcatctttgacgatctccatcttgcggtcaacctgcttgattggggttaggaccgtcccccgacacatgcctagatcgcctccttaacggccgctttttcccccaacattcctttctgccttcaacccgatcacctccccccttcccatgtctgctacgggcaccattcggttcctccggtgttcccatcgccatctttaaagggtcctccggggttccttgatttgtcgtgg

SEQ ID NO: 199424 - DNA, 880 bp, Gossypium hirsutum
aacaatggcaatggcaacgatagaagaagagtaaggcaatacgtacggtcgaaattgcctcggcttagatggactcctgatctgcattactcattcgtgcgtgctgttgaaaggcttggtggtcaagagagagcaactccaaagttagttctgcaattgatgaatgtgaggggactcagcattgcccacgtaaaaagtcatttacagatgtatagaagtaagaagcttgacgaggctggacaagttttaagccaaagtaaaagagcaattcaaggaaggggtgaatttgggagcttgttgtgtcaggccatgactaccctcagtccccatcatcgtcatcaacaacaacatttcagaatggaaaatggtggaattgttttagccagtgaatctcttgatggtagcaacactactttcaaagctaacttcccaaggcaccaccaattcccaaattctttcataagcaaagcctttggacaagaaaatggcttctacattcaaaaccaaattcatggaactggacccattagagcaatggcaagcaggtttcttgaagagaagagatggcatccttttgaaaggattagtaacagatggaaggttaatggaaatatgtacaaggacatgcagtctcaatcacattgtttttggcaaagaccaagctcagatgaagacaagcatgaacccttgaccaaattcagtagctgtagaacagagtttgagtggaaccaagataaagtgctcaaggacggggaacggttgcctgatttgcagttaagactaagccaaagaaatggaaaatttgatgaagagaagaataaccattgtaaaggaacacatgaaattagcacacagctttcactttcttaatcatgttgct

SEQ ID NO: 199425 - DNA, 639 bp, Gossypium hirsutum
atacggtctagggttctgacgagacgaatccaatttcgatcagcatattattgctgtaatctaacgagacgaatcgaattccaatcagcatattattattgaattcatagttgggaaatcaatctctccctctctttctctctctttgtatatatatgtatgaatgcatgtgtatacatgtatttatagatgtactccagcaatctcaagggctttattctggcgatggtctctagcgccttcattggctccagctttatcatcaagaaaaagggtctccgaaaggccggtgtcaacggcccccgtgctagttctggtggatatggctacttgttggagccgctctggtgggttggcatgcttactatgattatcggggagatttccaatttcgttgcttatatctatgcacctgctgttttggtaacgcctcttggtgctttgagtatcatcgttagtgctgttttagcacatttcatgttaaaggagaaactgcagaaaatgggaatgttgggatgccttttgtgcatagtaggttcgacaatcattgtgcttcatgctcccgaggagcgttctattagctcagttgaagaaattgggaatttgctactcaaccagcctttcttttgtatacagctt

SEQ ID NO: 199426 - DNA, 472 bp, Gossypium hirsutum
cttcccgtaagaatctcttacatggtgtagttttgtctggtggaatatgtcctattaccaagaagatgatgctgaatacatagcagaagagtatgacatggaggacatagatgacatggatgaagagttctgcggcagagatatgtctggctcggagtctgatgttgatgaatttgattactcgaataataaaatatctgatacttctgctgctgaagctagaagaggaaaagacatccagggaataccttgggatcagctcagcatcactagggaaaaatacaggcaaactaggctagaacagtacaagaactatgagaatatcccccactctggggaagtgtcagggaaggattgcaagattaccaagaagggtgcctcatactatgacttcaggctaaattcaagatctgtggaatcaacaatacttcattttcagttgaggaacttgatatgggctacatcaaaacat

SEQ ID NO: 199427 - DNA, 758 bp, Gossypium hirsutum
  unsure (1)..(758): unsure at all n locations
caaaaaaaaaattgtccagaaaaaagtatcaatttattaaaaaatccagtcatttccaggtgggataaattcttgcttagtgcttacaaagccaaaggcgagtcctagatagtgaatgtagactgttctgaaggggacgagcgagcgctaaaagatgttttatcgttgcaaaatcctcaacgttaacttcccatcatctatgtctctgggaactttcgtcaaacaccttccattttccaaacctaaaacctcacttcctcctcaaagactcaactttaaatctctaaccaccaccactacctgcgtaacacgcagctcttcctattttgaaaccttaaactcccgccaaaaggaccagattcatctctacgtagacgctttacttcaatggaaccagatgaatctcaccgctgtcaatgaagttaatgaagtaatggaaaggcacattgaagattccctagcaattatccctcctatacaaaactcttatatctcaagctgtaacaattcatttgacaaccttaggattgttgatgttggaagtggtgcggggcttcctggcttggttttagctgttgcttgtccangttgggaagtaacattggttgaatctatgaacaagcgatgtcttttcttggaacatgcagtgaatcttatcggtttgtccaatgttcaggttgtgagagaaagagcagaaaacatgggggccggattccaactttaagggagagatttgatgttgcagtggccatggcaac

SEQ ID NO: 199428 - DNA, 456 bp, Gossypium hirsutum
caaggttaccctgcttgttgtcctctcatgtgtggtggctgcctcggggggacttatctttggttatgatcttggagtttcagggggagtaacctctatggaccctttcctcaaaaaattcttcccgaatgtgtatcgaaggatgaaagaaggtaccaagattagcaattactgcaaatttgatagccaactgttgaccttgtttacatcttcactctacctatctggccttgtttcttctttatttgcatctactgtgactcgagtctttggacgaaaggcgtcgatgcttgtagcaggggttgctgtccttattggttcagcccttggtggcgctgcttctaatctctacatgcttgtatttggtcgtctttttcttggaattggacttggatttggcaaccaggtactgtaatctactttgtcatatatatatatatattgaagtttttgctc

SEQ ID NO: 199429 - DNA, 504 bp, Gossypium hirsutum
cccacgcgtccgcccacgcgtccgcttttaagtttgagattggaagtgaaactaaaataactgagttaatatggcgggccaagttccgagtcgacaattattcatcgatggcgagtggagagagcccattctcaagaagcgactcccaaccatcaatcccgctactgaagagagcatcggtaacattccagcggctacagctgatgacgtggagcttgcggtggcggctgctcggagagctctttctagaaacaaaggtgaggattgggctaccgctcctggcgctgtccgtgccaagtatttacgtgccatcgctgctaaggtaacagagagaaaaactgagttggctaagcttgaagcaattgattgtgggaaacctcttgatgaagcagtttgggacattgaagatgttgctggatgttttgagtactatgcagaccttgctgaaggcttagatgcaaggcaaaaggctcctgtctctcttcctatggagacatttaagag

SEQ ID NO: 199430 - DNA, 725 bp, Gossypium hirsutum
  unsure (1)..(725): unsure at all n locations
cggacgcgtgggtttctttccttgttctattatatatatttatcttcatcatcagacatatatacgtgtgttgcgtgaatgctcattacatattttcacaccataggagaggaagatattatatcaagctagaacatctcccttttacatcaactaagtaaagcatgcaaattcccacagagaggaaaacaggcgtctacacatacataggtcaatggccaatttactccgtggcatggtccgtccgcaacgacaaaagatctcgccttgccattggcagtttcctcgaagactacagcaacaaggtggaactggttcagttcaatctctatacatccgatttcacgactgacaatcggttagttttcgatcacccttacgctcccaccaacctaatgttctttccgtccgaggatacctctaatcccgatatgattgccacgtccggcgactaccttcgtctttgggaaatccacgacgatcacattgagcttaagtccttgcttaatggcaacaagagcagcgaattcagttccgccataacttctttcgattgggctgatttcgacactcgccgtgtggccacctccagtgtcgacactacttgtaccatttgggaacttgagaaggaagctgtaaacactcnattaattgcccacgaacagaagttgttcgacatttcttggggcgggttcantgtgtttgcatccgtgtctggagaagga

SEQ ID NO: 199431 - DNA, 734 bp, Gossypium hirsutum
  unsure (1)..(734): unsure at all n locations
cccatgcgttcggaaatctccaatttttttcccttggtctggtaaattgatcctttgcttcggctttcagtctttgccttctagggtttatcacttgttcctaagcttcctttacgccgttttcgtctttacagagtaacgaatgaaactgtatgctattcagagtcactgctagcaaggaaaagaaccgaaataagcagagatggctgctgagctggtcaattttgccacaagtgagaaattggctgagatggactgggcaaagaacattgaaatttgtgagttagttgctcgagatcaaaggcaagctaaagatgttgttaaagcaattaagaaacgattggggagcaaaaacccaaatactcaattatacgctgtattgctattggagatgttgatgaacaatattggtgaaaatgttcataagctggtgattgatactggcattctcccaattcttgtgaagatagtcaagaaaaagtcggacctaccagtgcgagagagaatatttttgcttttggatgctacacaaacatctcttggtggtgcttctggaaagttccctcagtactattcagcatactacgatctggtgagtgctggagtanaatttcctcanaggcctcatgcaacaccatcaaatccacctacttcgcaaccaattaaaagtaatacgcttaatggtgaacttgcctctgccaaacaaaaggcagttgncaaggaagcaaagctcc

SEQ ID NO: 199432 - DNA, 464 bp, Gossypium hirsutum
ctctcccgcctaccatcccttatcctttcaatttcatcttcttcataaaccctctccttcactctcccccagcttccctttcttcaatcaatgaaaatgtcttctataaccaaacccatatccatggcggactcatgttgcctcgtttgtatcccttcactcttcaccacttgttccaaatccccatccctcctctcctttcccccaaaacccatcaatcttttcctctcatcttcccattcttcaacctctttgaccctcaaaaccagaacccatttctcttctctagtttcctttgttgcccaaacatcagattgggctcaacaaggggaagaaaatgacgccaccatcaccatcgatgacgaggaaagtggcactgaagggggggaatcgaaatgggaaaacgatgaaagtgatggacctgaaggcgaggattctgtttttgaagagcaaagtggggattc

SEQ ID NO: 199433 - DNA, 437 bp, Gossypium hirsutum
cttccctttcttcaatcaatgaaaatgtcttctataaccaaatccatatccatggcggactcatgttgcctcgtttgtatcccttcactcttcaccacttgttccaaatccccatccctcctctcctttcccccaaaaccaatcaatcttttcctctcatcttcccattcttcaacctctttgaccctcaaaaccagaacccatttctcttctctagtttcctttgttgcccaaacatcagattgggctcaacaaggggaagaaaatgacaccaccatcaccatcgatgaggatgaaagtgaaactgaagggggggaatcgaaatgggaaaacgatgaaagtgatggagctgaagcaatttggggaactgaaggtgaggatgctggttttgaagaacaaagtggtgattcagaagaagagggttctgaaccctctga

SEQ ID NO: 199434 - DNA, 521 bp, Gossypium hirsutum
attaaacagcactacacatctagtaaggatttgcttgtcttgaaggagatctctgcactatttcggtatctacaaacagtttactctcgtgtatcagtgcccacaatttggttccatcaagaaccgcaacaatctccttcctcgtgcaccctttcaggtattctcactagtatcatgcccctctagattgtcattgaagaaaaaagacagaaatgatatcatgctcaccttagggaaaattgttcatatattttccaagtttcaactattattctagctgtaataaaacacttgatgtttcttttatttcattagaagcaaacaagaacaaatgcctgaaaagtatattatagcaaagacactatggcttttatgtgttatctacattggaagtattgttctcttcgagtccttcgaggctttggttcgaaccaaggatcatttttcgcaacataaatattaagtactggctgagctaagtttgtaatttactgttaagaaaaatggatgttgctatgatt

SEQ ID NO: 199435 - DNA, 381 bp, Gossypium hirsutum
  unsure (1)..(381): unsure at all n locations
caaaggcatgcctctcgaagtcattacggagttcttttccgttggtgcgaagcaagttgcagctgccaagaacaactgagtttggttacatatatttgatggatagtttgaaagttttgacggctgttcaaatttatctttttttttccttttcattttattgtcaattaggcagttcgatttatgtagaaagattaaaaaaaagaacaaaaaaccaaacatgattttctatttgttacagttttctaaatgacatttaaagttttcttcnnnnnnnnnnnnnnnnnnnnnnnnnnnnnnnnnnnnnnnnnnnnnnnnnnnnnnnnnnnnnnnnnnnnnnnnnnnnnnnnnnnnnnnnnnnnnnnnnnnnnnnnnnnnnnn

SEQ ID NO: 199436 - DNA, 459 bp, Gossypium hirsutum
gaaagtctcagtgtttttcaagggttttgagagttctcaaatcatacatttacatcctcctccactccctcgatatgatcctctaaaagaaaaaaacaaaatccaaacctaacccagaacttgcagcaaatcaattatggcgaccatgcccgcatccgcatcagatctgttgaagtccttcaaacttcaaaaccaagcaacaagaactcttgatccgagtctccatcctctgtctcgtctacatcttggcattcatcactcgtctcttctctgtcctccgttatgaatccatgatccatgaatttgacccctacttcaattatcgcaccactctgtacctcacggagaacggcttctacgatttctggaattggtctgactatgaaagctggtaccctttaggccgaatcgtcggcggcaccctttaccccggtctcatggtgaccgccgttctcattt

SEQ ID NO: 199437 - DNA, 762 bp, Gossypium hirsutum
  unsure (1)..(762): unsure at all n locations
ggaaaatctactatggcagattggacccaactccccaaggaactactagaacttatctccaaacgcctaggaacccactatgacgtcatccgtttccgttccgtttgctccacctggcgctccgccgttactgcccccaaccgctgccgcaaccgcttcgctccccgtttcccgcttctccctatttcctcccaattctccctctcaaagcgctccgtattcctcctcggatcacccacaactagtacccaaacaaacgcttggagcccctcctcgtgggtaatcaaaatcgaagaagatccgatgaacggcagagtccagcttttgaaccctctctcaaggtctcgtttcgattctctccctgataatttccccaaacctttaaatttgttggattttagggttcttgaattgggtgaagaatatgtgcttcattatttaactcatcacagtgtgggcaacttgtacatggaaaaagttgtcctgtcttgtttagaagataatgttaatgatttcattatacttacaattcatgtttctgggaaattagcaatgtttaaatctagtgttaagaaatgggctataattcaagacatgccatctccttttgacgatgtgatattatataaaggggaattttatgctgntgataatactggtaggactgtggttgtgggatgggatttcgagacanatttgattgctatgccctgttttggtggtgataaaaagttttggggtgatcaaaggttgagtnatggn

SEQ ID NO: 199438 - DNA, 418 bp, Gossypium hirsutum
cccacgcgtccggtaatcttctttttcaagcctaagcttgttctgatttgactccctcctaacgctgccttctacagatcacagtacctgaagaaaacccctttttcccctcctattctcttctactatttaaccctcttacaattaccatctgcctacccaagtttctttaattatttctttttggctcttatcaaaggagaatcttggattggaggcattggttctccatgggtgaagccccggcattctgttttgacaatctacaaaatggatttggtttaaaacccaaaggcttggagacctctgccgacgttggtgacaaaacgtttgtaattggtggggcagacaatgattccacatcatatattggggttaagatttatgacacatctacaggcaaatgggtgatccctac

SEQ ID NO: 199439 - DNA, 500 bp, Gossypium hirsutum
ggatattcaagagaaaaagaaaaacttagttccagaaagcgagtttgttgatgtactgttcaacgagccgttggagtcttcaactgttgaacagatgtttcttatgggtatgaacacttgtgaaggtgtggatattcttgatataagaccctgctccagtacacaatatagattagagcgtttccagaagcaggtccaaattatgaagaagtatcgggggactgcaaatgttcaacgtgcatggcttgcttcctctagaaaagcattgcctaccatcatgatgcatgggcttgcagactgccgtctttcttcaatcccaggcctatatgccgctggtgttcatcttgctgcagcagaatttacgaatggcagtgcaaagtattgtgatgttgacgaaaatggagtacagtacatgatattatgtcgcgtaataatgggaaagacggagcttcttttccctgaaagtggacaatgttttcctagcagtgaggatgttgata

SEQ ID NO: 199440 - DNA, 445 bp, Gossypium hirsutum
gcaaaggagatccattactaacccagcaccagcagcgtcaatggctagacgggcctcacgactcgctccgatctttgtcatcccaggtttctcatcgcaaatccccactcagtcccctccattcacgggcgttctcggcggctccggcgcctcaaccggcggttttcgtagacaagaacacccgcgttatttgccaaggcataaccggaaagaatggcactttccacaccgagcaagccatcgaatatggcactaacatgggggggggagttacaccgaagaagggcggcacagagcacttatgacttcctgttttcaactcagtagctgaagcaaaagctgaaaccaaggccaatgcttctgtcatatatgttcctcccccttttgctgcggcggctatcatggaggccatggaagctgagctggaacttgttgtttgtatcac

SEQ ID NO: 199441 - DNA, 524 bp, Gossypium hirsutum
ctttcttcattttcttttcactccaaaactgtgtaattgatgagatatcattggatgaggaaaatagagttgtgggggaaatattgattgtttcatgggcaatacatgccgtggatctttaaaggggaaacttcataagggcgacaatcagcccaaagaccattgttctagccgcaacaacacttcttccggccgttcaaccaccgccaccgattattccccttctactttaaactctcaacaactgattgctcaagaattctccaaagaaaccaaccaaaaagaaacccatttgcctgtcattaaccctaccaagaaagacaacaacaataacaccatgagacgtggtattgatcaccaggcttactatgttttgggtcataaaacacccaacatccgtgacctttacactttaggtcgtaagttaggacaaggacagtttgggactacttacttgtgtactgagatctctacaggcactgagtatgcctgtaagctatatccaaaagaaagtgatctcaatg

SEQ ID NO: 199442 - DNA, 593 bp, Gossypium hirsutum
  unsure (1)..(593): unsure at all n locations
gagaaagacgaagacgaagaagaagaagaagaagagcaaagcaaaaagaaagaaacccttattcaacatctccatccatttctctcccattaaaaccctactctgttgattatagagatataagggagataatatataatgggtggtgggaagagatttgctgttcttctgtgtgctgaggattccgagtacgttaaaaagaggtacggcggctactacggcgtgttcgtggaaatgctggcggaggaaggcgagacttgggacgtgttcagggtggccaacggtgagttcccggacgacgaacaagttgaccgctttgatggcttcgttataacggggagttgcaatgacgcgcacggcaatgacgcttggatatgtcggctggtttcgcttttgaaaaagttggattctttgaataaaaaagtcctcgggatttgcttcggtcaccaggttctcagccgtgcactgggaggaaagacaggccgtgccatcancggttgggacattggtgtcacaaccattcatttctcatcatcttcatcaaagctcttttcgtctttganaatcccaaccactctttccatcatcgagtg

SEQ ID NO: 199443 - DNA, 455 bp, Gossypium hirsutum
aaacggagcagtttacggaagggactcttaaaacccagccaaaccacatacagctcctcctcagaattcacctactctatacgttgaataaaacaagatggggggtgggtttagagtgcttcatcttgtaagaccgtttctttcatttctgcctgaagttcagagtgctgacaagaaagttcccttcagagagaaggtcatatacactgtgatctctcttttcatcttcttggtttgtagccagctccctctgtatggcatacattctactactggtgcagatccattctattggatgcgtgttattcttgcctcaaatcgtgggactgtcatggaacttggaatcactcccattgtgacgtctggactgccgatacaacttcttgctggttctaaaatcattgaagtggacaacaatgtccgcgaagatcgtgcccttctaaatggtgcccaaa

SEQ ID NO: 199444 - DNA, 818 bp, Gossypium hirsutum
gggctgcccaaaaagcattttgactatttgaggagggagcttctccacagttatggatttgagcatatggctacattaaataatttagaaaaggctggattgttgaagaagcaggagtcaaaaagcaattggctgacagtcaaacgtgctttgcaacttgtagttgaggatactgacactgcaaatcctaatgacatagcctatgtcttttctggatatgcacctcttagtattcgccttgtgcagcatgcagttcgatctggatggcgtgctatggaagaaattttgaagctgttgcctgggccgcatacagaaacaaaaaggcttggctttgctatcagtccctcatttgccacccggcagggtgcttcaaatggcttagacaaaatagcagacgggaggcgctccctggtacttgttgtctttgttggaggggtaacatttgcagaaattgctgctctcagatttctcagtgcccaggaaggaatggcatatgatctgattattgggacgacaaaaatggtcaatggtcattcattggttgaaacattcttagagacaatcggttaactcgttcgaatgtgtgttggcttttatgaggtttttgtttcccaatatttctctccaacaaccactgaaaatcataattatggcgtactgggcagtgaggctgaaaatgtgaagtgtttggtcagacgaaaattgttgtgcactgccagtgtatctatccatctatattgtatttatttgattttacagccaggaccatttaatggagatgattgtttttgtgtcatgagaatgatttggggatagta

SEQ ID NO: 199445 - DNA, 423 bp, Gossypium hirsutum
gttgggttcgttgttactgaaagagtttgcattactctttttggggttccagaaaaggaataacgtttaaagatgctacagttgttgttcacggtgatattcgcagagatggcggtgatcatcgtactatgcttcaagacaccgttaaggaagctggtgttaatggttctggatcgggccaagaggggacgaggtccggtcatagtgaagacggtgggcggaacagtatccgttgtgatgttgtcgtacatattcagcatgatgatgctcaagaaacgctggatcgttgatggaaacgcttctctaacggacgagattctcatggccaaaaacctcctcgaaactactctcatggggggattgctattcctatctctaattatagacaaattacaccattatattaaagaactccgtataaga

SEQ ID NO: 199446 - DNA, 607 bp, Gossypium hirsutum
cccacgcgtccgctcttatcaattttcccccatctggaaacgttttgaaaattaacaatgtccgctgttgctccttctttttccttgagtgtgctctgttttgcttcattgctctcctttttggctgtggtgaatgcaagaatccctggagtttatactggtggagcttgggaaagtgcccatgctacattttatggtggaagcgatgcttctggaacaatgggcggtgcatgtgggtacgggaatctctacagtcaaggctatggcgtgaatacagcagctttaagcactgcactttttaacaatggccttagctgcggtgcttgctttgagattaagtgcgcaaacgaccccagatggtgtcactccggcagcccttccattattatcactgccactaacttttgccctcctaactatgctctcccaaatgacaatggtggctggtgcaaccctccacgccctcactttgaccttgccatgcctatgttcctcaaaatcgccgagtaccgtgctggtattgtccccgtctcttaccgtaaagtgccatgccgaaagcaaggggggatacgattcaccattaatggattccgttacttcaacttga

SEQ ID NO: 199447 - DNA, 566 bp, Gossypium hirsutum
  unsure (1)..(566): unsure at all n locations
agagttatagagagagagagagtccctcttttctctctcttttcccttctttttgatcccaagaaacactttccatacacagggaaactgctgttttcttctttcagagagagagagaaagagttgccaccatgtctcttggctatgcagagaagctctcattcatagaagatgtgggtcaagttggaatgactgagttctttgactctgctcatgttttacaagataaaattgaacaacttgcaaaattgatagaaaagagtagacatctagtggtgtttacaggtgcaggaatatcaacttcttgtggcatacctgattttcgaggccccaaaggaatatggacattgcagcgtgaaggtcagcccttgcctgaagcatccctaccttttcaccgtgcaatgccaagcatgacccatatggctctggttggattgganaaggctggcattttgaattttgttattantcanaatgttgatggtctccatcttcgatctggaataccaagggagaagcttgccgagctgcatgggaactcgtttatggaaacttgtccctcatga

SEQ ID NO: 199448 - DNA, 747 bp, Gossypium hirsutum
tgcctttggaatgatggctgcagttttagtctcattgattgagtcaaccggagcttacaaggccgcctcacgtctagcaagtgcgacaccccctccagctcatgttcttagtcgtggtattggttggcagggcattgggatccttttgaatgggctatttggaacactgagtgggtcaacagtctctgtagaaaacgtggggctccttggaagcactcgtgttggaagccggagggtcattcaaatctcagctggctttatgatatttttttcaatattaggaaaattcggagctctgtttgcatcaataccttttaccatatttgctgctgtgtattgtgttttgtttggtcttgttgcatctgtagggctgtcgttcttgcaatttacgaacatgaactccatgaggaatctctttatagtgggcgttgccttgttcttaggtttatctgttcctgagtacttcagagaatacactgccaaggctcttcatggtcctgctcatacgagaggcggctggttcaatgatttccttaataccatattcttttcatctccaactgtcgcattacttgttgctgtgttcctaaaccacacactagactaccaagaccgtgccagagatagaggaatgccatggtgggttaaattccggacatttaaaggagatagccggaatgaagagttttacacactccctttcaacctcaaccgtttcttcccaccatcataaactattcgtcctct

SEQ ID NO: 199449 - DNA, 433 bp, Gossypium hirsutum
cggacgcgtgggtgttcaaattgtgtcaaatgattcttctcctatggaagtggaacttgaagcttcctggttcttacaatgtcttcatgcttatttttgcttcttccttatcttcaccttgattacaattcttccacttttgtctctcttgtttagtttggtacccagaccaaagctgtggtgcacctgtgagatttgtcacacatatctgaatatgagttggtcaaaacaattcgacaatctttgcgattggtacactcacctgctaaagaactcgccagggaacaccatccatatccatgttctgggcaatacaatcacagccaaccctgacaacgtggagtacatgctcaaaaccagatttgagaatttgccaaaagggaaacctttctccttgatcttgggtgactctcttggtcgaggcatattcaat

SEQ ID NO: 199450 - DNA, 656 bp, Gossypium hirsutum
gaaatctttttaaacagccactcccccggttgcatcaaacatggggtaccaacagagttacagtatatggagatatgcaaagccaacaacagttgttaggtcaaaagggattcaaaagtccattaaaaacatagtaaagtaaaacattcaaaacgtgaaccaaaaatcacacttccttttttctttttaccagggaacaccaaaaatagtcatgacattatacttgtgatcttaatgagttttgtttctcatccaaaaagagaacatcaaaaagctgatgcataagaatagcagtgtcttaccccttgtaccagggaacctcccaaaaaatgacattgaaaatgcgaaccaaaaatcactttgcagtcaagatcttgatcacggatgcagtcccaatccgatgcagagcaacaatcgaatccccattttggcataatccctttgccttggcatgctgaatagcaaactccaatgcttcctctgttgtctcttcatgagaagctttggcagatccagcatataaaactgggatcaaaccccgatacactaagctgtgccttgctggagcttcatcgctgcacgaccaatcgaacgaatcagtctggatctcagggacaaccatggataaaatgggcattccaggcctatacttagcc

SEQ ID NO: 199451 - DNA, 434 bp, Gossypium hirsutum
  unsure (1)..(434): unsure at all n locations
cagaaatacaaaatctaagaaacctcaaaaatgggaagctatagattctccttcactttcctcaccatttccaccatcctggccgtccacgtggcgctctcgtcttcttctcccactctcgacgtcgtcggcggcctttttctcccgattaaatcggaatgccgcggatccatcgccgagtgcctgatgctaagcggggaggagtcttcggacttcgatgctgagttcgccatggactccgagatcagcaggcgcattttagccaggactcgatacattagctacggtgcgttgaggaggaacacggtgccatgctcgcgacgtggcgcgtcctactataactgccggccgggagctcangctaatccttactcacgcgggtgcagtagaattacgcgctgtncgcgttagatttattactattttgtaaaata

SEQ ID NO: 199452 - DNA, 452 bp, Gossypium hirsutum
  unsure (1)..(452): unsure at all n locations
gatatccataaaaagcatgtcttgggcttgtttatttgttataaataatctgtgaaaattagggccttgtgttcattgatcttctgcaattgtttgtggagtaaagcagctagttgtctacatgttttaagtcgaagattgaagcttgagtctgtttacatttgaaatcataagagaaaaactttaagctcaaatgatcttgtaggcttttagtatcttattgaacttgatacagggtccatttgttttgcaaaaattgactttcaggaaataaattttgcaaaatagatttattttcactgacgctcagatttttttatcctaccaaattaaatcatgaaattttacttatgatttgataagaacaatgttacactgctgatcttttgcaaacactcattaaaaagggtaattcttagaattgatagangttttacaggtggagttgattt

SEQ ID NO: 199453 - DNA, 516 bp, Gossypium hirsutum
gttagcttaacctttgcctttgccttgacttgatcactcacctaagctttccttctatatcactctttgcttaacttcaccccactcccaattcacactatttactatttagaataaaatactaaattataaatcccctttccaaacccaaaaaagctcgtagtaaacgaaacagcagcaaaaatggtgctcacaaccacgaccccggcgccggagcagtatgttgaatccagtacctttgcttccagatatgtccgccaacctcttcccaggttccagatgccaaaaaattcaatgcccaaggaagcagcctatcaagtaataactgatgaactgatgcttgatggaaatcccaggttgaacttagcatcatttgtgaccacatggatggaacccgagtgcgataaactcatgatggcttcaataaacaagaactacgtcgacatggacgaataccctgtcaccactgagcttcagaatcgatgtgtcaacatgatatcaaacttatgtaatgct

SEQ ID NO: 199454 - DNA, 638 bp, Gossypium hirsutum
  unsure (1)..(638): unsure at all n locations
cggccgcgtcgactgcgtattctagattcgcttcagttcctcaaattgttgtttggagaataagctttgtgaatcaggtaaagatgatgggcgaggatctgggcgtggaacccaaggaagcggcggttcgtgaggtggcgaagatacttcctcttcctgagctttgacaatccatttctaccatcaaagctgattatattacctcgtcaacaggcaaatgacgcacaacttagtacaatgggtgcagagcaggttgagcaggcccaagcgggactcgaatcgcttaactcatctcagaaaacaataagccagctgcgtgaaaacgttatatctattgaaaacttatgtcgagagtgccaaaacttaattgaaaatcatgatcagataaagcttcttagcaatgtcaggaacaacttaaatacaacgctcaaggatgttgagggtatgatgtccatttcagttgaagcttctgaggctcgagattctttgagtgatgataaagaacttgtcaatacttatgagaggttaactgcacttgatgggaagcggcgatttgctttagcagctgtggcatctcataaagaggaagtcggcaggtcaaaaaaatattttgaaaacgttgatcgancctgggaaac

SEQ ID NO: 199455 - DNA, 381 bp, Gossypium hirsutum
atcaactctctctagattcctggagacagccaaaggtttcagtcaaaaaattgtcggcttctttggattattttgagttctggtcacttggatccattcaggttggggttttacggtcgttgaatctgatcaaatcggtttacgttgatagggtacatgttttttttttaatcactttagaattaaagtcttatgtacttaagcatctgttgctttcataaactctaaataaatcactctgatttttctttggagcctacataattttgtgttcgcagaaaacattgtagaacaaggactggagatgataacgtatgtttcggaatacgaggtcattgcaaaggaaaaattgcccaagatggtttatgattactatgcatc

SEQ ID NO: 199456 - DNA, 544 bp, Gossypium hirsutum
tgatttttcatctccatctccatctccatctctatctccttgctcttcctcctaaaaccctaaaatagaaatgctctccttgcagctcttctccgcaaatcctaagcccactctcctcgactctccgctcaacccccttttgtaccccaaatgcctaaaacctccaaaaccctaccccaaatcgaagcccgcccccatttcttctgtccttcaatggaatagaaagcctgagctggccggtgagaccccacgcgtcgtcgttataacatccggaaaaggcggggtcggaaaaaccacaaccaccgccaatgtgggtctttccttagcccgtctggggttctccgtagtggccatcgacgccgacgttggcctccgtaacctagacctcctgttaggcctggagaatcgcgtgaactatacggtcgtggaggtactcaatggcgattgccgactggaccaggcattggtaagagataagcggtggtcgaacttcgaattgctttgcatttccaagcccagatcgaagctccccattggattcggt

SEQ ID NO: 199457 - DNA, 426 bp, Gossypium hirsutum
gtattttgctggtgttatggttcggttgaagcagaaataaagaccagctgggaaaaggaaaagcaggatatggaaatcaaacatgaaagatgaccacgctgttggctgatgctcagagacagatgcaatgatggggatgtgatccttggcatatgttggatccagcaaagagtaaaaccttcctgtccaaggtgaaatataaccggataccatgcctaatcccaaaagcagtaccaccccacagcgactgcacaagtcacggtgatcctcaagaaagcttgaaacaattttgtgtcactaagcatgtgcttcacccaatctaaaaagtagaaaacctgcatcaagaagaagacgcccatggcggccatatgttcaccggattgcacatgttgacacccgacaaagcggatctgcattgcaagcaac

SEQ ID NO: 199458 - DNA, 697 bp, Gossypium hirsutum
ggcggcgggagcggcggcggaaagtgaaccacctcaaaagcaatctccttcgtccaccggaacatcggtttccttccactcccgcccttcctctctccgaatacctttttttttctctttcaaaaaaatttcaaattaacagtgaaatatccaggtttaaattgccaatggcgaaagttagcaaagtgcggaagtctgattctcagcataaaagagtgccttatccattgccctctcatcctaagagggctggaaaaggttccagaaagaagagatgttccaaagctttggagaagaaagattgggaagctgcaaaatgttccgtttgtctggagttcccacacaatgccgttctcctcctttgttcctcttacgataagggttgccgcccttacatgtgtgcgactagcaagcggttttccaattgtcttgagcaatacaagaaagcctacactaaagtaacatcagttgactcaatggatgtggagcaacccactgaaaagatggaagtgccagagcttctatgcccgctctgccgaggaaaagttaagggctggacagtggtaaaacctgtacggaaatatctaaatcggaaaaaaaggtcatgtatgcaagaaaagtgctcgtttgttggaacttacaaagagcttaagaaacatgttaggaacaaagcaccactggcacgacctcgagcagg

SEQ ID NO: 199459 - DNA, 1169 bp, Gossypium hirsutum
  unsure (1)..(1169): unsure at all n locations
gacagaggtagcggctccagaaagttctccacctcaaaagctatctggggcggccacctcaacaggggggagcttccactccctcccttcctctctccgaatacctgttctttctctttcaaaaaaatttcaaattaacagcgaaatatccaggtttaaattgccaatggcgaaagttagcaaagtgcgtaagtcttattctcagcataaaagagtgccttatccattggcctattatcctaataggtctggaaaagattccagaaagaacagatgttccaaagctatggaaaataaagactgggtagctgcaaaacgttcagtttgtctggagttcccgcacaatgctgtcctcctccttgttcctcttatgataagggttgccgcccttacatgtgtgctactanccggcgcttttccaattgtcttgagcaatacaagaaggcatacactaaggcgacttcagctgacaatgggtcggtggataatgcaaatgtgggacaaccctctgaaaagatggaagtaccagagcttctatgcccgctttgtcgtggtcaagtgaaaggttggacagtggtaaaacctgtacggaaatatctcaatcggaaaaaaagggcctgcatgcaagacaagtgctcttttgttggaacttacaaggagcttaagaaacatgttanggcaaagcacccattancacgacctcgagcagtggaacctgtacttgaagaaaaatggaaaaagcttgaaaatgagagagagcgagatgatgtgatcagcacaattatgtcatcaacaccaggggcactattcttgggtgattgcgtgattgagccaggctatcgtggtcgtatctacagagatgaatctgattcagatgactcttttggcaatccttttgatgatgattttattcggctagactcttctgttcacatgcatggtagattcatggactatgacctatatgaagaggatgactttgggatgcgccgtgctttccgtgctgttcccccagtagctcgaacttggcctgctcgcttgttgggttcagtgggactaaggcgtatccccagggtccgaggacgtaatggtggccgataacttccatccacctttttcttatctgcaattcagaatacctaaatctatttgaagcttgccatcacaag

SEQ ID NO: 199460 - DNA, 435 bp, Gossypium hirsutum
attccatatatacgtaatacttaatttttcattattttccatttttaacgaagttttattttattttatttatttaattttttttccttctctgccatgtcaatggcgggggagacggggatggagcaattaacgtcgggagcaagcaatcgtataatccccatcttaagaacgctaagaataccgctcattttccttcaatcaataatactgtatctcctcctcttcctcttccctcgccgacgccagacggcggtcggagctgccgatgaggcgccgcagttgcaggctaaaaccgcgaggcggaggtcggtatggaggcgggaagaggaggacacgttgagaaggagagctttagcggagggttgggacatggggttcgaaaccgccgacggagaggtccggtgtcgattgggcacgttcctgttttttggg

SEQ ID NO: 199461 - DNA, 715 bp, Gossypium hirsutum
  unsure (1)..(715): unsure at all n locations
ccggtccaaccacaccgtccgttttttcttggccggacccatgggtcctggggtggaaggtagttatcgaggaaatgggcagagatgctgaggatcctgatgattggacaacatataccaatataccggcggtttatgttgatcccggcttgtttgagaaggcagagaaggcacttaaaggaattggaaaagagaaatgcccacagaaatctttctgctttccagtttctaattacattgtatggccgaattggaaatttgcatgaagtttatcgaatatggcgttcattgaggctctcttttcacaaaacagccaatataagctatctgaatatgattcaggtattaataaacttaaaagatttacccggagctgagaaatgctttagagaatgggaatcggattgctctacttatgatatccggattgcaaatgtcttaattggagcttatgccaaggaaggcttgctananaaagctctaaaaactgaagagaaggcccgtanaaaaaggggcaancctaatggccaaacttgggaaattcttttgggattattatttgaaaattggagacaccagcctggctgttgattgtgttggccattgccatttcccctgggcagaagaagattggcgaaaatgtgggtccctcccccctgaagcctttggggaaggggtgaacctctccttttaaagccatttgaaagaaatgtgg

SEQ ID NO: 199462 - DNA, 514 bp, Gossypium hirsutum
ttgacgcgtgggcggacgcgtgggcggacgcgtggtgtcgggggcgccgcggttctgctatcgaatcggtctgttgatcggaggcgcagtaagtataagcttgttcatgtggttaggacacattgtggggcaaatgacaaggcattcaactgtgtccgccaagaacaggatgatattgggaaaacaggtgtttcgttgtctaaagatttgatggcgattgctggtggtgcactcaagtccaacatcactacgttgggtccccttgttcttcctataagtgaacaaatcttgttctttgccacattagttgccaacaagttgttcaatgcgaaaatcaagccttatatcccggatttcaagctcgcgttcgatcatttctgtattcacgccggtgggagggccgtgatcgatgagctcgagatgaatttgcaccttctcccggtacatgctgaggcttcccgtatgacgcttcaccggttcggcaacacctcttcgagttcgatctggtacgagc

SEQ ID NO: 199463 - DNA, 615 bp, Gossypium hirsutum
cccacgcgtccgcacgcacttaacaaatggaacatggcacagggtctagctgagctcatcctgcccggtccgttactcaggtaggaaatcactcgctgtctcttacagatcatgtgcaaacccggtcttttcccctgcgtttctcccaaagtccacttcacataattccagcttcattaaacagttaagtctcactccagtcataacgaacaatagaatccagaaaagacacagcaaattaactgtcaaagcggcggcatcaactccagccgccgtaactccgccgtcccagcaaccatggcaaggtgcagcattaaagccattgatagcctcgattgctacaggtgtcattctctggttccttcccgtcccatccggtgtctctcgtaacgcctggcagctactttccattttcctcgccacaatcgtcggcatcatcactcaaccattaccactcggagctgtggctttacttggactaggagcttccgtcctcaccaaaaccctaaccttttccgctgccttctccgcttttggcgatcccattccttggctaatcgctctcggcttctttcttcgctcggggtttcatcaagactggacttggtaatcgaa

SEQ ID NO: 199464 - DNA, 618 bp, Gossypium hirsutum
atataatgaagcttcaattttttctccgatccccaagtcaccaaaccctgaccgtaaccctagaatccacccaatccctaacccttcgtcaactcaaatcctctctccttccgaacccacaatccttctcctccttctacttcaccctcaatggaaaacccctctctgattccacccttctcccaaatccccaaatttcccatctttcaaccctttttctcctcccccgcgtctccggtggcggaggcgatggcggcgccactggagccgagtcccgcgactgttatctcaagatgtacgctgtcaaaaagcccgataaagtcgaccccaatgagaaaaggcttggtaagtggctcaattgtgccttatctaatgaacctctaagagaaccttgtgtgattgataaattagggaatattttcaataaggaagctcttgttgaagctttgttgggtaagaaattgcccaaagagtttagacatgtaaagggtttgaaagatatgattaatgttaagttgtcgatgattcccggcaagcaatcagatgctgctgatggtgctacgtttcaatgccccataaccgggctcgaattcaatgggaagtataagttttttgcgt

SEQ ID NO: 199465 - DNA, 525 bp, Gossypium hirsutum
gccttctcaaaaagaaagaaaaaagaagaaaagaaaaaaagaaaaaaaagaaaaaagagaaataaaagaataaaagtgaatgaaaatttctctcgtttgagaagtgaatcactacaaaatatatatcttccgcaggaggcagaattacttaaggctgtagagtagaaacggaggttgctttctcttttatgaatttcttgtaaagaataaagaagagaaaaatgtacaagatgaacatgtgcgacatggatatgtacagcatcaacactaactgcagttttaggattttcataacaagttttaggagacagtttcttttggtttggtagaagataggcctcatagtcgtttttacattagaagggttggttttaagcttgttgatagggattgatctaggtagaaatggaagcacggaacgccatggtatcggataataagcctgggtttctgcacaataggaagagaaagcgggctgcgcagcattcaacttattttcctggagcttcgcatgtgatattacca

SEQ ID NO: 199466 - DNA, 540 bp, Gossypium hirsutum
  unsure (1)..(540): unsure at all n locations
caaaaagggggaaaaaatcactgaacccaacagaaagctaaaacttattactaataatttcaaagaaaaaggagcgtcatcatcgaagcggaagcgggattcgcggtggtaactatactgcgatgccttgttcttcgatcgagactagcaataatttttgtggtggcggtgacggaggtgatgtgaatgggcgtattcacaatttcaagctgaacgagcacactttcttagcttctctgatgccgaagaaggagattggcgccgatcgcttcattgaagctcatcctcattacgacggtcgcggcgccgtcatcgcaatctttgattctggtgttgaccctgctgcttctggcttgcaactgacatcagatgggaagccaaagatcttagatgttattgactgtacccggagtggagatgttgatacctcaaaagtggtgaaggctgataaagatggtcgaattcaaggagcttcangggcttcattggttgtcaattcttcttggaaaaaccttctggtgagtgcatgtgggctataaa

SEQ ID NO: 199467 - DNA, 421 bp, Gossypium hirsutum
cctcgtttcgctcctttaacattgcataccgccaccaaacacagtcctacatttttggaacttctcttctcttctctttccaaaaagtaaaaaccagaaagagatccaaaaaataatggtgcacggttctattagtccatggagaagggtgttatcggaaactacatattctctgcgacgggggcaatttggtcgacgacgctgcttctctctggtggctcacacagctgagcttgataaaaacaatatcgattctgttcctaaattgcctccctttgattactctccgcctccttatacccgtccttccgccgttgacatcctttccaaacgcaaggagtatctcagcccttccatgttttacttttaccagaaacccttgacgtagtggatgggaggatgcagtatttgttcgatgaga

SEQ ID NO: 199468 - DNA, 627 bp, Gossypium hirsutum
  unsure (1)..(627): unsure at all n locations
gtcttcttcttttttaaatctaatttggtgtgtttctattgatcagacagaaatttgataccttgggtcttttttatttttctcttatagctctgaactgctttttttttttttgtgataaaattaaaaaattgtgatcactgagtagcttatgacattgaaaaccctaatgctagagagacccagatcggtttctttgtacagctatcaatttatgagccacctcgagttgcagttctttctatagtcatcatttactctatctgtggaatactttcccttgttttccaggccatttacatgcaaatttgtgctctacattgtcgatctccgagagtaggcatcgatgtcaatcatatgtggcctcccactcctagaatgtatttactgcctagcttgtgctcgatgggcatggaaccgatgcctgcataccgctggccacgatagtgtaacatggggtcttgcaaccgnngaagaattcgaacctgttcctcgactttgccgctacattctagctgtttatgaggacaatattcgacatcccctctgggaaccncctggaggatatgggatcaaccctgattggttaattctcagaaaaacttacaaagacactagaggacgcac

SEQ ID NO: 199469 - DNA, 922 bp, Gossypium hirsutum
  unsure (1)..(922): unsure at all n locations
ctcaaaaagcatggagccgctcactaccagcctaacccattccatttccactcttccacccatccgcttcttcgcctcagctcaccgtctcccccctccgcagctttctgtctccaccgtccgccacctccgttcccgggttttgcgttttagtaatctgttgcctaaagcgacaacttcggaagaagcctcctccaccgggccaaaccgatatttcggtgaagatcgtgaccgcgtggtgacagtggaagaagttccggcggttgggaataataatgtcttcaatgaaaagctgccacttggagaacctaaagtagagtcagctgccgatgaggactcgcagatgttcgagtttttggagaaacttaatatcaagcttgactctggagatggatattcaatcatattatatggaactggtgccttgtttgcattgtggctagcctcatctcttgttggtgctattgattcaattccattgttccctaaattgatggaagttgtgggtcttggctacacagtctggtttagttctcgatatctgttattcaagaaaagcaaggaggagttgggtgattaaaatcaaaaaacttaaccaccaggtccttggctcaaaggacggttaattatgggaggatttaatcccactgagtcttgcttgaacccttgataatggaagaaatgcagagttggatattttctctccttcatatttaggagcttangagagtacagagatatgtctgtatcngaaactagttggtagcatcaagataaaacattttgttggtttgttcctcccccccaaaaaaaaaaaattctgccggccgccccgcgggtggagcctccattcgccccctggttgatccttttacgcgccctccctggccggtctttttctagcgtttttactggggaaggc

SEQ ID NO: 199470 - DNA, 505 bp, Gossypium hirsutum
  unsure (1)..(505): unsure at all n locations
accggccganttccggtcgccacgcgtacggtctgacaccatccccggcctcttctttattgggtagtcttggatcattctctgatgatataaaccgattgttgcaactgtacgaggaggaagatgatgccactagtccattaaaagagtcagctgtgctgattcctgagattgatggatcaaagcctaaatcccagtagtttaccttgtaattcccgaggactattttgtgactcatgagccacaagaacaatcatttcaagggtttgatttatgcaaagtttctacctcagctaatgctgacataaattatcaattggattatcatccatttgatttacaacaagattttgaccatgggcatctcctcgatgccaatggcactgaagattacgtgaaggatgctaactccaacatgctgccaaatatctctcctccaccatctgctttcatgggtccgaagtgtgctctgtgggattgtacaaggcctgctcaaggatctgac

SEQ ID NO: 199471 - DNA, 459 bp, Gossypium hirsutum
  unsure (1)..(459): unsure at all n locations
ccctctcgtccgcggacgcgtggggcgagactgggaccaaccttttcctccccgagggcggcttttccgcttttgccctccgcccatattgcgcctaaacccacgcttcatttcatcaaagcctccacttccgatctccccaaaacccctccatcaccgatcctgcctcctccgatgaatcctactctctcgacgagatcgtttaccgatctcaatctggctccctccttgacgtccagcacgacatgtccgccctcaaacacttcgacggcgcttactggcgaaacctcttcgactcacgtgtcggaaagactacttggccgttcggttccggtgtctggtcgaaaaaagaatgggtattacctgaaatcgacgatgatgatatcatctctgcttttgagggtactctaacctcttctgggctgaaacgtatggcaaagacttcttangaatgaatga

SEQ ID NO: 199472 - DNA, 630 bp, Gossypium hirsutum
  unsure (1)..(630): unsure at all n locations
ccgatatggatgcacctaaagaaatctttcttaaggactacaagtcccctgactactactttgacacggtggatttgagatgggcggggggtgaggagaaaacaattgttgcttcaaaaataactgtgttcccccgtgttgaaggttcttctgctccattggttttggatggggtagatctgaagctaatttcaatcaaggttgatggcaaggaactgaaggagggagattatcatttagactcacgacatttgacacttccatcaccaccacaaggcaaatttactttggaaattgatactgagatacaacctcagaacaacacttcattggaggggctctacaagtcatctgggaatttctgtacacaatgtgaagctgaaggcttcaggaaaattacattttatcaagaccgtcctgatataatggcaaaatacacatgccgtatcgaagctgataagttactgtatcctgtgttgttatctaatggaaatctcataaagcaaggaacctttgaaggtggcaaacattatgctgtatgggaagatccctttaagaaaccatgttacttgtgtgccttagtanccggccaattggagagcagagatgacacatntgttacccgctctg

SEQ ID NO: 199473 - DNA, 571 bp, Gossypium hirsutum
actggaaaataagaatttatggttattaagctgtaattttagttgagcaaaacaatgggttcaattcaacattattatttaaaacaaaaaagaaacttaaatttgtttgaatttggaaaatttgttatattgtgttaatagatagcgaaaaatgtcaaacaaaaattctataggaaaatgaagagttcgagcttcataggatatatatgtttaaggcttctatcttttacttgaataagtcactcatctgtataaattgcaaagggttttagcttatctatgttatttcgaatctttatatttcttgagtaccggtatctgacacttggatatgggatatgaccttcaatcatatccagtttcaagcacatacccgtatctaactcttaagtaacagactgatttgcaatgaatagtgcatttgagttctttttggctatcagaactcaatagataagtaaatatagcttgaattctattgcaactgacattcttatacagtttgttcatgatttgctgaaaatgacatctgttgagggaaatacggctgagcctcggaaaactagtaatc

SEQ ID NO: 199474 - DNA, 625 bp, Gossypium hirsutum
atggactgattgcttgccatggaaatggatcgagaatctgggaaattggagcaaattgtttcccaatttcgttccaagatcttgcacgttattttggactctagggtcccttctcttcaccaccaccaccagctgcaacagcaagaatcgctttctcattctcgggtgagaaagactgacaaatggttcaatttagtattaggagaccgtcccccagctctggagaatctcaatttctcccttaggaatctcttggatcctatggtaatagacataatactggttcaccgtggttcttgttcctcatcggtggacaatctttatagtccttcagctccagctgtgggacctgctgatgagactgttatcgaaagatgggttgttcaatatgattgcccacgatttattgctactccaagtggtgctgatgcttctgtttcttataagaagatttacaagaagtcaatcatacttttgagatcactttacacacaaatgaggcttctccctgcatatagaatctttaagcagctaagttcattgagccaaacttataatttcgatcttgtttacaaggtttcatcatttagtcaccccttctctagggaagaggagagtggtatga

SEQ ID NO: 199475 - DNA, 429 bp, Gossypium hirsutum
gttaatgataagcggaataaacttgcacaacctctaaagtttgcagttgggtttaacagaagagggactgaagagagccaaatgaaaacttcgaaagatgtatcaaagaattctgatatgtctgtattattggaccgcaacaaatgctttggtgccgtggctgctgccgttaaaggcattgtttcagattcagttgtggatctgaaatctcctgagctatctattcttgttgagttgcttcccctttctggagtgcctaatggatcgctattggttggtgtgtcagttttaccccaaaacctggttagtactaagccaagactctgcattaagccactggtttgcgataaaaatgggaagaaggcaagttaaagcaggtaacttatgaagcgagttacgccatgattggtgtggagggctgaatccccc

SEQ ID NO: 199476 - DNA, 477 bp, Gossypium hirsutum
cctacgcgtccggccgaaaaaaaaaaaaaacagaggttcatgggttctccgacttgcgatcccagtggatatgctgatggaaatttggggaacaatggtgtaaccaacttgagttcccctgcaaggaatggtgattcagggggcagggttcgtgagagaggtgaaaatggtgttgctgacactgaacaaggcaaatgaggattcaccatatagcggggatggttttgttggttgaaaataggccctctgtgggtgatgaggacttggactctgcagcagcaccattgccttcagtatcaaaatctaacattggacacagatggagtgacataacttcgtacggtaccaaaaagaaggttcagtgttggtttcaacatccaaatgggaattgggagctggggagagtaatatcaacttcaggaacggagtctgttatatcacttcctgatgggaaagttttaaaggtgaactctgata

SEQ ID NO: 199477 - DNA, 424 bp, Gossypium hirsutum
gtctggtgaaattcagggaactttcaatggcagtgctttacagatgctttggctgaataatcaactgcatggagggatgactggtccaatcgatgttgtggcaacgaatggagtccctcacaggtgtatggctgcacgggaaccacttcactggaacaatcccagagagaattggtaagttaactctcttgaaggatctcaatcttaatagtaacaaacttgttggcctaattcctattagtttagcaaatatgagactgcaaaacttagatttaaacaataatcacttgatgggtccaattccaatgttcaaagcatcaaaggtaacttttgcttcaaacaagttctgtcaagccactcaggggcttctttgctccccagaagttatggcacttaatagagtttcttggagtggtgaattacc

SEQ ID NO: 199478 - DNA, 583 bp, Gossypium hirsutum
  unsure (1)..(583): unsure at all n locations
ggaaatttggtggccttccttgagagaatagataatgagttcttcaagagcttgcagtgcattgatccacacactcgtgagtgtgttgagagactgaaaaatnaacctttgtttttggtccttgctcaaaatgtccaggagtatttagagcgtattggtgatttgaagtctgctgctaaggttgctctgaggcgggttgaacttgtctattacaancctcaagaggtttatgatgctatgaggaaactggctgagctatcggaagatggagaaaaagatggagatgagactaaagtggaggaaacacggggtacatctgcgtttgtgggtactcctgagctcgtgtcccggaagcccacattccccgagaatagtagagcattgatggatatcctagtgacgctcatatacaaaagtggagatgagaggaccaaagcccgtgcaatgctttgtgatatttaccatcatgccctttttgatgagttttcaattgctcgtgatttgctactgatgagtcatttacaggataatattcagcatatggatgtgtcaacacagatactttttagccgggcaatggctt

SEQ ID NO: 199479 - DNA, 430 bp, Gossypium hirsutum
gaaaaaaatccctaatcaaaaaatggggaaattgtggctaatttgcattgcttcgatctcaatccttctcccatttctctgcaatgctttctctcccgaatcgccaacggatcgccgagtccttgttctcctcgacgacttcgccatcaagtcgtcacactccctctacttcaatgccctcaaatcacgtggcttcgacctggaattcaaactcgccgatgatccaaagatcgccttgcaacgctacggccagtatctttacgatgccttgatcctcttctgcccctccgtcgaacgatttggaggatctattgatgttgccgccattgtcaattttgttgattccggtcatgatttaattgttgcggcggatgttaatgcttcggatttgattcgggaagttggtactgaatgtggagttgattttgat

SEQ ID NO: 199480 - DNA, 1154 bp, Gossypium hirsutum
ttcttctcgtctccactcttccttgaactcaaaccggtttctttccccttcgaatggaagatcgatccacttccaaacggtagcggttcgaatgccgcaacaagccccgaaaccgcagcagcgacaaccgcaattaccgtcgcatcgaacacggcgccgtcctcgaaactgagccatctgacggaatcgttaaaattagagcaccaattcttgcgtgttccttttgaacatttcaagaaaacaatccgaaccaatcaccgaacagtcgagaaagaagtctctgccgttatttcaagcgtcactgacgtggctgactccgacgaaatatccaaagacgatgccattttgagtctcacttcccttgtttcccgtttgcagggcatcaagcgcaagttggaagaggggagtcatgcagagaacttgcaagctcataggtgccgtgctcgtcttgatcacttagattcagcggatgctgagaacctttctgaatggaataatgtgcgattgaagcgggtccttgtggactacatgtcgcgtatgtcatactatgactctgcaatgaagctggcagaaagcagcaacatacaggaacttgtcgatattgatgttttccaagaagctaagaaggttattgatggccttagaaatcaagaggtgggtcctgcccttgcctggtgtgcagataacaaatcaaggttgaagaaatccaagagcaaattcgagttccagttgagacttcaggaattcattgaattggtacgagctgagaactacatgcgcgctatttcgtacgctcgaaggtacctttccccatggggagcaactcatttgaaagaattgcaacgagtcatggcaactttggccgttagaagccacactgaatgtgcaaaatacaagatactgttatgaagatgactgcaccaaggaggacccattgtcacaggacagcttccggaagttggccatgcctttaccatattccaagcagcatcactcaaagcttgtttgctacataaccaaagagctgatggatactgaaaacccaccacaagtcttacctaatggctatgtctacagcactaaggctctgaaagaaatggctgagaaaaacaatggtaaaattacatgtccaagaacgggtctggtgtgcagtc

SEQ ID NO: 199481 - DNA, 762 bp, Gossypium hirsutum
cccacgcgtccgaaaaaaaggcctctcaaaatgtacaaagtccaaggttgcatggatttctcagctaataattttcattagagaagtagtgcaactttgttctcgagattcatcttgtgttgtattcggtttaggcgcgtaaaagacgtgcttcagataattgatccaagagagttgtgctcttagtcatggattctttgtggaagcttttgtatttgcttgagcctgccccactgactctcatacttacagcagtggctgtgacatttggatctgcatttcgtgctctgaattatgggaaagaaatggagcggaaccgtgacttgtcggaagcatcaattactctagatcggtcccaagcattaatgatcccaataatgagctcctgcagcttgcttttgatgttttaccttttttcttctgtttcacaactcttgactgcattcacagctattgcctctgtttcatccttattcttctgtctatcccctcatgttgcctatttgaaatcacaacttggtttggctgacccatttgtgtctcggtgctgttcaaagtcatttaccaaaatacaaggcttattgttattggcatgcatacttatggttgcagcttggcttgtttcagggcattggattttgaacaatttgttaggtatttccatatgtattgcatttgtcagtcatgtgcgccttccaaacatcaaaatatgtgcaatgcttctagtgtgcttgttcgtgtatgacatattctgggttttct

SEQ ID NO: 199482 - DNA, 470 bp, Gossypium hirsutum
aaaggaaatgcctgggctaacctgcaacgcctgcaacagagagttccttgacgaggccgtgcggtagctccattacaagtccgattggcaccgctacaatctcaagcgcaaggtagctggggttccaggggtgacggaagctttgttcctggcaaggcaagcagcacttgctgaagagaaagataagcagaatgaaacccccatgctttacagttgtggtctttgtggcaagggctatcgaagttccaaggcttactctcagcatcttaagtcacgggctcatattgcgcaggcttctcaacaccctgaagaggggaaggcagccattatcaagccatttatacgtcgtgctgtaaataagcctccacaaccaagggatacgaatgatgaggaaaatgacgataattgggtggaggttgatccagatgaggacttggcgtctggtgatgaaatgcatattgataatggtg

SEQ ID NO: 199483 - DNA, 375 bp, Gossypium hirsutum
ctcaacccctacattttactacgctctctgaaatcttagttacatccatggcggcgacatcgctaaatgcccctaacgctcctctccttcaaaagacccatcaaactcatgtctttctcaaacccatctccaccattccttgtcaaacctctgccaagcgcttctccatctcttgttccgcaactacccaagatcgcctctccgtccaatcccaatctcaagttcgggtctttaactgtcgccgccggtcccgccaccttacccgagaacgtcctcctcaaagcccaatccgagctttacaactggcacggatctggcatgagcgttatggaaatgagccaccgtggtaaggatttccgttctattatcgaaaaa

SEQ ID NO: 199484 - DNA, 457 bp, Gossypium hirsutum
  unsure (1)..(457): unsure at all n locations
attggtttgagctggccagaacctccactaaatttgctatctcagcatgttttggacagaccagcttctttcaaatcagtcaaatcttttagagcaaccaagtcttttcgaacatatagttccttcaggtccataaatgacatggcatcaggaatagctttgcttgcagaacttgaccttgaatccctcatgaagcggaaaagaagatcttcatatgtaagaatagttagcaagcaaatggtaggaattttcctcactatttgggtccgtaggagtttgcgcaagcatattcagaatttgaaggtgtctactgttggtgttggtgtaatgggctacattggtaacaagggatctatatcagtcagcatgtccatatatcaaacacttttttgttttatatgcacccacctgacatcaggtgaaaaagatggagacgaactgaaaagaanatctgatg

SEQ ID NO: 199485 - DNA, 200 bp, Gossypium hirsutum
ttcctctcgtccgctttgattgatggacccctggatatgggttggagtagtaaagttttaattacatgctatatttatgcttttaaagaaccagttcacattatggtttgaaattgatatacttaggagggatactattatgtttagtgatcagaatcatttttctagtccatttaaaatgtgttgacgttttggatctt

SEQ ID NO: 199486 - DNA, 500 bp, Gossypium hirsutum
gttccgagaaaagaccgccaagatctctgtcacaatcacaggctgaaagttcttacaaataaactccgatcaagccacttctgaaattcagatattttgtgaggtatcaggatgaaagcactcattcttggcggtggatttggaacacgattgagaccgttgactcttagcgtcccaaagcctttggtggattttgctaacaaacccatgatactgcatcagattgaagctctcaaagctattggagttactgaagttgttctggccatcaattaccagccagaggttatgttaaatttcctaaatgaatttgagaaaaagcttggcattaaaatcacctgctcacaggagactgaaccacttggcacagctggtcctattgctctggctagagacaagttgatcgatggctctggtgagccattttttggcctcaatagtgatggtataagtgaatatccactaaaagaaatggtaaattttcacaagggtcatggagg

SEQ ID NO: 199487 - DNA, 690 bp, Gossypium hirsutum
gatgatgatagcatcactagttcccaacttcatgatgggagtcataattggagctggttatataggtttgctaatgatgacagctgggtatttcagattgctgccagatctccctaagatattctggcgttaccctgtttcttgtatcgactctggtgcatgggcattgcagggagcatacaagaatgatatggttgggcttgagtttgatggcttcatacctggtggtccaaaactgaaaggtgatgtcgtcctcacatccatgctaggcatccatctggatcattcaaagtggtgggacttaccacctgttataatgattttgatagcttatagattacttttcttcatcattctcaagttcaaggagagagtgtcaccattgtttcgaactctctatacatggcgaacattgcaccacatgaaaaaaccaccttcttttaggataacatcagccttcccatccaagaggcaccctgttctactttcactgtcttctcaagagggtctaaactctccttttcacttgaagcaccccatcatgagtaccattgtactgctcttactggaatttgattaccgaaactattggaaagagattatattataatttcatttggaatttcctgtttccccttttatttttccattgcttctaatatctgccgacttttctggcatttatggccc

SEQ ID NO: 199488 - DNA, 683 bp, Gossypium hirsutum
  unsure (1)..(683): unsure at all n locations
aaaacacacatccccattaataccgaggaagaggaagttgaaaacccttgggctgtcccttggtgggtgtttctttaggttttcttggtcgcgacgattttcagtggcttgtaaatggcagcgtataggctcctgattttctccctctttttggccctagttttcaccaggattggagccgatgcctcaactgaaccgctgcttgaatcggacgccgccgattcttctgctcttaagatggagttggatcaactgaagtctaagatccgtcttcttgaatcaaatgttgaggagaaaattcgagaattgaaaaccaaggatgagatgataaagcagaaagataaaattatagaagaaaaatctgacaccatggcatcgttgcactctgaattatcatctcttcagaaaaaaggaaccccagatgctgaggaacgggtgggaaaagctcatgcgaaagctctttgattgcagaaacagttgataaactaaaactaactgaagccaatgaagataagatattggatccgtgcactagctggacaattgatgatgattgcactgagatctcaagatataggacaggacaactacaaactgacacttanatgcaggaacgtnaggagtgagccctaaggcagatnatggttcaactgtcacttgtgtacataattgagctatcacat

SEQ ID NO: 199489 - DNA, 527 bp, Gossypium hirsutum
ttttagtcgccctttactaatacagagtaaagaacagaaaccaaagcaaaacccaaaaatggcgacggcactcgcaaacagagctgcgcaaaatcaaactactgggctattgagactctccttcaacttcttcagaaacctctcaactgcgacttccacagaaaaaactggcgcctcctcttcagcttccaaaaagcccaagagaaaaaagaagaagaacctcttcgaggtagctcagttcttacccaactgggggcttggttaccgcatggccaaaactcattggactgatgtttcatatcagatcaccaagatcaatctttataaggatggaaggcatggcaaggcatggggagtggtccacaaagacggtgctccagctgcagatgctcccaaaaaaatatgtggagttcacaaacgctgctggagatacattccgcatctgtccaaacctggagataccgcaccgaccttgatgaaaccaacagaaaatgccccataggctgaatgtgaactagctcgatgca

SEQ ID NO: 199490 - DNA, 431 bp, Gossypium hirsutum
gagttggcaaggatgattctcatgagaattcaagtgactaggatagccacactccttgtgttggtggcattaattttgggtcaaaaaggagctgaggccaggaaaggaaggatattggagtcgtttgagtacatagctatgagttgcagagcgcactctgcatcaataactgattttggaggaattggtgatgggaaaacatcaaatactaaagcatttcaagatggagtaaatcatctgagccagtatgcaaatgatggcggggctcagttatatgttcccgctggacaatggctgactgggagctttagcctctccagccatttcactctctatcttcacaaagatgctgttctccttgcttctcaggatatgagcgaatggcctgttttgaaggctttaccgtcgtatggtcgaggaagggatgcagc

SEQ ID NO: 199491 - DNA, 772 bp, Gossypium hirsutum
gttttatgcaatgtcaccctactcttgtttaatcggttttctcaaattaattgtcttaaatttgacgaattaacttccactacatccaaattcaagtccatttgctgtgctgtgagtgaattggagagagatgagaagggggaaaattgccccagatggcaatgaagcgagcaagaggagcgagaaaggagactcgaaatccctcaatgcctatttcaagcagaggaagtcacgaacagaagacttcaaatgccgggatcttgaaggagaaaatcaggaacaaataagagaatcgggaaatgaaaataagggcaagccgggaaaagggttcttcgcttgctatctgctaacctctctcagccatcgtcataaaggccacacctatatcggatctggttaacttattccagcgactgcagcagagtatcttctcactctagaaggtgagcttgtgcctgcgctcaccatcaaggactctgtcgcttctcccttgccttacaagtgttttctcacgtgctttctcagctcttctcctccattttggcaggaaaacctgagtcacgaggccttgttgtcgtttcattttcctggaatccatgttttatttggatttgctgaaaaacaaaggaactgacgtcgcttcatcggataaacggattccaattttaaattgttacagtgatccacctggttggaaggatcaattaacacgtagtggaaacttcacacctcttccccactgaaactttgggtttcgaatactgctaatgtc

SEQ ID NO: 199492 - DNA, 502 bp, Gossypium hirsutum
gactaattaacttccactacatccaaattcaagtccatttgctgtgctgtgagtgaattggagagagatgaaagggggaaaattgccccagatggcaatgaagcgagaaagaggagcgagaaaggagactccaaatccctcaatgcctatttcaagcagaggaagtcacgaacagaagacttcaaatgccgggatcttgaaggagaaaatcagaaacaaataagagaatcgggaaatgaaaataagggcaagccgggaaaagggttcttcgcttgctatctgctaacctctctcagccctcgtcataaaggccacacctatatcggatttactgtgaacccactgcgtcgaataagacagcacaatggggaaatagggagtggtgcttggaggacaaagagccgacgcccgtgggaaatggttgtgtgcatatatggttttccaaccaatgtatctgctcttcagggccgatatataaaatatattttatattttatatata

SEQ ID NO: 199493 - DNA, 694 bp, Gossypium hirsutum
gttcaaattcctttcttttttttatctattcgacatttttatgaataccagcaaagctttgtccacttgtatcaaaagtaaagtaatcgaatgaaggaaaaaaaaataacagcttacaatagcatgtctctatgtgacttcaatacatacaagaaaccaacctggtaattttcacaagacagggaattcattctcacctggaattggaaagtccctggattcccatttgtttttcatcatattgcttcaagctttttctcttttccatttttatcaatatacagaaacttataatacaagaattgaaggagaccatggccattaaagaggacatagagagaggtaacgacagtgttttcgaaagcgcagctgtatctctcttgcaagatgagaatgatatggccggtaaggaagatggataccctgatcaaacaagcagcaaagcaagtctctggacggtttacttcagtacctttgttgctgtgtgtggttcatttgagtttggatcttgtgcaggctattcgtcgccgactcagacagccatcaggacggatctctctctgtctctagcagagtattcaatgtttggttctatattgacttttggtgcaatgattggtgcgatcacaagtggaccgattgctgattttatcggtcggaaaggggcaatgagaacagctactggattttgtgt

SEQ ID NO: 199494 - DNA, 367 bp, Gossypium hirsutum
cctaaattgagagagacagagagagatatggggaaagacgaggaggagatgcgtggcgagatcgaggagcgactcatcaacgaagagtacaaaatttggaaaaagaacactcctttcctctacgatctcgtcattacccatgccctcgaatggccttctctcaccgtcgaatggctccccgaccgtgacgaacctgccggcaaagattactccgtccaaaagatgatcttgggtactcacacctctgaaaacgaacccaattacctcatgcttgctcaagtccagctccctctccaagattccgagaacgacgctcgtcaatatgaccacgataggtctgacctcggtgggtttgggtgtgctagcg

SEQ ID NO: 199495 - DNA, 885 bp, Gossypium hirsutum
attaaaaaccggataaaccaccttttcattgttcactttcatttttccctttaaataataaaacccagacaagggacagccaacggtaccttccaaagaaatcgaaattttgacttatgattctcatatacatacccccagcccccaatatctcccacaaccttccatttacgtcttaactgttgaatgatcaatttccatttattcttttggtttttgaatttttgagtttttagggcgaaaaaaacaatggcgaatttgcaactggaaagagagactagcattgggatgcaagtggaagatctatgggatgttcaagaatcaaagcttaatcctacgcagaaacttaacgcttgctttgaaaacatccctgtctctgctttccctcatactcctcaagggatcgagataaaatcggatgcgagtttggccgaggctgttcaaatacttgcccaaaacaagattcttagtgcaccagttgtcaatgttgatgcacctgaggatgcaagttggattgatagatatcttggcattgtagagtttgcaggcattgctgtatggattctccaacagtcagaaccaccttccacctacaaaccattttgcctaccggagctaatctgcagtagcttctgctaacggaatgccctcttctgccgagctcaggactttaggctctgaagatgcttcaataactgctggagacttttttgaggctctaacatttctccgagttcatagaaaagcaatggtcgggaattcaggatcagttccgctgggcaccgttccatgctttcagcaactcaaaactcgtttttgaccatgctgttactgctttcaagatcaaaagtgaagagattccaatgttaggcttggtgctgaaaa

SEQ ID NO: 199496 - DNA, 418 bp, Gossypium hirsutum
cttttgaggtacatatcaagctgtctcaacctgtctgagaaaacaaagctgccattttacctcacacaggaagaaaataaaaacttaagcaaccaagcaagaaagaaagagcgatgaggcagggagcagcagcaaccaattaagatgatgaataggaacctaagggaatcgctggtgagcggcggcgggaggaataacagtaataacattccgccggcctcccttcatcaccgccgtggcaaaatttttaacgctggattgttccccagggattcagacgagaatttggatcttttctcaaagagtcgccgcagcctctccgtcgcctcctccgatgtgtcagtaaaacagggaagaacatcacatggatcagatgatctactttcttcgacagatggaggaaagcatgattatgact

SEQ ID NO: 199497 - DNA, 424 bp, Gossypium hirsutum
gaagggatcaacaactccagacaccagaaaaaagtaacaaatactctcacttttttcccttttcatttcgacgggactaactctaaattacaggattttattgttggaactgaagttttaaggtgatggcgaggttcaaaccacatgcttggctacaacagagcaaatggaagaaaggcccagctcgaataagtcttacaacaattataatgttgactttgattggcgttttgattctgttttttgtgtttgccacctacagacactggactcaaaggtcaagaattcatattgaaaacagggaatcagctattgagggtgacatctctttcatggattcaaagtaatccgatcttccaggatatgctattttagatactgcgtaatgctctatttcagtggagctctttaaggacattttttc

SEQ ID NO: 199498 - DNA, 456 bp, Gossypium hirsutum
agtgggtgcaccattagctccttctaagccagagccaaagcagcagagaagaggagaggaagatagaaaaatgggcgcaacagccaccggcaaatctctccatttttgctcttcacaggaccccctttcatttctctccctaacaaagacaaaatcaaaagcagaaaccctaaacctcaacttcagattctccaaacccccaattctcgtcgccttcgtctttccattagagcttcttcaccctcctccaccgccctcaatgacccgcctcttccctctctcaccaattccgatcttcaacttcgagttcgaatcctctctgaatcactcccctacattcagaaatttaggggaaaaaccattgtcgtcaaatacggaggcgccgccatgaaatctgcggagctcaaggcctctgttgtcagggacctcgtcctcctctcctgcgttggcctccgt

SEQ ID NO: 199499 - DNA, 800 bp, Gossypium hirsutum
  unsure (1)..(800): unsure at all n locations
gttttgtgatttcctcactgggtcttttttagcatatgggtcttaatgtgaatttttgatccaaaggtgatatttttccgttctttcagttggaaaaatcagtttttgggtgatgaaattgaaggggaaggtaactaggattgctgctggaggtaaccgtgcatccgtgattgggggtaactaatgaatttgtattctctaatctttgtaacaattttgcgttcttttgatggcctcaaaatctagtgtcatacattcccctgaaaagctgaggaaaccatttggtagcgaaactggcgaagggaattcttgtcggctatctcctatacaaatcacaaagacaagttgatttagcgccagttactccaaggatagtgcctaagaaacaaaattcttgttgtaatcaccgagggtatgcagccatcaaaacctcataattagagntncgttgattccttgacgagaaagtagattcaggtctatcctgagtgggggatcaccagagattctcgttacaagaaaagaagcatcgnagctgggattaattcagcttcagaaaatctagtgatggngccaccggcctttgctagactagcgaattgccaaagttgtgataatctgattattatggagtgtaaaacagatttgcagagtgnncaagccatgatgtaggatgaggtctgtaancttaagtgtgttcacaacctatagcaagnttttagggagcttacgctgcaccaaaaaaggnntgttgaccttaattaaattgctgggnnttatagagtttaatagcaaggttc

SEQ ID NO: 199500 - DNA, 924 bp, Gossypium hirsutum
ctgaagttcatgttaacaaattctatatggactactacgatagcggagaggtttcacaatttcacaccgatctatcattgttcgatatgaacgggaaggaagtaatgaggaaaacactgagtgtaaatgaccctttaagatatggtgggattactatataccagacagattggagtttttcggcactgcagatacttaaggatggtgaagggccattcaatttggcaatggcacctctaacgatcaatggagacaagaagcttttcgggacgtttctaccagtaggggacactgattcttctaatgtcaaagggatatcgatgcttgctcgggatctgcagtctattgtcctatatgataaacaagggaaatttgctggggtgcgacgacctaactcaaaacttcctataaagattgatggaacgaaaatcgtcatcgttgatgcaatcggaagtattggtcttgacttgaagaccgatccgggggtcccaccaatctatgctggatttggtgctctaatgctcacaactggcagcacttatttatctcatgcacagatatgggcgttgccagatgggacaacagtaatccttggagggaagactaaccgaagccaaggctgaatttccccatgagatgaatcgcttgcttgatcaggttcctgaaatagtcgagtcatccctttcccagaaaccagattacattggttggctagttttccaggttgccggaaaggcgaggatacgagcattcaagctagccacagttttgtagtttctggtacactcaagatattgttcaatctcaattacagtcaaaccaaagaaggcaacaacgcattcaactgagatgttaagaaccctagtcatggacaataccaaatccacaacttggcagcaaaggagcaaaatttgtttatgaaat

SEQ ID NO: 199501 - DNA, 1224 bp, Gossypium hirsutum
cttttcaaatcctgggtggctgttgacaactcattgttgctaaaattttagtagttatttttaatttctttgctactggcaggcccacactgttctggagatgaactatactgagcagcaacttatttcagctgtgagctctggtggactgcgtccagttcttgctggtattgagtctggagtaccagaaagtatgctgtcactaattcaaaagtgttgggatgcaaatcctcaaaacaggccatcattcaatgatatcgtgttagaactagatgatatgttgcaacaaagaaagaaaatggagaaagaagatttatctcttcaccagcctcccatttctcacttccatcaagtcatggatgatgttaataaacttcatacctatcaggaagagaataactgggtgctctcagggagaatgtgtctccaaaagagcttcatttggagaatattctggtttcacaatgtggcttgatggttttgatgatccttttgcatatcatctattgctttcttggggatcctttgctacatgtggaagacgggagagtatggaggacatgcactttcttatgcctttcctatgcaatgagaaggatgttcatgcttttggtatcttcgatgggcatagaggtacacaaaaccatgatacagaacgctgaagatgcagtagagatcatatatgaggacaaattcttgtaaatcttatctgagaaattaattcaaatacttctctgcccccctctccttgtttgaagctactaaatttgtctgcgttgaggttgaatctagttttcttggtcctatatattatataatgtatataaatttctgttctctggaaaacttgcaggtgcagcagcagctgagttttcagttcaagcattgccagagtttctgggggcctttggttctatgtgcagtcctgctgatgcactggtggaagcatttgttaggacagatgttgcatttagagatgaacttgattctcatcgaaaatcaaggagggttattcagaaagactggcatcctggctgcactgcagctgttgctctaattgttaagaacaagctttttgttgctaatgcaggtgactgcaggacaattttatgtcgaagagggtgccctgtagctctaagtagggatcatgttgcaagctgtcctgaggagagaaaccgtgttgttagtgcagggggggaggtaaaatggcaagttgatacttgg

SEQ ID NO: 199502 - DNA, 329 bp, Gossypium hirsutum
actcaatagcctggacgccattatcattttcgcctttgcatgtcaaaacatcaagtctgttcaaatgatagcagttcccaaaatatctatttttatttgctaccttttccgtttcatttcaccgtccacatcttcagcccgaattttgtggccatctttcttctggagtagtttcattgcatttcaacgtctctcccaccagagacaagacgttggaatgaagaatcgattttgaagctttaagggttcgaacaactagtcttgaagtccatctggagtttctaatatcaaaagctgcatcgaactgtattgtctgccttatcgacccc

SEQ ID NO: 199503 - DNA, 535 bp, Gossypium hirsutum
  unsure (1)..(535): unsure at all n locations
ggctacttgtgcttggttcctctccctttgctttactctcgttttctgtctgtgtaatgcctctcgtacgccacccatttccccatcccttgatggatttttgaccaatggtaacttcgagcaagcacccaagaaagagaacctcaacaaaacagtgatactggggaaatactcgcttccaggatgggaaatcgatggcacgttgtggagttcgtgtcagggggacctcaacctggtgggttttacttccccattccacgtggtgcccatgctgtgaggctgggcaacgaggcgtccatctctcagaatgtgaatgtcaagcctggcttcatttactccatcacatttggtaccacaaggacttgcgcccaagatgaggtgctcaggatctctgtccctgctcagaccactgacatctccattcagaccctttacagcacgatggtggtgacaccatggctatngctttaaagcttccgttaagtagtcaagtcaccttcataaccctgggttcaagaagtaccacatgtggcct

SEQ ID NO: 199504 - DNA, 667 bp, Gossypium hirsutum
cggccgcgtcgaccttttcttttttttttgaaaaatattcttatcaataaaaaatagtgttgattttcatatccaaacacttcttgttatctagcaatttataaatttccagcgtcataaagaaatcaaaccctacacttagggtttcctctctatccccttctcttagaaaaagagaaaaggaaaaacatttctttttaagtatcataattttttgacaatttcagttatgcaatattgacccactttgttaagattaagaaaaaaaaatcttcttttttgctgttaaacgagattgatcgaaaaggattaagtatttgttttattgggtttttaaatttttttttactatttttgttgttaaattggagaaatggagaacaaaaaggtgactgtgccattactgtgccatgggcattcaaggccggtggttgatttgttctacagtcctataactcctgatggattttttcttattagtgccagtaaagactccagtccaatgtgaagaaatggggaaactggagattggattggtacatttgaaaggcataaaggtgcaatatggagctcctgcctggataccaaagcattacgtgcagcatctgcctcggctgacttttctgcgaaactgtgggatgcattgaccggagatgaattgcactcc

SEQ ID NO: 199505 - DNA, 717 bp, Gossypium hirsutum
cccacgcgtccgggagaattgcgtgttggtgtacgacgtgcaatgaggcaggagggcaatgttccttcatcagtaatatcaagtcacagcatgcatcttggtgtgcttgcaacagcatggcatgccttcacaacaaaaaccattttcacggtgtattacaaacctaggacaagtccggctgagtttattgttccatttggtcagtacatggagtcattaaagaataattactcaataggtatgaggtttaaaatgaggtttgaaggggaagaagctcctgaacagaggtttactggaacagtagtcgggattgaggatgctgatcccaaaaggtggcaggattccaagtggagatgtctcaaagtgcgatgggatgagacgtcttccatacctcgtccggagagagtttctccttggaaaattgaacctcctttagctcctcctgccttaaatcccctaccaatgcccaggaccaaaaggcctcgatcccatgcagtaccttcatcccctgattcctctgtgctgactagggaaggttcatccaaagttactatagacccttcgtcagctagtgggttgtcaagggttttgcaaggccaagaattctcgaccttgagaagcaactttgctgagagtattgagtcggacattgctgaaaagtcagtgatgtggcctccttctgtagatgataacaacaaatgatgtggtttctgcttc

SEQ ID NO: 199506 - DNA, 850 bp, Gossypium hirsutum
caaaatcgaaaaaggtcgagtcggcccccgtccgggatcaatggcgacgcatatcctgagacgacaagtgagtcagatcctttcccatgccagccctaaccctaatcctgcctcgtatttctctttagctagacatttctcttcggcaaccgacaccattcgagccactctcttccccggcgatggcatcggccccgagatcgctgagtccgtcaaacaggtttttagaactgctgaagtgccaattgaatgggaagaacattatgtcggggaccaagttgatccaagaactcaaagttttctaacttgggaaagtctagaatcagtaagaaggaatcgggtaggcttgaaaggtccaatggctactccaattggtaaaggtcatcggtctttgaatcttacactaaggaaagaacttaatctgtatgccaacgtcaggccttgttacagtctcccgggttataagactcggtacgatgatgtgaatcttatcactattcgtgaaaacactgaaggggagtacagtggactcgagcatcaagtagtgagaggtgtggttgaaagtctcaagattattactcgtcaggcaagcttaagggtggctgaatatgcttttcattatgctaagacccatggaagagagagagtttctgcaattcataaggccaatattatgcagaaaacagatggtctttttcttaagtgctgtcgtgaagttggcagagaattatcctgagataacttacgaggaagtagtcattgacaattgctgtatgaatgcttgtgaagatcccggcactctttgatgtattggtgatgcctaacctctatggtgacattatcagtgatc

SEQ ID NO: 199507 - DNA, 527 bp, Gossypium hirsutum
cccacgcgtccgctcacctggcattggttcatgtttcttttcactcttcctatcgctgcttatcatctcatgttgtacttgaatcggaagcatcttcttgatgtcactgagattttcagagatcttaatactgagaagaaatatcgttttatcaagttggccgtttacttattgctcttcactgtagttttgttcaggctagtgataactgcgttcaactctttacatgatgaagttgatgtgcatgcattttgattacttggcagtgtggtagttggtatttgtaagtctgtgttgaaagtgaaacctagctaactgcagtagatgttccaacagttcatagtttgattagtttcctgaatgggttttcacaaggggtgattgatgcacagcgtaggttacctacataaatcttccaagttttgtaaaaccgagtgaaaggagtggcatcttcctaaagcaatgggttactccagtatgctttttttcgatctcaaagaaggagaaaaccatgctatgcttatcac

SEQ ID NO: 199508 - DNA, 623 bp, Gossypium hirsutum
ctttaatttaaaaactcaaaaaacagagtgaataaataaaaaacaaacccaccaaacaaaagaagaaagaagcagcagctcacaagaaaggtagaaagcaaagaagaaacaactacggcaccgcacctcacaatacaaagagaaagaaggaatcgagatattaaatcatagccaaaaccccagaaattgcaaaagagtgttttgagattgcaatggcagcgctcaattcttgtaagcttgtttggatctgcgccgtgatcgtggcggcggcgttgatggtggcagttgatgcgagcggtgcccaccactaccacaaccagcaaatcctgggttggattccgacccccaccagatcttcttgcaagggttccataggggaatgcttaggaggggaagaagagtttgagctggactcggagatcagccgccgcgttttgcaaaccaccaggtacataagctacggcgctcttcaaaggaacaccgttccctgctcccgccgtggtgcttcctattacaattgccagcctggagctcaggctaacccttacaaccgtggatgcagccgtatcacaaggtgcaggggctgagcttttttttttcctctttcgaaataaataatttcc

SEQ ID NO: 199509 - DNA, 629 bp, Gossypium hirsutum
cgaaagctaagcaaggaaatggcgatcccttccagttctgcttatctcttcttactctcctttttcaccctttctctattccttgccatttccactgctgaatctgaatctgaattagaactggtggccgatctccgcgcccttcagtccgaatccaaatcaggagtcatccacttagatgaccgaaccatcgccaaattcctaacctcccccaaaacccctcgcccttactctatcctcatcttcttcgacgccacccaactccacgacaaaaccgaactccacctccgcgagctccgccaagagttcgccctcgtcgcctcttccttcatcaccaaccacaacaactccaacaccaagctcttcttcgccgacatcgagttccgcgaatctcaatcttctttccacctcttcggcgtcaactcccttccccacatccgcctcgtcggccccaccgcaaaatcgttgaaagatgagtcggaacagatggaccagggcgatttttctcgattggctgagtcaatggccgaattcgttgagtccagaactaaactcaccgtgggtcgcatccatcgtcctcctattctctcgaaaactcaaatgggtctgatcgttgcccttttgttgcc

SEQ ID NO: 199510 - DNA, 384 bp, Gossypium hirsutum
acagtacaagccgaaagaaatattgcatgatattcacgaccagcatggagtcgctgggtcttatatgcaagcttggcctgggtaggaacggagtatggctgcacttcatgggacttttgaggaagggtatcgtcttcttcctgcatactgtgagcaaataacgaaaaccaatccaggaagtgttgcatcagttgttgctactcgacaagaaaattgtttccagtgcctctttatttcttaccgcgcatctatctacgggtttataagtgcttgcagaccacttctggaacttgataaggtggatctgaaaggaaaatacttgggttcatggctttgtgctgcaccagttgatgcttatgaatgtctgtttcccttggcaattgc

SEQ ID NO: 199511 - DNA, 594 bp, Gossypium hirsutum
cctccccctccccctccccctcggccccgttcgactctcatcacctctgccccaacacggtggggactcaggctcacggcgtttcagagaattcttttgaatttctcctttttattgatcttataattttttggttagtttttgaagcccaagagggatgggatcggagctaatatacagaggccatgagactcagcttgcttcagattcctattcacctaaaccggttaaaccatgggcctctgtcacgcgcgtggtccggtacatgctccgggagcagcgcctcctctttgtgctcgtaggcattgccatagccactctggtcttcaacatcttcccggcctcgcgtgctgcgcacggcccccacctccactccaccaccccgctccttgattctatcccctacttccccatcgagacccaaaacaagttctcctatgcacaccggctcgggttcgggtcgggcaatccaaccggttagaattccgttggggctgaagcggaaggggttgaaaatcgtcgtaacgggtggagctgggttcgtggggtcgcacctcgtggaccgtctgatagcgagaggagacagcgtgatcg

SEQ ID NO: 199512 - DNA, 685 bp, Gossypium hirsutum
cggacgcgtggggccgaaactgtcgtttacatctaacacaaaaatagaaaaaaagttatttcgctttaaaataatataaataaataattgtttttatttttattttttaatttcaccgctactaagaactaatccttttcattctggtttttcgacactccaaattttcagatttcctttcctttctcaccggaaaatgaaaaacatgggcgactttccgacgtttctagtcgtcgcacttttgatcttcagttgtctttcctatgttagatccgacgcttccgatcaccgttacaaggacggtgacgctgtacctctttacgccaataaggttggcccctttcacaaccccagtgaaacctatcgctacttcgatctacccttctgttctccagatcatgtaacggagaagagagaagctttaggtgaggttttgaatggagatcgactcgtgagtgctccttataaattgaattttaaagaggaaaaagattcttctgttgtttgtaagaagcacctttcaaaagatgaggttgcctttttccgaaaggctgtcgacaaggactattatttccaaatgtactatgatgatttgccaatctggggttttatcggaaaagttgataaggaaggaaaaactgatccgagcgagtacaaatatttccttttcaagcatatccagttt

SEQ ID NO: 199513 - DNA, 439 bp, Gossypium hirsutum
cggacgcgtgggctctctctgttttttttttctctctattttctctctttagaacaatcccttcatccaaaaacccaatacaactgttaacaaaccctagaaagaggaagataaagtttcttccaacgattaaagagagaaaatagaggggaaatccaggcacatgcacctagtagaggctacttcgatcaactaggaaatacagacgatttgtatttgaagaaacgatcaaggatgcgtcgttggctttgctgttcctgtcaagcagaggagagttaccaagcacacgaaaacgagcacttgaaagcccccaaggatcatacagatggaaatcatagaaactcaagggtggcagctcctgtcaaacctgaagtgcaaaaatcaccaccacctatcgaagttcctgcactatcgttggaagaattgaaagagaaaacgg

SEQ ID NO: 199514 - DNA, 633 bp, Gossypium hirsutum
gaaaaagatggaatcgattccgctacatgttatttttcagacaccaatctaattaagctctttaactttcctctgttctttagtttactgtctctttcctttgttttgtctctaaacaaaatgtcgaacctatcttctataactgcaactgcagctcttcttctctcgctcatctctactgtcacttcccattactcttcctcctccttctcttcttccccaccggcgccacagtccaccgtctggcactccgcacgcgccacttactatgccgcatcggatcctcgcgacgccgtcggcggtgcttgtgggtatggagacctagtcaaggctgggtacggtatggcgactgtgggtttaagtgaagctttgtttcagcgtggacagatctgcggtgcttgtttcgagttaaggtgtgtggacgacctgcggtggtgcatacctgggacatcttacattgtcaccgccactaatttctgtgctccaaattatgggttcacggcggaaggcggtgggcgttgtaatcctcctaacaaacactttgtacttcccattgaagcttttgaaaagattgctatttggaaagctggtaacatgcctgtccaatatcgaaggataaattgcacaaaaaat

SEQ ID NO: 199515 - DNA, 460 bp, Gossypium hirsutum
ggacaatcctactaaatcttgcaaagctaggggttccttcacgccgtgtaccgtgttggcgatcttgatcgtaccatcaagttctacactgagtgttttgggatgaaattgttgaggaaaagagatattcctgaagagaaatactccaatgcctttcttgggtttggcccagaggagtctcatttcgttgttgagttaacttacaattatggagtatcatcgtatgatattggaactggttttgggcattttgcaattgcaacacctgatgtctacaaaatggttgacgagtacaggcgaccactttattattcaagtgcctagtctagtcaagtcttccttaattatgtgatatgaatacgatgatgatgcagcaactccttctgggttttaattctaatttgatgttgaggtgttgctactcttgaactgatcttgatgtactttgtgatattataaa

SEQ ID NO: 199516 - DNA, 457 bp, Gossypium hirsutum
acgcgtccgcccacgcgtccgaaaaaagttctcttttccctggcgttagttgaaccacttgagatcttttcacaaatatcaccaaatatgccttcaaagtgcgaaatttgttgtgagctcctcatcgccattttgctccctcctttgggtgtttgcttaaggcacggttgttgcagcgttgagttctgcatctgtctgctgttaacgattctgggttacatccctgggataatctatgccctttacgccattgtttttgtggatcgagacgagtactttgacgagtacaggcgaccactttattattcaagtgcctagtctagtcaagtcttccttaattatgtgatatgaatacgatgatgatgcagcaactccttctgggttttaattttaatttgatgttgagggtgttgctactcttgaactggtcttgatgtactttgtgatattataaatt

SEQ ID NO: 199517 - DNA, 391 bp, Gossypium hirsutum
ctcactcccactctcactctatttttctctagtaattgctgcaatcggatttgttgaaagatggctgagggttcagctgcagttcccagcactgagttgttggaatggccgaagaaagataagcgtcggttccttcacgccgtgtaccgtgttggcgatcttgatcgtaccatcaagttctacactgagtgttttgggatgaaattgttgaggaaaagagatattcctgaagagaaatactccaatgcctttcttgggtttggcccagaggagtctcaatttcgttgttgagttaacttacaattatggagtatcatcgtatgatattggaaactggtttttgggcattttgcaattgcaacacctgatgtctaacaaatggttgaagaca

SEQ ID NO: 199518 - DNA, 413 bp, Gossypium hirsutum
cccacgcgtccgtttcttttcatctcaaaaattgaaatttcaccgtcaaagctttttcccctcaggttcgagctctgaaatggcaaccgagaataacagttccagggtcggatctggatccggatctcatactgtcaacggcgacgcggctcctgaccgcaagatcgcgttgatcactggcatcaccggtcaagatggttcctacctgaccgaattcctcctcaacaaaggctatgaagtccatggcttgatccgccgctcttccaacttcaatacgcagcgtatcaaccacatctacattgatccacataacgcccacaaggctcggatgaagctccattacgctgacctcaccgacgcttcctcgcttcgtcgctggctcgatactattcgacccgatgaggtttacaatc

SEQ ID NO: 199519 - DNA, 448 bp, Gossypium hirsutum
cccacgcgtccgcttttcttactttttattttcgttatttttttcatgattgtgcagatcagcccttaacctttcattttctttttggtttttttttttcgaagtattttttttgttgttgtttttcatgaagagaagaagctttacgtatggtttttctgaaattttgaatggtttttgaaagtaacaaagaagatgacgtcgacttcggtagcaacttcgtcttctaggatttgcttcaattcagtctgtaacgatttgaaatcggaaagaccgaggaaaggatggcggttgcgaacgggagagttggctgagctctgtgatcgatgcgcttctatttacgatgagggaagaccttgcgatacttttcacttaatgggcttcttagacgagagaaccgaacacatgagctcagaagccttatggcccaagcgatgcccttttttgc

SEQ ID NO: 199520 - DNA, 565 bp, Gossypium hirsutum
cactgagaagcagggattgaagatgctagtaactgcaggtccacgtgctcagaaaatggtggggatatggctttttggttctgctgcatgggtttttagtatggtggtactaagtggtgtcacacgattaacccgatctggcctttcaatgactgattggaaattcgccgggaaccttcctcccctatctgatgacgagtggcagcaagagtttgagaaatacaagcagtcaccagagtacaagcgagtaaacaaagggatgagtattgaagagtttaaatttatatactggatggaatatgcccatcgaatgtgggggagagccctaggcgtcatgtttgcattgccgttctcgtattttcttcgtaagggatatattaccatgcgccttggactaagactctctgctctatttgctcttggtgctggtcagggtttaattggttggtggatggttaaaagtggattagaggaaccagcttcggaatatgttgagccccgagtgagcccttatagacttgctgctcatcttacttctgcattcgttatttatagtggcctgttt

SEQ ID NO: 199521 - DNA, 671 bp, Gossypium hirsutum
cggacgcgtgggttctcgactcactcttcccacttcttcgaagtctttctactgctgcaaatccctgtcttcccctacttcaccttctcccctcagatcccgatctagggtttcgccgccaattcttttttcgcatttcgatcgctcttttttcttaccttaaatggcgattgcagcccaagctccagatattctcggcgagcgtcaatctggtcaggatgttcgcactcaaaacgtgatggcgtgtcaagcagttgccaacattgttaaatcctcactcggcccggttggactcgacaagatgcttgttgatgacattggtgatgtaacgattactaatgatggtgctacgatcctgaagatgttggaagtagagcatccagctgccaaggtacttgtagagttggctgagcttcaagatcgagaagttggtgatggaacaacctctgttgttattgtggcggcagaatttctcaagagagcaaacgatctggttaggaataaaattcacccaacatctataattagcggcttcagactagcaatgagggaagcatgcaaatatgttgaagaaaagttggccgtgaaagttgagaagcttgggagagattctctagtaaactgtgccaagacgagtatgtcctcaaagctcataactggtgacagtgact

SEQ ID NO: 199522 - DNA, 619 bp, Gossypium hirsutum
  unsure (1)..(619): unsure at all n locations
ctggaggaggcacttatgaagtcatggtgacaaggccacggttggatttgtatatgaaccttccggcccttaagaagcttgatgcaattttgattaccatgcttgatggttttagtgagacggagttttggtatgttgatcggggtatagttgtgggtgatggtggtgactgtggtgcttattcatcgtctgtttctggagggagaccctcaattaggcaggaagagaagtggtggttgccgtgtccgaaagttccaccgaatggtttgtctgaagatgcaaggaagaagctgcaacaatgtagggatagcacaaaccaagtactaaaggctgccatggcgatcaataacagcgtgctcgctgagatggagattcctactgcttacttggagacattaccaaagaatggaaaagattgtttgggtgatatcatttaccgctacattacagctgatcagttctcgccggaatgtctccttgattgccttgatctgtcaacagaacatcaaactctggaaatagctaacaggattgaggcagcagtacatgtttggaagcaganagatcagagganacacacnaatcacaccaaagggaagcgcttgtcatggggaagaat

SEQ ID NO: 199523 - DNA, 370 bp, Gossypium hirsutum
ggccaacgtacaaggagggtgtcgggtcggctgccaagagttttggtcttggctccgactcgggagttagccaaacaagtggagaaagaaattaaggagtcggcgtcttatttgaacacggtttgcgtgtatggaggggtttcttataatttgcagcgaaatgctctttcccgtggggttgatgtagtggtcggaactcctggtcgaatcattgatctgatcgaaagtgaagacctcagattgggggaagttgaatatctggtccttgatgaagctgatcagatgcttgctgtcggatttcgggaggctgttgaagagattttagaaaatctaccatcaaagaggcagagcatgcttttctctgcaacca

SEQ ID NO: 199524 - DNA, 595 bp, Gossypium hirsutum
caaaaaggaaagaatgatgaacccccctagcaactccaaaacccccaaaaatttctcgccattcaaacaaacccctcctctccaagacctccagcaagccttctcgaacatccagacccactgctcttctctcttccgacaaactcaaaatcagttaatggacgcttttaactccaccttttctcactttaatccgccttctttttctccaaaagggccggtttttgctcgaattgctgattctagcaagacccagattgctttgagtaaaaaaaacggtgatgccatgccggcagagaaattagaagagagattggctggggttccggtctatgccttgagtaactcagaggaggaattcgcgttggtttcgggtgtttcgacgaaaaaatcacttgggttgttgcgtttcaagaaggaggacgctgaggctcttttggaacagatgaagaatatggatcctggcatgcgaaaaggaggctctaaagtggctgctgttgctcttaacaaggttgtccagctgcaggttgctggtgtggcacttaggctggtaccagagtccactcagatcaagaatgcacttagatctaggagc

SEQ ID NO: 199525 - DNA, 775 bp, Gossypium hirsutum
ctccagcccagaatccccctatggcagcagcgccgccgcctccaacctctgccacggtgaccgactccgagtcacctgctgttttagaaaaacaagacccttccccgccgtctcatgtaccagctgtgtctgtttctgttaccgaatctgcttctacgactatagctgaaaatgaagagcaggctccgccaccggaaccggcggcattggaacctgattcatcggataaagggtcagggaaagaggagctgcctccgacgccaccgccgcaagcagtggagtcagaatctgagccacctgttgtcaccgaggcaccaaaggaagaaaacccaccagctccagcagcagaaactgtagtgatatcggaatccgagccgcagcagccgcctgctccactgcagcaggaggtggttacggagtcggagtcactggcggcgatgatggagaaagaagagacgggagcaccagcagagcctactgcggcgggtactactactactactacaactagtgctcaagaagaggtggctgctgctgttgaagagaaaaaggttcctcaaaatctggcttctttcaaagaggaaagcaacaaggaagctgatctatccgattccgaaaggaaagctttggaagaactgaagcagcttgttagagaagcaatagactctaaccttttcaattcagaatccaaaagtgaagaaaacccagaaaaggaaaagaaacaagaatcaaaagaggtatccatttgggggtattcctctcttaaaagatgaaa

SEQ ID NO: 199526 - DNA, 412 bp, Gossypium hirsutum
cccacgcgtccgggggaacccaaaggttctgcgtcgttcggccatcattgcatcactgcgacgatgaatgacgaccttcggtgaccccccctttttgctctttcattcactccagcgtggaactcatcgatttaagccccgaaatcccatctccgacttcgatttcagcgaaggagacgaggtcttcaatagctcgtacgcaaaggtaaagtttcactctccctcttttattttattatacagaaacatatgaaagcgaaaggaatatgaaacagatgcgaaaaagaaaagaaaaaaaagcacgaggagttcgaaaagatcaccttcttggtctattgcttttctattgatttgctgtctgtggttggatttgtgtggttctctcaaaaaaaaaactttacaatcgaaaatc

SEQ ID NO: 199527 - DNA, 481 bp, Gossypium hirsutum
atttttcagttcttgttaacatggacatgagtctgcagtcaatggaagttgtgaaccgggttacaactgctgttgaacttccgaaggaatttgttcgtacatacataactaattgtatatcatcctgtgaaaacatcaaggataagtacatgcagaataggcttgtgcgactcgtatgtgttttcttgcagagtttaatccgaaacagaattattgatgttaaggatctgtttatcgaagttcaagccttctgcatcgagttttcaaggattagagaggcagccggtttatttaggctggtgaaaaccttggaataaagggtgcctgtgttctatcccttacctgcatttaaacaaagttctacctcgtaagaaagtgtagattatatgattgtagtttgggacccgataactgctggctttagatattccgaaactgaaaaattagtccgcaatgcgtttgcaggaataatattagcaga

SEQ ID NO: 199528 - DNA, 545 bp, Gossypium hirsutum
  unsure (1)..(545): unsure at all n locations
tcgcagactggatttgagattctcgctggacgaagagcaaagaaccctagctagtttgctgagttagattggcctaagaaggctcagccaacctctgcttttactccggtaattgacactcgtcgggttcccctccacctttcctacctttcaattctttgctttgcggtagcttctttggtagcaaatggtgcaatggtagcttgtggtagcaccgctctctgttggaggtaattgctcacttgtgtgtcagcttgatgctttttagtttgcaatcatacataggggtataggaagggtagttgggaaatcatgggggagtttctggttttgtttcattttatgattggcgattgctgcttccttatgaagcactggcaaaatgttcatgggaggatgaggagaccaatttaagttactaatattttattccttggggagcatcttggagcaaatgactatggaactggggagcacactctctgttgaagattgctttttgagtgctgtttttggttttgcataanctttgttctatcttaagt

SEQ ID NO: 199529 - DNA, 608 bp, Gossypium hirsutum
  unsure (1)..(608): unsure at all n locations
cttactcgtccgcccacaaatgtttgtagtattaagaaaaaattagaaaaaaaaagaacaaaatccccaagcagcagcagccaaaaacgggggcaaattgaagaatgggtgttgattattacaagattcttcaggtcgaccgcaatgcaaaagatgaagatttgaagaaagcgtatcgtaaactagccatgaagtggcatcctgataagaaccctaacaacaagaaagatgctgaagcgaaatttaagcaaatctctgaagcttatgatgttctgagtgatccccaaaaacgggcggtttatgatcaatacggagaagaagggttaaaaggccagatgccgcctccaggggcgggaggttttggaggcggtgacagtggtggtccaacgacgttccggttcaatactcgcaaccctgacgatattttctcggagttttttgggttttcgagtccgtttgggatgggtgatatgggtgggccacgtgcangggcgtctgggttccctangggaatgtttggtgaaaatatattcngctcgtttangggtggtgctggtgaaggttctaccactatgcctccaaaaggtgcccctattgatcggccattc

SEQ ID NO: 199530 - DNA, 645 bp, Gossypium hirsutum
  unsure (1)..(645): unsure at all n locations
accaagtcttagggatggtcctggtgttcaaattgctgcccaaacttttagtttccgtgaactcgctgctgcaacaaaaaatttcaggccggaatctttcttaggtgaaggtggattcggacgtgtttacaaagggcggctcgagagtactggtcaggtanttgcagtcaaacagttggacagaaatggtctccagggtaacagggaattccttgttgaggttctcatgctcagccttcttcatcaccgtaatctcgtgaacctgatcggttattgtgccgatggggatcaacggcttcttgtatacgaattcatgcccttgggatccttggaagatcatcttcatgatcttccacccggtaaggaaccgttggactggaacacgagaatgaagatagcagccggtgcagccaagggtttggagtacctccatgataaagcaaaccctcctgttatttacagggacttcaagtcctccaacatattactggaagaaggatttcacccgaagttatccgattttgggctcgcgaaacttggtcccgttggagataaatcgcatgtttccacccaggttatgggcacatatgggtattgtgctnctgagtatgccatgactggtccattgacggtgaaatctgatgt

SEQ ID NO: 199531 - DNA, 664 bp, Gossypium hirsutum
attaaactgataatcactggatccgccaagcttcaaatggcaacccagttgcctgatttcatgctgatcttcgtcatcagttgcctaggtttcatctccctttgtaaaccaatcctcggtttcatcaaatgggtgtgggtcatgttcctcaggccgccaaagaatctcaagcaccactacggttcatgggccatagtcaccggctgcaccgatgggatcgggacagccctggcgttccaactggcatccaagggtcttaacttggtcttggtggggcgaaaccctttgaaacttgtagcaaccgccgatgccatacgtgaaaatttcggcgcacaagttgggaccagaaacgtcgtcattgacttggcgaaaaccagcggagaagagatatctaagacgatggaggatgctattgaagggctagacattggcgtactggtgaacaacgccggcttggcctacaaaggagcgaggttcttacacaaagtggattcggaggtggcggagagcattataaaggtgaatatagtggcggcgacttggattactaaagcagtggttccgattatggcgaaaaaaaaaaaggggccattgttaacgttccgtctggttcttatggcggcttctgttcttaccctttatacaccatttatgctgctacaat

SEQ ID NO: 199532 - DNA, 559 bp, Gossypium hirsutum
tgaacagactcaaatccggcgcggaacgcgtctgcgttttcgccaacatctacaaccaaggcttcacggcggaatatgatgtgagtctcattgataatagctgggctcaagatgcttttgatattgtcagaggcaacacttcacattcatggcagaagcttgatgccggtggtcatctatcacattcatttgaattagaggccaaaaggaagggaatgtttcatggtgctccagcagtcatatatttccgaattcccaccaaggctgttcaacaggaggcgtattcaactccaatcttgcccttagatatccttgaggaaagaccgcctgagaagaagtttgagtgggctaagaggttgatggctaagtatgggtctcaaatctccgtgatatcaattgtggttctgttcatctacctgataataaccccatcaaaagcaagcaagaagaagcgcttaaatagagtgcctccatttaatgcacaacatactttctttgttgtttctgtttgcagttaaaataagttctatggttgggttctggattttctaatgagaat

SEQ ID NO: 199533 - DNA, 390 bp, Gossypium hirsutum
cccacgcgtccggttttatgattttgaatatctgcatttaccttcgcttacttccccttttctactgggaacaagggtggttgaatattcgtgaatcccaagccacctaggtaactaccacctgtcacaaattctggcatcataaccggaaaattcgatgggaaacacttcctccatgctcactcagtatgacatcgaagaagtacaacaacactgtaacaacgccttttcgcagcaggagatcgtctctctatacgaaagattctgtcagttggatcgaaacggcggcggtttcgtctccggcgaggagtttttgtccgtgcctgagttcgctgttaatcctctctctcagagattgttgacgatgctagatggattgaatttcaagga

SEQ ID NO: 199534 - DNA, 337 bp, Gossypium hirsutum
taaaccttttttcttcattcctgttaccattttcaagagtcttcttctttcaaaaatttccttcaatcttggatttcttggccattcttcgtaccgtcactccttcgtggtggaacaacctcatctcttaccagtctccccttattgtggctgatcggagacccagtgaaattcccaatttgactgcctgtggacaagctaaagcctctgtccggggaagggagatgacactttggaatgaaggcactgctctaaaactttcatctctcccctactattacgtgcaatgacccctgacgccgatctggatctatttgcctcgaaagctggatcaaaa

SEQ ID NO: 199535 - DNA, 469 bp, Gossypium hirsutum
tttcacgcgtccgggaaaaaaaaattctttttgggtcaatctgaataagttcttatttttatgtttttggtcattttctgtctgggatttccagcttttaagtgcagtctcggtttaattatgaaaactcaaacgaagaaaggaaaaatagggactttgattaattagaaaacgcatcttcttccccttcgctttcgactttcttttaggggttttaaacaaagaacacgagaatccacacggcaaattatggttgacagaagctatcaatgcaaaggtgtgctaatcttagcttatcagagttttggtgtactctttggtgacctaagtatttcaccactttatgtctttaaaagcacattctctgggaatttgagtaattatcaatctgaagatgtcatctttggggccctatctttgattttttggactttgacacttcttttctttgtcaaacatgtcattattt

SEQ ID NO: 199536 - DNA, 1015 bp, Gossypium hirsutum
  unsure (1)..(1015): unsure at all n locations
gtgcgcacccagtgggcttcacctggttgccttcattctccacgtttctcgacaaggtcagttaagattgcagtttgcgtgaaatttcctgcaactataaaaactctcttactcaaacaaagctttgccttaactcgccttctcaacccgccccactcgctttcaatgtctttctctagctccagctgcatggatggatcttatgctgagattgtggtggtgcgacatggagaaaccgagtggaatgctgatggaagaattcaggggcacctggatgtggaattaaatgaagctgggaaacagcaagcagctttagtggctgatcgtttatcaaaagagcctaagatatccgctgtatattcatctgatttgaagcgagcccttgtgacagctgagacaattgcagctaagtgtggtgggttagaggttataacagatccagacctaagggagcggaatttaggggaactacaaggccttgtatttcgtgaagcagccaaacttagtcctaaagctcacaaggcctttttatcacacagaacagatcaagatataccaggtggtggagaaagcctaggccacctctttcagcgctgcacatcttcattgcagagaattggcaacaagcataaaggagagcgagttgttgtggtttcccatggtggtgtcattagatccctctacaagcgtgcttgcccaaatgggaagtctggaggaaaggtgcttaatacatctgtaaacatatttcacttgtgtgatgaggaatggaccataaaatcctggggtgatgttagtcatctccaacaaacaggatatctggagtccggtttcggangggacaaaacatctggttagtttgttatatttgatacttgatatgccatattattgttttaggcagcancatgggttatgtctcttcttaataagattttggagcagctcctgcataagcatttattagtgaggcaacttttattttaattaccatctgaaaggcgtgtgttttccaact

SEQ ID NO: 199537 - DNA, 802 bp, Gossypium hirsutum
cccacgcgtccgcggacgcgtggggcatttttgtttctcaacaatcacttttctctctctaaatcttgtacgcgttgcgaggcgaggaagtaaccggcggcggagatcagtggcggagctgagctgagtcgtcagcggaagagatagttccggcaatgggaagcttgcgtggcatttcgattgccatttttgtagttcaagctctgttagcttcagtagctttggtttcagctcaaggatctgctactccttctcgttggcagactttaagcggggaagcacccgttgtcatagctcgtggtggattttcaggaatattttcagactccagttttggagcttatagtttggctttagtaacgggtccttctgatgtgatcttgtggtgtgatgtgcaattaacaaaagatggagccgggatttgctttcctgatcttaagctagataataattctaacattgcaactgtttttacagataagccgaagacttaccttgttaatggggtctttaccaagggactttttttcattgattatactctcaacgatttatgaagtgtatatttatatcaatgaatttatactgtgaatatataatttgatgtggataatttcccaattattaacgtttaatattcctatcttaattgaactctataaatttggtttataatttaattttgtttattattcattcaaaatatttcataggagttagatatttacaatttaaattatattttatgtttaatattattaatatgtggtatttatatgcttatatgtctatgttttgatat

SEQ ID NO: 199538 - DNA, 628 bp, Gossypium hirsutum
gaatctatacgctcacgatctctctttatttgatttcaccaacttctctgataatcctatcatcgatcacccttcatctttcgcttcctttatcactacacctcccagtgattctgatgatgttgatgctggaaataaaccaacttccaccgctactcctaggagtccaccaaagcaccgccatgaccggacctcgccgttgcctttggggatggattggtctttacctcctcgcagatgggatgggcgggacactgtttggcctcacaatcctcagacagggtggagttactgtgttacaattccttcttggattattctgccaacatctggaggttcagatattgtcgtgttttaccgggttcaagttggcattcaatcaccagaaggcgtcactaccacccgggaaatattacgaagatttagtgatttcttgaagctactatctgaacttaagaagatatttcccaagaaaaatctgcctccagctcctccaaagagaattttgagggtaaaaaacagaacactgttggaggagagaaggtgttctttggaggattggatggaaaaacttttatcagatattgatatttccagaagtgtttcagtggcaacatttcttgagctc

SEQ ID NO: 199539 - DNA, 580 bp, Gossypium hirsutum
tccacgcgtccgcccacgcgtccgaaaaagcacaggccacatagaacaatgcacaaagcttcaaaggttggcttgcacgcttagcactcacagcatttcacggtttacaccatttttctctttcagatttgctttaattttaccttcactttagacccataaaagaagaaaaggaaaacaggaaggagacatcgaaagaacccatcgttgttgctgcagaaatctcaaaagggcatggcctcaaccgagagttccagatcttcaactgctggctctcccgattcatacataggcagcttgataagcttgacgtccaagtctgaaatcagatatgaaggtgttctgtttaatatcaacactgaagaatccagcatcggcttgagaaatgtaaggtcatttggaacggaagggcggaaaaaagatggtccacaagtgccagcaagtgataaaatttatgaatatatactggttccgtgaagtgacatcaaggacttgcaggttaaatcttcaccaccaccagttcagactccggcacctatacacaatgatcctgctattatacaggctcactatccccaat

SEQ ID NO: 199540 - DNA, 507 bp, Gossypium hirsutum
tatttaaaccctaactttcccttaactttgaaaccctgattttcgtctcctctttcaaaatggaaattgaaagagaaaccaatgaaggcaactcaaggaggattcaagtccgatttataacgaaattaaaagcaccatataaagttccgacaacagccattgccatcccttctgacctctctcgtttaggcctttcctccattgttaacaagcttcttcaagctgcagtggattctgagtggaaaaccgagccctttgatttcctgatcgatggggagctggttcggatgtcacttgagcagtttcttcttgtcaagggcatctctgcggagaaaattttggaaattgaatacataagagctgttgcccctcgaaaagaggaagagccttctccgcatgatgattgggtcagtgctggtgacggttctagtcctaggttcattttgactggttgctatgatagtttgggaaagatatggaaacaagcttgatggtgtacgcatatac

SEQ ID NO: 199541 - DNA, 452 bp, Gossypium hirsutum
cccacgcgtccggttcctctgcaagcatttctcggctgaagaatttgaacaggaggactctcgatgttctagctgctaggctgtacttctattactctctttgctatgagctcacgggtgctcttgctgaaattaggggtaaccttctagccctgcaccggattgcaacattgcgccatgacgagctgggtcaggagactcttctcaacctgctacttcgcaattacctccattacaatttgtatgaccaagctgagaaactgagatcaaaggcacctagatttgaagctcactcaaaccagcagttttgctcgctacctctcttacttggggaagattaggacaatccaattggagtacactgatgccaaagagtgtcttcttacaagctgctcggaaagcccctattgcagtctctggttttcgggttcaatgcaacaaatgggcaatca

SEQ ID NO: 199542 - DNA, 380 bp, Gossypium hirsutum
cttaggtattgcttggtgccaagcaatgctataggttaaccaccctcgatggtgtcttttatgttattacttgtgtatcatagcatacaaccaatcgacatgttgcatcatgaaggcgtcttcgtcgatagtgtggtatgacaaactgattagttttagatggtattaacccaaaagttctttaattaagtctgcttttggatgtaaaggcgaacaacgagcttgcattatttaacatagcatacagccaatttgacatgatgcatcatgaaggcgtcttcatcgacagttatgagacaatgattaattctagatattattaaccaggaagttttaattttaattcactcttgtcttagattggcaaccaatttttttat

SEQ ID NO: 199543 - DNA, 426 bp, Gossypium hirsutum
cggacgcgtgggcttcaacataataatctcaaggattgggatcagtgttcgtcctccaaaacccagaaaaaagaaggtttcgaatcgacttcaaattctgacaagtaattgttaaaattttgattgagggtccttcggatttcctctggtaaatcctttcagcgctctcaagttggttcccaaagagagggtaaaaagcctgggaatgctggaagatgtgcctcatcgttcaaaattccatttttgaagttgatgagcttacggcttttcgatcctttttcatctttgatgattctggatttggagttattggcgaaccatcactaactctccatgcacagaagcagaattggcatataagtgatacgagagcaccttttctggtattgcgtgaactttgcggagacggttgagctcattataata

SEQ ID NO: 199544 - DNA, 902 bp, Gossypium hirsutum
  unsure (1)..(902): unsure at all n locations
gaaccccagtttgcacattcccagaaccagtgaaatccagggactgttccacttggtttacgtcacttggttgtggtttcgggccgattacattgcaccattaatccaagccttgtctaaattctgtgtagctctattccttatccaatctgcagaccgtatggtactttgcttaggctgcttttggattaaatacaagaagattaagccgagaattgaggggaatccattcaagtcaaatgatgtcgagggatctggttacgactaccccatggttcttgttcaaatcccaatgtgtaacgagagggaggtatatgagcagtctatctctgctgtctgccaacttgattggccaaaggaccgattattgattcaggttctggatgattccgatgatgaaagcatccagtgtttaattaaagcagaggttgctacatcgaaccaaaggggtatcaacataatttatagacatcggttaataagaactggttacaaggctgggaatcttaagtctgcaatgagctgcgagtatgtacaggcctatgagtttgtagcaatattcgatgctgatttccaacctaacctgaaatttctaaagcaaacggtgccacatttcaaggacaaccccgagttaggtttagttcaggctagatgggcttttgtgaacaaggatgagaatttgttgatacgactacagaacattaatttgtgtttcacttttgaagttgagcagcagttatggtgtgtttttaaattctttggattaatggacgctggtgtttggagaattaagctttgaggaactggagctgcttgaaagacaaccgtgagattggactagccattctgcactctcatggttgaaatcatctcctaagattaaagtccctattactttcatn

SEQ ID NO: 199545 - DNA, 773 bp, Gossypium hirsutum
cccatgcgtccggaacccttttgggaattacctcatgcagaagttgttggaagtgtgtaatgaagaacagagaatgcagattctgttaatggttactgaagaaccaggtgcaacttgttagaatatctctcaacactcatggcactcgtgtagttcaaaagttgatcgagactctcaaaaccaggcagcaaatttcactggttatatcagtacttgagcctgggtttctatctctcatcaaggacctgaacggaaatcatgtcgtgcagcgttgcttgcaatgtcttagcagtgaagataacaagtttatctttgtagctgccgcaaagtattgcgttgatattgcaactcatcagcacggctgttgcgttttgcaacgatgtattagccattcaactggtgagtatcgagaaaagttggttgaagaaatatccaccaatgggcttctactagcacaggatgcatatggaaattatgttgttcagtttatcttggagttaaaaatcccatctgccacttcaactttggtttctcaatttcaagggaactatgtacacctctcatcgcaaaagttcagcagtcatgtggttgaaaagtgtctcgcggtattaaatgacgagagccggtcaagaatcatccgtgaattgctctctgcaactcacttcgaacggttgctacaagatcctcatgcaaactatgttgtgcaaactgctctccgtgtttctgaaggaactctgcacaactctctcatcgaagcaatccagtcccgtatt

SEQ ID NO: 199546 - DNA, 749 bp, Gossypium hirsutum
  unsure (1)..(749): unsure at all n locations
ctcaaaggtagccgtcaaaaacagggattaccgactaaggagctgacagtgacatgggcccctgatgtttatgatcctctgccaacatccgttttgcacacagttagaggcaaaaaagcagcagaagttgaagaagaacagtgataagaagaaaaaaggaaagaaatggcacaagggaaacaactccttgcgtggtggtggtaaagacaacaaacagtttcacagaggtggtgggagtttggataagtggtataactacaaaccacttgagcttcatggtacggtagtcaacgatgcctcaggcaaccttgatggttttaaggttggcagtacagacccctactgtgggactagttatctgaaaaattcactcactagaatgcactactctgtggcggaggctttatgactaaggctcttccttttaccggttcctgtagataaataagcccttttttctgtcctcccgtatgaatattttgaacatttgcctttaggttgcaatttgctatgctatgatctttttgataatgtgcgggatcgngaaggttttgttcagggcgctgtttgtgctgtgtaggaggcagtacttgaacagcttaactgccttcttgctttgtgaaataggaatttttggtttgatcaaatagcagacagtgagattgtattggaatcttatgctcttattttctattattagctntgtgaactaaacatagcatttcatcaaaaaaaaaaaaaaagggcgg

SEQ ID NO: 199547 - DNA, 448 bp, Gossypium hirsutum
aagaaattgagggcaaagggaatggaggcttcttctgtcactgaaaattcttccactggcaatgaccacgagcaagagcctgttttgaatcatggaggcacggagtcgaaccctgagactgatcgagaagaagaagaactagacggagaacaagttaggcgcgtattgcaagttagtgccgctactgggaaattttggcataattgggataagctgaagagcatgctatcctttcagttgaaactggttttatcagagtatcctgaggcaaaaatggcggttgagcaacaaaatgcttcactaggtgaaacttacctagagttggttacacggctaaatgaagagcttcattcttttattgagggcccaccatttacccttcaaagactctgtgagatcctactggatgcaagaagcatctatccaaaactcttgaagcttgccctag

SEQ ID NO: 199548 - DNA, 730 bp, Gossypium hirsutum
gatgaagcaaagtacccaattatgtcccctttgagggaaattgttgatggtattcacactcaagtggcaaaaattgaggatgatctcaaggttcgtgttgctgagtataacaatgtgcgcgggcagcttaatgccatcaaccgaaagcaaagtggaagcttggctgttcgtgatctatctaatctagtgaagccagaggatatcattacttcggaacacctggtgactctccttgcagttgttcccaagtattctcagaaggattggctttcaagctacgaaacattgactacctatgtggtccctaggtcctccaagaagttgtatgaagataatgaatatgctctttacactgtcacgttatttggtcgcgtcgctgacaatttcagaactagtgcacgggaacgaggcttccaaattcgtgattttgaatatagtccagaagcacaagaaagtcgtaagcaggaactagagaaattggtacaagaccaagatagcttgcgaagctcacttttgcaatggtgttacactagttatggggaggttttcagctcctggatgcatttttgtgctgtacgtatctttgcagagagcattctaagatacggtctgccgccgtctttcctggcatgcgttttgtccccgtctacaaagggtgagaagaaagtgcggtccatccttgaaggattatgtgatagcacaaacagcacatactggaagactgaagatg

SEQ ID NO: 199549 - DNA, 651 bp, Gossypium hirsutum
  unsure (1)..(651): unsure at all n locations
gccaagcaaacagaaagagaaaaacatgagaagccaaaatctaatggcaacctttagaagatcaaagggtggaagacgatccaaggctattgaaggatgcaaaaaacacccaaaacacaagcaatcaccaggcgtttgttcactgtgtttacaacaaaaactctctcagctatcgtttgaatattccatcccacgatgtcgtatccccattacagttgactcttccatttgttcttcatcgtcaacatcatcttcatcttcttcattgtcatcttattattcttcagcttcaacttctgcttcttcttctcctacacataactaccatttggttagagaaggaaagggtaattcgtttcccttgttactggttagtggcatgaaaaggaattgtgggttcttctcaaagttgcttcatcatcacagcaacactaccaccatggttcattatggtggtgttntttatgggttttcagtcttcttcttcttctttntccatatatatacatcagctgtgatcagttntctttgggtcatttttgactgatcatagcanatccagtttcaacanaaagatatatattntgatcttgattgatcttgcttctatcagtcattgttattctncgtcccaacgatatatattaatgt

SEQ ID NO: 199550 - DNA, 758 bp, Gossypium hirsutum
catcaggggactcaatgtgtatggaggtacaaaagaatcagaagcctcaaatttgtgaaacctgcgaacagtgtgactacgagattgaatatgctgatcgtagctcctccctgggggttcttgcaaaagataagcttcacttggtgactgcaaatggatcaattaccaacttagatgttgttttcgggtgcgcatatgatcaacaaggcatacttttgaacacactatcaaagacagatggaattcttggactaagcaaggctaaagttagcttgccttctcaattggcaagcaaagggattattaacaatgtggttggtcattgccttgcaacagatgtcgcttccggcggatatatgttcttaggtgatgattttgtaccaaaccggggcatgtcatgggttcctatgcttggaagcccttcaatagaattttaccacacacaacttgtgaaaatcaattacggaagtagctccctcagtttaggtgcaaaagacagtgacaaggcaggagttgtgttcgacagtggcagttcttatacgtacttcacaaaacaagcatatgccgaattggtctcttctcttagtgaggtttccgagctaggatttatccaagatgcatcagatccaacacttccaatctgttggcgggctccatttcctatcagaactattatggatgttaaaaagtacttcaagactttaacccttcattttgggagcaaatggtggattatatccaagaaatttcatattcct

SEQ ID NO: 199551 - DNA, 895 bp, Gossypium hirsutum
  unsure (1)..(895): unsure at all n locations
ggttaacttaactcgtgccgtgttaggctaccgctaggtgtcgctgggtgacgattatttgttgcagaggaggagcaggagcttgtaggaagttcaaactttaatttcaaacaccaaatctgaaacagttgactgttggttttgaggtttttgcaaatgtcgactttaagccttccgccggttcttacctctcctagagacgatgctattcagctttaccgtgctttcaaggggctgggatgcgatactgcagcagtagtcaatattcttgcccatcgagatgcaactcagcgttctttaattcaacatgagtatagcgcaatgtattctgaagaccttctcaaacgacttgtttcggagcttcgtggaaaattggagacggctgtcttgctatggatgcatgatcctgcaggacgtgatgcaatagtcattaggcaggcacttttaccagatttgacaaatcttgatgctgcaactgaagttatttgttctcgcacaccatcacagattcaattaattaaacaaaattaccaagcgaagtttggggtttttcttgagcaagatattgaaagacacacctcaggtgatcacaaaaagcttttgcttgcatatgtaagcacctcccgttacgaaggtcttgaagttgataaagagatggctatgaaggatgcaaagggcctctataaagcaggggagaaaaaattggganctgatgaganacctttatccgcatatttagtganagaagtcaggcacagctagcagctattagcgctgcttatcatgacatatatggaggttcccttganaaggcagtgaaaagcganacatctgggaagtttgagcgtggtctcttgactatnttacaatgctcagagaatcctgcanagtacgg

SEQ ID NO: 199552 - DNA, 467 bp, Gossypium hirsutum
aaaaatccaaattcatcgcatcgggggggtttttatacgaaattgggtaattaaaaaaaataaaattttgatggaaaagggaaaatctgctcgacaagccgtagaaatctcgttgaagaagctcaatctgaacgctgatcgaaactttaaatcctctcgtttgatatcttctcttcactcatcaaagttacgcattgagaagacgaaacctcctagtttagtgagcttgtgccttggagttattggtcggcatctggaggaaattatcgaggatttaagtgaaattgctgttaattttcccgcggatattaagataccattggcagcaatagcaaggagaagaaaattactgaatgatgatgtcatcatctccttggccgatagttcttgggaaattcttgacctttctggttcagatgtttccgattttggcttagctaaagtagctgaaatgtgcaaatctcttc

SEQ ID NO: 199553 - DNA, 992 bp, Gossypium hirsutum
gagaaaaaaaaatacggaattcggtctcagaaatgggtgatttagtgcctatttacctcgtcatcctcgcttttttttgtactgctggagccattgcgttggccgttcttcatatctacaggcatcttttgaattacaccgaacctatttttcagagatacatcgtccgcatcatcttcatggttccgatttatgccttgatgtctttcttgtcccttgttctaccacggagttcaatctatttcaattccatccgggaaggatatgaagcttgggtcatttataattttctttctctctgcttagcatgggttggaggtccaggagcagttgtgctcagcttgagtggtcgagttttaaagccatcttggtatctgatgacatgctgcttgcctcctatgcctttagatgggcgatttatacggagatgcaagcaaggctgtctgcagtttgtcatcctgaagcccattttagtcgctgttacactcgtattatacgccaaaggaaaatataaagatgggaattttagtccaagtcaagcatatctctatcttactatcatctatacaatctcttacaccgtggctctgtatgctttggtgttgttttacatggcatgcagagatctccttcagccattcaatccagttccaaagtttatcatcataaaatctgtggttttcttaacctattggcagggtgttctgttttttcttgccgcaaaatctggatttataaaggatgctgacgaagcagctcaatttcagaacttcattatatgtgttgagatgcttcttgctgctctaggtcatctttatgcatttccatataaggagtatgctggtgcaaatattggtatgtctcgtggttttacacgaagccttgcacatgccttgatgttgaatgacttctatcatgatactgttcaccagtttgcacctacgtatcatgattatgtactgtacaaccataatgatggtgatgaaggaact

SEQ ID NO: 199554 - DNA, 428 bp, Gossypium hirsutum
gatggcatcaaagcaatcatattggaggacttaaagaatgcaaagtcgattgtgaactggatagcttgggcagaaccacaatatgactttaatccaatgatagatgaatggtgcaaagaagcccctaaagagcttgattttgatcatgaagctgagaatactagaactgtggctgcaaatcttggctgcaaaaagtcacctggtgagagctactcttccaaccgcgtgaatgttttgattccagaagttattcagtcaaccaaaagtgtcctcatcttagagtacatggatggaattcgtctgaatgacactgcatctttggaagcttttggtattgacaaacaaaagatagttgaagaaataactcgtgcatatgcccaccaaatatatgttgatggattttttaatggtgatccccatgctggaaa

SEQ ID NO: 199555 - DNA, 542 bp, Gossypium hirsutum
atctcaagtcgccgcgtttgactcggtccatgggtaacgcgctaaaaattaccaccgccatttctgcccttttccttcatatccttaatctttttttttgttcatgttctttgatcattgaccttattttctctcatgggaactttactttcaagccatggtttctccttgttccttctttggaccttcactttatacggtctctgtttatccttctctccgatcgacaattacctcatcaacagcggtgcctccctcgattccgttgtagacaaccgtcgattcatctccgactcgtcgaattcacccgattcccatctctcttctggtcggaccttttcgctctgtgccggaactctccttcctggtctgcctcaaatctaccacaccgctagggtttttaattcgccgtcgaaatacgtcttcaatgtcaaagatccagggacgcacatggtacgtctccatttccatcgattcaattcatcgagattggatctgggtaactctcgatttcacgttttggttaatgggttagtagcttt

SEQ ID NO: 199556 - DNA, 555 bp, Gossypium hirsutum
ctttttcttcttctcgtcgtcgttgttgtttcgatttttggtcctttcttcgtcttcaacttttttacccctttttttgtttgctaaatcttttgctcgtcttcttcgtcttgttcttcttgtttgcaggaggctttaaatgaatttataaaattaaagcatctcgagcaggcgttttctaaatttccgtctactctttttttagtaatatgtttcagttatcgctggtactttgagggttgactgtttcttgaatggttattttggctacgagcttcgattcagcttaagcaatccgggatcccagtaattgcatgtctagggtttgctagcagctcgaattcgaaggtgtttcattttccgcaactaaatagagatcgtgtagagattgtgccatcaaatgagtgtcaagagtttgggctaaggaaatctgcttatcctgggttttatcatttggggtttcattcatgattgggaaaatggtcgagggtcctaaatttactggacttatgggaggaactgacaacaacgataacaattactatgattttactc

SEQ ID NO: 199557 - DNA, 881 bp, Gossypium hirsutum
  unsure (1)..(881): unsure at all n locations
aagatttgtattgaagtcttggagctatgtgtcaaatgcaatactcacctttcagaaggccagtttttcttggcattgaaaactgtagatttgattgacacaaactacttgcagaatatccctgtaaatacaatcaaaataatgatagggaagaatattcctataataaaagctcatatcgaaaagaaagtgactgcagactttaacgagtggcttcttcacattaggagttctgccaaggatattgggcagactgcaataggtcatgctgcatcggtacgccagagagatgaagagatgcttgaacggcagagaaaagccgaggagctgaacgtttctggcttaggagatgtggtatattcattagatgttgaagaagttgatgaagattctgttttgaagtttgatcttacacctctttatcgagcatctcacatccattcctttcttggaatccaagagcaatttcgtcgatattactacaagaatggtctattacaactcaattcagacttgcaaatctcttcctcacaaccatttgttgaatcatatcaagcctacctagctcaaattgcaggctattttattgtggaagacagggtcttgaggacttctgggggcttgttgtctgccgatcaagttgagacgatgtgggagacaaccgttgcaaaagtggtgtcagtcttggaagaacaattttctcatatggattctgcaacgcatcttctcttggtgaaggattatatcgctcttcttggggttacacttaggcagtatgggtatgaattgagttcaattcttgaggtcttggacaatanccgaaaacaataccatgagcttctttttgaagagtgcggtcngcnaattagcaatgttctatt

SEQ ID NO: 199558 - DNA, 700 bp, Gossypium hirsutum
  unsure (1)..(700): unsure at all n locations
ctcaaaaagaaaaatgctacctcgatggagcagggctgtaatccatctctcaaagctacgatcattcaattccattgaattaggcaaagatttcagtttgattcatcgccaaagctatgcagctgtggcacctgcacctgctccttctgctgattccttcccacctaccagatcatcggtaaatttggataaaatgttttggtctaagccttgttcattggctttggccccagattctccccttagagtggaagacccaaagtatgaaggcattaggcgtattgttctcaagatgatgcttttctatagtaaacaaagcacgtcaattcgaggggctaatgttatatataggcgtgtcctttcccaagttgataaacctgctatttatgaagtatttagcttggagaagacattcaggatgacgttttcactgcttgtacttcatatgtggctctgcttacgccggttgaaagctgaaggaaaagatggtgttgaattaggacaatacgtctatgagatttataatcatgatgttgagctcagagtatctaaagctggggttaacttacttttgacgaaatggatgaaagaattggagaagatattctatggaaatattggtgcttatgatgctgncttgcttccggaggctacacacgaggagctaacagaggttatatggaggaatatcttttctgat

SEQ ID NO: 199559 - DNA, 641 bp, Gossypium hirsutum
gcaacacatccccctttcgactacagtatcagagacgattacttctctcataagcctttgccatttttaatatatatatttctctttgggaaactacaactacagctatttcatcttctaaagcacactttcctttctctgtttcaacatttcctactctattaatcctacccaccttgcttacacacacacacatattgttgcttaggtgaaggaagtaggtggaagtttaagaagatgagtgcttcaaagttcattaaatgtgttacagttggagatggagctgttggaaaaacatgtatgctcatttgttacaccagcaacaagttccccactgattatataccaacagtgtttgacaatttcagtgccaatgtggctgtagatgggagcattgttaatttgggtttatgggacactgcaggtcaagaggattatagcagattaaggccattgagttaccgaggtgcagacatatttggcttagcttgctcattaattagcagagcaggctatgaaaatgttctcaagaagtggatgccagaactacgcctctttgcaccaaatgttcccgttgtcctggctggaacaaagctagatctccgggaagatagagcatatcttgctgatcaaatggggtg

SEQ ID NO: 199560 - DNA, 396 bp, Gossypium hirsutum
ctcactcgtccgttttattgtcctaaaaccatttcaaatccttctttttttttttttagaatttcccaacgatggcttcgacgattccaacgagccgatcctcctctgatgacattaccgacacgacgccctttctgtcaccaacaagcaacgcttcaaacgacgactcctccacgcgtcggaccgttcgtcgccagagtctccgcgatgcggctaggttcttgcgccgagccagcagccgaaggatgatgcgtgagccgtccatgctggttcgagaaaccgccgccgagcagctcgaggagcgtcagagcgattgggcgtattctaagcccgtagttgttctcgatattatctggaaattagccgtcgtggtggtggcaagtggtattttgattt

SEQ ID NO: 199561 - DNA, 423 bp, Gossypium hirsutum
aaaatacaaaacaaaaacccatattgtagcttccaccatcttgctttcaaccccctgcttgctttctctcaacaatatcaactgaattatcggccgacaggtatttctcccaatacccaattcttcggagcatccggagagcccagaagataagttgtttccggcttcctcctatttggtcaaatttgtaaagggaaagggtggacggtagagatgccaatggcggcgggggcagcgacgccgagggaaagggttcaagctatggggccagcagcggtggtaccgatgatgcaagctgtgccggctgttgctgatgttttggccaaggacacgatcatttcttggttccgaggggaattcgcggcggccaatgccatcatcgatgctctttgcggtcatttggcgcagcttcaaggagggggc

SEQ ID NO: 199562 - DNA, 525 bp, Gossypium hirsutum
  unsure (1)..(525): unsure at all n locations
ccataacccaataattttctctctttttttcctccaaaaacttgggttttctttcatttacatccaagtcctaaaataccccaaaaatttcataaaaaaagtgttcctaaaagctcaaaagaattcataaaaatagaaatggaaactgggttttattcagcatgggagaatggttctttattagaagaagatggtgatgatgaactgatccctcagccattaacaccaacggagccaatggagtttttatcaagatcatggagtttatctacatcagaaatctctaaagctcttgcccagaaacacaatcactttgaatttgatcatcataataatgataataagaatcaaagttcattgttttcagaatcctttgatgcaccacaaattgcagggaaagtgatgaactccattaatggtcgaagaacaggacaatcagcaaatggtttaatcatcaccaagaaataggaaccacncnttgaaaaagatggacnnnntccgtgcagaanacgctcggcttcactc

SEQ ID NO: 199563 - DNA, 423 bp, Gossypium hirsutum
atttcttcaatggcttctctttcaggcttatgttcttcttttccatcggtgaagcctaataacagaatcggcggtgaactcagtccggttcgcaaagactcactcgcagtgtcgactcgttctaactcgagctttaaacactctgttgctcgtgaagtatctgctgatttgtcgaaaacgaatgatgtcgcgggtttgaagcaggctaagcaaggtggactcgagaaagatcctaaagcgctttggaggagatacgttgattggttgtaccagcataaggagctcgggttgtacctcgatgtgagtaggatcgggttctcggatgagttcgtttccgaaatggagccccggtttcaagccgcgtttaaggctatggaggaactggaaagaggcgccatcgccaatcctgatgaaggacggatg

SEQ ID NO: 199564 - DNA, 682 bp, Gossypium hirsutum
  unsure (1)..(682): unsure at all n locations
ggctgaaaaaaacggtgagattgaaaggggtttcaggtgtccctctttgaacttcagcttcagttctccttgctctttagctgaaaggaaaaacatatttttacttcattcattcaaattcccacacgaaaagggggaaaaacccagaaattttaagccatgaaacagttacacaagcaatcaagcattaaccataggcgagatgaagagatcttaatacctcaaactcctccttactcacccaaatccttaaaacaccccagatctctccctagatccattaactatctcttcaaagaacaacgccttttgttcatcttcatcggcattttaatcgggtctactttcttcatcctccaaccaactctctctcggttaggcccaaccgagactcacccttcggtccccaaatctttctctaacaacgtcgtttcccacacccaagagttttccgtttccaatcagaatcctattcatggcaaaatgggtcgtgttcccgtcgggatcggtcgacggaggatgangatcgtcgtcaccggtggtgctgggtttgtcggtagtcacctcgttgataagctaattggaagaggcgatgaagtgattgttatcgataatttcttcactgggaggaaagaaaacgtggtccatctttttgggaatccgaggttcgaattgattcgac

SEQ ID NO: 199565 - DNA, 727 bp, Gossypium hirsutum
tcgcccacagcgtccgctcttcagtccagtattctaaggcgcataaagaaaacccattttgtttggctcttcttttctgttccaaatcccgagatctctgaaacccatttcttcttttcacttgattcatccaattcctcatctgggtatcttcagttttctttttcaaactttatttgattagataaatctggtaaatgatgaataaaatcatgtctgcttattggatcttttctgcaagtgaagcttcctaggaattctctggttttttatttttattttttgggttttctctcctttgttgcatcatcagcaacatttctttatttcatccccaatttttaatgatttaatctccaccaaaacctcacaaatccagctcatttaacaagggatgttctcttagtcttattcatcaaatcacatttcaaaattcccatatttttcttcactgttttccctttttcttttcccctgtttttttttatgggttgcgctagttccaagcagaaacgatgccgccattgccgggctccttattcgcctgttccaagaagctattcgatgcatgttcatcatccggctcagcacacaggcgatagctaccatgtcgtagcgttaacatccacaacattaggcactctcaagctagaagacaaccaccacagcaatggcggcaccatcaacgttgcagcttttgaaaacggctccaaaatcaatggggatt

SEQ ID NO: 199566 - DNA, 438 bp, Gossypium hirsutum
tgttcgtttgggagatctcttccttctcacccatatcagatattttctctaccacctcttacagtttttccccagcgaaaaccactcaaatctcaaaccaattttctttttcttttttcattattttatatgcactaatattgttttttagtgagttaaatcttagattaaatcagcaaaattttagcatctgataaacaaagcccagagaagaacagattttctgattattagttaaacagtaatcgacagtgagaggcagagacgactaatcatactggtgtaaatttccaatccttttaagagagaaagagagagagatgaaatatagtttctcttggtgattcaatactttttgtgttcttcaattgatatcacttacatatttgtgggaatccgtgggctgaaccggctggggatgttgaattatgaaatatt

SEQ ID NO: 199567 - DNA, 806 bp, Gossypium hirsutum
caacctcaaaataaattgattaattgatccttctgatttgagatttctattgtcttctaaaatcctcttcattttcatcaatggcgactcaagggcaagtcataacttgcaaagcggcggtggcttatgaaccgaacaagccactggtcattgaggatgtccaggtggctccgccacaagccggtgaggttcggatcaagattctcttcactgctctctgccacactgatgcctacacttggagcggaaaggatcctgagggtctattcccgtgcattcttggacatgaagctgctggaattgtaaaaagtgttggggaaggtgtaactgaagttcaaccaggtgaccatgtcatcccttgttaccaggcagagtgcagagaatgcaagttctgcaaatcaggtaagactaacctatgcggcaaagttaggacagccactggagctggagtcatgatgaatgatcgcaagagccgcttctcaattaatgggaaacctatctaccacttcatgggcacctcaacatttagccagtacacggttgtacatgatgttagtgttgcaaagattgatccacaggctcctttggacaaagtgtgccttcttggttgtggtgttccaactggacttggagcagtttggaacacagccaaagttgaaccaggggccattgttgctatttttggccttgggactgttggtcttgctgtcgcagagggtgcaaagtcagctggtgcttcaagaataattggcgttgatattgatagcaaaaagtttgatgtagcaaagaattttggagttacagag

SEQ ID NO: 199568 - DNA, 695 bp, Gossypium hirsutum
  unsure (1)..(695): unsure at all n locations
agctcaccgaaatttctgtgatcttcaatccccaaaccccaaaaaggtcaaccaaaaacctttgtcttctgtgccgatgaatccacaacaacccagtccatcggaacccgaccttcaggttccatccctcgcttccctccgaatccagccctcttccccacgtttccctttctccacccccatcgccggttctcagcgtcgcatcgccatcgccgttgacttaagcgacgagagtgcttatgccgtccgctgggctgtccagaattaccttcgtccgggagacgccgtcgtcctcctccacgtccgtccgacttccgtcctttacggagccgactggggctctatcaaactccaaattacccccaactccacgaataatcacgaaaacgccaccgccatcagcggcgatcactccgacgaagagtcgcagcagaaactcgagaacgacttcgacgttttcacgacaaccaaagcgaacacgctggcccagccgttagtggatgctcagattccgtttaaaatccacttagtaaaagaccatgacatgaaggagagattgtgtttggaagtggagagattagggctgagtgcagtgatcatggggagcagaagattcggagctctanaaaaactgcnagggaaggctanngaaccttantgattattgcgtccaccacggctttggtctgtggtat

SEQ ID NO: 199569 - DNA, 517 bp, Gossypium hirsutum
gcgatacaaagactgcaatataacctcaagctctgacacccacttttcagaccttaacaccaaactcataccaaacactcttgctccatatatctgcctctctttctttctttacaattctcaggtttctgttctttgaatcctgctttcaagatcataatagaaacaaagaaaggcaaagcttagaagatgggatcaggtgaatggtgccttcaaaaacgagatagtttcaagagtgaaacgcttgtaggcaatgagactgtgccagaaattgggtgcctttcgattattgttcttggcgcctctggtgatcttgccaagaagaagacctttccctgctctctttcatctttattgccaggggatttctgccaccaaatgaggtgcacattttcggctatgcaaggactaagatttcagatgacgaattgagaaatcgcatacgtggatatcttgtgagtgaaaggagtgcttcaccatcaaaagatgtatcaaagttcttacagctgattaaata

SEQ ID NO: 199570 - DNA, 557 bp, Gossypium hirsutum
tcgaccacgcgtccgatggcgaagggttttgcttaaggtaagtggagaagcactagcgggagatcactcgcaaaatattgacccaaaggttacgacagctattgctagggacgtttcatcagtgacacccctgggcatgtgaggttgcaattgtggctggtgggggtaatatttttcgcggatcctctcgggcaggatgtagtggacttgaccgttcatctgctgattacatcggaatgttagcaactgtaatgaatgctatatttcttcaagcaacaatggagagtatcggcatcccaacacgtgtccagactgcatttcgtatgtcagaggttgcagaaccatatatacgtagaagggcagtgaggcatttggagaaagggaggggtcgtcatttttgcagctggaactggtaatccattcttcaccactgatactgctgcagcccttcgttgtgcagaaatcaagccggaagttgtgctgaaggcaacaaatgttgatggggtttatgatgacgatcctaggcataatccaaatgcccagcttcatgatacact

SEQ ID NO: 199571 - DNA, 462 bp, Gossypium hirsutum
gttctgtttgaaccatttctcttcaagtgtttatgttggaccacctagtggaaacaattggtttgagaagcaaactgatgggacacttgatatagtatgttcatcatggatggattggttccatggtggtttacagttccagattgagcaccatttgtttccaaggttgccaaggtgccatctcaggaaagtttccccattcgttcaggagctgtgcaagaaacacaacttacagtacgataccgcttcgttttggaaggctaatgtaatgacgatcgagacccttcgatcagccgccttgcaggcaaggattctcagcaacccagttccaaagaacttagtgttggaagcagtaaaaactcatggttgagatggaacttcatgtgaatgaatcagcttatgttggtatgacctgtaggtcttaaaaagttgtgtactgattccagtagactgatataaaat

SEQ ID NO: 199572 - DNA, 441 bp, Gossypium hirsutum
  unsure (1)..(441): unsure at all n locations
cttgaattttcnttcaatgaaataagaaacaattaaactgtttctgtcattgaaatttgctgctattttcagttttctgggaaaagtagaggcaaattttccactttttcgttctgggttgtaaggcaaagaacaagaagagcttcaactgaaacaatggtgaccaaaacagtagatcttcgatcggatacggtaacgaaaccaactgaggcaatgagggctgcaatggcaactgctgaagttgatgatgatgtcttgggtgctgatccgaccgcggcccggttggaatccgaagtcgctaagatcatgggcaaggaagccggtttatttgttgcatcaggcaccatgggtaacctcattagtgttcttgttcattgtgatattaggggaagtgaagtcattcttggtgacaattgtcatatccatatttatgagaatggt

SEQ ID NO: 199573 - DNA, 528 bp, Gossypium hirsutum
cagatttaaaaaaaaaaaaaccagtggaggagattttctccttagtctttgggctttctacactcagatttattcttggaaatataaggttagaccaatggattcccagaccaaaacagagaattgccttggatgggctgctacagatccaactggtgttctatcaccatacaaattcagtcgcaggcctctaggaagtgatgatgtttccataaaaattactcattgtggagtttgttatgctgatgttatttggtcgaggaatatgttaggagattcaatatatcctttggtgcctggtcatgagattgctggtattgtgaaggaggtcggttccaatgttcaaggcatcaaggtcggcgatcatgtcggagtgggaacttatgtcaactcatgtagaaattgcgagtattgcaatgatggcgttgaagtgcaatgtgtaaaagggccggttttcacttttaatcatattgatgttgatggaacagtcacaaaaggcggatattctagccatattgttgtccacac

SEQ ID NO: 199574 - DNA, 714 bp, Gossypium hirsutum
cttgtcgcgtgggttccaactgcctggatctcccttatctttcctcttaccttcacttctcttacaattcttccaacaccactctctccatcgccttcatcgccacaccttccaaatcgggtggttggatcgcatgggccataaatccaaaggccaccggcatggcgggttcacaatccctcgttggctacaagaactccaccaccggcaccgtccaggttcatacctatgacatcagctcctacagttcaattgttgccaaggatctgtccttcgaggtctgggataagacggctgagagtagaagggacgggagtttggcgattttcgctaaaattaaggttccggcggatttagcggcgagtgggaagattaatcaggtttggcaagtgggtcccagcgtcggaactgatggcaggttggacaaacatgccttcgccgtctctaatttgcaatctaaaggaaccttggatttgaaaagtggacagagtagcactagttctggaggagacgacaggctcaagaagaaaaatattcatgggattttgaatgctgtgagttggggaatattgtttccacttggggccatgattgcacgctacataagaacctttgaatctgcagatccagcctggttttatctccacgccttctgtcaagtatcagcttatgccataggagttgctggctggggaactggtcttaagctcggat

SEQ ID NO: 199575 - DNA, 489 bp, Gossypium hirsutum
ctgctacaccaacttgattcagtctcgatctttccgccgttaatcagctaccctgtccctcccacgttctatatttgatctctttactctaaacaaatcacgccctccaccttcggttttacttcaattccccctccccatttttctaccgcttttgggggaatggctgatggcttggaccgcatccctttgcttccattcctttttcagcttggagatttgaaggggaaccggaagagataccttctttctggggggacaaaatcctataaatatgactggttatatcgttggtgcgctggttcctatggttttttacccttctccttcggagttcaaagaaggtaaagaagcgaggggtgccagtcgatgttggtggggaaccggggtatacaatccgaaacagtcgattcccttcccctgttgaaacatcatgggaaggtatatctactcttgcagaacttttgagcaggcatgtaagcaacacgc

SEQ ID NO: 199576 - DNA, 591 bp, Gossypium hirsutum
agttaatccgcattttaggttcattgccatcttgtcccgatcagggtataattcgtgaagttctaaagttttcattgtctcctgaggttcgcagccaagacgctatgtatgcacttgctgttagcaaggaaggtcgtgaagttgcctggacttggttcaaggaaaactgggatctcattttaaaaacctacggtagtggattcctgataacacgttttgtcagtgcagttgtctcaccgtttgcatcatttgaaaaagtgaaggaagtggaggagttctttgccaaccgatcaatgccttcgattgcaaggacattgaagcagagcctggagcgcgttaacattaatgccaactgggttaagagcattcaggcagagcaaaatctgggtgaggccatacaggagttagcttacaggaaatactaagggatttgtctctgttttttactagagatctagtatggaaagtagccgcggtggctttttactgttgttatacttttttactaaactgaatactctctagtaatatcatgaataataatcatcctaataaaaacaatgtattaggcattagttattagttattttt

SEQ ID NO: 199577 - DNA, 661 bp, Gossypium hirsutum
  unsure (1)..(661): unsure at all n locations
ctaaatcctcctttgttctaacgcaaatttgaatcatgacagacacctcctccgatctccaaaaatacggcgtgccgttttacggagccggatgggttccttacaaccacatcaaatccaagctcgcctcacaagaaaagattgaagaggataagaaagaagaaaaagatccaactccatccaacgatgacgagatcactacacccctaaactacgttgttctcgctggcggtggcggtgaaggccgtagtggcattcccaatgcaatcgttgtttcccacgttaatttctcctccaattctctctccgatcaacctgtggttaagcatgaaactggttctgatttgccttatcgaatgactgttcatccgcatggagatggcattatctgtgcatttcaacagagctgcaggttgtttgagtggaaagaatctaacggaaatgaagcccacaaactgggtgtcaaggtatcaaaaaaagttctgatccanttaaaagatgttgggcaacagttggcactgacatttaatattgaaggttctgtactggctgttggtggtgaagatggcantttaagggttttcaagtggcctancatgaaaatagttctcaatgaagcccaggctcattcatctgttaagaacttggattttagctgttt

SEQ ID NO: 199578 - DNA, 542 bp, Gossypium hirsutum
gtgtttttttgcctattgaaaaattttccagtgttgatttcagtagccatcgaaaccctaattcctctttcaccatgaactgttcaatctccggtgaggtgccggaggagcccgttgtctccacgaaatccggcttgctctacgagaaacgcttaatcgagcgtcatatttcggattatgggaagtgtccagttactggggaggtacttactatggacgacattgtcccggtcaaaaccggcaagattgtgaagcccagatctttaacagcagctagcattcctgggatgcttggaatgtttcagaatgaatgggatgctttaatgctatccaattttgcattggagcagcagcttcatacagccaggcaagagttaagtcatgcactctaccagcatgatgctgcctgccgtgtgattgcaagacttaaaaaggaaagggacgaagccaggtcattgcttgcacaggctgagaggcaggcacccttgcctgcatcagtaactactgccaatgtttctgctctcagcaatggaaagagagct

SEQ ID NO: 199579 - DNA, 489 bp, Gossypium hirsutum
cccacgcgtccgcccacgcgtccgatctcaacagcgacgatgaccatgaatctggtggaatccgttggcgttagggttcctcctagtgcaccggcatcgtttttctcctctaaaggtacgtgtaaacgcggcggcagcgtccgacctggtttctgcaaacgagatttctcacagaacaacgcaaatttcggatggagcgcggttccgttgcggttcatgtactttcgtaatgattcatgggttaatttctcggccgatgtagtagaaacgctccgagccggtttcttggagcggaaaccgattatcgagacgtcgattgacggttcgaagtatatatttgatttcaagaggatgctgcagatcgagtactcgacaggtaattgccggtcaatttcttggatagacgaaagtggcaagtgttttttccctagcgatttttttagcgaagaagaatttattgaatcagaatgtagtgagtgggatgattat

SEQ ID NO: 199580 - DNA, 810 bp, Gossypium hirsutum
tggcgatggattatttccattcagtcacagcaattccaactgttggggtgattgcctttccactactgcggcttttctctttgccatggatctcaagaagaaacacaaactcgaagaaaacagcaccagaagctggtggagcatggcctattattggtcatctccgcctcttaggagggccacaaccacctcacataagcttggctaacatggctgacaaatatggaagaatcttcgctatcaagttgggtgtgcatagagctttggtggtgagcgattgggagattgctaaagaatgtctcaccacaaatgataaagcgttcgcctctcgtccaatgcttgcatgctcggaacttttggcttacaacggtgccatgtttggctttgcgccgtatggaccttattggcgtcaagtgcgtaagattgtcattattgagctcctctcaaatcaccgacttgaattgcttaaacctctgagggaatccgagataaagacatctctgcaacagttataccagctgggggaccaggaagaaaaggacttactttccgttaaagtattggtgaagataaagggatggttcaaggaagttactctgaatgttattatgaggatgattgtagggaaacgacttccaaattcaatgaaagaggtgaaaacttgaaagggaagaattatttggatgacttctttgaactgaatggaaagttcctaatatcagatgcgttgccggttttaagatggtttgacataagtggagacatgaagtgcttgaagaagacgcgaaagaatggaccagttgtgcaggg

SEQ ID NO: 199581 - DNA, 578 bp, Gossypium hirsutum
gcttgagcgtatggccttcaagagcacgacaaaccgaagccatttgcgtattgtgagggaagtagaggcaatcggtggcaatgtaaatgctgcagtttctcgggagcagattggatatacctttgatgctttgaagacttatgttcctgaaatggtagagttgcttattgattctgtgagaaaccctgcttacttggattgggaggtcaatgaacaacttcagaaagtgaaagaggaaattgctgaagcagcaaagaatccacatggcttgcttttagaagctattcactcggcaggttattctggtgcattggcaaatcctcttttagccccagaatctgcagttaatatgttgaacagtacagttttggaggattttgttgcagaaatttttactgcttctcggatggtactggcagcaactggtgtagaacatgaagaattgttatctgttgcagaaccacttctgtcagatcttcccaatattcctcgtgctcaggaaccaaaatctgtgtatactggaggagattatcgttgccaggctgattcagggggccgaactcattttgctcttgctc

SEQ ID NO: 199582 - DNA, 770 bp, Gossypium hirsutum
cggacgcgtgggttcagattctgggttatggccatagctctgccatctacagtgtggcacgcaacaaagtttcagccgcaacgtccgcttcttcagcgtcggcgccccttattagtccaatcctttaggcggagcgacttcgacaccttcactcgccgcatggcttctggtgaggccttgaaggaggcctggcgaaccgccaacgacggcttcgagcaattcgtcttcgaagctaaaaagaccgctgaacgcttagaccgccagtattccgtttcccgccggctctcctccgccgcccaatccgctgcggaccgtgctcgtgagattgaccgggagttcgagattggactccgttggcggactttttctatggattttagtagaaattggcctaggtacaggaagcagctgaatgatttcttggatactccattgggaagaagttttgctacaattttcttcctttggtttgcattatctggttggatgtttcgatgcttaatatttgccacatggatactaccatttgctggacctcttctcattgggactgttgccaataatcttgttattaagggtgcttgtccagcttgtaagagacagtttgttggctataaaaaccaaatagtacgttgtgtgagctgtggaaacattgtatggcaacccgaaggagacttctttagcagagatagcaggggcaccaattcaagaaagtcagagcctgacattatcgacgttgaatttgaggagaaatgacaagatgttctcat

SEQ ID NO: 199583 - DNA, 654 bp, Gossypium hirsutum
  unsure (1)..(654): unsure at all n locations
atcgaatacgacgctagctatcgagtgatccgaaacgatgtgtacactttttacacctacccttttcgcctttgcttctataataccactcctgatgcttacatttttgccatgcgagctggcattcccaacgacgaaagcctaatgagatgggtgtgggacgctaaccggaacgatccggttcatgaaaatgccaccctcaaatttggcgaggacgggaatttcgtgttggcggatgcggatggtcgtgttgtgtggcaaaccaatacggctaacaaaggtgtcactgggattaggttactaccaaatggtaacttggtactgtttgataaaaatgggaaattcatttggcaaagctttgattaccctactgatactttgttggtgggtcaatcggttaaaatcaacggtcggaacaggctcgttagccggaaatctgacatggacggctctgatggaccgtatagtctgatactagaccataatgggttcattatgtatctaaataatttgggccagcaacttatttatgggggctggcctacanaggattttgctgacattgtgacatttgctgccgagcctgagacgttataaacaaatacccttacgagtggtgtnnagttacacatntacagctcaacgagacttccg

SEQ ID NO: 199584 - DNA, 542 bp, Gossypium hirsutum
aggaaaaaagttataattataacatttcacgcggtttttgggatctgaaagggtcaccaaacaacgcgtcttctgaaaaaattccctttcctttacaaacaaatccacacagttaatgaaaaaattcattgttcttcatgttcctcaaaaacccagattataactttttttgaatcttcttgttgttcatcttgtctttttgtttctgtttcattcatcattttgaagctatggtgacaactttgctattattagctattcttttcatactgggtttcattcatatttacttttcttttttgcccaataaattttattattggatccaatcattaagctgcaatacccgtccttcttcttcttcttcatcatcatcatcttcagctgtgaattacaaaacggcccacaaaatatcagtaacggaacggggagatccaaataacttggagttaaaacgggtattttccaccttcgacaaaaacggggaaggattcataaccaagcaagaattgcgcgaatcgttaaagaacatacggatgttt

SEQ ID NO: 199585 - DNA, 466 bp, Gossypium hirsutum
gccgcgatgagatggggtttcttcatccggaagaaagctgctgagagacgggcacaggtagtcgagttagaagacgaagaagaagaataggctatcaacaagtcgtattggtactatggttttggaagttgctaacaacaacaatgtatgaaattaaggggtttcaaaactcttgaagaaccctaaattaggcaatgggaaatctctttgtacaatttcctgtatagtaagccgcttcttttgacttcccattattaaatatattttactgtatatgagaggctaaatttggttttaaattcatggccctcctttctttccttgttgattgatttttctaatggcatttaggtgtgagtttgttacagttaattgttatttcatcaatcaagatttctgggatattttgtaagcaaattgttggctgagtttcatcttcaccgaacaacgatcaacaatttgactg

SEQ ID NO: 199586 - DNA, 678 bp, Gossypium hirsutum
  unsure (1)..(678): unsure at all n locations
ggggaaagaatctattttcccttcattttcactacagaaaaaaaatctcttttattttttctcgagagaattcgagttccttttcactctctttcacttcggttcttgaaagggatgtgagtttttaaagaaaaagcttttttataaatatatatattttaaatttccactatgagtcttaggtaaaatcttcagatctggtcaattcttgtggatttcatcaagatctctgccttttcatgtagggaattcttcatttttttccccttttttttcctcctcttttccctggttttctccggagaaaggaaaacaaaaaaagaaagtaaaactgtgtatgttctggcgggggaaagtagtaaaacaataaaagatgaattatttcccagatgaagttttagagcacgtgtttgatttcatcacatctcacaaagaccgtaactcagtgtctttagtttgcaaatcgtggtacaaaatcgaaagatacagcaggcaaagggttttcattgggaactgttattccatcancccagagaggttgatcgccagattccctgncttgaagtcgctgactttganagggaagccgcatttcgccgacttcaatttggtgccacatgattggggaggtttcgtttatccttggatcgaanccttggctaanaaccgaatcggatt

SEQ ID NO: 199587 - DNA, 601 bp, Gossypium hirsutum
  unsure (1)..(601): unsure at all n locations
cttcactccaaagttgagaattctcaaactcagatcttactctgaacaacatggccaaaacacccatcaaatactatgtggttgatgcattcaccaactccgccttcaagggaaacccagctgcggtttgtttgttggaggaagaaagagatgagaaatggatgcaatcagtggctgctgagtttaatatctccgagacttgttacttgactcggatcaccaattccacctctccaaacaccaggtttcgtcttagatggtttacccccgttgccgaggtaaatctatgtcggtcatgcaaccttagcatctgctcatactctctttacaactggtttggtaaattcaaacattattgaatttgatacattatctggaatcctaactgccacaaaggttccagatgtttgtccaaccaatgtctctgaggttcagaacggcggagtgagcgactgtttctgatcgactgaattttctacattncagcaccgatttaattctgtgagcttactatatcaaagcttgacgatgctcactatgatgttagaaacgatacgaaatgaatctggtgggctccattggaatctgaattaagggaccc

SEQ ID NO: 199588 - DNA, 658 bp, Gossypium hirsutum
ccctttcttccggtcactccctgttcatattgtcttgttcttttcctctttaatccaaaaaccaaaatctgggtctctcttctttgagttcaaaatccattaccccatcatcaaaaatcctttcttttctcagttcaaaaaagctgcctgcttggtgtgcttgatattgcctcaaccaaccattctcaaagttttctttttatataaatttccaagtttttgtttttcctaacatcttcatgctcaatcttctgttcttgatgtttgagattcatgtctccaattctcagtgaaatcttcttttctgggtttatgatcaattctacattcattcgaaggacccaactcgttcaatctttctcagttgttttcctttactggttgtactacgtttcatgattttctagcccttttttttctttcaaggtttctatctctctatatataataaataaataaataaattcaactactataatattctactaatctgcatattattcatcttttatctacaactttccatggcttcctcaagtggtacatcatcaggttcatcaaccatggtcacaaactcaggctccgatgaagatttacaagcattaatgaacgaaaggaagaggaaaagaatgatatccaacagggaatcagcaaggcg

SEQ ID NO: 199589 - DNA, 419 bp, Gossypium hirsutum
agaacattagcctcttttgcccttttgccccccttttttggttacaccccattcccctctcttcgcagccactgtttgtctcacagattttttgaaaataatggaccggtaccaaaaggtagagaagcctaaagctgacacacccataaacgagaatgaactgaggattacagctcaagggaggatgaggaattatatttcttacgccatcactctgcttcaggagaaaggtgctaatgagattgtgcttaaagccactggtagagctatcaacacgactgtcatgattgctgaattaattaagagggggattgctggtcttcatcaaaacacatcgacgggatcgatagacataactgacacatgggaaccgctggaagaaggccttcttcccctagaaaccacacgccatgtttcga

SEQ ID NO: 199590 - DNA, 438 bp, Gossypium hirsutum
tcgtttcttgtgatctcctgaaaaccgaggtttctggaatggaagaaagaaaagtaaagggagaggttatgtgcggcactctcgacctgactgctctcccactagattgtgtcaccctcattatttccttgacctcccctcgagatgcctgtagattgtcgcttgtttcaactgcttttaattcggctgctgaatccgatgctgtttgggaaagcttcttgccatcccaataccaggaattaattccctcatcgctctctttctcgtccaagaaacaactttatcttagcctctgtgaaaatccccttctcattgaagctggacgaaagagtttttggctcgaaagagtgagtgggaagaaatgttacatgctgtcacccagggacctctccattatatggagtgacaccccagattattggagatgggtgtctatac

SEQ ID NO: 199591 - DNA, 448 bp, Gossypium hirsutum
gcttgctggtgctaattcgtatgctggtgtagtctgcgcccgcgccgcttatatcccctttttctttttctcgctaaacaaacagaaaatcagcaaccctcttcttttacattctgtggtaatttaactaagagctgaatcttatggcgtcttctttggcttctccgtccccaacttcttcctttatcaggaacaagaaagatttgggtttctctgctttcccttcaacatctcaaatcgcaattcagaaatgtaagaaacaagtttcgaagaaaatcgtctcagtcatggcacctcagcaatcagagcgtaaaccagcgaccacaggctctgtgaagactggaatgacaatgacagaaaagattcttgcaaaagcctctgagaaaccacagctgagtcctggtgataatgtttgggttaatgttgatatattgatgacacatgatgt

SEQ ID NO: 199592 - DNA, 442 bp, Gossypium hirsutum
  unsure (1)..(442): unsure at all n locations
tccacttgtccgccagttttcccttcttctttttttccctgtgatgaagatgggttttaggagctaccatgttgatgaatttcaagcccttaattgcattgaatggctcaaaccatcttcctcacctactccttcttcatcactatcactctcgctatcatcttcatcgtcttcatcgtcttcgtcgtcttcgaatgatcagcacgggcacgattataaaccccatggctatcttgaaactgcctgtttcatttcaacagcagctacaacaacacgatggtgggcagcttgcgcaggaacctattcaatgcctaccactgttcagcaggcttacagagaacaaatcattgaaaggggatgatgttgggaatattgttaaagaagaaaatatagagaaagttacagtttctttgcacattgngttgcctaacagtagtactgg

SEQ ID NO: 199593 - DNA, 531 bp, Gossypium hirsutum
cccacgcgtccgatctaaatgttttcagaaacttagatccaattaatattgttcccctaaaattttacccaaaataattccgtattgaaacaaaaaaatgggaattttatgcaaggtagttgatatgctgctgttggtggcgtttatggtgatgcttgtagccggacctttaatcgatgcgcagctggttttgccggagaccactttcccggaggtgctcgtccgtttgaagcagcaatatgcggcggagtaccaagattatttgatggtggagaagcctcatttcttcgtggccttggtctggttggagcttattttccagtggcctctggttttgcttaacatttatgggattttggcatccaagcattggttccataccacttgtctcatctatggtgcctctgttattactgccatgaccgctttattaggggagctgatgggatcccagaaggcatcagataaattgttgacagtgtactctcctttcatgggactcggtgttttagccttcctgcgagggctggt

SEQ ID NO: 199594 - DNA, 419 bp, Gossypium hirsutum
tcctccttgatatctactcattgtttcgacgctttggcctctcatcgatccacaaagatgattgatgatcagcagctggggtttcttgccaattttttaggggtttttatatttggactggtaattgcttaccattacgtgatggccgatcccaaatatgagggaaactgaaaccgttagacagttaaattatattacatgttagataagaacttagattatgttcgtaaacatgttagttttctttgcataattgaactgcttgttttggtcaatcttcttttacatactaaagattgatctatgatcgattttcgttagatttgaaggatattaacttttgtctttcaatgcatttagtgatgcttttgtcaagatagcgattatacatgcatgggcttgcatgatatttgccttgg

SEQ ID NO: 199595 - DNA, 419 bp, Gossypium hirsutum
aaataaacaagttgccatcttgtcctgcacccctactgctttcccactcccccaaaaaaggcaaggggagcgtaaccaaacctcccccaacaatgttggtctcaacctcaggcctgctcctccccgtgtgcttgttgtttcttctaatatttggcactgtcaccgctactgaccacatcgtgggtgctaacaaaggctggaaccctggcatcaactacaccctttgggccaacaatcagaccttctacgtcggagacctcatctcgtttaggtaccaaaagacacaatacaatgtgtttgaagtgaaccaaactgggtatgactcctgcacaacggaaggagcagtagggaactggagcagcggcaaggattttatacctctcaacgagtccaagagatactacttcatttgtggcaat

SEQ ID NO: 199596 - DNA, 653 bp, Gossypium hirsutum
ggccttcattttccccgttcatttctgtctcgctcaaaaaatccaatggcggaaacagatcaggcgccgccgccgtcggaccaactcgccgcgctgaacttgaccgacaccgttgagaaacacgcattttctgaccgtgtcctgatccgttccatcgtgggccggccagatggcggggctggccttgctgggcaacgagtccgggccggtggttgggtaaagacagggagagagcaagggaaaggaactttcgccttcttggaattgaatgatgggtcgtgcccggcgaacttgcaggtgattgtggacgccggactggctgttctgagcaagctggtggcgaccggcacctgcgtggtggtggatgggatattgaaggtgccacctgaaggcacgaggcagaagattgagcttcgggtcgaaaaatttgtttctgtaggcgaggtggatcctgctaagtacccgattccaaaaacgaagctcacgcttgaatttttgagagatcatcttcatcttcgagctaggaccaacacgattgcagccattgctcgaattaggaacgcacttgcctttgctacgcattcattcttccaagagcataatttcctttatgtgcacactccaattttaactactagtgattgtgagggact

SEQ ID NO: 199597 - DNA, 654 bp, Gossypium hirsutum
ctcggagccaactctaaactacctttttcctttgtcttcatcaaacacaaatgatactaaatattgagtttgggttttagaagtcggtatcaaacaatgattataatattgttttaatgcgtcatacatgttttccttgtttttaccgaagacccagattaaatgagggtcaatacgagcttgggagctccattttagagttggagttttacaagtcagtaccaacgaaggcaataaagtgaaggaaatggagtcaccattcagagcaaatatactgaaacgcaaagtagctttggtaacaggaggaggctcaggaattggattcgagatctcagtgcagctggggaaacatggagcctcagttgccatcatggggcggcgcaaacatgttctcgactctgctgttgatgttcttcgttcccatggcatccctgccataggacttgagggagatgttagaagagaagatgatgcagctagaactgtggaatcaacttttaagcattttggcaggcttgacatccttgtcaatgccgcagctggcaatttccttgtgcctgctcaggatttatctcccaatggctttcgaacagtcattgatatagattctattggaacttttataatgtgtcatgaggctcccaaatatcttaa

SEQ ID NO: 199598 - DNA, 642 bp, Gossypium hirsutum
gtctgaatggagggtcagatgaagatgcattggtatcaggtgctcgccagtttaaaaccttgagtggttatgaagctgctgatgagcggaacagttgggattccttcaagcatttagttgccggcgaagaattgcgatatgatgcctcagtaaaaatgaaagctgctgatgaagcttctcagagtgtcactttgatggtatctgtggaagatactggcattgggatccctttgattgcccaggacagggttttcatgccctttatgcaggcggatagctcaacctctagaaattatggtgggactggcataggcctgagcattactaagtgtttggttgagctaatgggtggtcacataagcttcatcagcagaccacaagttggaagcacattctcattcaccacggtctttgggaggtgtaaaagagcttcatttagtgatacaaaaaaacccaatgctgaagatcttccatctggtttcagaggattgaaagctgtggtagttgatggaaaaccagttagagctgctgtaactcgataccacttgaagaggcttggcatgctggttgaatttgcaaatagtgtcaaaatagctgcttctgcttgtggtaaaaatggttcttcatgcggaagtaaaactc

SEQ ID NO: 199599 - DNA, 724 bp, Gossypium hirsutum
  unsure (1)..(724): unsure at all n locations
ggtaaatgctctataagctattcattgaagccaaccattcatagggaaaagctatgtggaagtttgtctctcatctcccaaaatctgctgccatgaacctaatgattctcttccttttttcttctctgttcattaaggcattctctttgaaacctgagccagcaaaaaataatgcccagatcactgtcatgggccttgtttattgtgacatttgctccaacaacagcttctccagacacagnctacttcttaccaggtgaaatttctcaacaacgacctatgtgttttttccaagttgtgctgttttgttctttgggtattatttactaagttaaaagaaagcatggttctaattatcgggatattgtgtaaaccaggtgcagnaagttcaaatagcctgcaacttcagggcattttgttccaaaaacaagagaacaagtatcattctcaagtcacagaacttcgattaactgggagtttacaggttggaaataccatcaggtgatgggatccgctgtgcagatgcagccattgcatcatcttgccangcagcttaattggggacctctttacttcatgcaacatttctgtcacagaagactactgatcagattgcttcaaatccgacaccccatctctgcattacagctaactgctttagatcagacctcaaaagaatgttgcttggtggagtaaacaccctcttacacatcctggaattttt

SEQ ID NO: 199600 - DNA, 474 bp, Gossypium hirsutum
  unsure (1)..(474): unsure at all n locations
ggtaaatgctctataagctattcattgaagccaatcattcatagggaaaagctgtgtgggaggttgtctctcatctcccaaaatttgctgccatgaacctaatgattctcttccttttttcttctctgttcattaaggcattctctttgaaacctgagccagcaaaaaataatgcccagatcactgtcatgggccttgtttattgtgacatttgctccaacaacagcttctccagacacagctacttcttaccaggtgcagaagttcaaatagcctgcaacttcagggcatttgttccaaaaacaagagaacaagtatcattctcagtcaacagaactacagataaacatggagtttacaggttggaaataccatcagttgatgggatcgcatgtgcagaggcagccattgcatcatcttgccaggcaagcttagttgggacctcatctacttcatgcanacattctggtcaca

SEQ ID NO: 199601 - DNA, 684 bp, Gossypium hirsutum
cccactcgttcgcccacgcgtccgcccacgcgtccgctttctttaagccttcaccagtgtttaggtttaaaatttgcagattttgaactaaaaggattttgattgttccttaaagttttcaccttgtttagatgtaaacaaactgacatgtttttggcaataaaggtccagtctttttagtcccacaaagaagattgctgttctttttaatgttttgttgaagaaaagtaggaaaaaaaaaaggacaaagaaaaagaaaagagctggctttcggactttggggtgttgatagtttggttgaagaaagtgaaaacactgaagcagaaagctttttactttggggaatttttcccttgttgaatttgggtattgaaagttttcaagttatagtacaaggcttgagatttttgcttttagctctttggccaatgcaaactttatgttcttgcagtgaaaacgggatagaggtcagaacgatgatggaaaacaaaaggagcccttgctctgttgatcatagcagtttcactcctttggcgtcgaagcgacagaagtccgacttattgatctcgacaaaggataggaaagataaggtcggtgaacgcattgtcactctgcagcagctagtttcgccatacgggaagacagatacagcttctgtcctcctgcaggcaatggagtacatac

SEQ ID NO: 199602 - DNA, 476 bp, Gossypium hirsutum
ggaatgaattatttgcatgagaataaaccaccaataattcatcgtgatcttgagccttcaaacattttgcgggatgactctggacatctgaaagtcgcagattttggtgttagcaagctgctcacagttaaagaagttaaacctctaacatgtccggtgacatcttgtcgatatgttgccccagaggttttcaaaaattatgactatgataccaaagcggatgtgttttcatttgccctgattctacaggagatgattgaaggctgcccgccatttcttacaaagcaagataacgatgttaccaaggcatatgcatcaaaggagcgtccgcctttcagagccccatctaagtattacgctcatgggctcaaagagttaattgaggattggtggaatgagaaggctgctaagcgaccaacatttagacagataataaaaagactggaatcgatccatgacagtttcagtcataaaaa

SEQ ID NO: 199603 - DNA, 673 bp, Gossypium hirsutum
  unsure (1)..(673): unsure at all n locations
agaaaattgaaaattcagatttaaaagattctaatttcttgaaccaaagcggtgctttttcacttttggattcaattagcgaataaaagaaaaccctaacggaccttccattttcaaagctctcaccaaatcaggaactcaaagattgcattaagggattgctgtatttggtgggagtggtagaacatcgattccgggttttcagaactgatggatacggatagagagagacacagcgccagagaaacagctttttatctgtttactcagcaaagtcttccggcttgcaaacccgtcttaacaccaggatgggttatagcaatatttttgtttatgggtgtcattttcattcctgggggcctggtcactctgcgtgcttctcattgtgttgttgaaattgtggaccgatatgatattgattgtgtacctgagccatctagaatggataaagtttcatatatccaagatgactcaattcccaagaattgttctcatttcatgaaggtgcacaagtacatgaaagctccaatttacatttactatcaactcgataattattatcagaaccaccgaaggtacgtcaaaagcagaagcgataagcaactcttggatggccagaagtatcatgacacangttcttgtcaacctgtggagtcgaataacaataggccta

SEQ ID NO: 199604 - DNA, 421 bp, Gossypium hirsutum
gcttactttgggcccacagttcatccatcatcctcaaattccagtggaagtggtgtcagatagttctagttacaataatcactggaatggtccatcagtgcctggtgaggtacctgcatcatatgcttttcctgcaatggatcaccattaccataattgggagcatcattccccaccattctccacatctagcagtcgaattggtagttctgatcaaccttcaaatcctcctgtcagtcaaaggtctgccaggagtggtttctgatatgccaagatcaggatcttttatgcgcccgtatgttgttggccacagttctggtgctagagcagggagttcagtggcatcctcattgattcctccttaccctggtagcaatgctcgagcacgtgatagagttcaagccctccaggcattctatta

SEQ ID NO: 199605 - DNA, 797 bp, Gossypium hirsutum
ttcactcgtccgaaattttccctctcatttcctctctggcagcccgcttgagaaatcaaaattcaaaaccctagttagggtttttatcttcctcaatctcccgttgtcacactgcaaatcggccacaatgtcgatgtccaagagttccaaaatgcttcaattcatcaactaccgtatgcgggtcactatccaagacggccgtcagttggtgggtaagtttatggctttcgatcgtcacatgaatctcgtactcggtgactgcgaggagttccgtaagttgccgccggctaaagggaagaaaaaccccagtaccaatgaggagcgtgaagatcgtagaacgcttggtcttgttcttcttcgtggtgaagaggttatttctatgactgttgagggtcctcctcctcctgaagagtcgcgttcaaagtctgccgctgctaatgctgttcctggacctggtattggtcgtgctgctggtcgtgggattccgactggtcctcttgttcaagctcagcctggtcttgctgggcctgttcgtggtgttggtggaccggctcctgggatgatgcagccccacatttcacggccgccggttccgcaactgtcagctccgcctatgacttaccctgctgctagtggagcacctcctgttatccgtgcacctggacaaatgccacctggtggttaccctggtcaaccacaggctcctcagatgcaacgtggtcctccttcacaggtaccaccacctgcttttggagtaaggccacctcaacaattccctgtcccaccaccacaatatg

SEQ ID NO: 199606 - DNA, 1238 bp, Gossypium hirsutum
  unsure (1)..(1238): unsure at all n locations
cggccgcgtcgacggcagcaccagtttcgtattgcagaaaaaaaattaaaatagagaaaacagcacagatctattaaccaataaaatcctacgcatccttccagtacacccactcaccctaatttctttttagattcttttttccaggaaataaggtaagaatggaaggcggaggaccaccacaggcggcggacaccgagggggcagaagcagcccagcaacagccacaacaccaccagcaacgtccgcctcaggtggccgctggcctggaaaatattccggccactctaagccacggcggtaggtttattcagtataacatctttggtaacattttcgaggtcactgctaaatataaaccacctattatgcctatcggtaaaggcgcttacggcatcgtttgttccgcattgaattccgagacaaatgaacacgttgcgttaaagaagatagcgaacgcatttgataacaagattgatgcgaagagaactcttcgtgagatcaagctgcttcgtccccatggatcctggaaaacgttgttgcaatcagggatataattccaccacctcaaagggaatgctttaatgatgtttatattgcgtacgagctgatggacactggcctgcatcagataatccgttctaatcaagctttatctgaagagcattgtcagtatttcctctatcagatcttacgtgggctgaagtatatacactctgcaaatgttctacacagggacttgaaacctancaaccttctcctgaatgctaattgtgacttgaaaatatgtgattttggactcgctcgtgtcacctctgaaagtgattttatgactgaatatgttgttacaagatggtaccgtccacctgaactgttgctaaactcttcagactatactgcagccattgatgtatggtcagtgggttgcatttttatggaattgatggatcgaaagccattatttcctggaagagatcatgtgcatcagcttcgattacttatggaactgattggcaccccatcaaaagctgagttggagtttttaaatgaaaatgctgagagatatattcgacaacttcctctttatcgtcgggaatctttcactgaaaagtttcccaatgtccaccctttanctattgatcttgtggagaaaatttgacttttgattcccgaacaaggattactgttgatgacgcacttgctcatccctatctaacgtccctggctgacataagttt

SEQ ID NO: 199607 - DNA, 446 bp, Gossypium hirsutum
attttctaacacctttgcatttgcatctttctttttcacaccagatctggggatccaagctatggctgaaaaggtgacgataatggtgctgaaggtcgaccttcagtgtagtaaatgttacaagaaggtcaagaaagtgctctgtaaataccctcaaatacgagaccagatgtacgatgaaaaggctaatacggtgaccatcacggtggtatgctgtagccctgagaagatcagggacaagttatgttacaaaggtggtggatccatcaagagcattgaactcaagtcgccggcgaaacccaaggaaccggagaagaaacccgacaaaccaaaagaagctgagaagaagccggaaaaacccaaagaagctgagaagaaaccggaaaaacccaaagaagcagctgagaagaaaccggaaaaacccaaagaagctgagaagaaaccgg

SEQ ID NO: 199608 - DNA, 224 bp, Gossypium hirsutum
tccgcctcaacccccgttgtaaccttcccccccctccgccgccgcagcattctcctctgtacagatatgaaattagcttagattaaaatttctttggggggttttggcgctttcgcctttgtgatcaggtcttttttttccttttaaattttccgacggcttctacgaggaaagatatggatcggatcaaaggtccatggagtccataagaagatgaagcttta

SEQ ID NO: 199609 - DNA, 587 bp, Gossypium hirsutum
ctcaaacattttcttactttccaagacaccccacttcaagttttttagatcaagaaagcagtgccttttgctgggtttctttctttcttttttttaattctaaagaaagagaaaattatggggaattgtatgatgaagacattgggatcaaggccgcatctggaagaagaagaagaagaagaagagattggtgaagcagcttcaactgattataagaaggaaaatgaagggaagaaaagcagcataaaggtgaagatagttcttacaaaagaggaactagacttgttattagtgaagctgaagaacaagggtaatggtgggaagagcttagaggaaattttgggtgaaatagagaaagccagatctgagaaacttgactcttcatggaaaccttcgttggagagtatcatggaagacgacgatgtcattaattcatgaaactttcaatcccttttctgtaaattaccctctctcttttttttttttttttacgttcatatactattatacttgcgtaactcgatgacaaagtatttaccagacctctccccaccctttttattttctctggaaccttggcattgagc

SEQ ID NO: 199610 - DNA, 420 bp, Gossypium hirsutum
cttagctttctttttagttttcctttaacttttgtaatatccttttagccttccgcgcatactctgtgtaaccctgctcatcttctcccccagaattggtatcagagggggtggtgtaaccatttcttggggaaataatatcatagtgttcattgtatgtatagttagattgaggaatgaaatctgtggacgttagtgtctcaagacttgacccacggtgatgaatattcagttgaatatcttcttgcataagtcactttcttgatgggagacaatggtttcaaaagagatgcaacaatagtggggacaatgggttagagcttccattttcatcaatggagagtggagccatgatcgtctttaatgtaaagctgttaaattctttgttaactgcttcgttttttttttcaatgggcatgt

SEQ ID NO: 199611 - DNA, 658 bp, Gossypium hirsutum
  unsure (1)..(658): unsure at all n locations
cacgttttcaaagggccaaatggaagctgggaaaccccatgctgtctgtattcctctaccagctcaagggcacattaaccctatcttattatttgccaaactcctccacttccatggcttccatatcactttcatccataccgagttcaactactatcgcttgattcagtcgagaggactcgactcgctcaggggctcacccgatttccggttcgaaacgataaccgatggtttgccatcgaccaacatgcgggggatacaagatttacccgacttgtgctcgatgttgctggttcatggtntacgttcgtttcgagagctcataatgaaacttatgctagatcaagatgtccctncggttacttgcatatatcgaatggggtgatgagctcacttggnaagttgctgaagaattggcatcctgagataggtcttttcatcctaatgctgggcatgtnggggtaccttcattttgaaacctaagaacgtgnatacttccattgaagataagtgagttgataatggtatctgagacgagatgattgataccacctgaagggtagataaagatatccacttattcacccaacctgtgaatctgtaatacactgcatcgtacatgcaggaagttatctgactacaccttagatgacaaagt

SEQ ID NO: 199612 - DNA, 314 bp, Gossypium hirsutum
ctttaaatggtcacgaccttcaaagctaagcccccggagtaaggcaacaatcgaatggataatcccatcatcttcctcaccgggagtatacagaataagacatttcggtgcttcaaaagggcttatgggatcaattcggcatttcactggttcatcaagtgcttttgtagtggcatgagaaaattaaaggtcaaagccatttatacatgatatggcacagcgtcttcaaagtttaattatttttatgctatttatgtaatgaattgtctttaggttataagttcaaacacggtcgaatccaacaatgttcctat

SEQ ID NO: 199613 - DNA, 717 bp, Gossypium hirsutum
tctggattcaacccgccaccgttttcgacatctattatttttacttcaacggatacgaatccgccattaaagctcaagctgatgaaacaaaccccaagtgttcgataaaattaccaggtctaccgccactcttcccccgcgaccttccatcgttcgttatcgcttcgaacgtttaccaatcggcactgtcgttgttccaagaacaaatggacgtcctcgcagaagaacccaacgctaaaatccttattaacaccttcgatgctttggaacacgaagcattaaacgccattgaaaagttcaagacagttggtattggacctttagtcccatcttcattccttaacccaaaagacgcattagataattccctaaaagtcgatctttttcaattcgattcaaaagattacattccaagggtagactccaaacccaaatctggccgcggttacacgttccttggagtatctcggcgtttaagaaacccaagtggaggagaaaactctagcgcttaattccgccggcgaccacctttttggggatgaggagcccccatatagatgcgcacaaagaaaaagaagattattcctgctgggggaataaggcaacttaaaaggtgcctgtggttccaaaaaaaagggtcatcatcccgggggttttagcacctggggagaaccctttaaaagttgcggctgcccggggtatttttgaggaagagag

SEQ ID NO: 199614 - DNA, 426 bp, Gossypium hirsutum
ctctaccattgattttttttccttttttccttttgttttgtttctggttctggtttcctttttctcttcacatttctttctcccgatgagcaaacgctcctttgtcggtacatttagagtttattgccactcaactcaccactatttgatctgaccttggttatttctgcttcagttttttctcttttaatttttctttgtatttttctttgaagcttctttccaacggagaaatagatagaagagagagggagagccagagagagtcgactgagaaagttttgctgtatgtcagtagattgtattgagacttactgcggtggatttggcgagcttgcaaaccctttacaatggcctcagctaagaaaaagacgacgcttctttcttcttcatcttcttccccttcttcatgttgcgcatcgcact

SEQ ID NO: 199615 - DNA, 422 bp, Gossypium hirsutum
atttttatttaagttcattgcttgatccatttccatcccagcaaaagcctgaaacagtattaatcgtcgataaaatggaaggacaaggtgaagatgttaggctgggagcaaataagtacagggaaaggcagcctataggaacagctgctcaaacccaagataccaaggactacaaggaaccacctgctgcaccactgtttgagcctgccgagttatcctcatggtccttttacagggctggcattgccgaattcgttgccactttcttgtttctttacatcaccgctttaactgtaatgggtgtcgctaaatcttcaaccaagtgttctactgtagggattcagggcattgcttgggcttttggtggcatgatctttgctcttgtctactgcactgctggcatttcagggggtcatattaac

SEQ ID NO: 199616 - DNA, 1059 bp, Gossypium hirsutum
caataatctaaaactcaacgttaccaactgtgtccttcggctcttagctatatttcaggccgaaacaaaacaaaacaaaaccaaatcaagtgaaataaacaagacttagaagtagaattagaagggaaaatggctagtggaggagggtatggggacccaagccagaagattgactacgttttcaaagtagtcttgattggtgactctgccgtcggtaagtctcagattcttgctcggttttccagaaatgagtttagtttagattccaaggccaccattggagttgagtttcagactagaactcttgttattgaacacaagagtgtcaaggctcagatctgggacactgctggtcaagaacgatacagagctgttacgagtgcatactataggggtgctgtcggagcaatgctggtgtatgacataacaaaacgtcagaccttcgatcacattccacgttggctggaaaagttgcgtggccatgccgacaagaacatggttattatcctgctcgggaacaaaggtgaccttgaaaaccagcgagaagttccaaccgaggatgccaaagaatttgctcaaaaggaaggactatttttcttggagacctcggctcttgaagcaactaatgtggagactgccttcatgactgtgcttacggagatcttcaacatcgtgaacaagaagaacctggttgctgatgagaatcaggggaatggcaaccccacgtctctagcaggcaagaagatagtcattccaggtccagcgcaagaaattccagcaaagagcaacatgtgctgtaggtcatgatttaattggatttgtctcctattatcaggttttttattttacattcttaatatcaaattttgaagggtgtggtatatctgtttgtatattatacattgcattagtttaatctgcaaggggcagctaattaattacatgttctgatatgggaaatagaaaacctaaatttaaagctgacttgcagattgcttcaatgtatttttctgaagttataagatctatcaaattatcctgctgaaaaaaaaaaaaaaa

SEQ ID NO: 199617 - DNA, 455 bp, Gossypium hirsutum
gcttgtgtctatatatatatatagatatggagtgaccatggtctaaccaaattcctcgacttctcttctgcttattagctctagtctacgccaagaggttcaaagattttatggctgtttccaagtcttcctcgggcaagcaacaaaacgaccgtgatcaagaatatcacaagaaatcggagccgttgattccagggctacccgacgagatcgcagagctttgtcttcttcatcttccatatccataccaatcgttggcacgttcagtatgttgctcatggaacaggaccataaccgaccctggcttccttctctccaggagatccttatcgctttctctgccttatctgttcgttttcgcttttcataactcaacggccaggatacaatggcaagcttttgacccgcgatcaggccgttggtttatattacctcccatgccttgtcccaagtct

SEQ ID NO: 199618 - DNA, 442 bp, Gossypium hirsutum
tcattcgtccgccagtgctatgagaggccaaaacaacggtggtgtaaggggatttgcttcgccagataggggtgcgcacgataagagagttggtggtaacaaccataacaataacaaccaccaccaccaccatcaccaccatcaccacaacaacaaatctgcggcatcttcggatatgacccatgacagcaaaaaaggaggctcatcttcaggaagcggtgaggcagctccacccatcgtttggccaccaaaatttgtgattgctttaactaataaagagaaagaagaagatttcatggccattaaaggatctaagctgccgcagagacccaaaaaacgagcgaaatttattcaacgtaccctcaacctggtaagtccgggggcatggctatgcgatttaacacttgaacgatacgaggtcagggagaagaagatctcaaag

SEQ ID NO: 199619 - DNA, 916 bp, Gossypium hirsutum
  unsure (1)..(916): unsure at all n locations
ctcaattccctttcacttaaaaccaacatcaactcttcttcttcttatgctttcaagactctcagtttctccagtaacctctctcacaatctcttctccaaagggaatctgtcttttagtacagtgactccgaaaccaatacccgatggtgctgatgcagttgtccaagttgaggacactgaacaggttaaagctccttctgaaacaaagtatgtaaagatattggtgcaaactagtaaaggtgttgatattcgtcaagtgggatgtgacattcagaaagatgcagtagttctaaaatctggagaaagattagctgcttcagaagtgggactacttgctacagttggtgttactatggtgaaggtgctacattgcctactgttttcattttaatgacctcaaaagcttgttcagcttcctaaaacaaaatttgtgtaaggttaaattctctaattaggcttgaaggttcttcctgaagcacctcccttcctaaagacggatccagttcggccagaattttatcgtgctactatcagatgggaggctaatgatggatcggggagtgccgggtaaatttagagttatagtttccttgatcataggtctcctcagtttttcgatttgttgttcagttagatccttcttggacctaatttatctgcaagtgtcatggtttttgctattttattctactntgtaatgctattataattgtgttaagaagcaatttgtttctttcggattttagaattgtcgctgagagcactggtcaccanatgagtagtcggcttctgagtatgaagtcagctaatgctttgaattatgttggtcataatcgtaaagaactttcttgctaatgaggaaangtatgaaagcaggtattttatttcgctgctatgaagtggattgcttttan

SEQ ID NO: 199620 - DNA, 733 bp, Gossypium hirsutum
  unsure (1)..(733): unsure at all n locations
ctgagacctatcatcacttgaaggctgttattacagaaaaatacggtgcaaatgggtgtaatgttggtgaaaatggtggctttgttcctgacatatccagtgtaagagaaggattggatattgtccgagaagctattggcagaacagggtataatgacaaaataaagataggaattggtgttgcagctactgaattttgcataggtacaaagtatgatttagaattcaaatctccaaataaatctgggcaaaatttcaagtcaggagaggatatgattcagatgtacaaagacctttgcattgattacccaattgcttctattgaagatccctttgacaaggaagattgggaacacagcaaacgtttttgcggtcttggactatgtcaggtggtgggggatgacttattgatgtcaaatccaaagcgcatcgagagagcaatacatgaatctgcttgcaactctcttcttctcaagataaatcagatcggaaccgtgacagaggctgttgacgtggtaaaaatggcaaaggaagcccactggggagtggtggtatctcaaagatttggggaaactaatgattgtttcattgcggatttancactcgcacttggcgcaggtcaaatcaaancaggggctccttgccnangaaagcgagtggctaagtacaaccagttgcttcgcatcgaacaagaactcagtgatcaagcagtgtatgctggcgaagactggat

SEQ ID NO: 199621 - DNA, 560 bp, Gossypium hirsutum
gtttacagtatcgcggtgattgaaggttaacctctggtttgagggtctccaagaccaaaagatgagtcttgcatgcctggtgtgccacagtgtggaaagtccgtcacactctttccggagttactctgtttcaagctcagataacgagggaagatgttcagctgttgctaactgcttagcaaggaagacatctctaccatctgcaagaccagctataacaacgacctccaaagtggccccacaaccaaattttcaaaacagcgttggaatggcaggtccgccacgtctggtgcgtagtcgtgctgttaggagggatcttgtgagagactggaactttgaagaggttgtgatggaacgctagtttgcttagtatgaggtgcaagactgtgggggctctctccatttgggctctctattttgtattagtatgcaaaaactgaacttttcagcatatgtaacacactgagtaaagattattgaatgtgaagaacatatcacatgtcctatgtctcctgccttatttgtttaggtgtctttggtacagcatgggcgtggctgac

SEQ ID NO: 199622 - DNA, 528 bp, Gossypium hirsutum
ccctcgcttccgaaaatggggcaggctcttgggtgtatgcatgtgttgcagtcaactgtagctataacagaagcatttgggaagtttgatgatgtgcttcagcctggttgtcattgtttgccgtggtgtttcgggaaacaggcagccggtactctctccttgcgtgtgcagcaactggatgttcgatgtgaaacaaaaaccaaggataacgtgtttgttaacgtgggtgcttcaattcaataccgagccttagctgaaaaggcacaagatgctttctataaactcagcaacactagagcccagattcaatcctatgtctttgatgttattagggcacgtgttccgaagttggagctggatgcagtatttgaacagaagaatgatatagcgagagctgtggaagaggaacttgaaaaggccatgtcacattatgggtacgagattgttcagactcttattgtggatattgaaccagatgagcatgtgaagagggcaatgaatgagattaatgcagcggcaagaatgagg

SEQ ID NO: 199623 - DNA, 444 bp, Gossypium hirsutum
tctaatcaccctaatttttatcatcatcttgcgcctaccatcggccctcttcgctctttcatctctgcaaatcagttttttttccttctcttctcttatcagttctcacccaccaacgtgtccgctagtgttttccggatctgacccgtatcccttgtcggatcgtatcggcacaggtactgcacccaaattaccgagtccggggaacgaaggtcactgccactgtccaatccgaaaatggcgtcgagactagcgatgctaaaacattccgccgccaccgactacggttcttttttaggtctgaggagatggattcatgcttcagcgctccctccacccttgggcgctccaatcggtcatcccccaccatcacaatcgttggttttccccgagtctgatcaaaccccagaaagcaataataacagcaacattgggtttgggttc

SEQ ID NO: 199624 - DNA, 420 bp, Gossypium hirsutum
ttttcccatcctggctgttaagctcttccccacagaatttctcttttcaagtttcctttgtcatttcgatgatgaagaaagcggagctagtgttcctcccagcgcctggaatcggccatttggtatccgcagttgaagcggctaagcttttagtggatctcaatgccaacctctccatctctggtctcaccatcaagcaaccccttaactataaagccaccgcctacatcgactatctcaacgccgccactatcaccaccaccaccacccgcatcaaattcatcgacctccatcaatctgatgcagacatggataggcttaagtttgtggggagtttagttcaaacccacggaccacttgtgaaagaggccgtcgccaaaatagttgagcactccaactcagttcccggctcacctcgac

SEQ ID NO: 199625 - DNA, 455 bp, Gossypium hirsutum
gctggaacgacccgcaggtagccgtgtccggaatcgaccggactgcgacccacacaaaaccaccttccctgtctatacggcgcacgttagcgtcttccagcagcgaaccatcgcaagccttctctatggccgcttcctatcgaccgccgccaccgtcagctattgatctcgacctcaccgtcgtctcagccaagcatctaaagaacgtcaactggcgaaacggcgatctcaaaccctacgctgtcttctgggtcgatccagaccgccgtctctcgacccgttcggacgatgccggatcgacccgaccggtatggaacgagcgtttcacccttccccttccctcccctctacacgacgtcgttttaaccctcgagatttttcactccaagccatcggaaacaccgaagccgttagtcgccactctccgtgtcgaactcaaagaattacccgacccg

SEQ ID NO: 199626 - DNA, 477 bp, Gossypium hirsutum
ccctcgcgtccgcccacgcgtccgaagtcggccatggcggatgcccttttgacatccatgtgggttttcagcatgccctttcttaagattctcactttcgaaattgcagctttcctcggccttcgacccttccctttggctgctttcttcatcaccaccctcttggtcagccttatgatgtttatcttcaccatcatcggcaacgctctcggcggcgccaccttcaatcccacggcctccgtcgctttctacgccgctggcctcaggaaagactggtctgccctttccatggcagtgcgttttcccttccaggccgtcggtggagtggtgggcgtgaagacagttttgggggttcttccaagggaatataaagaaaccatcaaaggaccttctttgaaagtagatatacagacagggtttttagctgaagggttgctgacatttgggctatgtctagctctattggtgattttgata

SEQ ID NO: 199627 - DNA, 492 bp, Gossypium hirsutum
gcggattaggactttcgttcttcttgctctttaatgtttacgccaccagtttctactctggatctcgacttgttgagagtggcgatgccacattctcggatgtttttcaagttttctttgctttgacaatggcaactgttggcatttctcaatcaagcacccttgctcctgactccagcaaagccagggccgctgctgcttccatattcgcaattatcgaccgtgagtctaagatagacccgagtgaccagtccgggacaacattagaaaacgtgaagggtgatatcgaactttctcatgtcagtttcaagtatccattaagaccagacattcaaattttccaagacttgagtttatctatccctgctggcaagactgttgcattggtaggagaaagtgggagtgggaaatccaccgtgatatcattattacagagattttacgatcccaattcgggacgtatcactatcgatggagtcgaaatccaaacac

SEQ ID NO: 199628 - DNA, 411 bp, Gossypium hirsutum
gaaaaaaataacaataaagacgacaaagacaagcagttcaaattacacgaagaaaacggagaatcagagcttactattctacatatatgacccccacccctaccctcaccaacgctctcaattttactattttgcatttttattccttcttctctttcttaccaaagaaaaaaaattcttttttttttcttcggtaaagaaaagtattttatttaattttctggggtttttgattcttacccatttcaggttttccatcgacttgcaataaaggaccttgaggaagtaaccaagcatatgattttactcttttgatgcgtgaagatggattacaaagtgcaagtcggagtccaatcccaccttgaaatgggacccctagatgataggacaatggaagatctcgatgacgag

SEQ ID NO: 199629 - DNA, 407 bp, Gossypium hirsutum
gttcccaaagtggatgagctttgacatggctttgctagtcccaaacttacttgaaatcgccatatggaattgtattaaatgcatacatctcccgttgttcagtcggcttcccaagcttaaggtgctcaggcttgaagtgataactgctgtcgaatacattgaagatagcagtgccgagtcttcatctttctcattcaagggaaatccaatgaatagaggaagagaaggtaaagaattcttcccttgcctagaagaattagtgttttttgacttgcgaaatctgaagggatggtggggggaagcccctctctgttaccaattattatcatggcgcagcagcatcaccacagaggccattgcagaagaaggaatcaatgcccccattccctcgtctttcaaaattaaaa

SEQ ID NO: 199630 - DNA, 497 bp, Gossypium hirsutum
cccacgcgtccggttgatattggttggctgtgaatccaagttaaaaagagtatatggggggtggaagtggacgtctcgtggacggtgttcgtcgctggtttcaacgtcgccatttgattccttcttcttcgaatcaacaaaataataacattatcatcgatcatcatgatacttcttcttcatcctctactactctaaccctcactcaaaaacaatcacaagaatcaacggctgatattgtcgttcaggattttgatttttcttccttgaggcttgttaaagttcctaagcgtcattactttcctgtttcttccatggattctcacaaaaagggtgcacttgaaaaggaatttttcacacagtatggagaggcaagtcgatatcaagttcaggaggtcattggaaaaggaagttatggggttgttgcttctgcaattgacacccacactagtgaaaaggttgcaataaaaaagattaatgaggtctttgagcatgtc

SEQ ID NO: 199631 - DNA, 611 bp, Gossypium hirsutum
tttctttcaatgcgtcaaggatttggtgccgcttcccgatcagccgtgttcggtggcatcttgcttgctttgatcgaaggagctggtatcatgttgaataaagttctcagtcaaccgcagatgcctattatgatagatgagccagcacccaatgtagcaggaatgcctggatatccgatgggacaattgccaaaccaagcgcctgcatcaattgagagtttgagacgcgactcgccaccgccgcctccacaacagtcctcatctaactcttcctcttcatggtttggaggactttttggtggaaagaagcaggaaccggcaacaggtagtggaagtaaaactgaggttttggagagcttcgatgctcctccggtgccgtctttcgaatacaaataaggtggtggcttccccattttgtcacagttaagaacactaatcctgcctttttgtttcagcactttaaagtgtttcagcttactaagcttgcatttttatcattaaattgactcgatagttgttattgctttcttgttcttggatttccctattgcaagatacatgcctatagagctgtttctcatcagtcaaataaaaaacccaatgttgttgga

SEQ ID NO: 199632 - DNA, 411 bp, Gossypium hirsutum
ctgattttctctttctaaaaaacgcagcggtgagcgaccggcgagaaaccaaatctcgccggaatttcgctctcttgatcgccggaaatttcatttcctttttcttttcacctctccggaatcaagctgccccaaagagagcggatatatatatatttgaatttcgggtatgattttgtaatcatgtttttgtagaagaaaacaaagagaaaaaggagaacaaagatcttctctctcttttggatatggcgattaaatggagccttgagtgataaattttgagcttttagtttttgagattttctgggtgttgaagctgtacaatgccatctgagatcatggatcaaaagaatgcatcggcatcatcccatttttcggaagacgtttgtttcccagctgagagacaaattg

SEQ ID NO: 199633 - DNA, 396 bp, Gossypium hirsutum
cttcacttcttttcattttccttcagacttcaccaaagtgagaaaatgacttccccgttttccttgccttgacttctccatctttctactttaaaacccaaagccccaaaagagtttttaattttcttttcttataaccctcaaaaaaaattttcttattggagagagcttttgataggatatgaatatggaggcaagagttggggtggtggtagaaggagggcaaagggctttgaattcagcccacggagctgttgttgatgctggggctagaaagtttttacagcagcagcagcaacaacaacatgagcattcttcaaagcagggcttgaatccgcagattgggactgttcaacagcttcttgctggtggtattgctggtgcttttagcaagac

SEQ ID NO: 199634 - DNA, 447 bp, Gossypium hirsutum
tgatttctcccttccttctttgctagggcgcaaatggatcagccccgccgctaatccatctcgaacgtgaataacagtggctggagaagcgcataatgtgcctccaccaccgtcgcggtttcaaccagacccacaaggatctgtcaaccttcgaccggaggagccaacgtcgaccaaatcgacaccaaaacagtacgtggtggtgtacagaggtggtacggttgtgtcgacgtggaggcgtgagcgatggtagtgctggaggatgctggaggctgctgcggcgccaaacaaatgaggctagggttagggttcccaagaactgtcaaaggattgggcctatcgggctctattagttgtggggccattgagtattgggctaggattaatttggtttttaggtttctatttgggtttgggtttgaaattgggttatgtaatttggacttg

SEQ ID NO: 199635 - DNA, 573 bp, Gossypium hirsutum
gattattactactagtttagtttaaagcaagttagggccgtccaactcagttgtagcgaaacgctggttgaagtttgcagtgagtctatgtgcctaatttgtttgtttgcaataataaatccaaacaatcacacactcaactctttcatctttctattgtctcccgcattttcgtaagtgaacgacgctgttcaagcttaaggagagaagggcatcatggtagactcgctgaagaagaacagcatggaagagagtttgattcccaagttgggagaacgaggagaaaagcactcggcggctaagttgggctgctctcgttgaagatataaaaagggcgggttaccttgcggggcctatggtagccgtcaccttatcacagtacctattgcaagttatatcaacgatgatggtgggtcatctgggtgagcttgctctctctagctctgccattgccatatctctcgccggagtcaccggttttagtcttcttctaggaatggcatgtgcattggaaacgctgtgtggacaagcttatggtgcacaacaataccgaaaattgggaatccataccta

SEQ ID NO: 199636 - DNA, 379 bp, Gossypium hirsutum
gaagcattttataactgtccaaaacctgtcttttctttttcttttttttttgtcaagttcaaaatgtgtagggttaattcgacaagtatagcatttcttagtgttttgctgttttgtttttcgagctttgaggtgacgtatagtgctagggaaggcaaacagtggaggaagcagagcatagctggtggtttccgccgtctaatggcgaagggaggaagctctgacgtcgtagccgacgccactaccacctttaatgtgttggactacggtgccaaaggtgatggacgcacagatgactccaaggcattcgaagcagcatgggctgatgcttgtaaagttgaggcatcaacagggatggttccatcgggttcaatattcc

SEQ ID NO: 199637 - DNA, 577 bp, Gossypium hirsutum
acccgttctccaagggtttctggtagtgatctatgtctgctgaatcttcctaatggcctgtaacgatgaaaacgagcctttgctatcaggattagcgactccaagaactcaaaagactaatggggatagaccaaagaagagaaggtttcgacgtgttaggagtgctccttttgcagattttgttccgactgatggtaatagagaagctgcagttccacgttccgggtccattttcgggagacttaatccgagtcttaagaaggtagctctatttttgacgttatacatgggtttaggcaccatttgcttttatacaaccaggacccaaatcaaaggggacaaaacaaatggaattcttgatgctctttatttttgtgttgttacaatgaccactgttggatatggagaccttgttcctaacagcgacctcgcaaaactactagcctgtgcctttgtcttcacaggaatggctctggtcggacttgtactgaccaaagctgctgactacttggctgagaagcaagaaatattgctggttaaagctttacacatgaatcaaaaagttggtgaacttcac

SEQ ID NO: 199638 - DNA, 708 bp, Gossypium hirsutum
atcacctggtccgataccaatggttgggttacaggactcttcagctgtctttccagttgaaactgatgattcgttaactacggtgggtgaggaaatatgggatccaaagctgaatagttgcagagtttcatcccaagcagaccaattggcttcattcactcagcaagatccatgcagtcttaattctggtggggtaagggatttgtctgatgacagcaacaatcaaagtgggatatatagtagctgtcttaacattgatgttagcaatggttgcagcactgtgattgatccttttgtttccagtgccattctagatgagttttgctcattgaaagatgctgattttcaaaacccttcagattgtttggtcgggaactttggttcttgtcaggatgttcagtctcagattacctctgctagccttgcagattctcaagctttctctcgacaagacttgcctgacagctccggtggcaatatcgattttgatgacagtggtcttctgcaaaacaattcctggaagcaaacagctccacgcgttagaacatatacaaaggttcagaaggcaggatctgtaggaaggtcgattgatgtcacaagttttaagaattatgatgaactaatctctgcaatagaatgcatgtttggactcaagggtctgctggatgatcccagaggttcaggctggaaattggtgtatgtggatta

SEQ ID NO: 199639 - DNA, 725 bp, Gossypium hirsutum
  unsure (1)..(725): unsure at all n locations
gaatgcccgggccggcgccgcccacgcgtacgttttttattctgttttgccttttccttcgcatctgctttttctaaattccagcaatctctttactctttgctttcattttcccttaattcagtcacaaaagcatcatcattattatcattgtttaaccactctctttctttttcactcaattctactactaaaattctgggttttgttttctgattcttgattctcagttttcactttgattatcgatctgggtttgtgttttttttttgggtcatggaaaaagacaaagcttttatgtctgaagagctgaagaacagaacaacaacacgacaacaacaaccagcttggaacccttgtggttttatgacagaaatgtcaacaaatgagctgaattgtggaacagaacaaggtgggaactattttttcaatccaaattgggataattcaatggatcagagcgatccctttgaatcagcattaagttccatggtgtcttctccagctgcttccaatgttggttccggtgaaaatgtaatgatgcgggaattaattggaagatttgggaatatatgccattctaaagatatcatcaccaacagtactaatgcttcatggtatagtacgccattgaattcaccttcattttaactgaccctgggatttgctgaagagctgctagattttcttgtntggtgggctaaatgatccattagggattcctn

SEQ ID NO: 199640 - DNA, 414 bp, Gossypium hirsutum
gaagaaatggcttccgcggatagcaatctccttatcctcaatttcctaaccttggctgcgttggccctattctatgccgacaaagctttttgtattcggattccagatcgggcctccaccacgcctcgggaactgtcagatcagtctctgaaaaccgcggtttttgccctcggtagtttctggagatcggaagctggcttcgggtgcttaaacggtgtcgttcgaactacttctggttatgctggcggatccaaaatcaatcccgaatacagaagcttaggtgaccaccccgagtctgtgatggttgaatatgatcccgaggagattaatttcaggctacttctggaggttttttggtctagccatgacccaagacaggtttttggccaaggtcctgatgtaggtccccagtac

SEQ ID NO: 199641 - DNA, 728 bp, Gossypium hirsutum
ggtgcactgagcagaggttaaataaggaatggaaggtgaggaattcgcagtgggttgcttcctttcaattaagacaactttgggcgacgaatttgaaggtcaaattatcagtttcgaccgcctctccaacatcctcgtacttcaggagggtttggaatcaggacccagaaggaacattcggctgctgaaggctaatcacattaaagagttctctttattgcgccaagatgaagatcctcttgatgttaagaaatgttttttagaccttactagccttcaagcaagagaagattctgctattaggcaagctgaggctgattcagagaggtttggtgttggagttaccagtgaggcacagactctttttgatgctttgtctaaaacgctacctgttcgctgggacaagactgtcattgttgtaatgaatgaggtgcgtgtgagcagtccatatctccccgagtctgttagtggaggaactcctgcagccaatgaacgagtgagaaaagtgctggagtttgaaaggaagaggatgcaaactcgtggtactagccagtgacaaactcacatttgtgttcaaaggttggagaaaccaaaatgtgttatgattggtattattgtggtagttcttttgcctcacatttttcttattttattgaaagagtttaaacaaatgcctgatactgaattgttagtcctaatataatgctacctaccttttttagatgagt

SEQ ID NO: 199642 - DNA, 386 bp, Gossypium hirsutum
gaaacaaggcacggtgtatatcatatatgatatgagattttccccactcgccttcatcaggtcaatctccaattatatctctaaaccccacatgtcttttccttctacgcatccctaagccaaaaccccgccttcaactcctctcacccaccaaaatcccatgtcacctcctccggcactgcagctcgctctggtggctctactacacctaactctaactaacgccgccacctccttccccgactttcaactcttgaacgtggaacaagctctcgttggggtgttagcacagcctagtcctctccaaacatctgaatataatcatcacgaacttctcaacgttactgaaagtgaagatcaatggaaatggaagctgaaactcatcc

SEQ ID NO: 199643 - DNA, 766 bp, Gossypium hirsutum
ttcttttcaatattgatgatgcagctggggggctgtagatcaagaagatacaaatgtcgccccacaccaaagagttccgttacttggatagggcagctctcaaggacccacctcttaatgatcaggcaaataaaaggaacttggctacattaacagatgctgaagaagtgaaactggaactaatgatgttacctatatgggcaaccactgttatattccggaccgtatatgcccaaatgacaacattttcagtatcacaagccacaaccatgaaccgtcacatagggaaatttcaaatcccaccagcgtcactcactgtattcttcgtcgggagcattctcttgacagttccgatttacgacaggctcatcgctccaatcgctagaaaattacttaaaaacccacaagggttaacccctttacaaaggatcgctgttggtttagttttatccattatagcaatggtagcagcagcattgaccgaaataaaacgattgagagcagcaactacgaatggtcttgcgaataacccaaccgctcaaatcccattaagtgtcttttggttggtccctcaatttttgcttgtaggcgctggtgaagcctttacatacataggacaacttgattttttcttaagggagtgcccaaaagggatgaaaacaatgagtacgggtttatttttaagtacactttcattagggtttttcgtttgttcattattagttactatagttcataaggtgactggaaacaagcatccatggct

SEQ ID NO: 199644 - DNA, 426 bp, Gossypium hirsutum
tcctctcgtccgcccacgcgtccgcccacgcgtccgatcaaatgccaaattcgttgctttccatttatcgaggaaaactcagttcagtcgtggattcagtttttctgtttttaacatagttagttgaagcaagcaatcatggcaaggaagatgttggttgatggagacttaaaccaaacgaataacgagggagctgaatatgattttgacttgtttgtcatcggtgctggaagcggtggtgttcgcgctgccaggttctccgctaactatggagcaaaggttgggatttgtgagctcccatttcatccaatcagctcagaagtcattggaggggttggtggaacgtgtgttattcgtggctgtgttcccaaaaagattttggtctatggagccacgtttggaggtgaaattgaagatgctcgaaat

SEQ ID NO: 199645 - DNA, 611 bp, Gossypium hirsutum
gggatatgaattgtgagtttttggtttgttcttcacaaggatctattttaagcttttgggttttgtttttgagtgtttagagaaagagaaatggctggaagtaatgaaatcaacctcaacgagtgcaagtcaagaggctcaactagagatggtaccggagttcatgacagcattgtgaaccagctgcttaccaagatagatggagtggagtctctaaataatgttttgcttagtggaatgaccaacagaaaggatctgcttgatgaagcccttttgaggccaggacgtttggaggttcaagttgagataagtcttcctgacgaaaatggtcgtttgcagattcttcagatccacacaaacaagatgaaagagaattcttttcttgctcctgatgttaaccttcaagagcttgctgctcgtacaaagaattacagtggagccgagcttgaaggtgtggtgaaaagtgcagtgtcttttgctttgaatagacaagtaagtatggatgatctaacaaagccagtggacgaagagaacattaaagttaccatggatgattttctcaatgcactcctagaaatcgttcctgcatttggagcctccactgatgacct

SEQ ID NO: 199646 - DNA, 424 bp, Gossypium hirsutum
gccaaagcctcttcatttaaaaaatatataaatttctgcaaaaaaaaaaaacttacaaaaagatagaccaaaaagaagaagagcccgcggggagtatgacagaggtctgtttcgggggtgagctttctatcactgctccaacggacttcttcttttgtggtgctctttacccagatccaggcaatctaagaggactaagatgaatcctttgatgcgcttttaagattatgatgttttggggttactgttcacaccttagtatcatcttgtcatgatttcggatatcgtgatcttcgaggtgagtgttgctgtcaaagttcaacaactacccatgaaagtcttatgtttgaagggtctggatctcaaatttggatttgataagagctttgtgaacggagagatatatatatcaaaactttgacat

SEQ ID NO: 199647 - DNA, 439 bp, Gossypium hirsutum
cggacgcgtgggctaatattctctaaacatggctctgagatggtttctgcattcagcatgtcatgttctggggtacctacatgagtctgatgacatgcagtactgcaagaacatggcaagtgaacaaagtggaggagtgactcagagctcaaaggtgtcctccaacgctgagctgacggtggttaaagcgaaaatgcatccgggttcggggtttcagatgccgctgcactatcctcgttacgcgaaagcggattacgagaaaatggaggagtggaaagtggacatgcttctcagggaatatggactaagtttggagggcaacctcagccttgatatgagagcatatgcaatgggcacattcttgtggcctcatcagtattgatccatcttctaatcatcatcgtgccttaatcaagctgctagctaatatcatatgcat

SEQ ID NO: 199648 - DNA, 417 bp, Gossypium hirsutum
ggtggcaggaaacggtgcgtattcgccacgttttttcagcatctctttctcgattgttctctgttttttgtgttttattgcttgtttggctgcgaagagagtgagagagatcaggcaaaaatggcgtgtacgcacgaccacagctgcgaagatcacgattgttcttctaattggtctctttacaagcacatcgacctcgccaaggttaccgctttaaatgaggctaatccaggaagtgttaaatcggtgtttaaggcctgggaggagcgattaaattcttctggggaacgcttggaaagtaatgagggtgatcctgagttacttgtttacattccgtttacatcagatgttaagatcaagagtatatcagttgttggtggtgctgatggaacaagtccttccaagctgagagtattt

SEQ ID NO: 199649 - DNA, 619 bp, Gossypium hirsutum
aaaaatattatctacatctatcttggccgattgctctttgtgctctcatatggctatggaggatgctgagcaaccgcttctttcccctcggctagtcggcgaggacagccgccaccaggagcagttactttctagaccatcaaacaccaccttcacgcccggcatcgatgacatcccaccgatcaacggcgtccgtgacttcttcagagaatacctgatagagtccaagaagctctggttccttgctggccccgccatcttcacatctctttgccgatactccctcggcgctatcactcaagtcttttccggccaagttggcactctagctcttgccgccgtctccgtggagaattcattcatcgccgggttctccttcggcgtcatgcttgggatgggaagtgcactcgaaactttatgcggccaagcatttggagcagggcaggttggtatgttaggggcgtacatgcaaagatcatgggtcatcctcaactcaacggctttgatgttaagcttgttatacatattcgcgtcaaaatttttgagggtaataggccaaacagaaagcatatcgaaggcggccggaatgttcgcaatgtggatgttgcctcaactgttt

SEQ ID NO: 199650 - DNA, 716 bp, Gossypium hirsutum
  unsure (1)..(716): unsure at all n locations
gagagcaaagactaagaagcgatcaaaaaatggcagcagctccagaaacaaagaccgttcattcacctgcactcacttatttctccatgttatccttgctctcactttgcccaccttttgttatcctactatggtatacgatggtacatgctgatggatccgttgctcaaactcggaattatctcaagcagcatggattgcaaggtttcatagatatatggccaagacccactgccattgcttggaaaattatttttgtttatggagcatttgaagcagcacttcaattgcttctccctggaaagagggttgaagggtccggtatctcccactggtaaccgacctgtttacaaggcgaatggtatggcagcttactttgtgacattggttacctatattatctttgggtggttcgagattttcaacccccgngttgtttacgatcatttgggagaaatatattcagcactcatctttggaagcttgatcttttgtgttntcttatacttanaggtcatgtggcaccttctttacagattcctgggtcatcgggaaaacttatattgatttctatggggcatgnagctgtatcacgaatgggaaaaactcgacatcaagtcttacaaatgcagatcgggataagtcttggctgttctgctgtacctatgcataagcgtatgactcattggaagttcaaatcatgttgtgatacactn

SEQ ID NO: 199651 - DNA, 609 bp, Gossypium hirsutum
gttttatccgatagaaatatggcgagaactgctctcttccacttgcttcgatcccaatccaagcaactcatttccagaaacatccattcaggttatcgttttaggtttgcaacactgtctggcacccaatatgcgaagccgaacctcaactatgcaacgagcattttcagtgtccaaaaaagatgggcttctcaagctaagacatctgaggatgacgacaaaatcagcatcggtcctcgtaaaagcaaagaagacgacgaagatgagaaggatgccggggttgtttactacggtccgatttcttctacaatcaagaaagtaaagatgctttcactttcgacctgctgcctctcggtatcgttaggccctgtcattacattcatgacttctcctgatatgaatgtgattgtgaaaggtgcggtagcatcctctgtgatattctttagtgctacaacaactgccgcacttcactggttcgtgagcccttacatccacaaaatccggtggcagccttgttcagacagcttcgaggtgaagatgatgtcttggttagcaacatatattccacgaaccattaagtttgcagacatccgtccagccgagaccaac

SEQ ID NO: 199652 - DNA, 419 bp, Gossypium hirsutum
catggctaaggtatctttgttgttgttttccttgttcattattgttgcttctgcaattatcaatgggtcagcagcagtggagaaggttgggatatatgagctgaagaaaggtgatctgagtgttaaattcaccaactggggtgcaactattgtttcagtcttcctccctgacaaatatggtaaaatgggtgatattgttctgggatatgattctgtcaatgactacaagaatgatacttcgtatattggttccattgttggaagggttgctaacagaataggaggggctcaatttactttggaatggagtccattataaattgatccctaatgaaggcaaaaacatgcttcatggtggccctattggatttagtgatgttgtatggaaagtgaacaagtataagaaagatggctattct

SEQ ID NO: 199653 - DNA, 434 bp, Gossypium hirsutum
ttcttcatcagtttttttttgtcaattttttcttgaactcatagtaaaaaaaacccataaattttccttccaagagtatcaattatttttggtttctgggtatagcttataattcaaattattaaccttttattttttaaagacaatgattttgccattgttgaaattgtatgacaaaggaactagtgttgttaaaagctattacttttggattttccagatttttaatacttataggattgaaacttaagaaccaaatttcattattttcttgtttcatttccttaaaagttataagcgattgtgtagttagataaagaaatttaagtaacattgagataatgggaggggccatcatttgccaccaggtttttcgttttcatcctactgatgaagaattgattggatattacctcaaaagaaaaacttaaggg

SEQ ID NO: 199654 - DNA, 442 bp, Gossypium hirsutum
actttcttttgtagtggaagaaaaaaaagagaaaaaattatggagacaaagtcattggcaatggtggtggtgataactgtttcagtcatgtggggcgttgaaatggccactgcagaactcagtgccgctcagtgcaagcaagaaaggaacctcgccattaccgcttgcaagccggtggtttacggtaagcttccgtccccggaatgctgccagcgagtaagggttacccatctggaatgcgtttgccccatcatcacgcccaagatcgccgcccttattgacgtcaaccgtgccatccgcctcattcaaggctgcggtcgaagtgttcctcgccactacaaatgtggaagtatcacaacctccatgaaattggcataccttctgctatactactggttacttattgctgggggtggaatcagcttctgaaattaaaataatt

SEQ ID NO: 199655 - DNA, 555 bp, Gossypium hirsutum
tgacagtattgcctctcaatttggaggttggacccataagcatgatgaagtggcaactattcatgcagattgaccaatcattccaaattcatcgtagttatggcagcatggttgaaggcgaggctgatgaacttaagagggtcttcctggaaggaaatccgtacttgctagtgatcacaatggtcgtttctgtgcttcattctgtgtttgacttcttggcttttaagaatgatatccagttttggaacaaaaataagtctatggaaggattgtctgcaaagtctgttgtggtgagctttttgtgtcagcttatagttttcctctatctactcgataatgagacctcatggatgatactggcaagttctggaattggttgttgcatcgagttttggaagatagggaaagcaatgcacatagaggtcgatagaaccggaaagatacctatgttgaggttccgagatcgtgattcatatgcaagcaataaaactaaggaatatgatgatatagcaatgaagtatttgtcctacgtgctcttcctccttgttgcaggct

SEQ ID NO: 199656 - DNA, 371 bp, Gossypium hirsutum
  unsure (1)..(371): unsure at all n locations
ctttgaagtgctcaaatggctatgcataaggtgtttggtgcggttttatttgtgttcttaggtgtaggcatctgttctgcaactagagctctactcactctaaatgatgtaggttctcacctaccaggtattggtcatggtggtgccaccattggtgtatatggtggtgttgggctcggtggaggaggtggaggcggttcaggaggtggtcggtggttctgcggttgtaggaggaggtgctagtgctggatatggaggtggtggtggtagtggagaaggtggtggtgttggaaatgtttttnntctcactagtccgctcaacatcattatccttccattgttaaaccatcctttcaccctaaaccaccaaa

SEQ ID NO: 199657 - DNA, 414 bp, Gossypium hirsutum
ttctacttttcgccaggcttcaatgttttgttgacctctcaacttgcttaggggcctttggttgtcgtcgttgtttttcgcgaaaatggcggtggatctgatgagttctcctaagatggatgatcagatggccattcaggaggctgcaacgcacggtatgaagagcatggagcacctgattagcctcctttctcaccagtctaaccgactcgactgcgctgaggttgccgatctcaccgtctctaagttcaaaaaggtcatctcactaattaacagaaccggtcacgctcggttcagacgtgcaccgattcagtcctcttcctttccctcatcgtcatcatccgctgcttctctaactgttactgattcccacaaggctctaactcgaactcctgccccggttgaaacaccgcc

SEQ ID NO: 199658 - DNA, 602 bp, Gossypium hirsutum
ggtttatctgtcatctccaaaatacagtgaaacagttcaggtgactggcgttggatcgctttcgaacactgaggagactaaagattgtgttgcttacaatattgaagccacttcagtgccaaaacctgctattcaggcattcaaattactcaatgagagcccagcagttcagtctgttgttgcttccattgcttctgatccaaatgtatggaatgctgtcctgaacaattcagcttatatggatttcattaaatcccagcagacaaatgataagtttgaatttccgggatctccccgaagttctgtatcttcagtgaagcttgaggaaaatgaagatagtggagattcattttcggcttttatacagaaaatcaagactagtgtggtcgagatggtgagtaaaacgactgatttcctccatagtctctttagtttacccttggcggacaaggctaaagaaaatgctggatcgaacaatatggataagacaattggagctagcttgatgggattggcagtgatggttattatggttgttcttttgaaacgagtgtagcaccctattttaaagtaaatttgccgatattacaaactcaaaaaca

SEQ ID NO: 199659 - DNA, 694 bp, Gossypium hirsutum
  unsure (1)..(694): unsure at all n locations
gcgaattttcagagcaaatttcagtggttcacttcaaagcattccaataaaagtttcttttttatttattatctttggtcacttgcctccatctttcctttgaaatctttcagatttttttttaaatcagggtttctccgcttaaattaagcccaaaaaagggggaataatgttaaccagtaagacattaattcaacctccttccattcatctccaaaaccctaatcttaaaccctctccttcaatccctaaaagacccaccttctcatcccttccttttcaccgatcatttttactgtctttttcacataatttgacgccccgaaatcttagccgtcactgcattagccctggccaggaactgagttatgaaaatgaagatttagtcgaagaacaaaatgaagaagaataattggaattttcccggaaatttcaggaaaaagggtttagcaatttanaacatatggaatcaaatgaaagagattgtgatgcttactggaccggttactgggctttggctttgcgggcccttgatgagtcttattgatactgctgtcattgatcaaggaaactcaatcgagcttgcagctttaagtcctggcacggttgtttgtgattataccggttaattggttatgttcttttaattgcccttttaatttgtggccactttcttgtttacggataaaattaa

SEQ ID NO: 199660 - DNA, 556 bp, Gossypium hirsutum
tcgtttacgcgtgggaaaaaaatgagggaatcctatctccttttcacactactagttttacttccttccaccctgcatttccaagctcatgctgcccctgctggaccattggtgaagcacttgtcttctttacttaaatggaccaggtctaccactaaagcaccccaatcagatggcaatgttcttcaatttgagaatgggtacttagttgagactgtagttgaaggcaatgagataggagttgttccttacaaaattcgggtctccgaggatggagaattatttgctgttgatgaagttaatagtaacattgttaagattactccaccattgtctcaatatagccgaggaagattggttgccgggtcatttcaaggttacacggggcatgtggatggaaagccaagtgacgctcgtttcaatcatcccaaaggtgtaaccatggatgataaagggaatgtatatgttgctgataccatgaatcttgccattcgaaagataggagatgcaggtgtcacaacgattgctggaggcaaatcaaatattgcaggatata

SEQ ID NO: 199661 - DNA, 408 bp, Gossypium hirsutum
ccaaaaacaataacaaaagagagcaaaacaaaaaaaatggagcttaaacctggcttatcaactctggtcactggccgtgcttccggtattggtaaagctttgtgcttagctctggccgcgaaagggatatttgtgacaattgtagatttctcggaagagaaagggaaggaagttgcttctttagctgagatagagaattccaaattccatcaaaatttaggctttccttctgctatttttgttaaatgcgacgttactagcttaagagatttaaatttagcatttgagaagcatgtctcaacatatggaggactggatatatgcattaataatgctggcatcgcttatacagcacttttctggaaggatcaaactgatggcactaaaacattggaacatactattaat

SEQ ID NO: 199662 - DNA, 405 bp, Gossypium hirsutum
aaaaaaacagaaaaccctgcgaaaaagaatgcaaaaccgccacaacgctttgttttgaagcttcactcatgtcgcatgcacttcatctcgtccccaataacattcctggttatggaccgacagactgccgatatctctcctactcgggcatttccggaagagcagtgactctatctccttgctcttcacatagggaccacaaaatttgtacacaggtgaatgttagatctttggaatgtaggtcggggggaataatatcttttgtatgcagagcaggtcctggtggccataggagaaaccctgacttctcgaggcaaagacctgggtgtcgagggaagaattgacaaaatgcagaccgggagaacttttaaaatctagatgaatcccgaatggtatcttcaaaaa

SEQ ID NO: 199663 - DNA, 454 bp, Gossypium hirsutum
attcatttggcttctgtcggctaaggatgtctcactttcggcggcttctttctctgcttgctcgaaatcaacctcaagcctctcttttcaaagaacctctttcaccagccatctcttctgcaagtgtatccttcaacagtagatatgacttttatagaagatggctccaaactcaacctgatccttccggcctggctattgacaacaccgaaaaccaagaagccgacagtttaaagcctgcttcttgctcagctaatgtaccttcggagacaaacgattctgccatgaagcatactgctatatctaacttgaaaacatctgcaaggcacgatcttgccatgatattcacgtgcaaaggctggggaaccccgaccggttaagacggcttgccggggatcatacgagaaaggtgtggctgtggtgagatgtggaggatgtaataatttacatctga

SEQ ID NO: 199664 - DNA, 463 bp, Gossypium hirsutum
atcaaattcaattttaaaaatttctttcaaatataattatcaatttgagttttaaaatactcaattactaaatttacttccacctgatttttagattcttgagattgattggcataagagcttaatttatttcccctcgcttccacccgatcgttgggatcgattagtattagtattgagaagtacttatgggaattggttttaagataactccagtactagtagctgtggtcaataaaaattaaagaagggattctcagattctgttttgttgtgttgctctctgtggatacacaagataattagggtttaattagatttggattcaagattccttcttcatcgtcattttcctaaggaagctacggagcaggcggggctttctttcttcttcgttgcactttttctatttaatatttgcattatctttatgccattgcaataaaattgtaaagattgttct

SEQ ID NO: 199665 - DNA, 433 bp, Gossypium hirsutum
ggaacggccgggccggcccagcgcgtcccgtttcgtgtagttataaaggatagtctcaatcggctcgattcgcctgcgtggcgggggtaaggatcccctcttttaaggatgaattcactttcgaccaaaggctggaagaatcccgcgatatcattgccaaatatcccaatcgggtccctgtgattgtggaaagatactcaaaagcagatcttccagaaatggaaaagaaaaagtatctggttcctcgggacatgtctgttggacaattcattcatatcttaagcttgagacttcgtctgagccctggaaaagcactgtttgtgtttgtgaagaacacgttgccacaaacagctacgcttatggactctctctatgaatctttcaaagaggatgatggttttctgtatatgtgttacagcagtgagaaaacctt

SEQ ID NO: 199666 - DNA, 563 bp, Gossypium hirsutum
ctttttctttcacctttcgattctccacggtgccgccaggcactgttttctctgttctagatgacaacgcaatcggatccatcggcttccgatccacaagggattgggaatgcctttgtcaaacagtactacactgttcttcacaatgacccttcacatgcttataaattttatcttgacttgagcgtgttaagccgccccggtactgatggtgcgatgaagtccgtgactaccctgaaagagataaatgagttgattctctcattggactaccagagttataaggctgagatttcttttgctgatgcccagttctcattagcaaacgggtgtgattgttttggttactggctctttgatcggaaaagatgatgtgaggaggaagtttacgcagtcattctttcttgctccacaagagggtggatattatgtcttgaatgatgtgtttaggtatgttgatgacaaagagccagtggacgtggcatataatgatatcgatgagtgtaatcaagctgatttgtctcaagataccgaggtaactcctgtgccgaagaatgctgtgt

SEQ ID NO: 199667 - DNA, 463 bp, Gossypium hirsutum
ctcacgcgtccgagcctcctatttccccaacctcagcgcaagctactcatcgtgcgcaatacaaaccaccatcgtcactgaccgcgatcggcgtcaattcgattttaaaggcaaggagagatgtgggtattttacctgatctcgttgcctttaaccctaggcatggttgttttcaccttgaggtacttcgctggccctgatgtccctcgttatgttctttttaccgtcggatacgcttggttctgttctctctccatcatcattcttgtgcccgccgatatttggacgacgatatcgaagccgggaaattataatgaaaatggaggaatttcattcttttggagttggtcttattggggtacctttctcctcacctgggctgtagtgccccttattcagggttttgaagatgctggagacttctctgtgactgaaaggttgaagactagtgtgcatgtcaact

SEQ ID NO: 199668 - DNA, 395 bp, Gossypium hirsutum
ctcttcccatttctctctcttttcttggcagggaaaaaagtgagtgacttgtgggaaagcaaaaataaaggccatatctttgatgtgaaaagagagcaataccagttacaaggaacaaagattttgtagatattttttccttcacagttagtttaacataatggaaggaatcaaaggtggaggaggaggtagagttggtgttggtgttggtgttgaagaagatatgggagatggtatgcaatgcagtaatcatccttatagaaataaccctggtgggatctgtgctttttgccttcaagagaagctaggcaagttgggttcttcttcttttcctttacctattcgtgcttcaccttcttcttcttcttccccgccttcttttagatctgatactg

SEQ ID NO: 199669 - DNA, 397 bp, Gossypium hirsutum
ctgggagggtttatgccactggtcttaatgattttgggcagctagggtcatcagatcttataaagtactctagagagccggttgaagtttcgggtcttgcaaaaggaattgtgcaaattgcagctggttatcatcattcatgtgctattacagtggatggagaactttacatgtgggggaagaactcaagcgggcaacttggccttggaaaaaaggctgcgaaagcagttcataggccaaccaaagtggaatgcttgagcgggcttacaattaaattggctgctttgggttcagagcacacagttgctgttactgatggaggtgaggctttaagttggggagcagttgcatctggaagacttggtcatggccttgagtcgagcatttttggtttttt

SEQ ID NO: 199670 - DNA, 437 bp, Gossypium hirsutum
caacaacctcctctccccccttcatttctctctctctgcattttcatctcttggttctttctcttttacaatctcatacatggctgaggagactcaaaagcctgaagctgctgcaccccctgctcctgctgaggaagtggtggtggagaaggagagtgaacaggaggctgcttccgagaagcctactgatgctgttgttgaagacaaacctgctgaggctgttgaggaggagcctaaggttgaagctaaggacactaaggtaactgagtctgcttctttcaaagaagaaaccaatatagccggtgaacttcctgacccacaaaagaaggctcttgatgagcttaagcaacttattcaagaagcccttaacaagcacgaattcacaccccctcctgccaaagataaagataaaccagctcccgaggaaaagaaagagg

SEQ ID NO: 199671 - DNA, 353 bp, Gossypium hirsutum
tcgtaatctccatttgcctgctctgcacccatttttttctgtaagggaaaaacaacgcttgctttgggaattcaagcatggcggggatggaaggaggagggacattatcggatgtgtatcaaagcgctagaaagctacttcttcgagcaagggatgggatcgaacgcttagagagattcgtgagctccgtctccggtaccgattctcctgaactctccttcgccgtgaagaaagatatctctcagatccactctctatgcgctgatatggatcgcctctggcgttctatccccgccaaatctcaacgcgatctctggaaaagaaaagttgaacaagtggctgaagaggctgac

SEQ ID NO: 199672 - DNA, 450 bp, Gossypium hirsutum
gtgaacggaggcgttgatatggggagtgtttcacaagcttatttggaaagcgacccggtgaagagagggcgagggatctttagatatctctagagctttgtcagccaaggttctaattagccttaggatagggtcttcagagaacagagtggcaagcatcactcatgaagagtctcatgataagctctatctcccaagctctcaacaaccttatcctcatgtcccccttctggtgtccaaaaggagagaatggaaccagaggacatgtatgtattatcaggagatggggctatcatatcttcaccttctccaaagccataccctcataagcctcctaaatgctctgattgtgctccgcttttcatgaaggcatatcatatgcgtaatgctggggctgttatccacagtcatggaatggaatcctgtcttgcaacaatgatcaatccacat

SEQ ID NO: 199673 - DNA, 676 bp, Gossypium hirsutum
  unsure (1)..(676): unsure at all n locations
aaataagttaactcaaacccttcaaaatttcaaaacaaaatcctgaaaatctcaacttccaatctttcagtttctaaatttattgtcttccccgttttctttatgaaattaaacctctcagaaaatgcaatctcttgaaagcatcacagaatccccatttcctcaaaaccctaacaattcatcatcatcatcatcttcttcgaatgggttgtatggatggctcgttgaatgtcatggattttggcataacttagcacttattatcccttctctcctctttgttctgtttctgggttttcaagctaaaaaaaactttcaaaagctctctcatggaaggtcttatatcatgatttcttattacggttgcctttggctcgttagcttgctcaaccttgtttggtgtttcgttcaggcctgggaatgcactcctggaaaggaaatggcatggaatatcttatcattgttcacaacttctgggatgctattcctggaagttagcctgttggcatttctactgcaaggaaatcatgctagtgggttgcaagctttgacacggacatttgttatttcagggcttattgttgtttggactactctcaagctattaccatnngatgnngngcctgtcatgacactcgaaatcactagaaaatgngctgtgtgtcacactatgctc

SEQ ID NO: 199674 - DNA, 461 bp, Gossypium hirsutum
cttccattctcttcccttccctgggcctccaaaaatccacgtctctctctctcgtcaagacaacgaaacccacaaaaacctgttgggtgtccaaattcaccacaaaacatcaatggcgaacctcaaagcagggacaagaccaccatgggttggtcttggtgctgctgtctgggtacagatagcatctgggaatgcctacaacttccccctttattcccattcattgaaatctgttctggggtttaaccaacatcagctgacaatgcttggtgttgctaatgatattggtgaaaacgtgggattactccctggtattgcttagtaacaagttcccaccttgggttatcctattgattggatcttttgcttgtatcttgggttatggcgttctttggcttgctgttagcaaaactgttctatatctgccttattggctgttatggcttgcactttgtgtcgct

SEQ ID NO: 199675 - DNA, 661 bp, Gossypium hirsutum
  unsure (1)..(661): unsure at all n locations
ccgaacctaccaagcttcccgattctgatcctccgaggaacgaggacgagtgggaggaagagtatgttgagaaaggtaacggtacccccgccgctgcccaaggagctgctgagccagcgactgcggatgtggcggagggttttgatgatagagttgcggatttgaagaggtgtttggtggattcggtttacgggacggagttggggtttcgagcggggcagcgagttaagggctgagattttggagttagtcaatcagttggaagcctgttaacccgacccgagctccgattgaggccactcagcttcttgatggcaactggattttgctgtatacggcattttcagaaactgttgccactactggcggctggtgcaacccccttactgacaagttaaaagcataagccaatcaattgatacagcgaggtcagtctaattgtgaactccaccacattgtctggccctttttgctgatctctcctttagtgcatcagctaccttcgaggttagatctccttcagaatacagttgaattaagaaggggatatgcaacctcagaaataaacaaatgtggatcttctgcagattagatggcttggtcaaagatagtttgtcgctgtgcagcatctcttgccccctgcngattatcgcaatattan

SEQ ID NO: 199676 - DNA, 712 bp, Gossypium hirsutum
cccacgcgtccgtattttgtgaatcaggtaattcaggatgcaggcgtcgtcgcatttagtcagagggaatttcggcattgagatttcaaaacggagagtattcccttgctttggtgaagttaggcaacggagtttaactttgaatcgcaatttttgcatccgaagtggttccacctgcagcggtttaagatcaggtgacgtttcgatgggagcaggacttgtacgccccaaaaatggtatcgaaactgccgttcgctcttcggtcaaatctcgatcgatcaaagctcaagcctctggtggagacattgaggatttgacaccgatcaaccctcaggcgaaatcttctggggcagttctgccatttgttggtgttgcgtgtttgggagctatgttatttggttaccatctaggggtggtaaatggtgctcttgagtatctatctaaggatctgggaattgctgaaaatactgtcatgcaagggtggattgtcagcacactccttgctggtgccactgttggttcatttactgggggaacattggcagacaaatttggcaggacaaggacttttcaattagatgctattccacttatcattggagcatttctcactgctacagctcagacagtccagactatgataattggccgctctctggctggtattggtattggcatatcatctgctatagttcctctatacatatctgag

SEQ ID NO: 199677 - DNA, 554 bp, Gossypium hirsutum
ctttcttcacacccgacaatctaaactacatacaagaaaaaagtgtgtttggcaaaagagaaaaaaaaaaaaaatcaaagatggcggaaaaagaagatctgggtttgagtctgagcttgagtttccctcagaatcaccactctttacagcgaaatcttaggccttcgcttgttccttcctctgctaattcttgctcttctccttctactttaacccttaacaaacactcatggaatgattcttctcctccttcagatcataactcggaatcattccgggcggagatggggtcaatttttagaggaatcgacatgaacatattgccatcgacggcagattgtgaagaagaagctggggtttcatctccgaacagcacgatatcgagcgtgagtggaaaaaggagcgaaagagaaggcaacggagacgagcttgagatcgaaaaatcctcatctcgtggaatcagcgacgaagaagatggcgacacttcgagaaaaaagcttagactttctaaagatcagtctgctattctcgaggaaaactttaaagaacacaac

SEQ ID NO: 199678 - DNA, 873 bp, Gossypium hirsutum
  unsure (1)..(873): unsure at all n locations
cttggttcaccgaatttgaatagatctggagaacgaacagggcgtttgccgcgtcgaccgagggagctctccggagccggtgatggcggcgtcgccggagcatcgtgatgattcctcctcctcctcttccgtagatattccggtcaaaaaagagctagaaatatgcgtcgatgctaaacagatagatagtggcggagactcccgggaagccgccagtggcgacaattcccgcgccggagttgattttgcattgaataacggtgctgctgagccttatagcattgttcaccgaagcttttctgaagttggagcattgcgtgtgggcacttcaaacattgaaaagttggattcaagccagcctaaattggtaaaatcaaaaactgaggcaccaagacataggagcatacttgctgaagatgcagcacagatttttgacaataagatgtctgcccaaaagaagcttcaattgttgaacagaatagctaccgtgaaagatgatgggactgtggagttcgaagtgccagtanatgttgatccccatgttctttcttgtggattaagagattaacatattgaagttgctgaagaagaatccctgaagcagatattctcttgtttccancactgcgcattttgatacctattatttggccaccttgagacattcacccttttttgtccttggcgacccctcccccaatttggtcctccgttaatatggcaccccttccatttccaaagattgtttctcttgcgggcccaattcttttccttaggtgtagatatcaaatttcttgccgggtttttggtttaaatattagggcttttgcctccaaaccctctcaaatttccttttcccccaaattcattttt

SEQ ID NO: 199679 - DNA, 742 bp, Gossypium hirsutum
  unsure (1)..(742): unsure at all n locations
tctttacctttcagactcactgaattgaagcagagaacgaagcaaatatgaaattcacggactcaccggtgatacagcttcaagtgcgtgattcccaactctctatccaacaagacaatggctccttccacgttggtacctccgtctggccttgttctttggttctagccaaattcgtagagcgctgggcaccatcttcgcccaccaccaccaccagcgataacccttattacgacctccttgattttcacacccgccgtcgtcgtgccatcgaattgggaactggttgtggagctgccggcatggctttccacctattgggtctccaagacatcatcctcaccgatatatcccctgttatgcctgcgctcaagcataacctcaaacgtaataaacccgttctgggtaagaacatgaagacctcgattctttattggaacaacaaggatcagatcaggggcgttaatcctccgttcgatgtggtgatcgcggcagatgttgtatacatcgaggaatcggtgggtcatttanttggggctatggaagcgttantatccgacgatggggtgattctgttagggtaccagctgaggtcaccggaagcggataagttgttttgggaaatgtgtgaaaaggttttcgtgatcaaaaaggttcctcatcangatttgcaccctgattatgcctatgaggagaccgatgtttatgttttcagaaagaagatgaacaataacaattagtc

SEQ ID NO: 199680 - DNA, 488 bp, Gossypium hirsutum
aaatggggtctctttttactcctctgctccttccactcttttgtctttgccttactctaatctcacccacacattccacggattgttcatcgctcaaactctccggtggcaaaaaacaatactccaattgcacccacctccccaccttgaacgcaaccctccatttcacctacaatgccaccaactcttccctttccatagccttctcagcacctccggctaaagccggcggttggattgcttgggccgtcaaccccacggggacaggcatggcaggttcacaagccctcctggctttcaaaaacaatggatctatggttgttaaaacctacaacataagctcctacagttccattgtggaagggaagctttctttcgatgtttgggacttggaagccgaagccggcagcgatgggaagatgattttatatggttcattgaaagtggaggaaagtgcggagaagttgaaccaggtgtggcaagttggg

SEQ ID NO: 199681 - DNA, 594 bp, Gossypium hirsutum
tgtcacgcgtccggaattttttctcccctcaagttcctttctgcccattgtaacaatttcgttattggaaaaaaaaaagaaaaaaaagagaagttaatggaaaacaaatactcttgttcttccctccgttgtttgctccctcttgaatattcaccgaaatcccaaaaatcccatcttgtttttgttttgtttttgaggttcaaacgtctcaaaactctggaaaggaatcacacatacctatggaggaattcaagacgatcaagaagaaaatgtggatgttttctctttagtctttctttctgtttgaaaaaacgatctccctagaattgttcacttgcgttatggaagctatcatcgaaacaatcatagcactgatcatcggcaacaacgagaaagtcgctaaccatcaaaactttgttcttcaaaagctctctttctggttcgctcccactacacgcccacctggtctactctctttcacttctggttcctaaaaacaaactctcatacaactgtcgtttagctttctttttatttttgggggtgtttttatatggctgctttctatttcaacaacaacatttttttatctgg

SEQ ID NO: 199682 - DNA, 411 bp, Gossypium hirsutum
aaaaaaaatggcgaaagctccaaggttgaagataacagtgataaacttgctatgtttggtggtgctctgcggggcaactgaatcgccacagtacgaggtggtacacgctgaatccgatttcgaaatcagacactaccgggacgccacgtggatgtctgcaaccgttaacgaactttccttccaaaaagccaccttatttgggtttcacagattattccagtttatacaaggtgcgaatctgaattattctcgggtagccatgacagcgccggtggtgacgagcctagtcccgggagctgggccacttcactcattagcctatgttgtccgattctacttgcctgccaagttccaggacagtccaccaaccccacttccggagctaaacctggaaccttacgcatgggattc

SEQ ID NO: 199683 - DNA, 421 bp, Gossypium hirsutum
gaaaaaaaagagcttccgccacatggaaaggaactccgcggcttccgttccgtatttactcggccactcccttacaaaatagaaacagaacccttcattacctcaaatattcggctccctattactcttttcctctagggttagggttttctttcccgattcacctccgttctctttcttctgataagctatggaatctaatctcgttatcaaggttaagtatggaaatactctaaggcgtttcaatgctcgaattgttgatggtgaacacctggatcttaatatgactggactaagggcaaaaattatggggcttttcaattttccttttgatagtgaacttactctgacatatattgatgaagatggggatattgttacccttgttgatgatgatgatttgtgtgatgtgatgaggcaa

SEQ ID NO: 199684 - DNA, 464 bp, Gossypium hirsutum
cgcctgcaccaccgctcctgtaattggccgggatcgacccacgcgttcgcttgcttatcatacatcaatccgatcatccgcctcggaggcttctaattccatgggtatttgggggatttttcacgagcattgtctggttgtatatgattgcgaatgagcttgttgctctgttggtagcatttggtgtgatatttggaattaatccttccattcttggagtaactattctggcttggggcaattcaatgggtgatttggtgtcaaatgttgcactggcaatgaatggtggtgatagtgtgcagattgcaatgtctggctgctatgcgggtcctatgttcaacacacttgttggtctgggcatctcattgctgcttggagcttcatcaaagagtccttcctcatacttagttcctcaagatagcaccttggtttacaccatgggctttctcatgtctggactaatc

SEQ ID NO: 199685 - DNA, 482 bp, Gossypium hirsutum
caaatttacaaccttgtaaatgtgtggtcaataaaggaacccattttccctttaaaaatcacttcttttaagctcaagttcacttgataacaaactccattaatggctgcttttatcccattcaagctatcacttcttttgagtctgctctcaaacattggtttctggccggaaaccagcaagaacgatgttgggatatttccacctacatgtaatcggattgaatgcccaagtttcgatttgattgaagtcggcaatggctatgagattcgtagatacaactccaccatctgggtgactacttcacctattcaggatatttctctcgttgaggccaccaggactggttttcttcagctatttgactacattcaaggggagaacaaatacaagcaacaaatagagatgacagctccagtcatcactgaagttttaccaagcgatggacccttctgcgagtcatcatttaggattagctttta

SEQ ID NO: 199686 - DNA, 416 bp, Gossypium hirsutum
cttcacttcattaggaacatcaataccttgatcctttgaaccaccaaatggctcttcatctcttccacctcctcctcttcctccttctcagcccattatcttatgtctctagcgttggcattaactatggcactctaggaaacaacctcccttctccaaagaaagttgctcagctcctccaatctacgctcattgataaagttaaaatctacgacaccaaccctgatatccttgaagccttttccaacaccggagttgaccttattgttgccgttgaaaactaccacgtcgccaacattagcaaggacgcagccgcagccgacgactggtttgccactcgtgtgcagcccttcatccccgccacttccatcgtagccgtttgtgtaggcaacgaatatttgacctccgatgataat

SEQ ID NO: 199687 - DNA, 408 bp, Gossypium hirsutum
tttacattagtatcggctgtaatttgcctgggattcctcatccaacatttgctagagatccagtgcccttctttctcgctccaaaggtaagcaatgaattaggattagaagcagctgtggaagctactgccaattttctgaacaaagctgtgaagcctgtccttgtgggtggacctaaattaagggttgcaaatgcaaaagatgcctttgtggagcttgcagatgcctgtgggtatcccattgccgtaatgccttcgggcaaaggattggtacctgaacaccatccacactttattggaacatactggggtgcggttagtactagcttttgtggggaaatagcggaatctgctgatgcctatgtttttattggcccaatcttcaatgattatagctctgtaggctact

SEQ ID NO: 199688 - DNA, 413 bp, Gossypium hirsutum
gtcaatttctgttttatatataatagcagaaagagggctacccattatcaattctagcactcaaacaaattgcctggctctattcacagagaagagcaagcgcaaacgaagtgtctctctttcttttgcgcttcggaacaaaacccatctaagcgctttagttgacaacatatagtagttcaacggctggttctacttgtttgacaccttgaagcttggtgggtttcttgcgaaaagtacttttcaattttaatctaagtttgttgtatgagggaggtgcatgccatgtgcttgtaaattattattgcaatctctatggaacaatttcatgaaagagggcaccaatgcaaaacatcgtcttatatggaggatgttcagttgaatacaaattgggacgatgtgatttgtcctat

SEQ ID NO: 199689 - DNA, 565 bp, Gossypium hirsutum
attcaatctcccccaaaataggcaataacatgtttttgcttccataaattcattattcttctctgttttccgagaaaattgagaaggaacggtttttgaaatctctgtgagcttaagatattgttttggagttgaggtcaccaagtatacgactcctcacaattcaggctccgacatttcagcttcagtctgcagaatcaggaaatggttaacaggtatggagtgttttgatgcgcggagaatatcatgttgcagtgcttagacggattgaagcatttatttgcttctgtattgcactgttgtgatattgatttgtgcaagcaatccagaggtctcgaggatcctgaacttcttgcaagagagacagtttttagtgtaagtgaaatagaagcactctatgaactcttcaagaagataagcagtgcagtgatagatgatgggctgattaacaaggaggagtttcaattggcgttattcaagacaaacaaaaaggagagcctgtttgcagatcgggtgtttgacttgtttgatacaaagcataatggaattctaggtttcgaaaagc

SEQ ID NO: 199690 - DNA, 417 bp, Gossypium hirsutum
gttttcattccccatttaactcacacccagtttcatagattttctgtactaccccaacattactctctccagattcttacattttgagcttcagtcagcggaatcaggaaatggttaaaaggtatggagtgttttgacgtgtggaagatatcatgttgcagtgcgtagctggtgtgaagcgtttatttgcttctgtactgcaatgttgtgatattgatttgtacaaacaatctagaggtctcggtgatcccgaacttcttgcacgagagactgtgtttagtgtaagtgaaatagaagctctttacgagctcttcaagaagataagtagcgcggtgatagatgatgggctgattaacaaggaggagtttcaattggcattattcaaaacaaacaaaaaggagagcttgtttgcagatc

SEQ ID NO: 199691 - DNA, 655 bp, Gossypium hirsutum
  unsure (1)..(655): unsure at all n locations
atcaaagtgcaggagctagggtttccatcaattgcaaaaatggagggattagtttcaatgaaaacagcttctggaatttccttccactctattccttcccctaatcagcgacctaatttcttcctcagacgctcctcaatggaccttcagcatcggcgattccattttccctccattcgagctcaacagtcggggacgatatttccgggaaaagaaggtgaggaagattctttgaaggtaacggaatgggaagttggaatgttgcaaaacgaagtcgcagcgagtcaagggattagaatacggcggcgtccaccgtcgggtccgcctttgcattacgtgggtcccttcgaattccgtttacagaatgagggaaacactcctcgtaacattcttgaagaaatagtttggcacaaagatgtggaagtttcccaaatgaaagagaagaagcctttgctttcattgaagaaggttatcgagaatgcacctccaactagagatttcgtcgggtctcttaaagctgcccatttgcggactggattgcctggtttaattgctgaagttaagaaggcttcgcctancagaggaattctcagagagaattttgacccagttgagattgctagagcatatgagaagggtggagccgcttgtctgg

SEQ ID NO: 199692 - DNA, 829 bp, Gossypium hirsutum
cccactcgtccgcaacaatcggaaatatgagaaaatttttttcgatgtcttcgcttctgaataagggatctattcaacgaagagtttcaaataagtatcttatcaatgcaattcgtccatattcagaggatctatcctccccgaaatctccagggcctctactgcaatatcgcaagttagtggagcaaggaaggctgcagcatgatccttaccaagaaagggttgctttggcattggaaaatttgcttgggaggttggaacagtatgaaaaagagatggaggactatcatattaagctagctgagtgggagaaaaacagggagactgagcgtcggaagcttttgatggaggaagctgagctcaatcaccgtggggacctttggacatcggttaataagcggaagagtgaacttttagaaagatggtcattcaggagaaaatctgaagatatagaacctggagttggtaagtgggtttcatacctcaatcgtgagaagaagttggattcacttgttggtcgccgtcctactgctcctccagccccaaaaggactctatatatatgggaatgttggaagtgggaagacaatgcttatggatatgttttatagtgccactgacggaatagttaaacatagacaaaggttccattttcatgaggcaatgctccaaataaatgaagctatgcataaattgtggaaaaatcaagttgaggaaaagtctattcagtcaagcatatcttcttggattatgaatctttcctttgatatcaaagccaaggagtggttagctgctgaagaaagatataaacaagaggttcagatgaaaaa

SEQ ID NO: 199693 - DNA, 670 bp, Gossypium hirsutum
gcaaaacgcacggtccccttactgcagccaataattttcaacgtagtcctctctgtctttctccattttggcaaaacccattggcctaaagaagaaaaagcagattccttgaaaccgataaaacattgttacagactcactgaaagctttcagttttgcttatctcagttgactcttcaatggcttctccaatgaggtctgaaaggacaaaaggtgacaattatgaacctaatcgcatgaatcctcagcagccggttcttgatgtggcgcctctcaattgtgtgccatacatgggtccaactaatgccgatgatatgttttcttcacccacccaagagaatactgaggctgtggaaaacaatcgggccactttgaatttttgcctttacaataacccggggaaaattggaaaatataagggttgttccaaaaagtggtttcccctcatgggtcttaacacctgggacaattggccccttttttgggaaaagggaccttggtaatatccagatttatactattccgggtccccttccggggtcaaaggaaaaagatttcattggaaataaccgtgggaaattttaaaggggtgtcactctggaaaaaatggcaaaattaaatttctttggcacatattttcccggggcctcccttttttaattttgatcag

SEQ ID NO: 199694 - DNA, 444 bp, Gossypium hirsutum
acgcttctttttcgttttttaatttgctttctgtaatggctaaatcttatttacctgcaaactttgggtttatggcttcaagaatgctgctttttgggctgtttatggtatccctatataccacaagtgctcaaataggtgtttgctatggacagctcggcaacaacttaccatcaaggcccgaagttatatccatcttcaaccagagaaacattagaagaatgcgactctacgcgccagaccaacctagtctccaagctctcagaggaaccaacattgagctgatgctcggcgttccgaattccgatcttcaacgtatcgcggctagccaagccaatgcaaacatctgggtccagaacaatgttagaaactttggcaacgttaagttccgctacattgctgttggaaacgtagtccaaccttcgatccggcggctcaatttct

SEQ ID NO: 199695 - DNA, 485 bp, Gossypium hirsutum
gtgatttgctctttttatttccgaaattttcgttttccaatttttcatcaccaaatcgtcagcaaccccccattagccttctattttctcaaatcaaatttggtttcccaattctctttttaccttaaagtcctcaccttttgtttttgttctgctgaactcagtaagccgccatggctacgacgactcagtccccttctcctcccaattccaacgacgataagccccaaccaagctcagaggtggtagaacaagctaatggggttcaacaagatgttaggccagaagctactaaacagaacgttccagcatctgtgtttgtgaactctgaaccaataagagaagaccaagtttccaatgctgttaaattcctttcacatcccaaagttaggggttcacctgttatttatagaagatcctttcttgaaaggaaaggccttacaaaggaggagattgatgaagcttttcggcgtgtgcctgatcca

SEQ ID NO: 199696 - DNA, 465 bp, Gossypium hirsutum
tctccacgcgtccggcttgtagtagtggaaaacatgagtagaggttggagctacggtggcggccaaagttccttgggctacctctttggtgccgatgagcggccaagcgcacccaccgtcacaccaccgatccagcctccatatggcatagatattaccccagagaaccctccccctcaatataaaccaagttcagagcaacagactgagaaaaacaccaccaacaactatcagagggctaaaggacagaatgcaggcaacttcataactgatcgaccatcaacaaaggtgaaatcagttccaggtggagattcctccctgggttacctgtttggagacaagtgatgcaatgattaattccttcttacaagtttttaagaagaaaattggtgaactgcttccgataaggaattgaagataaacagataagtgggtttttttagttaaatacatgtgcagaagttg

SEQ ID NO: 199697 - DNA, 482 bp, Gossypium hirsutum
acttgcaacaattgtgtctttcatctccatccctccaccacttcctcaaaagtccatcttcctcacgcgtccccttctttttccttcatagcttccagacaggtccagggaatgcagaaagatgtgcttgcatgctgtgaactttttatctgaagcacataaagttgtatccggttctgaattacccgcattcattcccgatgatgttggatgctcaacagacagcaaattcattccctgtatccatattgtaaatagagttgaaagtaaaatctctgccatgttgaagggtgacctcgttgaagacggttgagcactccggttatagccactcctgctctttagatgttatacatatatatagttactgcaggaggtaaaaatttatctaagggtgttaagatttgaactttagaatggaaaataaagggaaggtgttgatgcataagtatgaattcggaagattgttaggacaaggaaac

SEQ ID NO: 199698 - DNA, 490 bp, Gossypium hirsutum
cccacgcgtccttatgtattacctgttttgagggtttattcatttgcagccatgaaattcagaagcttttgtttttgcatcccaggatcaaagcaagaagattcagacagttcttctaacaaagcaaaatcccataaaaagtctgacaaaagtgggaaaaaggaagggaatgtggatgatgctgattatcagggtgccactactactactacgacagccagcagtgatgctggaatggctgctgctgtagcagtgggtgccactacagcacatgcctccgctgtggaatgaagtggttgcgatggttgtcatgcaggtggtggtgttggcggctgatagccggacactatttcaaaaaagctggttcagtttttggcctttggcattcttcatcatattgatttcagaatctttctttcatcttgcatgaaaggtgcttggttttttcatctttatatttttgggggtcttttttttttccccgagtcta

SEQ ID NO: 199699 - DNA, 565 bp, Gossypium hirsutum
catttatcctcctcttttcactctcttcttcgctaatatcctctctcgtggagttcggggggcatattaattacttcaccctcccctgcttgtcctttcttcttccatcattcctcatttttctgctttggaaatcttctaggcttgtagctaagctaagctaaactaaacttcgaagacatggatcttcttcactcctttagctcattagctcttattctgtatctcattgtcttaactctgaactctaaaggtgcattaggtgcttctttcacatttgtcaatcgatgtgggtacacggtgtggcctgggatattagcaaatgcaggcagtcctacactcgacagcactgggttcgagctaccaaaggactcgtctcgttcatttcaagccccaactggctggtccggtcgtttttggggtcgaacgggctgcacatttgacggatccgggtctggtacgtgcgtaacgggcgactgcgggtcgggtcagatggaatgtaacggactcggagctgctccgcccgtgactctggctgagttcactctgggaacgggtgggcaag

SEQ ID NO: 199700 - DNA, 747 bp, Gossypium hirsutum
cttaacatttcctctccacggaaccagctgcagcactaatcgcagacatggaaacagaaggggagcaactctgcgaagctgcacgaaacggcgacggcgcccaagcgaaagctctggtagagtcaggagccgacgtctccttcttcgacagcgatggactcacgccgctcatgcacgccgccaagctcggccataccgatttagtcaaagctctccttgaggctggcgcaccgtggaacgctctttctccttctaaccaatccgctggtgactttgccatggactccggtcaccaggaagcctatgaagcccttctcaatgctggaattcaggctgaattgattttgggaaccattgcaaggaaaacaaaaaagaatggtgattttgaaggggattacttggaagatagggttacttttagcgaggataagttgatggactctgatagcaaggctgtgatgatggcttgggagaaacccttgatggaagctcatgctaaagctgtttgctctggaggtggtaacgttctaaatgttggatttggaatgggtcttgtggatactgctattcaacagtatggtccagccacgcacacaatcattgaggctcatccggaggtctatgcacgcatgcttcgcactggttgggacaagaaggataatgtgaaaataatatttgggcgttggcaagatgttctttcaaaacttgaatcttatgatggtattttcttcgacacctatggagaat

SEQ ID NO: 199701 - DNA, 614 bp, Gossypium hirsutum
gagaagacgacctggaatcggagggctccaaacagctgcagctgctagggatcaatatcgagcgttgggagaaaatgtagccaagttaagaaccgacctcatgaaagagcagcttgctacttttcgttctcaactcgaagaattcgctcgaaaacacaagaatgatattcgtaaaaatccgtcttttaggtctcaatttcacgaaatgtgtgcaaaagtaggagtggatcctttggcttcaaataagggattttgggctgagcttttaggaatcggtgatttctattacgaacttggagttcaaattgttgagatttgcttggcaactaggcctcttaatggaggtttgattgacctgcaggaactctgcaaattgcttcgtcagaaacgaaaacatgatcgcgaagctgtatccgaagatgattgtttgcgtgctataagtaagctgaagacattacgtagtggatttgaggtgatttctgctggaaagaaaaagcttgttcggtctgttccaactgaattgaataaagatcataatcaaattctggagctggcacaggctcaaggctatgtgaccgttgatgaggtataaaggcggctttcatggacacatg

SEQ ID NO: 199702 - DNA, 503 bp, Gossypium hirsutum
gtgctttaaagtgtatggatacataagtatgaaacaagggattacctttttgcaagacttcaaactcggtcactacatgaagattcctcctagatccatgttcatagctcaggttggtggtacaataatagctgcattagcgcatttgacaacagcgtggtggcttatggttacagttccagacatatgcgacagagaaatgcttccaacggacagcccctggacttgtcctggtgatcatgtgttttacgatgcctctgttatctggggtctgattggacctcgaagaatctttggtgatcttggctactactctgccataaactggtttttcttagttggggccatagctcctgtccttgtttggcttgcatctaaggccttcccaaacaagccatggataaaacttattactatgcctgtgctttttggtgcaacagtcaacatgccaccagctactgctgtcaactacaccagttgggttcttattgcctttgcatctg

SEQ ID NO: 199703 - DNA, 548 bp, Gossypium hirsutum
atttattttagttctactgagacattgaacgctgaggacaaatttttctgtgacaagtgctgcagtttgcaagaagcccagaagagaatgaagataaagaagcctcctcacatcctggtcatccatttaaaacgattcaagtacattgagcagcttggccggtacaagaagctctcctaccgtgttgtgttcccactcgagctgaagctgagcaatactgtggaagatgcagattcggagtattctctgtttgctgtagtcgttcacgtgggaagcgggcctaaccatgggcactatgttagcctggtgaaaagccataaccactggttattttttgacgacgaaaatgtggagatgattgatgagtctgcagttcagacatttttcgggtctgcccaggagtactcaagtaatacagatcatgggtatatcttattttatgaaagcctttgtgcaaacaagagctgagaaaagagggcttcgattttaccatgagtacaggtatccatttccccaaatctcaattttcttgaaccacctatgctttt

SEQ ID NO: 199704 - DNA, 441 bp, Gossypium hirsutum
ttggcttccctcccaaatgtcttcttcgacattaaccgtactcttcgtcctccttggaactctctgttcctttatctacttcttcagctcaccaaaccgcaacaacaatggccggaaacttccacccggtcctgcccctcttcccgtcgtaggtaacatccacatgctaggcaacctcccacaccaaagtcttcactatctcgccaaaaaatatggacccatcatgtcgataatgctaggcaaagtaccaaccatcgtggtatcatcacccgaagccgctgaactgttcctcaaggtccatgacgtcgtttttgcttccaggcctaaagtccaatccgcgaaatacttcgcatatggtggcaaggccatggcttttacccagtacggttcttactggcgaactgtacggaaatggagtattttgcatttcctcagtgcttc

SEQ ID NO: 199705 - DNA, 962 bp, Gossypium hirsutum
cccaagttaaaggaaaccatttcagtagcgaacaatgcatgctgggctattggcgagctagcaattaaggtacggcaagaaatttctccaattgtcatgacagtgatctcatgtttggttccaatccttcagcatgctgaggggctgaacaagtcacttgttgaaaatagtgctattacactagggaggcttgcatgggtctgtccaaatcttgtatcgccacatatggagcatttcatgcaatcttggtgtattgctttgtctatgatacgtgatgatattgagaaagaagatgcgttccggggcctatgtgcaatggtcagggcaaatccatcaggggctctgagttcacttgttttcatgtgcaaagctattgcaagttggcatgaaataaggagtgaagaactacataatgaagtttgtcaggtcttgcacggttataaacagatgcttaggaatggggcgtgggaccaatgtatgtctgccttggagccacctgtgaaggataaactttcaaagtatcaagtataagatgttcttggttatccatgcttgtcgttattctacattatatttgtggttcttcagagatctttatcagcatcgatactgttggtatattttgtgcattatctgactgtattggagctgcgattcatataagcatcctataagcaaatgttggttagggggtgggggtactgaagcggttgagtatttgtgtatggatttttagcatgcaggaatatgcaggctccataaggggtgaagaggtggttttactgggtgtttgtaattgggacatggggtaaggtatctgattcaagcatttgcattcgttatttttgacaaatttctcttattttcattgttttgtgagttagggatagggttttggtctgtggattcccacagtttttctgtacaagggctttaattggtttttcttataaaaatttggg

SEQ ID NO: 199706 - DNA, 563 bp, Gossypium hirsutum
  unsure (1)..(563): unsure at all n locations
agctgttgaatctttgataacttcactttggagcctaaattagggtttccacggacaatatattatggcaactgctaaagtttccaaggcttccaaatggttctctaacaagagccttaggttaagccttcaacgtcgtggatcaaagtctagatcaacatccttaagctcttctcctggaccatcatcaacaccaatatctcctcgcacaattcctaatatgagaaccaaaaggcctgaagaagacgagatgaagcaagtctttggctatttcgacggggatggtgatggcaaaatctctgctcttgaacttagggcgtactttgggtccatcggggagtacatgtcacatgaagatgctcaaggggtgatcaacgatcttgactcggacggggatagcatgctgcactatcaggatttcttgaagctaatgaaaagagaacccagcaaggatgatgagggagatgattatgatgatctgaagaaagcgttagagatgtttgaactggagaaaggttcggtgtgcataacacccaaagggctgcanaggatgttgaatcgac

SEQ ID NO: 199707 - DNA, 567 bp, Gossypium hirsutum
ttctctaccatttggggacaagccaagtctcatgacattccatgaagttgagactgtcttccatgaattcggccatgcacttcagcatatgctgaccaagcaagatgagggtctggttgctggcattcgaggaattgagtgggatgctgttgagttgccctcccaattcatggagaattggtgttaccacagggatacattgatgagcattgcaaagcattatgaaacaggagagagtctccctgaagaggtatatttgaagcttcttgctgcaaggactttccgtgctggttctctaagtcttcgtcagcttcgatttgctagtgtggatttggaactgcatacaaaatacatcccagatgggtcagaatctgtttttgatgttgatcagagagtttccaaaaaaacacaagtgatccctccattgccagaagataggtttctctgcggattcaatcatatatttgcaggtggatatgctgctggatactacagttacaagtgggcagaagtattgtctgcagatgctttctcagcatttgaggatgtaggactggacaacaccta

SEQ ID NO: 199708 - DNA, 403 bp, Gossypium hirsutum
gtttcgtgcttcagaaaggaagtgtctcttcttgtttagaaaaaaaaaacccccaagaacgaggaatcaatcaaaaagagaagagaggtgtcacggtcgtaacgaatgcacatgtgcttagttttcttgaggcttttattcgctctttgcttctcccctttgaatctgcttctacttttagaaaatttcctgaattctcatcttctagccccgtcacagactaatacaaagaaaagacacccaagagcagaaaaggagggacaatacacctatgcggtcttgctttagtttcttgctactatgaggctggctttgtgaagattggctttgtttcctcgggggggtctttttattgcatctttttttcccttttttgttttccgtcttgggggtgctctgagtc

SEQ ID NO: 199709 - DNA, 617 bp, Gossypium hirsutum
  unsure (1)..(617): unsure at all n locations
ctttgactgagctgatccaatccagtggtaacgcagacagaaaatggattcaagagaagacgacggcggagagccacttagccggatggcggagtggcgtgatgtgacgcctcttcctcaagacgacggtcctaaccccgtcgtccccatcgcctacaaggaagaattccgtgaaaccatggattacttccgggccatctacaaagccgatgaacgctcccctcgtgccctccgcctgacccgacgagcaatccatctcaatcctggcaattacactgtttggcattttaggcgactcgtgctcgaagcacttaatgccgatttggacgaggaattggattttcttcaacggattgctaattctaactctaagaattatcagttatggcaccatccgcggggggttgtcgacagattgggagctaatgctagagccaaggagcttaatctcattaagaagatactatcaattgatgccaaaaactatcatgcctggtcacataggcagtgggtgcttcaggcattangaggctgggaagatgaacttgattattgtcagcaacttcttgaagaagatatctttaataattctgcttggaaccagagatattttgttg

SEQ ID NO: 199710 - DNA, 449 bp, Gossypium hirsutum
cgggacggcccgggcggaccgacgcgtgcgttgcagcccatttttttgagaaacaaaaaacagatagcttttgctctctctccctctcctcttttccttgcggctagggttttgaaaccctcgtcgccgccattgtcacggcgccaccacaggcggtagttgggacgttgcgagcttggctttctagcccctgtttaaagcgtccccaaaggccaagccttctcagcccaaaaggtgcgaaagagaggatctctcccctccctattcggtccgatcccgatgacgaaggagagccctccgacgacgaaaaccaccggcgactacggtgtcagagaggtgccaggcgatggcagttggctcgcgaggaggcaaggcggcacgcgtggtggccaatggttggccaaaagttcggcagtagcattcttggggggctggctgctgcttgtttc

SEQ ID NO: 199711 - DNA, 517 bp, Gossypium hirsutum
cgcgtccgaagaaaccctaactttttgagagatctgaaagccttattgttgtcaggtgaggcaggggaatcttgctcaagttcaaagccactagttttccatctcaagttaaggattttaattcagctgctagatgtggtttttttgggatattttaagtgcttgagttgaatgggcactgttgattatggtttaggaatttatagggtttatgtcgtagctactggctactctgttataattggggctttccttacctaattctgaactgtaataaagaaatgggtgaaatgttttgggcaaatgaggaagataaggctaaggtggaatctgttttgggcactgaagcctgcgactacttgatattgttggcttctaagaacatgttgtcagatttcatctctccaccacccagttatttgggtctgcaacaaaagctttgcgaggtcgtaaaaaggtcaaattggaactatgcaagttactggcaagtgtcaagcttgaaatctggtggatcgat

SEQ ID NO: 199712 - DNA, 611 bp, Gossypium hirsutum
  unsure (1)..(611): unsure at all n locations
aaactcttcatttagcaaaaatgagtaccagttcttcggctgtttcaacccaaaaaaggcttgaagggaaggttgcattgataactggaggtgccggtggcataggtgaggctacagcaaggttatttgttcaacatggtgctaagggttgtcattgcagacattcaagatgatttaggacaagctatttctcaagaacttggagaagaaaacatctcatatgttcattgcggatgttacattagactctgatgtcggaaccgccgttgattccgcccgtttcgaagcatgggaagcttgatattaatgttcaacaacgccggtatatccagtcccgataagaacataagttccttcaacgatgagagatccaaaaggggtcttgatatcatatcttgaaggtgtttnnngggtcctaaacatgctgctaggnttgatgatcccgccgaganaggntcatttctgtttacaaaagcgttggtcnatgatcggtatgccgtgtgtggcatgcttttgtgaatcgagcacctttgtgggtgctctaaaactagggtgattgggcttggatagataactggtttcgcgacgtgtgcgactcatgtacagacgtg

SEQ ID NO: 199713 - DNA, 614 bp, Gossypium hirsutum
acgcgtccggaaagatcctctccactaggaactagttatagtcttctctcttccaccagattctttttggatcatggcgatatcggatgtggtggttgggaatttgctgatcatatacgtggcggttatagcggggataaaggcgtacggtttagtgtgtgggaggaacttcggtggttggtttgtgttgatggcgtcgactacggtggtgggtctgatcttggtcggggctttgacgtgggacgtcagtcgtaaagccacgcaagcaatttccggtgaggatcaagatgctggttcccttcaagttcacgagatgtgtaaaggtggtatttgctggcacggcgtggctgtccggttccctgcttctcaactccggttcagcctccctcaacaaattccagacggctctttgtaaaaagaagaagaaaactttgggaatttcaggtttaaagctgtaagatataagattagctttgggtttgggtttggccgaaaacaaaaccccatgaggtcttttccttttctccttaattttgattgcgaggaataaaagagcgtgtataaggttatatatatagttgaaaatgaaaatgaagatgctttaatttgtgaat

SEQ ID NO: 199714 - DNA, 632 bp, Gossypium hirsutum
aatcatatcatcctttttttattccaaataaaaagctgcccactatgctcctatcttcgggtcccctccatctctctctctctatattatgggagtcttatattctccactaaatcaaaccccccattttcatttcttgctaatcaatactccatttccctttttgtttttattttcaatgtgtttctttgtagatgatccagggctaattttaagccatttcctttacaaaacagctgtttttttagcagttttaagatgggttttgtcttggcttcttaatcttagattcaaagacataaactctttcttcttcactcctaaattttcatcaaattctcatcaaatttcttcagacatgatcagagacaacttggttttaacaacctatggggatgctaaacaaaggatgccttgggtttctgacacgtgtgctgtttgcttgtgtgagctcaaagaaggtgatgatgtaagggaattgaggaactgttgccacgtattccatcaagattgcattgtagatggcagctatgacatgactgacatgagatgaatgatacatagactgtcattgtaggcacttgctctgtctaaactggttcctatatgacaagttgcgttatgtacttccc

SEQ ID NO: 199715 - DNA, 412 bp, Gossypium hirsutum
tcgcctacgcgtccgcttccttctctgaccagggtggggtcaccgagggaaaggcctcagctcatattgctttcatcgattttcctctgcattttccatcactttctcgggaaaaaaaaacagaaagtttcagaagaaatgtactcgggtattcggtcgttatcgttagatggatgtgtgggggattatcaagggtcgcttgatggaaccaacttgcctggtgatgcttgtttggtcccaacaaccgaccccaagcctcgactccgatggacggccgagctccatgaacgttttgtcgatgctgttactcaactcggcggccctgacaaagcaacccctaagactattatgagaacaatgggagtaaaaggccttaccctctatcacttgaaatcacatcttcagaaatacc

SEQ ID NO: 199716 - DNA, 482 bp, Gossypium hirsutum
cagcacgctaccactatttatctccatcatgcaatgtctgattttgctgaagctttagcttccaaaatgcctggaaatctcaaggttgtatatttcgtgaattctgggagtgaggcaaatgagttagcaatgctgatggccagactgtactctggtaatcttggtatgatttccttgagaaatgcttatcatggtggaagttctagtactattggactcactgcactgaacacatggaagtacccaataccagagggtgaaatccatcatgttattaatccagatccttttcgtggagtgtttggctctgatgctactcgttatgccaaagatgtacaagatcacattgagtatggtacttcaggaaaagttgctgggttaatagcagaaaccattcaaggagttggaggagcagttgaactagccccaggatatctgaaacaggtttatgacattgtacgcaaggctggcggtgtctgcat

SEQ ID NO: 199717 - DNA, 463 bp, Gossypium hirsutum
ttctttattaatctctctttttctctatataacatggcttacaaaattcaagatttaaaccggtttccgatctcattcaaatccttaatataccggcgatcgaaatggatagaataagggcgtttttggtagccgtggcggttgtcgccttatgcggcgtacctcaggtcagatccaccgcttccgatcatcgttacaaagctggtgatgaagttcctctttatgctaataaagtaggtccttatcacaatcccagtgagacctaccgttacttcgattttccgttctgttcctcagctcccgtgaaggagaagaaggaagctctgggtgaagtattgaatggcgatcgactagtgagtgcgccttataaacttgagtttttgacggagaaagaggctgaaattgcttgtaaaaggaagcttacgaaggaagaagtggtcaagttcagaaaagctgtctcgaa

SEQ ID NO: 199718 - DNA, 453 bp, Gossypium hirsutum
ctatacccctatgaccgacccttatattagttcactctctcttttccctttggggttttgggcttctctcagtttctcaatcccaattgtttttaaaatggcttcttccactgctcaaatccacgtactcggtggcatcggtttcgcttcttctcgaaaacccaaccaccatgcacccagaaccgttttcttcggtcaacgacttggtaaaccgtcgccgttaaacgcagccttcttacggttagcgaaaaccaatggaaaacggtacaatgttgggccggttagagttgtgaacgagaaagtggtcggaatcgatctcgggactactaactcggcggttgcggctatggaaggagggaaacccacgattgttacgaacgcggaagggcaaagaacgacgccgtcagtggtggcgtatacaaagactggggataggttggttgggcagattgc

SEQ ID NO: 199719 - DNA, 580 bp, Gossypium hirsutum
ctttggagaaatatgtcagctcctacactccccatggcagccggtgttgcagctgtctcttcttcactttacaataacaccaaaccctcctctcttttttcttcatcgattcacttccttccttcaagacttagctctaagcagttaaaaccttccaacctcaaaacccaaagcctcaattccctggcctttgtctcttaacttatctctcccacgtctgccctgcttttcagcagcttttgacagcttccaagttactgaagatgaccaaagcagtggagaagaatacccagaaacagaatctcaagaccttgaagaacaaccacaacaagaggaagctgaagaagataaggtttcagagtctggcggtgaagaaggaaagttgtatgttgggaatttgccttattcaatgacttcttctgagttaactgagatttttagtgaggctggtagtggtgctaaagtggagattgtttatgatcgagttacggataggagcaggggatttggctttgtaacaatggggagcgttgatgaggccaaagaagcaattagactgtttgatggatctcaagtcgga

SEQ ID NO: 199720 - DNA, 641 bp, Gossypium hirsutum
acacactctctttccgacaagcttccatacacgcctctcagaactgagaatctactggtttttttatttgtttcatttgactatggattccccacaatcagttgtgtcgccattgaagaacacggttatagctgaatctggtgagaaacaaaaatccaacacaaaagaagctgttttgtccaagaaagacgacaacatcctaggtgttcttgaagtttatgttcatcaagcaagggacattaataatatctgcatttatcacaaacaagatgtgtatgctaagctttgtctcaccactgatcctcaaaccactgtttccaccaagatcatcaatgggggtggaaggaatccgggtgttcaacgacaacctccgtctcgatgttgggaacatcgtttcgggtcttaaaatcgagatattcatgatgagtagagtgaagaattatcttgaagatcagttattggggtttgcattggtaccatttgtctgaataatagtcaagatggaaatggaaaagagtctcttttcttgacgattgttcattcgcgctgttcgtcaatgcgctcatattcgatatttccgtgatgctttcctaagtgttgagaacctaggtttgaacaacactcaagatgttccgttcaaa

SEQ ID NO: 199721 - DNA, 610 bp, Gossypium hirsutum
  unsure (1)..(610): unsure at all n locations
ctcgaaagttcctctccgttctctcccataaaaccaaaccctaactcgaattcagagccaccaaactcaccttaacaatggctcatcatggcggctccgacccagaatccgaaccaaacacccgactttacaatccataccaagaccttaacctccaggttcccatcaacaacctttacaggctccctacctccccggagttcctcttcgctgaggaatccctccaccagcgccgttcctggggcgaaaacctaacgttttataccggttccgcttatttaggcggctctgtatcgggcgcagccgtcgggctcttctccgctctcaggaatttcgagcaaggcgatactttgaaactcaaaatcaatcggatcttgaatagttcgggtcacacgggtcgatcatgggggaacaggatcngtgtggtgggcttgatttatgcggggatggaaagcggggtcgtggctgtaactgaccgtgatgatgtctggagtatcgtggcggcgggtcttgcgaccggagctctttgtcnggccgcgagaagggtaaggtctgctgcanttgctggtgcgcttggtgggttggcagctggaaccgtggttgctgggat

SEQ ID NO: 199722 - DNA, 498 bp, Gossypium hirsutum
cggtctcttggggtgatttcttcatctctttaatttgtatctataaaatttatatttctttattttctcatagcaataaaaccttgttcaaaataaaaaaaaaaaggcaataaaacccttcaatttttgttcccattaatcctaagatggctgtcaagtctcacataatctcaggatttaccataccattgaaacccactgcttcttcttcaagctcggggaatagtagcaccctctgtttagttaagaaaccactcacttcttccttcttcaatggcggagtagcttccctaaaacttacaaggttaaggagtgttcctggaagatctcattgttacagacaaagaggaggtgcccttggtacgcgcatgaacctttttgatcggtttgctagagttgttaagtcgtatgcaaatgcactcttaagttcctttgaagacccagagaaaattttagaccaagctgtgcttgaaatgaatgatgacttggtaaagatga

SEQ ID NO: 199723 - DNA, 368 bp, Gossypium hirsutum
gcggtgttgatcaagctgagaaggaaatggctggatacgctaagcttatgatcgagacaagggtggttgctggtttagcccttgggtcccgacccatggtggcaaatggtcagaaagtttgtggcatgaacaaagatggtttcatggcatgccagccgagcgtgactgccgggaaccccagccctccgccgccatcggcctcatgttgcatggctttaaacgaagcccacctcacatgcctttgtttcttcaagaattccaagttgatgaatgattatggaatccatttcaatcgagctgaggacctgcccctgcaatgcaatttgaccaaatctttcaattgctagatgtgggattaaaatgaaaaa

SEQ ID NO: 199724 - DNA, 675 bp, Gossypium hirsutum
  unsure (1)..(675): unsure at all n locations
ttaaagagctcgctttgagtaccgcgtcaagctacgtccgactcagtgtccgagtcaacgattcctcatccttagctgaatctgatcctgaacaatgcaagagggcagcagcgagcaggaatttaacagtataagagcttcaattgcgatattgaattcaaatttagatcaacagaatcaaaggaagattagcgttctcaatgaattacaaaatttacaagagaaaattcgaaaggaaggtgctgaatccaaagtgaaaaaattcgtttcccttttggagaatttaaagttactagaaagacaagaatctgaaattcggtgtgattttgatgcaaaacgttcttcactggaagctgaggttagtgatttggaggaaaaaatagcagctggatctgacagcaagatgctttctcgtggtttagatggttctttaaatgaatcattgctgaagcttaatatancaaagagggaacttgcagctagactgagggcaatagtatcaataaagcgtcagctggatgatgcaccctcccagtcagaactcatccattatgagcgccggttgtcagagctgaacgctcatattcaggaaaaacttcaccaactcggaaattctatgcaacctataatgctctcttggagattaaagagtggatactannaggacattccttg

SEQ ID NO: 199725 - DNA, 454 bp, Gossypium hirsutum
gattgattactcaatcataaaaatcgatcaaagttagcagccgatggagaggctgaatctgaaacacaagctcggcgataaatggatttcaaccctagccagcatatggatccagtgcaccagcggttcactctacaccttctccatctattccccaattctcaaatccacccaacgctatgatcagtcaaccctcgacacggtttccgtcttcaaagacatcggtgccaactgcggcgtcctttccggtttcctctacactttcgccactccatctaaccgccgcaacgcttattttggtggaccctgcttggtcctcgcggctggtgctatccaatgctttatgggctacttcctcatctgggcttccgcggttggattgatcccttgcccttccggtgtagggatgtgcttcttcgtgcttttggcagcgcatgctcagactttcttaata

SEQ ID NO: 199726 - DNA, 419 bp, Gossypium hirsutum
cagaaatggatgcaacgatcagtcctggattataccctttgcaccgttgtaaaactcgccatctggtgaggcatgctcagggggttcataatgtagcaggggaaatagatcacgctgcttattcatctgaagaatatttcgatgcccatctcactcctctgggctggcaacaggttgatcatctgcgcaaccatgttcatgaaactggactttctaagaaagtggatttggtcattgtttcccctttgctcaggactatgcaaactgcggtgggagtctttggtggtgaggggtataaggatgggatagaagttcctccactaatggtggcaaatgcagggcaaagtgaccgtcctgagatttcaagcttgaattgcccaccatttgtagctggtgaactttgtcgagaacatttggga

SEQ ID NO: 199727 - DNA, 397 bp, Gossypium hirsutum
ctctttcttccttccttccttcttcttatacggtgccggcgccggcgacccattaggttctcccctaacacaggttatcatccgttttggatctttgtccaagatggggttggacggtccaactggaaacgaaggtgtgaggagacgaggatgttcatgcaccaaagatgattttcttccagaggagtcatttaagagctggggtaattatgtccaagcactccagcaaactccgagaagggttatggatcgggtattcacccgatcacttgactcaacggagctccatgaaatcaaggctcggggccagcatgaaatgaagaagaccctctcctggtgggacctcatatggttcggtatcggaggcgtcatcggcgccggcattttcgtacttacc

SEQ ID NO: 199728 - DNA, 620 bp, Gossypium hirsutum
gttcttcttcaaaggcttctttcttttcaggtgaaaatagcagtgaaaaggtaggggtaatggagacaggagcgcttatagaaaatactgctaaaacaggagggataggtcttgatcttagaggcaagttgatggaccagatagagtggctccctgtatcaattgggaaattaaaggatgtgagcgaattggacttatccgaaaaccgtatcatggcgctaccaccctccattggtggccttcaagccttgacaaagcttgatcttcactcgaaccaacttataaaccttcctgattcggttggggaacttgtgaatctaacagagcttgatctccgtgcgaacagggtaaaggcgctgcctgctacttttgggaacttgataaacctcatgaatctagatttgagttcaaatgagttcacccatttgcctgagacaattggaaatttaacgtctttgaggagactgattgttgaaacaaatgagcttgaagaacttccatacacaataggaaattgctccttatttttggagctaagattagattttaatcagataaaggctcttcctgaggctgttgggaagcttgaacgcttggaggttctcactgcacactataac

SEQ ID NO: 199729 - DNA, 392 bp, Gossypium hirsutum
tgcactggtgctaaaagtgaacagcagtctaaactggctgcaagggagggtgccggagttattcagaagcttgggtttcctgctaagtttaaggacttcaaaatccagaacattggtgggtcctgtgatggtaaatttcccatcagacttgaaggccttgcatactcccatggtgctttttcaagttatgaaccagaactgtttccaggtctgatttatcgaatgaaacaaccgaagattgggcttcttatttttgtgtcagggaagattgtgatcactggagcgaaggtgagagatgaaacatacacagcctttgagaatatatatccccgcctgacggagttcaggaagaaccaacaatgatataccacccgtgaaatcgactgtgagtc

SEQ ID NO: 199730 - DNA, 379 bp, Gossypium hirsutum
ctttccaataaaaaactccccaaatataacataagcttatcatattactaatcattaaagatattccaacgaaaaccaggaaaaaaaatgtcttggaaattctctggctctcactctctcccgctcttcttcctcctcttcctttattcctttcctttaatctcaactcaaccacaatgatgatccaacatttaaaaccatgcatgatttctctgggtacccagttgatgaatcatcacacacttttacaccatcaaattcaagctcactttcagttgatattcaagctctgcaaaaacagattgatgagctatcaactttctcggacacacctgccccatcagtaactaggattctctacactgagaatgatgtattg

SEQ ID NO: 199731 - DNA, 621 bp, Gossypium hirsutum
  unsure (1)..(621): unsure at all n locations
ataagttagttggtgacagtttatcagttgtggattggcggcgctcgttttatttgaatatgattgcccatacttcgtactctgtaacagtggctagttgcagtcacaatgtccttagaaatcatcaagtggggcaagacacaccattatctgctatctacaaggttgtgaagactgtttatgcatctcccagtcgagtaaattttcatttggactcaaaaaaggaagtagagacaacacctgcctatccggacatctgttttgcaatagatgattttgactctacttttgatgcagtggtcttgacagaaacagaacattgctattgtgttcttcttaatgcgcttgatggggcagcttttcctagtgaaaaggatacaaatgatagcaggtccagcaacaaagtaccattaagagtagatactaattctatgaagacgaaaaatagtaagctcacacttttttctggatttgtcagctatcaaatggtccgggatgcatatgatgctgggagttctggatttggaagtcttctatcaatgggtcattcctctggcaaaaaagacagactttacatgaaaggtcctgaaggacgtggggaaattgaagtagctgtntctg

SEQ ID NO: 199732 - DNA, 660 bp, Gossypium hirsutum
cctacgcgtccgcttaaaaagagcaggagggagttagttttggcttctgatctgcggagtaaaacggtgttgatggctgcggcggtgaccgggaggattgaacgtcggcgttaacgctgactgtatcggtcacaccggcgttaccaatgacgtggccatcttaagattccagccaaaaaaaagaaaagttggcgctttctttttctaatactgaaaaccttcttaattatttatttcattctgatctgatctttgtttttggtttgtggtgttggttgaactgtgggtccctaagagtgtgtggggggagtgcatctgagctggttcagttctgggttgatttgaaccggtttggcttagagctggtttcctccttttctcgcaatcctgctttcagcttttctgggttggtgattcagttgaatattgagagattggatttggcatgcttataaaagatgtcattgaagagtattatgcgagagttaaaggaaatgaaggaggggattgggagcatatcaaagagaggaggggaaagccaggtttggcgtagtaggactagatcccatgctgctcctgatcgagcaccaactgaatctgaatccgtacaacaaagcccttgggctaacctaccgactgaattgctcttggatatcatcc

SEQ ID NO: 199733 - DNA, 565 bp, Gossypium hirsutum
cccatttgtccggttccgttccattcatctaatttggcggctcatgttctagtaaactgcaattggacggttttcatttctaaacctttcccccccaaatttctgatacttgtaccggtgaaaatggaggcattgggcggtaattgcgcgttttggggttggaaacttccggagataagaaacacaaagaggccgtttccgtcaaagtcaaaatcctcggattcatccgcagagtcaacgggcagtcgaggctaccgtttcccgttgaagcaagcggtgacagcttcctcactcgctctcacgggcgatactattgctcaactaagctcccattggagaaaacggaaagattccatttctggttccagtgatacaagtaaggatatcatgccaagcgtcatttcagatcatgattggcttcgtgccttgaggatgacttcttatggtttccttttatatggtcctggctcatatgcttggtataaatatctggatcactgtttgccacatcagacaccacaaaatataatgttgaaggttttactaaaccagatagtgcttggtc

SEQ ID NO: 199734 - DNA, 515 bp, Gossypium hirsutum
tccacgcgtccgggcaatccctatccctttcctgtccttccattctaagtaatacattctatacaagtcgtcgaccgccgcaaactagctgaaacgaagatggagcttggcttggaaactatggcggcggcaatcggcgtatcggtgccggtacttcggttccttttgtgtttcgtggcgaccattccggtgagttttctgtggcgatttgttccgggtacactacctaaacacgtctactcagctttttcaggtgtcgtgctttcttatttgtcgtttgggatctcttccaatctgcttttcttggtgcccatgctcttgggttatgctgcaatgcttctttatcggcccaagtgcgggattatcacatttttcttgagtttcggttatttgattggctgccatgtatattacatgagtggggatgcatggaaggaaggaggcattgatgccactggagcattgatggtgttgacactgaaagtgatttcatctgcaataaattacaatgatgg

SEQ ID NO: 199735 - DNA, 508 bp, Gossypium hirsutum
gaaagagtttctcaaagtcttttttttttttttcaaagaaaagtttccttcatatttatatcgaagctgaagaagccttaattcaacactttattccctcgttcattttctttgtcttccttatttgtcgatctcgatcgagggatcgcgttgtccttgatgatcgcttgaagaatcgataagaggggcgtcgattttcagtttattattggtggaaggaaatagaagcttaaataaatttcgcccacttaagtttttttcttttttggcggcggttaacttgtttaaggttctgggtaaaaggggatttttcttttcaaaagatcgagttgtttttagttttaatgatgtttgccttaactgctgggttttgaagtgctatggaccttgttgttacaccgcaataaagatgacgctttacattggtcgcgaagcttcaaagttatggaagagaatttgttcagagacaactacagagatcaacctttttcttgataactggaaatac

SEQ ID NO: 199736 - DNA, 517 bp, Gossypium hirsutum
tcttcctcttcctcttactcttcctcttcctcttcctcttcttcacccaggggacccccgcccgaagctagggttactcttcttcttcgttctctctctgggttttttacattcctctttcttggggcattttagggttcttgaaatttttgcactcatttaatttttttattgttttctttggatctggatcagtgaaagaagttctctaatggatactcgtaaaaggggaagacgtgaagctgggttcaatgctaatggcggcatcaagaaatctaaaccagaattggaatctttatcaactggtgtaggaagcaaatcgaagccttgcaccaagtttttcagtactgctggttgtcaatttggtgagagctgccatttcctgcactatgttcctggaggttacaatgcagtgtcccagatgatgaaccttgcaccagctgttcaaccagcttctagaaacgtggcagcgacagctgcaatacctcatggatctgcctttgcggtcaaaactcgg

SEQ ID NO: 199737 - DNA, 372 bp, Gossypium hirsutum
caaaccgcccccccccccaatttcgtagtttacaatggctgctgcatcaccagcaattgcatgttcgccacagacattatcattctatttgaagaaaacccatctcagtatcttaccctcccatttacatggccctactgctcgaagcaatgacctctttttaaggtcaaaagtccaaaaccgggagtatgttccaattccttctagccgaactagagcttcctcaaatgggtttcttaatgcagctcatacaagcagagaagatgaaatattgccttcttttggggaggctccagtgaaaatcatcttctgggttgtcttctgggcttctttgtctcttgtttggtacgctgcatctggagacgctaaagc

SEQ ID NO: 199738 - DNA, 474 bp, Gossypium hirsutum
aaaaatctgaaaaaaaaaaaattctcttgaatggtaggtaagctaaagctaaaacaaccccatcatcccatttcttcattgttcatgctttagagacctttgacatgttcatatggccttgtttggtagtccaggaaagttaagtggactattattaagaattgggcagtgtttttctgcagctgcttcaattggtttcatggtttctgctcatggctttttttaactccactgctttctgctatttgattgcgtcaatggggattcaagttttatggagctttggacttgcatgtctcgatttccatgctttgaggtcaaagacaaacctacacaatcctgtcttagtaagcttgtttgttattggtgattgggtaacagccacattatcacttgcagcagcatgttcatctgcaggtgtaacagttctttattcaagagacttgggttactgcagatcaccacaaataccat

SEQ ID NO: 199739 - DNA, 415 bp, Gossypium hirsutum
gtttccttttcttacactgtaacagccatggaagctgtgaacatgaagaaaaaagacccaaaaggagtggtggccgtggacgagagtgatgagagcatgtatgcactttcatggtgcttagcaaatttgatttcccagacctcaaccagcaacctcgtccttctttatgtaaaaccttcaccccctgtctattcttccctcgacgctgcaaggtatatgttttccaccgatgtgatcgtagccttggaaaaatacggcagtgacatggtgaatacagggatgagaagagctgaagctatttgcagaaaatccaccaccaaaataaatgtggagagaatcgtggggagtggagatgccaaggatgaaatatgtaacatagtgggcaaaatcaaagctgatacgtttggtatgggat

SEQ ID NO: 199740 - DNA, 563 bp, Gossypium hirsutum
cccacgcgttcgagctgcgcttcatctcttatcctttcttcttcactttcggcagatcccaatggcaccaaagaaagacaaagctcctcctccatcatcaaagcctgcaaagtctggaggtggcaagcaaaagaagaagaagtggagcaagggaaagcaaaaggagaaggtcaacaatatggtgctattcgaccaagctacttatgataagcttctctctgaagctcctaaatacaagctcatcactccctcgattctctctgatcgtatgaggatcaacggatcgcttgcgagaaaggctataagggaactgatggcaagagggtctattaggttggtttccgcccattcgagccagcagatttacactagggcaacaaacacctaggtctcatattggtacgttttttgcttaattagttatacatagtaatgctttttgctgagattgaacttgttcaaatggtttcgttttgttttattttaagacgtttcttcagctcaagaatgtttttgttatggtttaaagggatcagtttgggattttgttgacatgctcttta

SEQ ID NO: 199741 - DNA, 341 bp, Gossypium hirsutum
gctatctcaaaagagaagcagggctcctttcgctccaactccgtgttcactgcatcgactcagccatggacacacaagatggaactcagcagtcacagcaactcatccttgctcacaacgtcttcctcctcaagcatccagacgtctctgacattgagaaggtccgtctcagggatgaggtcctcaactcggtccaatccaatgatatgacttcatattatgaaaccctccttactgatgaagtgttggagctggatcagagccttttggaatcgatgcgtgccaagaatgaggaggagattaagaagcttgacgagaagattgctgatgctgaagaaaac

SEQ ID NO: 199742 - DNA, 397 bp, Gossypium hirsutum
cccattcgtccgctccccccttctcaattttctccttcaactccaacccactgctccactctttgaaaattcaactcttcttttcttccccaaaaagccccactcactgagtcacttctcactctcaaaccccgtaaaaaagcaatttcccagaaaatgtctttctccacccggcagaggcgagcgacggtgtcggatcttccttcatcgtcgtctccaccacaaccgtcgaagcctgaatcatacacgaaagtggataagccaggacgatcatcatcggacggcgttggcgaagaccgcggattggggtggttcacggggttgtttgctttgggaatgctacggtatatgagcgccacaataaatataatacacgactgcgatgaagtctttaata

SEQ ID NO: 199743 - DNA, 586 bp, Gossypium hirsutum
gaaaggatactggcagtaatttagaagtgaccggtgagaggaaatctgaggtggacgttgcggatgacctgttcaatgcgtacatgaatttggaaaatcttgagacattgaactcttctggtactgaggacagggatatggatagcaaagcaagtggcacaaagacatatggaggcgaaagtagtgacagtgaagtcgatgggagagtacataaacatccaatcaatatacagggaatgagttctggtgtttcaagtgagaagagggaaggtgtcaagaggagggctgctggagatattgcaccgactgttcggcactacagaagtgtttcaatggacagttacatgggaagtctgcagtttgatgaggatccaccaaaaattcctccttcaggaaatcatggcaatcatcactctcctggtagctcaagcgatgcaaattcaagtaaattcaactttgagcttgggagtagtgagttcaatgaatctgagcttaaaaagatcatggaaaatgagaagctggctgagatggcatctgtagatccaaaacgcgtcaaaaggattttggctaatcgtgaatcagctgg

SEQ ID NO: 199744 - DNA, 446 bp, Gossypium hirsutum
tgaggacgcattcagaaaactgtgtaaacaaaggttcatctcggttttgccctgaatcaggtatttcatctcctcaagggcttgaagattcacatcggatacctgttgagaatcaattgcgtgaagtaatgacagtccatagctcgggttctgagaccactcctcatgactctgaactggcgaccttacactcccttggagaagaatcgataccttcgggtttaggatttctcgtgtccaatagggaacaaggccacggagatggaggtgtgcttcatgttgatgttgtgagcattacttccaatattatatccaatggcggtgctgatacaagtaatcgtgaagccaggaggaacagtagaagattgttctgggatgcattttccaggcacagttctagaacacttaatgattccccgtcaaatgataggaacgatgtagcatct

SEQ ID NO: 199745 - DNA, 765 bp, Gossypium hirsutum
  unsure (1)..(765): unsure at all n locations
actccagccttgattaaggctgaggtgccatggtcagtcagaaggggtaatctttctgagaaggagcgtgtcctaaaaactgtaaaaggtatattgaacaagttgactcctgagaagtatgatcttctgaagggccaacttattgggtctggcatcacatcagctgacatcttgaagggtgttatttctctgatttttgagaaggctgttctggagcccacgttttgccctatgtatgctctcttatgctctgatcttaatgataagctcccctcattcccatccgatgaacctggtggaaaagatgttacttttaagcgagtcctcctgaatacctgccaggaggcatttgagggagctgacaagctcagggaagaagtgaggcttgatgactgcccccgagcaagagatggagcgcagggataaagaaaggatggccaagctccgcactctgggtaacattcgtttaattggcgagcttctgaagcagaaaatggtacctgagaagatagtccatcacattgtgcaggaacttttgggtcaagattctaaagcttgccctgncgangagatgttgaagccatttgtcagtcttcaatattattgtaagcagcttgtgagaccccaaatacggngcataatgatgtactaacagactgaagaatggctcaatctcaattgaccggactaaaatatggtcgacgcttattctgcaacacggttcagggntaaggagcaccattcgaacctttagtgaaaaattgg

SEQ ID NO: 199746 - DNA, 467 bp, Gossypium hirsutum
ctctttcgtccggctcattcaggcatttccgcagacactttctcaaaagaaacgtttcttttacactaacatggctagaccgcaacaacgatatcgaggtgtccgacaaaggcattggggttcttgggtttctgaaattcgccatcctcttttgaaaactagaatttggctgggaacatttgaaacggcagaagacgcggctcgtgcctatgatgaagctgcaaggcttatgtgtggacccaggactagaactaacttcccttacgatcccaatgcacctcagtcatcatcatccaagctgctctcagcaactttgacagctaaactacataaatgctacttggcttcacttcaaatgaccaaacaacaatcagtgcaggagccaaaaagagagccaccgactccacatatcatcaccaacaatggcatttcatatagaggtagtgagactggagttcgtctgctgg

SEQ ID NO: 199747 - DNA, 549 bp, Gossypium hirsutum
  unsure (1)..(549): unsure at all n locations
atgctcctacagctgactcataaatcttcatcaagctgcatggctctgtacgtnatggggatgaatcgaggggcattatgaaaaggtatcaggcatcgagctcacatcctgctaatcctgagaaatttttaacatacatggtgccgtctcttggtgagctatcaaaggatatgtctgacgaacacgaagacatcacatattcttgggttcgagaataccattgggatgtacgtggcgacgatgcatatgacccaacgacataccttggttcgttcgatgaaggagaagctcgctatgtgcctcttcccacgaagcttaatttaagaaaaaagacgcccagagagggaagatcaggtgatgagattgaacattttcctgtacctgctagaattactgggaggagaagaccaacagttgcagtaatagaactccatgagccagaggtttattccaactcaaggggtggtatttgtagctcaaagatggcaaggctagatgcataagatggccatggaagaccacacaagctttcacgacaccaagatattg

SEQ ID NO: 199748 - DNA, 396 bp, Gossypium hirsutum
gaaaaatggaaaaaggagggacaattggagtggagaaaagaaggagaaaaggttaaaagctttgggggacttttttttcttttcatttatttgattttgatttgtgatatgaattatgggtttctgagttctttttttcaaaaagatctgtttttagctcttgggttttgttttcgagtgtttaaaagaaaggggaatggccggaagtaatgaagtcaacctcaatgagtgcaagacggtggttcccctaaatacatgggtcctaatctccagttttaagttggcttacaatcttctccgtcgaccggacggcactttcaatcgtcacttggcggagtttctcgatcgtaaagtccctgctaatttgaacccagttgatggagttttctcttttga

SEQ ID NO: 199749 - DNA, 382 bp, Gossypium hirsutum
gcagtcacagctttacccatttcagcttccaattaactatttcgcttcggttgctttagcatcagtaacacgctgcaatcaatcaaaggtgatataacctttagggggaaataacgtatctggtacgtggaaagattttaatggcaggcaatggcctgccatctctgggtcgtgtaaagcttactcgatctcataccttctgaaggcattccttcagattctcacacgctgtcagtctctactctatcacaatcatttcctcaatattcagctgccatcattcaccttccagctagtgatggacctctactgagatccggcttagattccgctcgcctttacttccaacaaaaggctgcatacccaccagaggagctgattc

SEQ ID NO: 199750 - DNA, 376 bp, Gossypium hirsutum
cttcgctatacattcctgtttatgatttgtttccaatttgatatccatggcttccgaaacttgttccccttctaacaagttgagattcctcctaggaatggttttatttcttcttatgaatatggccactgtccagttgtcctctaccttttattcaacaacatgccctaaagcacttgccaccattaaatcagcagtcaactctgctgtgtccaatgaagctcgcatgggggcttctttgcttcgtcttcattcccacgactgctttgtcaatggatgcgatggatccatactgttggatgatacagcaaatttgacaggagaaaaaacagctgttccaaacagcaattcaatcaggggatttgaagttattgat

SEQ ID NO: 199751 - DNA, 689 bp, Gossypium hirsutum
aaattctatatcatacaccagagtttttgacttctttgcacaactgttagtaatcaaatcaaaagagagaaaaaagaaatccccaaatctgaaccctaaaagatggcgaagatatggggaaagatgtgggctttgatgggtttgcttctttttaattcggtgtgtaatgtttcctccctttcggtgaatgtaaacaacatcgaatgtgtgtacgaatatgtgctttacgaaggagacacgatttccggcaactttgtcgtcgttgaccatgatattttctggggttccgaccaccctggcattgatttcactgtgagttctcctctgggtaatacagttcacgaattgaaggggacatctggggacaagtttgaagtcaaagccccaagaagcggaatgtacaaattttgttttcacaatccccactctgcaccagagaccgtctctttccatatccacgttggccatattcctactgagcatgatcttgccaaagacgaacatttggacccaattaatgttaaaattgccgaacttagagaagccttggaatccgttacagcagaacaaaagtacttgaaagcacgtgatactcggcatcgtcatacaaatgagagcacaagggaagcgagttatatgatacacagttggagagtacattttgctaactctagttagtgcacttcaac

SEQ ID NO: 199752 - DNA, 551 bp, Gossypium hirsutum
ctctctttctatttttcttctctctttttttttaccctatttgatagggttttcatgtccttctagctccaatccatctcatgcattcgtgtcttccagctacatacgttgacgttttagccttctcccttgtcgggtctctcttttttctctctttggagggtttttgggcggctaacggtgcagatttcaccttccggggtttttttgagctgtacccatgtcaaagctcttttcttttagtggaactgatgatttttgccctggggggtcgatctacacaaaccccaaggaatcaagtctctttttgtcccttggacgtcatgtggatgtatattttccctctcgcaagaggtcccgcatcagtgcgccttttgttttctctggagagaggtctgagaagaacaaatcatcaattgaggttctccctgatgaatgcttattcgaaattttgagacgattaccagggggacaagagaggagtttctgcgcttgtgtcttcaggcgttggcttacaattgtaagcaacatccgcagcaatgaaatcagtg

SEQ ID NO: 199753 - DNA, 418 bp, Gossypium hirsutum
caaaaagtgattagttgcagttcacacccccccctttaaaaataataataaccgtatcggtgataccgatggggactacttgctgaggggtcgaagaaacattctgcgactgagttgacctattttttggaattgaatcatttgcctggacggcggccacataaggaaggcgtatgagaagctgaggttctgcagaatcaatatcccatgatctttatttcaaacctctgagaaggtgttggtgagtgggcgtttcaagtaaattcgaatcgacatggcattccctactaagataaaagggatgaatccaatagttgagatggacggagatgaaatgactcggattatttggaaatctataaaggaaaagctaatttttcccttcttggagttggatataaaatattttgaccttggt

SEQ ID NO: 199754 - DNA, 427 bp, Gossypium hirsutum
ctcacgcgtccgcccacgcgtccggaaaataaaaaataaaaaagaaatcgatgaagaaaaaccctagaaccgggatcgagatggctgtgtagatgcatgtcggcggaataacgttggatctgaattggttcctgcaattcattttcacgctcttcattgtcgcattggcgtctcttcgcttgctgaagaacacggcgtcgaactacttcgaggtcgacgccaatttcggtcgggaccaaccaatgccttccatccccatggacgccgatcacttcccttgcgccgtatgctctaatcccgccttcaagaagtgctctcggtgcatatccggtcgttattgctcctcagcctgccaacaggtggactggaaggatgggcataagacaaagtgcataggcttttcaacacaaactacaaccaccaaacc

SEQ ID NO: 199755 - DNA, 1002 bp, Gossypium hirsutum
  unsure (1)..(1002): unsure at all n locations
gttcgtctcaatcctgctatttctataagaatagtttgggttttcgttttttgagtcaaactatcagtttacttcctctatcatcgcaaattctgaaagaagagggatccgatctgatctgctgcaaatgggggagaagtgggtgttgatgaaaacggctcagacgcctaccaacattgcagtgattaagtattgggggaagggggatgagacccttattttgcccgtcaacgatagcatcagcgttactcttgatcctgctcatctctgcaccacaaccaccgtcgctgttagccctgctttccagcaagatcgtatgtggctcaatggcaaggaaatatccctttccggaggaaggtaccagaactgtttgagggaaatcagaaaacgggctagggaagttgaggataaagagaggggaataaagatagagaagaaagattgggagaaactgcatcttcatattgcatcttataacaatttccctacagctgcaggattggcttcctctgctgctgggtttgcttggcttgtttttgcacttgcaaagcttatgaatttcagtgaagatgagagtcaactttctgctattgctaggcaaagttcagngcagtgcttggccgaatttgttaggtaaatttcgttaaatggattatgggataagaggatagtggaagtgataggtttggcagttcaactaggtagatgaaaaacactgggnaagatctcttcatcattatggctgaggggaggttcacggcagaatgaaacaagttacacctttgggatgcgtgagagagttgaacaaagtcgctttacagcataggcaaaggagtgtttcaaacgcacaatcagatggagaggcataccaatcggatttcattttgcaaaatatctgtgctaaggaccatttcatcattggtggatactgcctcattttacataagatcattacaggtatgtgctgtttagaaggaatttagaaagcccggggattattan

SEQ ID NO: 199756 - DNA, 470 bp, Gossypium hirsutum
cccacgcgtccgtccctttccttttctctctctcttttcttctctttctctgtgtttgatgctatcaagggttctttgattgttcttccatcagataaattcttggttatcgtttgatcttgttcatccgtcttcatcacagattaaatttgattccccagttatggtgtaaggttaacactgttgaagcagctatttataaaccctaattttttttttcttgttgaatttagctatttgatcttaaaaccttcgacccagttcttgtttttgtgtgttggatttagcttgaaacgctggcgaacccttggtgggctaatcaggtgagcctaccgggtatggacccggcaggcaattcaccagctttaaacaaaagtgaccttgaaatctctatgaacgatgctagcaaaagtagaaccaacggaagaggggatgatgatgatgaagatagggacaccggcgatgagcct

SEQ ID NO: 199757 - DNA, 408 bp, Gossypium hirsutum
ggagctttcgttttaaaacgaggaatcaacatttaagtggcggctcgcggggacacagtgaatagggaaagatggaagaaggatgcgaaattttgcagctctacgaaattccgtactcggatctcttgcttctatcatcttcttccgcatcgtgttcccattatcaagagagaatgataatggaaaacctggggccgacgggccctggcctcttcgctattacaaacgttcccgacgcttcgcttctccgacgaaagctcctccctcttgctcgcaagctggctcttcttagccccgatgatcgcaaacgtattctcagagaccacaacttggggagtgatgttccattgaaagacccagataggaatgtcttctctttcgcgatgcagctcaaatatgctcaaggta

SEQ ID NO: 199758 - DNA, 819 bp, Gossypium hirsutum
  unsure (1)..(819): unsure at all n locations
aaaatatttagcaaaggataatataaataataattaatgtccgtttttctgaatcgtttgtctcgtctcctccgtccgcaatgcatccctaatctgagcaaaagtatttacgcgttttgcgttgcttaattccttattatccattcccttttctccttttctttccttatttatatttccttttctcactattttcctctccaattttccttctttcatttctctccaaattttcccaacaatggagtccgtcgatcttcacgaacccaccaatgccaaccacgttgaccacggctggcaaaaggtctcttatcccaaacgtcaacgcaagaccaagcccaacgccgatcccaacctcccccgtcctaacggaaccctaactaatggctccgccagcgttttccgttccctcgagcaacagtccgaggatcgccgtcgtcggatagttgaagctcaaagagcttacgctgctgctgccattgatgccgatgccaagtctaagcctaaaagatcggtcatcgatgattccgacgatgacgatggcagtgatctggatggcgttaaacctaacgggaagccagcagatgaggagaagaaggcgaagcanaagaagccgaagaaacctaaagttacggttgtagaaaccgctgcgaagatcgatcccactgatctctctgcttatctcgctgaattgaatggcgaacagcaagaaattcaaatgcagaagtttgcggattactatggtaaggcatttcanctattggttgcggggcagtttccttggttgaagcttttcagggagaagtacgttgccaagcc

SEQ ID NO: 199759 - DNA, 431 bp, Gossypium hirsutum
ttcattcgtccgctcttgttcagatagtttttctctgtttcgagtgtttaaaattttgcagacgatgtcaaacttaatactttttgaggatatttttgttgttgataagcttgacccagatgggaaaaagtttgataaagttacccgcattgaagcacggagccagaactgtgatatgttcatgcacctcgatgtaaatacagagatatatcctatgcatgttggtgataaattcacaatggcgttagctcacacgttgaatttggatgggacgcctgatactggctatttcaatccggggaggaagtctcttgcagataagtatgagtatgtcatgcatgggaagttatacaagatatcagatgattcttcagggaaaggacttaaagcggagatctatgtatcatatggtgggcttttaatgctattga

SEQ ID NO: 199760 - DNA, 413 bp, Gossypium hirsutum
ttctttttcctgcagcctgcagctgttctcacaagtagtattagttgttatttctgtcattgttagtggagctgtgttaaataagtgaagtatacacaatcttgcatggagtttttcatatataatttggagcccttccaaaaatagaagagcgtagacaaagaacatgaatccttcccaatgatattagttggaaaccagtagcataaggggtcgaaatctcatctctatttcctaaaggaagcaaaggatacatgagtgtatactatgtcccaataaaggaaggtgaaccatcattagtcaacatcttgggttgtagagaaagtgaaactcacagctaggcatgagggatgatgggttggatgtgtgaatgagaagactggttattccaagagggacgcggcctcataaaa

SEQ ID NO: 199761 - DNA, 347 bp, Gossypium hirsutum
atcgcagactggttgtttgttttccaaattgcactaaattcccaagatctgcacatggcatttcaaaacccttaaaggttcaattcctactcttcttttttatgaacgttggagcttgcaaaacatttttctcggtttccagttggagcgcacaggagaatgttgttcggtcatgctgatggtctatctgaacaacggtcaccaagggaccagctactcgctgatcctgaatcgctggaagatgatttcaaattagacagttctgaaacgatattgtacgctgcttcttttgaagaactcgccagagataatcttcaatatgacaccatcatatgggtttctatatc

SEQ ID NO: 199762 - DNA, 913 bp, Gossypium hirsutum
  unsure (1)..(913): unsure at all n locations
ctaatacaaaaaatcaaaggttcaccgcagaaagtaggaaattttggtaatactggaaatgttgtcgatcaaaaaccctaaccctanctccggtttggagcccttgaagaggttccatcgtgcttcttcttcttcttctccgatggcactttgctcgtcaccgtcgttacggctcaaatcgccggcttacagagtctctctcgccgctcccaaaggatttgtagttggttttcgctcactccattcacggcttcccttccaccattccgtcgtcgctttcgcagcttctcacgaggaatctcattcagaaatggaagttgatagagaaaaggatgaattggaaactgagagcgaagaagaatcaaacgaagcatggaaacaagctttagcttcgtttaaggaacaagctttgaagttgcaaagcgtatcccttgaagcttacgaagttcactccaagaaagctttgattactcttaaagaaacttcggaggttctcaaggttcaagctgaaaaggcaaaaaatgatttgactgaagtattcaaagaaatgagtgaagaaggcaaagaatacctctcaacggctgccgagaattcccctcctgaagtccaagaaatcgttgagaccttctcttcctccgccgaagatttcaatgacgtttccaaagttcatgactttcatgtcggtataccttatggttttattctttcagttgggggatttctttctttcatggtgacagggagtatatctgccattaggtttggtattattctaggtggagctcttttggcattaagcgtatcgagcttaaaatctcataaaagaggagagtcgtctcctcttgccatcaaaggacaagcagtgatctcatctgtactacttttgagggagttaagcttgctgattcggaga

SEQ ID NO: 199763 - DNA, 408 bp, Gossypium hirsutum
tctcatcccagtcttcaaactcaagttcttctcccctttctcccgttctttccctctcctaaactaacgtttcaaaccacactccctttacctcaaaagctctctccttttcttgttttggcggaaagaaaatgaatcccgctgataacactgaccaccctcagcttccaactatcaagatccaccacccatcatcccctcaccaccctacctctgctgctacccccaccccaacatccggtgcccgacgtaagatcggggtagccgtcgacctctctgatgagtctgcttttgccgtgcgttgggctgtccagaactacctcaggcccggcgacgccgtcatccttctccacgtgtcccccacttcagtactctttggagctgactggggtccactccctcaaaccc

SEQ ID NO: 199764 - DNA, 694 bp, Gossypium hirsutum
  unsure (1)..(694): unsure at all n locations
aatcattaacatttcacccaaaaaacatacacccatttgcgttttaagcttcagaatgatacagaaaatatccattatttttcatgatccaaatgcaaacccgtttcttgcgcccataaaaaaccccgaaaatgatggagacggtgccggtggggcggtttcagttcaagagattggttgcggcgttccttccttcatatcgaactctctttattctcttatggatcgtggcttccggggcggcttttatatggcagcggcaaaattattggggcggcgatttcaggttcggtaaaaaccgcgttgagtcggcctatgccaaagatgcggcctcttgcgtttaatttggctgatttcggcggtgttggggatggtaagacgttgaatacggcggcgtttgaaagggctgtattggcgatctcaaagcttgggaagagaggcggtggtgggcaactcaatgtgccgcctgggaagtggcttacggcgccgtttaacctcactagtcatatgactctgttcttagctgaggatgctgagattcttggaatccangatgagaagcaatggccattaatgcctccgttgccttcatatgggtatggaagagagcatcatggacctcggtatggaagtttaatccatggtcaaaacctcaaagatgtcgttataactggggataatggtaccataaatt

SEQ ID NO: 199765 - DNA, 683 bp, Gossypium hirsutum
tcaacttccaccactagatcacaagaataataatgggttttccatcaattttaagtcggattgccatctccaggaacctgctttcctctaaacccaccaatccttccatcttattgtcctctcgttggttttcgaatctcgttgctaacaacaccgacaaggcggagagcagcctaccatcaacttcggctgcttatcatgtcagctctggtgggtatatgcgagggaccgtcttctgggaacccgatacccccctcactattgaagaatttcatatgcctcgtcctaaagctggagaagttcttattaaaaccaaggcctgcggagtatgccactctgatcttcatgttataaaaggcgaaataccattttctagtcctttgtgttatcgggcacgaaggtaactggggaaaatcgttgaacatgggccacttaccgatcgcaaaatcatcgaaagatttccaattggatctcaagtggtgggagcttttatcatgccttgtggtaactgtttcttctgttctaagggccatgatgatttatgtgaagacttctttgcctataatcgggcgaaggggaccctttatgatgggggaacacgcgcttttcctccgcaacagtggaaaaccggtatacatgtatagcatgggaggccttgcctgatactgggcattccaaccatg

SEQ ID NO: 199766 - DNA, 725 bp, Gossypium hirsutum
gtctctctctctctctctctctctctcaaagggtatcatttttcaagctctcaattttctctggattcaaatcctctattttaggttgggtttttctggtgttatcaatgttactgcccttgttcatgtttggctgtagtttgaatttggttgattgatgaaacttagtggatactgtattgcttggaattgaatcatgaagatttttatgaggtttaccagtggttttgtggattgattggtgtatgaatatacgatttggctggaattttccatttgatttgtgaagatgtcaatagagagcttttgttgattggtaggggtgtttcaaattatatataaaagtgaaagaaaaaaaaaaagaggaaatagttaaaagagcaagagaaaaagaatgggggaagctattctcactactttgtcaatggaaactgatcacccatctacacttttgtctatggattccggttcttttctaccaaatgaattggagagagagatgaaccgatctatgctgttgtctcggccacctgatatcaatctcccgttatcatccgaaccgagccccccacctttggcttggaatgattcatgtgaaatcttacatgtcatccttgctccccacatttacgacgcggtcgtcagtgtcccgaaagtggctaagatgtgtatcaagcctcttgattatgtatggggtgcttggtttttctttactttctactccc

SEQ ID NO: 199767 - DNA, 456 bp, Gossypium hirsutum
gttctttgctataccctaggactatagtcttctcttccgatccatccattactttcaaattttcttcttagatcaaacaaaacaatgtccggcgtttgggttttcaagaatggtgtggttcgcttggttgagaatccagcggctgagtcattagacggaagccgacagagttcgaacactcgccgcaaagtgcttgtgcacactccttctaatgaagtgatcacttcttatgcggttctcgaacataagctatggtctcttgggtgggaacggtcttacgaggaccccaggcttcttcaattccataagcgatcaactgtccatttgatctctctcccaaaagatgttaatacgttcaagtcggttcacatgtatgacatcgtcgttgaaaaccgcaacgtgtttgaagttagggatggttagttgtatagtttagaggagctaattggacgtctt

SEQ ID NO: 199768 - DNA, 402 bp, Gossypium hirsutum
ctcacttctctttcttttctctttactcacccaattcttcactcttttgcttaaaagaatatatatcaattatagagctgatgggtggcataatatcaaaacgatcgaccacatcacagtcctcatctgtagcttctaattcatattcatgggattctcatagatatgcacagccatcaaatgctccctcaggccaagactatgttccagagcagcgttatgcccctccacatcacagttatggcagtcatgccccagagtcgaagaggaggttggagagaaaattttcgaagatagatgataactacaacagcttggagcaggtcaccgatgccctggcccgtgctggcctggagtcttcgaaccttaattgtggcattgatttcactaagagcaatgagt

SEQ ID NO: 199769 - DNA, 513 bp, Gossypium hirsutum
gacccttttattagtttcacaactaaaagaacccaagttttgatattgtttaaccgccatggatgagacccagaaaagcctacttttgatggggtcaatagcaagtgcaaatgaatcattaggtgaaatgcggaccactccattgatacgtaacccatcccaaccatctttttactatctttcactccaaggaatcacagtgggaagcactcgcttgcctatcaaggaatcaacttttgcactcgaagacaacggcagcggcggtgtaatcatcgactccggcaccactatcacgtatctcgaacaagctgctttcggcgtgctaaaaaaggcattcatcttggaaatgaagcttcccgttgacactttgagttcaacagggcttgacctttgcttcaccttgccatcaggttcaacccaagttgaagtacctaaacttgtattccatttcgacggggcggatttggatctaccggcagagaattatatgatcgcggactcgagctcgcgggt

SEQ ID NO: 199770 - DNA, 709 bp, Gossypium hirsutum
  unsure (1)..(709): unsure at all n locations
ctttatttgctttctccactaacagccacccataatcgcccgcctccattgaatctgacacacttcaaacatcggcgtcagtgtctaatcgcgttggcaccggtgtgctgtcgaaaaagacgagtccaatcaacggagcttttaacttttaaggtgcaatcatctctccccgctgggaagaagagttttttgcataagttgatgtaagtcatatgctacccactactccccaagatcttaacagtacttgtaccttattgatttggggaaaaaaggaggattgtcggagacaagaaaatctttgttttgccaatggctgcttctacaaaagttctcgcccttgagagtccaactcaaactggagagtggacaggttgttctaccccgtaagggtagacatagaaggaattcccgaaaaataacaattgcaaaaggacaacaacaagaacacagccgttgggttcaactcgatcttaagattgaccctgagagacaatcnanacttatgcataagatcnagcatgtatgaagaaanttgaaactctcaatnttcttggctttttggatcagatgcaaattcgaaagtcttgatcactttacagggttttggatctgagtcgcaactgcaatggtgatatatgtattggcagcatgagtctcatgaacttctgacttcacttagcctgactctgatgaaagaagtcactgn

SEQ ID NO: 199771 - DNA, 390 bp, Gossypium hirsutum
acagcatataaaaagcttattaaagggaaaaaaaacaccgatccaatgagttacctgaaccgggtttggatggcgacgagcatggcgatggtacaaggtcacggtgaaaaccaaggtcaaaactggaaatcaggcatcaagtttctccaaaggggccaaaggaggcccttcgacggagaatcttcgaatctccggccgatttccggttctgatctaaccggcgtggtcgggaaccgtgacggccaagccgatgagtcgatccgtcgagtcatgtatcttaattgttggggtcaaggatgaggattttgacttgttcttcggcttttttttttcgatttcgcaaccctaaaaaaacggaaatttggactgacgggtgtctgggagagatgt

SEQ ID NO: 199772 - DNA, 453 bp, Gossypium hirsutum
tctttacgcgtccgcacaaatataataaccaatactctgcatcaaggaaaaaaaccatttcttgcagaccatccggaggcctaaaggcagtcaagccctcaattttaaggtcctccttttaggagttttctttgcttttctcctcctttttgtgttaagatcaagtatatcatcttcccaagatgatacatcgaatttacaaacatttgccgcagctaaaacctctaatggtgttaaagaaagcaaaagtggagcaaattgctcgccatcttgtgacaagattccacgctctctagcccaagctctcattcactacgcaacttcgagtatcactccgcagcaaacactgaaagaaatctctgtcactgccaaaattctagagaagaagtcaccatgcaatttcctagtatttggcctaggccatgacagccttatgtggagttccctcaacta

SEQ ID NO: 199773 - DNA, 662 bp, Gossypium hirsutum
cccacgcgtccgcccacgcgtccgcacaggctctgggaggccaccaaaatgcacataaacgtgaaagaacactagccaaacgagggcagcggctcggcggtggggcagcggcggcctctttttcagccttcggttaccctaatacacaccctagtcgatattctagcttggcttcacttcctttgtatggctctttcaataaggcgcttggaattcaagagcactccatgatccacaagccatttttagttccatcggcgcatgtttatgggcacaatggatggtctagacgacctgttgatcacacaagggcagtcgggcatgtttccgatctgcaggggataaatggtactgctagattccaaggtagtgtagggaagtttggtccagccacggagggaatgaatggacattggtgggatacagttaaccatttcaacaacaaaaaagatgagttgaagcttgacctgtctttgaagctctaagtagctactctactttcattcttcttcttcgtcttcttcttcgtagattatttttttctttgatttttagctggattttttgtaaatgcattttggatatagaaggcttgatgagattataccatttccaaatctaaaagttgcccaaagagaaaaaaaaaaaagctttcccaaaaa

SEQ ID NO: 199774 - DNA, 633 bp, Gossypium hirsutum
ccttcgcgtccgcccacgcgtccgcggtgcccgaaataacttttcggcacttaacggaaaatgacgaatttgttgtcttggctacagatgggatatgggatgtcctttcaaatgaagaagcagtagagattatagcatctgccccagctcgttcctctgcggctcgagcattagttgaggtagcaatccgagcttggagatataaatacccaacttcaaaagtcgatgattgtgctgttgtttgcctcttcctcgattctaattcgaaccatttgtcgaccgcttctaacggcaataccgaagtgcagccaacttcgaaggaccaactcgacaatgacatcgaggaaaacaataatctcgatgtattgacccctctcaaccagtgccgggatcaccagaacagaagaagaaacatccctagaagggaacgaagatccctcgatgctggagaatatgaattcggacatgggaataaattggtctgccctcgaaggggtgtctcgtgtcaatacgctcgttaatctcccgaggtttattccggaaaaggaggagaaggctgggaagtaagaaggtaccttgcttttcccttggattaaaatttttgtaactctttttttccatgcattttagtgc

SEQ ID NO: 199775 - DNA, 513 bp, Gossypium hirsutum
tctcacgcgtccgcccacgcgtccgcccacgcgtccgtatccttataaatccttaatcaatcatctcattcctttgtcatctaattattaaagcaaagatagatggctaaacttgccacctttttcgtcttaacccttctcttcgtttccactctatcctttgccgcccgccctggtccagctttccctaaccagtctcctaccaaaactcaagctaagggtattactgtggtggagactgaggttgagcggtcgactgaagctgttgaagatagctgccaaggagttggagaagaagaatgtttgatgagaagaactcttgctgctcatgttgattatatctatactcagaatcacaagccatgagagctttttatgaatttatggacatggtcttttaaattttaaataacataatcactcaagttaatttgtgtttgtttcttcttcattatatatttcttcaatcttctggttttttttttttttttgaaatatatggttggagtttct

SEQ ID NO: 199776 - DNA, 609 bp, Gossypium hirsutum
cccacgtttccttgaatgcatactttgattagagacagggatatttctaagcatgattttgtcttctattcagatcggcttattcgtctggtggtggagcatggtcttggacatttgcctttcaccgagaagcaagtaataacgccaacagcatcgatatatactggggttgatttttgcaaaaagttgtgtggtgtttccattattagaagtggtgaaagcatggaaaatgcattacgtgcatgttgcaaaggaataaaaattggcaaaattctgattcaccgtgatggagatgatgggaaacagcttatctatgagaagcttcccaaggatatttccgaacgacatgtcctccttctggatccggttcttggtacagggaattctgcgaaccaggccattgaactactgatacagaaaggagttccggaatctcacattatattcctgaacctcatctctgcgcctgaaggaatccattgtgtttgcaaacggttcccatcattgaaaatcgtcacttcagagattgatgttgcactaaatgaggaattccgtgttataccagggatgggtgagtttggggaatcgttactttggcactgatgactg

SEQ ID NO: 199777 - DNA, 429 bp, Gossypium hirsutum
ttaactttatggccagatgcattttgtccaatcctaaagctcaggctttgacaccagaagaactgcagaaaactctgcttaaatcattgggaggcgtcagcaaattggagaaagttttgggcatttggcatgctggaaagttggtctatgcgttgtcaacctggggacttgcactggttgggttatatagagcccgtagtgtggtaaaagttgctgcaatgggcatccacacgaccagcaaagttgtaatgagggctctatgaatttattgctccaatatcagataaaaagataaggtctgtttgaactgtattattctttcaattctcggttggtttgtttaaaatccttcttgttgctgtaaaatgtacatgttgtaaatatatttgaaatactcttttaatgaatcaattgtattgcttcagaatg

SEQ ID NO: 199778 - DNA, 474 bp, Gossypium hirsutum
tttttcaaaatgaagccactgtttcttttagtttgtgttctctgagcttcctctttctttattcccatttccgccatgcctatccaggaccagcccttgggtggtgaacgcaaaggaaatgaatgtggtcgtggaatcaaatgcataccaaagccaacgccacggcctactaagtgtaaaagaaacaatccttactgcaggcctccctgaatgtggtaaaaaataaagctatgggcctatggacgatatggatatgggtgaagttatgctagtaataaattaacaaataaacaaagtttccccccatgcttcatgacccatggcaattaccaatgaagttcttgtaatgatcatatcattactttcatgactactagtttgtatgtgttatgtttatgtttaataaattatggagtggttttatgttgaaaaatatcaagtactactttgattgtgatagggttatatgtttat

SEQ ID NO: 199779 - DNA, 484 bp, Gossypium hirsutum
ctttagcgtattagcattaggattccactgagtgctataacatacttaaaattgctgtgggggaaatttgatatatataatatagcattaatgatgaagagtccaaacaaaattaagagttattattattctctgtttatgatcagcttgatgctttgtttaggtgcgaggtcccaactaaccactgatttctattcacaaacatgtccatctctcctttcaacagtacggaaacaagttcagagtgcgatcaagaccgaaatgcgaatggcagcctctctgctccggcttcatttccatgattgctttgtgaatggttgtgatgcatcagttttgttggatggagacaatagtactgagaagtttgctcttgcaaatgtcaattcggcaagaggatttgaagtcatcgacgcaataaaaagcgccgtagagagctcatgcagtggagttgtatcatgtgctgatatattagccatcgctgctc

SEQ ID NO: 199780 - DNA, 443 bp, Gossypium hirsutum
tcccacgcgtccgcttcgtttagctgtaagtaaagttttaaagatcattctctgagaaaagaaacccccccaaaaaaaaagagcaaatagttggcattctggtttctatgaatatgtcgtgttcaccggaatttatggttcacaaaccggcgaggtcaccggagaagacaagttttacccaaacttgtaacttattgagtcagtacttgaaggagaaaggtagctttggagatctaagtctgggtatgacatgcaacgttgaagctaatgagactcccgagatgctgcgtcccaccatgaatttgtttcctgtcaatgggaaatccggtgatgattgccatgcggcgcctcctccttggaaactgagatccatggatttggtccctaatcaagctgctttttcatcacctaaagatgatgctctgaaaagcagcatgaacaaa

SEQ ID NO: 199781 - DNA, 242 bp, Gossypium hirsutum
  unsure (1)..(242): unsure at all n locations
cccacgcgtccgccttattttagattattgaactggtgttttctatatatataagtcttgggtgctgtggtatttccatggatgggaataaagatcagtcaagaaacattaatattactagcagaagtactgcatgttagtgtttctcttctcttactatgaatagaaagcgaatacaaagtggtctctcattctttnnnnnnnnnnnnnnnnnnnnnnnnnnnnnnnnnnnnnnnnnnnnn

SEQ ID NO: 199782 - DNA, 424 bp, Gossypium hirsutum
ttttatcttctgaatacgggccacaatcaagccggggggtttaattaaacttggtgggtttatctcatgtagaagaaggtggagaaacaatgttcccttttgagaatgacatgagagtcaaaggttacgactacagacagtgcgtcggtttaaaaataaaaccacgaaaaggggacggacttcttttctattcactctttttgaatggcacaatagatccgacatctctgtatggaagctgaccatggatcataggagagaaatgggttgctacaccgtgggcctgagaccaagaccacagtgactgactattcagtgtttctgtagaaactatggctcattatcggtgtttatttttgacgctaatcatcatataaactctgttttggatagtataattctttatgaattcactcccactttc

SEQ ID NO: 199783 - DNA, 500 bp, Gossypium hirsutum
cggacgcgtggggttttacagacttgtaatatctttatactccatttttatcttcattagctgtaatctcaggaagagaaattcatgtctgccatggtttccttgttattccacctacggggttgcctcacagttttctcgcttcttcctcttccttctcattcagctgaccctgatccattacaagacttttgtgtagcaaacctgagtgcctctatatctgttaacgggtttccttgcaaaccagcatccgaggtgacttcggatgactctttctttgatgggttcacccaggaaggtaacaccacaaacgccttttcgtcattcctcacacctggaaatgtcctctcattcccagggctgaatactcttgggatttcaatgaaccgggtggactttgccccggatggaatcaaccctcctcattcgcatccacgtgcgagcgaggtcggtgcagtcattgaagggaagctccttgtaggttttgtgactactaacaa

SEQ ID NO: 199784 - DNA, 627 bp, Gossypium hirsutum
  unsure (1)..(627): unsure at all n locations
gaaaattttttcattgctaatgataccatgaattccctgtacaactgatgttttcactgatttattactataaatcatgatccattgctcttcattttcccctcttttctctgtttttcagtgatgatttcttggatcattttccttcaaaacctgggtttgatttgattgatcaagttcttcaacaaaaacccatcaacgaattcctttcgcttccttgtttatttttgagttttcgtcgagtcttggagcatgggaaaaagcaatagtagcagagattggactcagatctatgccatttacggcatgcgatcagtggcaaacactgcttttccttttgtgtcacgctgtctttcttctcattactgtctattatcttcgttttctacttcgattccatcttccacttcttccaaactttatttcccagccccagcaccgctcgtttcgcgcccgggttcagcggcgccgtcacctcgattcttctgttgcttgttcttcgctgcgccaacttntgtactccgctgcccgttgcatacgaaatgcgcagcgatggtggggtcgttatgatggtcgtcgtgaagctgcgctgacattgatgcgcagaggattctctcactcgtggca

SEQ ID NO: 199785 - DNA, 687 bp, Gossypium hirsutum
  unsure (1)..(687): unsure at all n locations
atcttttcttcctctccatgtctccttgatcacgatccgactgtccacaatgaacgcttatccttttgcttgtttcctctgcttttagtcctgcaaatcctcagatctactttcgcctccctcctaagcttctctgttttctcctttccttttgattttagctctgtaattcctcagatctactctctccgccttcctcatcttcgtttctcggttgcctttaggtttatcgttggccgtagtgaaatactgaagttgcccacagttcgatggcggttacggttagttacgtcgcgctaacatgcgccggtgaaactctagcttccatgttcttgtcggctcttgtcaataaccaccttgtagctctgaactcctttacattgctggtggctaacaaacctggaatcaagggtgaccattcccaaaaccagcctaagctgaaggacgccgatggggaagataatgatgacggcaatgatgatggcgatgatgggggtggtgagtttggagatggtgaaaaatactgtcctcggaaggcggggattatggcaacaatggtaatagcgagaagaacaatccanagacaggactgggaggtggtgcgaccggggcagaacanaatggagaagacgaagacnatgacgatggagatggtgaagaccctgacgatgacgatgacgatgactt

SEQ ID NO: 199786 - DNA, 478 bp, Gossypium hirsutum
gtttttcagtcactcccaatccccagtactctctttcgcttcctcccttttgcttttgctatatcttttcttcctctccatgtctccttgatcacgatccgacggtccacaatgaacgcttatccttttgcttgtttcctctgcttttagtcctgcaaatcctcagatctactttcgcctccctcctaagcttctctgttttctcctttccttttgattttagctctgtaattcctcagatctactctctccgccttcctcatcttcgtttctcggtgagttgtgtttttccaaaaaccaaaagctaatttataccaaaaacaactttccgccggcgagttttgctcgtaattcaaggttgcctttaggtttatcgttggccgtagtgaaatactgaagttgcccacagttcgatggcggttacggttagttacgtcgcgctaacatgcgccggtgaaactctagcttccatgttctt

SEQ ID NO: 199787 - DNA, 468 bp, Gossypium hirsutum
tctacgcgtccgtaaaaacaaaggtatatgcagatcaaaattcagagtaaaagatcgacgatgagcggcttttgctcggcgatggcaatgacggtgacggtcgtcttcttcttcttcttgttccttcagcaaactccattaatggcggaggcggcgaaacttgaagaagatcatttcatcattaagaataagccaacgctgtacgagttttcaagcagagatgaaatggtgcatttggccggatacggcgaagagaagctctcgacagttctcgtcaccggaactgttctttgtgaagcttgccaccgccgccgccgccgccgcgatccacaacctcaacttcgttcatggcctatatcaggggctttggtgtctgttaaatgtgaaactccgtgtaagaccaaatcaagtacaacacgagctacaaccgatgaatacggagatttcatgatcgatcttccgtcccac

SEQ ID NO: 199788 - DNA, 489 bp, Gossypium hirsutum
ttcactcgtccgctttcattttctctacttgggcaggaaaacagcaatggcaagaatgaaacttatggcacttgctttagtaattttgatgacggggaattgctgcttggcaacaaatagaaaagttataaaagtagaagttgatgggctcaagcatgaacaaatcagtgtccatggccgtcagctgcttgatgatagtgggagtgacagagccagctatccatcgagcagtacaaacaaccatcattttaggcctaggcaggatttccccggtggtggtactggagatggaagcggttcaaataattagatcagtattgctacgcctatatggtcatgttatatggaataattatcgacaatgatactacgacgctgttacatgcttaattaggttttctctatatatgctgtgtgtgatctaattagcttctctttgtagctttgtactattgttctcttttgctattatacacgagatgttatagt

SEQ ID NO: 199789 - DNA, 746 bp, Gossypium hirsutum
ggggaaaaggaactcatagtagtttttggacaaaaatggctacttcggattctccaaacacttcagctggatctgatattgaaacaaaccctaatcctaattcttcaaaagccataatcctaacaccatccaattccaattcccctgccgtatgcctcttccaattcgcaggagactccgccgccggtgccttcatgggctccatctttggctacgggtcaggattgattaaaaagaaaggctttaaagggtcctttgtgggaggcaggatcttacgccaagacatttgcagttttgtccggcgttcacagtttggttgtttgctttttgaagaggcttcggggaaaagatgatgttattaatgccggtgtagccggatgctgcactggacttgctctaagtttcccaggtgcacctcaggcacttctacagagctgtctcacctttggggcattctcatttatcatcgaagggcttaacaagcagcagccagcattggcacattcattttctgcgagaaacaagagtgcacaccacaagggacctcgtcctttagcactacccctttctatccctattccggatgagctgaaaggagctttttcttcgttctgcaagtccttggtaaaaccaaataaaggtaggtttcctacaggtaactaagtagtaggtggaccatttttcatttttcctgttgtttgtagaattttgcaagtgttgagaatgtagactgaaagttttgtctg

SEQ ID NO: 199790 - DNA, 721 bp, Gossypium hirsutum
tttgtagggcttgtggacttcaatgtgctttaaaatgtatgccaagaaggacagatattgctgcgtggcagaaatctatagatagtatgtgctacaataagcttgctgagccagatgtcttacctgccaagtgtgatgatagtcttgaaccagattcagcatggtacactccactccgcccgtgtgttgtggtcccaaagccagaacttaagaagtcagccttagagtccctgcacaaagtggccagagaggttgcaagtcgcacctgagcgcatctcaaatgttcccggtgggagtagcactgctttaaagcatgatgacggcaagtggaaggtccgagccaagaactacaaaaagttactccctgcacttgggaccaatgagataaggaatgttatggacatgaatacagtttatggaggttttgctgcagctgttattgatgatcccctgtggaccatgaatgtggtgtcttcctacgctgccaacacactgcctgtggtctacgatcggggtcttattggaacttttcatgattggtgtgaagcattttcaacatatcctcgaacatatgatctccttcaccttgacggcctcttcacagctgagagccacaggtgtgacatgaagtatgtactgttggagatggaccgaatcctgcgacccaagggttatgcattaatacgggaatcaagctattttattgatgcaatagccagca

SEQ ID NO: 199791 - DNA, 735 bp, Gossypium hirsutum
ttttaaatgacgtaaatttgaagaaggaaacgttgaaattcgaagctgatgagctgaatcctgggaagttcttggtttctttcacgtttgatgctactgttgctggaaggattactgttattttctttgcaaaagaaggtgaagactgcaatctgacggcaatgaaggaaagtattctacccccagtaattgtgcctttcgaacaaggtctaggacagaagtttagactgccgtctggaacagggatcgatttctctatgtttgaggagtcggaattactgaaaatagatgaagtggatatctatcatctggctgtgaaagcagaggcattgcctcttaaccaaaatgtgtcagatggaaaccaggagtcaggagccatgaattctcagataactcaggcggtgtttgagaaggagatgggtgaataccagaccagagtagtgaaacagattctgtgggtgaatgggaggaggtatgagctgcaagaaatatatgggatcggaaattcagttgacaatgatgttgatccaaatgatagtggaaaagaatgcgttatttgcctttcagaacctcgggacactactgttcttccctgcaggcacatgtgcatgtgcagctcttgtgcaaaggttttgagatgccagacgaatcggtgcccaatctgtaggcaaccggttgagaggcttttggagataaaggtcaacaatggccctgatgaatgagatgagaacatgt

SEQ ID NO: 199792 - DNA, 766 bp, Gossypium hirsutum
gcgtccattcgtccggtttttctttttttctttatttttaagtgtcaaaccccacaattgttgtggtaaacattgtgaagaaaaatggaaaaacaaatgatatttgcatgggcaatgatattttgccttgccatggcaccagtgtatggccaatactactccagaactgttaaggcaggtcctcgggtggaaaagattacccacctccacttctactaccacgacattcgcagtggcaataaccctactgcattcctgatagccagtctcaacatcacccaggacccgccctcatatggcaccttgtttgcaatggatgatcctctaactacagagtttgaactaacatccacgctcgtcggaaatgcccaagggctctacttagcattgagtcgagaccttaccaagttttctgcagtcttttacgctgactttacgtttaccactggcaggtacaacggcagctccttcagtttattctcacgatttccccccacagatgttgttcctgcccctggcacaattcgtgaaatggcaatagtgggagggacaggtaaatttaggatggccacaggctttgccctcctgcgacccacttcttcaagcgacacggtcggggatgctaatgtcgaattcaatgttactttgtaccattattaaacccaattacaaaatattgaaatccaacgaataagatgaataaaatgttgtattcctaaagattatatttaatgtattgtcagtaatcaataaatcataattcatc

SEQ ID NO: 199793 - DNA, 439 bp, Gossypium hirsutum
ctttaatgagggtggtgcagttggtgaaagaccaggcatccaagttggaaactaatctaaggtccctcaaagattcttcttcttcttcttcttcttcatctaagcaagcgaggcgtttctctaacacggtggattccgggactgtgaaggcggctgccgccacaaatgacaggttgaagcaagcggaggagtcattgaggaccgtcatgttcttgagttgttggggtcctaactcatgaaccccccctcccttattttatgttaaaagtacaagggaattgtataaattacttggatgtacatacacatcttttttttttaatcttatatatgaattatatagataatagatatgcaattgtttcaggattttgcatgaggttttttttatgtctatatttcctctaataataacaagtaatgctttagattatgtttt

SEQ ID NO: 199794 - DNA, 438 bp, Gossypium hirsutum
gcgggaaaacttcatggttcccaaccttgaccggggcttatggcagtactcccgtcatccaaactactttggagagcagttatggtggtgggggctggttgtatttgcatggaacttgggtcatggatggacctttgttgggtctttgatcaacagtatgtgcttagcttatgttactgtgctcgcggagcaacggatgttgaagcacgagtatagagctgaagcatacaggttataccaaaagacaacctcagtgtgggtaccttggttcagatcttctgctatggcagtgaaggataaggatacttgatctgactatgtttgtttcattgaaacaaacatcttgtgttagttgttatcctttttagctatctatttgagagggggaaaaaatgggtcttaatctgtggtagtaaagagagatccctctatcgctat

SEQ ID NO: 199795 - DNA, 708 bp, Gossypium hirsutum
ttcgtcttgttaatcgtgagcactggttcttagacgctcttaacagtggagccaatgcatctggtctcgaacgcggccgttccgagatttcctcgattgtatcggaggtacccgattatttattcgggttggataactccgatgaggtccaaccccgtggcccgaaattaagtatacgtcagctcttgcatgagaatgtctcggtttcggacccgggttcgccggccccggttgtttcttcatcgcccttttgttccacctcatcagctccagttgttgtaccttcaatgccagatctgccaccggttaagactaaaccagataaccccgaaccgggttttgagtcaaagcagaatcaaacagagagcttggtggagcaacccgttttgcagccaacgacatattcgggtagtcctatgtggcactatattccgggttctcattactctgtacctgccgctcaacaaatacctgtatattatgttccgggtccagttcaatccggaaatccgcaggttcaacctgttcaaatccggccacagtatgtccagcagtatccaatgtcaacgggtcaaataccggttgggtatcatcagccggttgctggtgtgggtcaagcatacaggccagtaacggcacgtggacccttatgatcccgcataagagtggctccgatggtgtgaaacaacctatatattatggagttag

SEQ ID NO: 199796 - DNA, 771 bp, Gossypium hirsutum
ttggagttgaactatcaacagataatgtcattgctgaatatttctttgacaggttcgatctcaaactccacacagccggaattattgctgctacctttggtatggcaaacattgttgctcgacccttcggtggttatgcttcggacaaagcagcccagttgtttgggatgagaggcaggctgtgggtcctatggatcctgcaaacatgggaggtgtcttctgcatctggctaggccgtgccgatacacttcccgttgctgtcttggcaatgatcctcttctccattggagctcaagctgcgtgcggagccacttttgggatcatcccattcatttcacgacgatctttgggaatcatttcaggtctaacaggtgcaggtggaaacttcgggtccggactgacgcagctaatattcttctcaacctcaagattttccacagcggcaggtcttacttggatgggagtcatgatcgtggcttgcactcttcccgtgagcctggttcatttcccccagtggggtagcatgtttcttccgccttcaaaagatgaaaacaaatccaccgaagaacattactactcctcagagtggaacgaggacgaaaagaaacagggcaagcactccgcaagtctcaagtttgccgagaacagccggtctgagcgtggaaagcgcgtggactcagcaccaaccccgcccaatgcaacaccgtcccaggtttaacctatccaggcgtgaaacactagattttacaaattaatctttcttgttgaata

SEQ ID NO: 199797 - DNA, 369 bp, Gossypium hirsutum
ctttcattagcaatggcaattttggggttttttgcagttgtgttactcgttcaagtcggcaactttgttgatggctctccatggaatcatcatcatagtcatcggccccatcgtggatatcatggaccatggatcaatgctcatgccactttctatggaggtggtgatgcgtctggaacaatgggtggagcatgtgggtatggaaacctgcatagccaaggatatggggttaatacaccagcattgagcagtgcattgtttgacaatggaatgagctgtggtgcatgttatgagctgaggtgcgcgaatgacccgcaatggtgcttgcctggttccattgtggtcaccgccactaacttctgcccaccc

SEQ ID NO: 199798 - DNA, 475 bp, Gossypium hirsutum
tgtttaattcacctcatgagccttaagctgtcgcgatgcataagcgaccaccttgccctcttgcatcagtacgcaacctaaccccacatgcgacgcatcagctgtatacagtaaagtccttcccagacaccggttgaatcaacactggcgcttcggtcaatacctttgtcaaccgatcaaaagctttttgctgtttctcggtccagacaaatggtactcctttccttatgagttttgtcaagggtgccgccatcaccgagaaaccctccacaaaccttctgtagtaacctgctaaccctagaaaactctgaatttccgataccgacctaggtggcttccattccagaattgcatcaattttacgaggatccaccttaatcccttcggcagagaccacatgccctaggaaggttacctccttcaaccagaattcacacttgttgaatttcgcatagagctccttttcccttaacac

SEQ ID NO: 199799 - DNA, 859 bp, Gossypium hirsutum
tcttggttttcgggttcaatgcaacaaatgggcaatcattgttcgattactgctgggagaaatccccgagaggactgtttttatgcagaaaggcatggagaaagcattgaggccatactttgaactgacaaatgctgtccgcattggtgatttggagcttttcagatctggggctgagaagttctcaactactttcagttcagaccggacccataacttgattgtcaggctgcggcataatgtcattcggactgggctacgcaacataagtatctcatattctcgcatcgcactggccgatgttgcgaagaagcttagattggactctgttgctgatgctgagagcatagtagccaaggcaatcagagatggagctatcgatgcgacattggatcattcaaatggatgtatgctgtccaaggagacgggtgacatctactctacaactgagcctcaaacggcattcaactctaggattgctttctgcctcaatatgcataacgatgctgtgcgtgcacttcggttcccaccaaactcccacaaggagaaagaaagtgctgagaagaggagagaaagacaacaacaggagcaagagcttgcaaagcacattgcagaggaagatgacgacgagttttagtgattaaaattcgaaaagttactttatccaccatatgatggtttgatcaagttgtgcattttcctttttaaaagtgccctagtagaactagaaacgcttttggttttattttcgcaatagctactatttccattgataacattgctttacagtcctacaccatggagttgcactttatttgtatttttattttcctcccttgatttcaagttttattccttg

SEQ ID NO: 199800 - DNA, 743 bp, Gossypium hirsutum
atacaaattcttcaaataagggttcataaaaacacccacttccattctcatataaatgtcataccagtgattttattaattcagcaatattatttcatttcaatttattattcttaattatattttcttttgggatcccaagttcccaacacttttgttttttgtgctctttatcttgtcgaagttttaaaatggctgcgcccaggactgtgttgagggacaaagaaagtgccgcagcggcattgttgaacaacagcatcaaggaagatgacgattccccatctgggaaaaggttaaaatcggaaaagtttcacgtctcgaggtgagaattggctgacttttctggggttttcttgattttatctacgggtttgttctgcatctacctttctatgcccgcctccgagtacgggaaactcaggatcccgcgttccatctccgatctgcgcttgctgaaagataatattgcaacatatgcaagtgattatccaacacaattcattttgggttactgctcgacttatatcttcatgcaaacctttatgattcctggaacaattttcatgtctttgctagctggagctctctttggtgtaaaaggcgttttcttggttgtctttaatgccacagctggagcatgctcttgcttttttctgtcaaagctgataggcaggcctttggttagttggttgtggcctgataaattaagattttttcaagctgagattgctaagcgaagggac

SEQ ID NO: 199801 - DNA, 515 bp, Gossypium hirsutum
tccacgcgtccgcttaattagtccttcagttttgttattgccatttacatcgttaatcaatccttcttaacacttaattatggcagaaacccgtagctgtgaatttggaatttccggaatgaagagagcggcagcggctgatagctttgaagtggatgatgagatattcgtggccaagaaatctatgttgccaacactggcagtggcaccagcagcatgggaaaatgaccctgctgcctccttagccggtctgcgccatgaattcggtgagcatggtggcattaacatgtccattgaagcttccgccaccttcaccgtcatggaacctgagacaatgcgccgcatgttcactggcgaactgggccccgatcgtgatttcttcatttatagtcgtcacttcaaccccaccgtcttaaatctcggtcgtcaggtggcagccctagaaggaaccgaagctgcctattgcactgctagtggcatggctgctatatcatcagtgatgttgcaactctgca

SEQ ID NO: 199802 - DNA, 695 bp, Gossypium hirsutum
gacattcttagtgattgctgatctgaaaactcatgagaagcattgtggtaaggataagtggctttgttcttgcggcaccacgttttcaaggaaagataagctgtttgggcatatcactcttttccaaggtcacactccagccattccttcagatgaaattaaagtagcacccgccggaacatctgatggagccactaataaggttggaagcgtgaatttcaacctttcctcttatgtttctagtgaaagtgaggttcaaagtagtagtatggacattaaaggggggattgatgatgctgttggttacttctcaccgttgagctttgatacatgtaattttggtgggtttcatgagttccctcgaccaccatttgatgactcatagagttcatttgcatttctactttctaggtcctgcaattacagtcagaaaagtgtataagagttaagcccttgattgtggcttattccttactttatcagtagggaatcagggattgtgttaatattgtttggaatggcatccctatgaacttggatgctctaataattgtctaaccttgtagatcactttttatttactgttaaaaattacgtaatatatctgagtatatatatatatcttcattgacataaatattttgagggcttgatcctagtctcttagtaataacataattattgtgcccgtttcc

SEQ ID NO: 199803 - DNA, 247 bp, Gossypium hirsutum
ctcactcttttttctgccttaaaagacgagacctcaaattgcaggcttctgtttttttaaaaaaaaaaaaaaaaaagggcggccgcggcggacaagtcgcgggcgcctccctggagcgtaattcccaccgagcggcgggtagaatcctttgcagacgacttaaatacgcgacggggtattgtaagtggcagagtggccttgctgccacgatccactgagattcagccctttgtcgcttcgattcgtt

SEQ ID NO: 199804 - DNA, 703 bp, Gossypium hirsutum
tccacgcgtccgcccacgcgtccgggaagtgctcatggttgggatgttttgttttacatattcagtttcttgaaagggatcatgcttttcacgctcatcgttttgatcggcaccggttggtcgtttttgaaaccttatttgcaggacaaagaaaagaaggttttaatgatcgtgattccacttcaagttgttgctaacatcgcccaagttgtcatcgatgaggcctccccatttggtcaagatagggcgacatggaagcaactgtttttgcttgttgatgttatttgttgctgcgctgtgttgttccctatcgtttggtcgattaagaacctgcgtgaggcggctcgaacggatgggaaagctgcggtgaatttgatgaaattgactctgtttaggcagtattacgttgtggtgatctgttatatttacttcactcgtgttgtggtttatgctttggagacgattacttcgtataagtatctatggaccgctgtgttggccggagaattggccactcttgccttttatgtgtttactgggtataaattcaagccagaggcgcataacccatattttgccatcgatgatgaagaggaagaggctgctgcagagcagttgaagcttgaagatgagtttgaattgtgaaaccaatcatcgagaacaatataaaatgattgaagttagcaaatacaattgggacatt

SEQ ID NO: 199805 - DNA, 482 bp, Gossypium hirsutum
ttttcgcgtccggagcatctccttatcctggtcaaaattctttacaacgggtcgtcattttcggagacatgggaaaggctgaagctgatggttccaatgagtacaatgatttccagcatggctctctaaacactacaaagcagcttattagagacttgaataacattgatatagccttcctaattggagacatatgttatgcaaatgggtacctttcacaatgggaccaatttactgcacacgttgagccgattgcttcaaccgttcctttcatgattgcaagtggtaaccatgagcgtgactggccgggaagtggatccttctacgggaacaaggattccgggggagaatgtggcgtgttggcggagactatgttttatgtccctactgaaaacagagcaaagttctggtactccacagactacggcatgttccggttctgtgtagctgacacggaacatgattggagggaagggacagag

SEQ ID NO: 199806 - DNA, 395 bp, Gossypium hirsutum
agcaatactaagctaattctcctccatccttatatccaaaaacaaggaagctcaaacagattatggctccttgcttttgtctccttcttcaccatagctttccttctaactcttatatacaccagagagtcgattactactaaaactactgccccaagcacaactgtcaccggccctgcaggctccgccattggtggtccgccgttgccaaacaccgtggtcaacaccctcctccactatgcttcaaaatccaacgatagttaccacatggcatactcagagctcaagccaatctccgatgtgctgaggaaatgttcttccccttgcaacttccttgttttcggtctaacacatgaaacccttctctggaagtccgtgaaccacatcggacgcac

SEQ ID NO: 199807 - DNA, 911 bp, Gossypium hirsutum
  unsure (1)..(911): unsure at all n locations
ataacaactcatttattcctggtgttgtgtttggtgacttggaggctggcgccgtcttttcttcttcaatagagtcagaatgtcttacgcttacctcttcagggacataatcatcggtgacactggagtggggaaatcatgcctcctccttcagttcaccgacagacgggttcagccggtacatgatcttaccatcgggggtgaattccgggccaggatgatcaccatcgatgacaaacccattaagctgcgtatctgggacaccgcaggtcaagaatcctttagatccatcacaagatcctactacagaggagctgctggtgccctgcttgtctatgatatcaccaggagggaaacttttaatcacttggctagctggttggaggatgccagacagcacgctaatgctaacatgactattatgctgattggtaataagtgtgaccttgctcatagaagggctgtaaccaccgaggaaggccagcaattcgccaaggaccatggtttgatcttcatggaggcctctgctaaaactgctcaaatggttgaagaggcatttataaaaactgcttcaaccatatacaccagaatacagaggggttttttngatgtctaaatgaggttctaacctcttcaacccgtgctcacatctcctacatagattcttgaatttaatcacatttgcgcatactgcgctctaaaagagttgttgtgttagaggttatgaccttgtagaatctcttgaaacctgagggttgaactatagcgcttctattttaaatttttaacctaattaattttaaaggaggtcaaaactttttttaagctacatctactagnatactactttatccttgttgggatagagagattatttgagggtaaacctgataaaatcgcttttttttgag

SEQ ID NO: 199808 - DNA, 960 bp, Gossypium hirsutum
cccacgcgttcgagaatttactgataaagcagagctaagaaacgaagaaatgttgaggtccattgcaaaacgagccacgctcttaaagccacgagctgattcacctataatccctcccctcatctcttcccaatccaagctctattcttccaagaacgcaaaggcctcccacgggaaatccaagaaaggcgatcccaagtccaagaccaagtccaagaacggcggttcctcttcctccgttgcctcctccactggtgatgacttcgattctgccggcgccgacgacttcgaggctgctcgagcccgccgcctggtcgaggacgagaatgacccttctctagatgtgggacccaatggacgtcccttgttcacttccactccctcactttccctgctcactcggaaagactgttgctcgtacatgaagttcagtgagaagggattgaaccaagtgttgccggagggtttgccgacggggatggtgacggagttcaaggagtcgatgaggccggcactccttgttcgacagagtttcttggatcttcgtgataattttagacgcattgtagatcctccaatgtggtcttctaatgctaaagctcctaaagcgagaaagcaaatagttttggacggaccggttagctgcgggaagagtattgcgcttgcaatgcttgtgcattgggctcgtgatgagggttggcttgttctctatgctcctaaaggtcgtgaatggacgcatggaggatgtttctataaaaattccgaaacaggtttttgggacacacctgtacaggctgaaaatatcctcaaggattttctgaaatacaatgaatcacgcctgcaacaattgccatgccaaatttttgatcctattccattgggagaaggtgctggtgtcggatttatgaaaggaattgaatccatggccctccctgaagagtcaacattgtatgaactgcc

SEQ ID NO: 199809 - DNA, 552 bp, Gossypium hirsutum
gtttcatgtaatgttcgcccacaaaccgcaccatgtgcaccatacttgctatgacaagattcaaggatgcgatttacttgaaggtgaatggggaaaagcttggtaccattattcagtctggcgttatgtgcatgatggaaaggctaaagtctcaaagcagctagttgaagcgatagatcctagtaagaacttgatcactttcagagagatagaaggagatcaactgaaagagtataagagctttgtagccacgcttcaagcttcgcctaagaacaagggtagtggcagcatagtgcactggactgtggaatacgagaaactgcaccacgggattgcacatcccgagactctgttgcaattcttggtggatgcctccaaggacattgacgctcacctcacccaaccaaactaaaggatcgattaagaacatccgatgtccgtactgctcactactactacctgaagcagtactaatctaattaagaataaattgacagctaccttacttctttgtttcaattcgaatatgtatacacgtttggatcaatatgc

SEQ ID NO: 199810 - DNA, 501 bp, Gossypium hirsutum
tttacgcgtccgcccacgcgtccggaggaaaaaatgttttctgctagggtttttaatcccagcccccactgccgccgttctcaaacgaaccaacctccggcgttcgaaggcgcttcgggtctcagcccttcgccaggctcccgatttggagcgatgcgagtgtaggtttcaacggggaagcttctgagtccgcgattgcaggagttcgtggagtgtacgacgcgaggaaaaggggtggttccgcaacgtgcgccgatcagatctgctggagcgcgtcgtaggggctgttgcggcgctgaggcgaatgcatctagggtttcggtgttttggggtttgggtaattgggcctaggctagtagttttgctgtattgggccatgtcctgttttgtgcgggcttgggttatttttgtttgtttttattattttaaaagctcgggcaaaagggctattacaagcctgattctaaatatatttttttttacacagagaaacaagcaatc

SEQ ID NO: 199811 - DNA, 635 bp, Gossypium hirsutum
cacgcgtccgcccacgcgtccgttttcagctccctttttgtctctgcatttttcctagtgtaaaaaaagaaagttagatatgggtaaggatatagagagtagtgtagagcaagggtcaggcaaggactaccatgatccgccaccagcaccattgattgatgctgaagagctgactaaatggtcgttttacagagcagtcattgctgagttcattgctacccttctcttcttgtatgtcacagtattgactgtgattggttacaaggtccaaaccgatcctctcaagaacacagttgaccctgactgtggtggtgttggtatcctgggtattgcttgggcctttggtggcatgatctttattcttgtttactgcactgctggtatctctggaggacatatcaacccggctgtgacctttggactgttcttaggacgaaaggtatcactgatccgagccatcatgtacatggtggctcagtgcttgggtgccatatgcgggtgtggattggtcaaagctttccaaaagacttactacaacaactatggaggtggtgctaatgagctccaaagtgggttcaacaagggcaccggtttaggtgctgagatcattggtacctttgttcttgtctacaccg

SEQ ID NO: 199812 - DNA, 629 bp, Gossypium hirsutum
gcttgttctttatgtcaaaaagtgcaacaaagcttggtttctgctgcttctggacatgttttggccaaggatgatgattctcctgttactattgcagactggagcgtccaagcaactgttagttggctgctttccgaattcttggagggttggagtgtgtccattgttgctgaagaagatgtccaaacactctccaagcctgaagcggctagtttactttcagctgttgtcaatactgtgaatgaatgcttagctgaagcaccaaagtatggtcttcagtgtccaaagaaagttctcgggacttcacaaatccttgaggctatcagtcggtgtaactcaactgggggcccaactggaagacattgggtgcttgaccctgttgatgggacattgggatttgtacgtggtgaccagtatgctgtagcactaggcttgattgaagatgggaagctagttcttggagttcttgggtgtcctaattaccctatgagaaaggaattgttgaattataatcatcaatgcaaccaaattaagccgacgagtccaccatcttcagatatttggcaaaaaggatgtgtgatgtatgcaagtaaaagaactggtcaggcatggatgcaacctttgatcct

SEQ ID NO: 199813 - DNA, 472 bp, Gossypium hirsutum
ttgtttaccacattgttttattcttctttctgctgctttcttcttctgtccagattcaagctagggagagcaagttctttagcaagatcttccaccttggggccaaaatttctcctctagtggtacctacaccaacgccagcaccagcatcggcgccggtactagcaccgacagtggcacctgcaacggcaccggctaacattggtatccaagatccttattatggcctctatggtcatggctctggcatgtttccccctgcaaaagagggtgtcaccactagcaacactcccaccgcttttgaaaacgatcttttcgccgaggaacttgcggatgaaaaatacgaaagcggctacgagaaaaacaactactattacaacaacaacaacaacaacaatggctacactctcagcagctacaacaacaatggctacagcgggcactacaacaccaatggctacaatgacaacta

SEQ ID NO: 199814 - DNA, 472 bp, Gossypium hirsutum
tgttgtgttgactaatactagtgtttccggtacggggtatattgacggtcatcttgctgtttatcaaatagatagagttcttcagcctttacagatattcgatcctagacctccggcaccagcgcctgctccggcgaaatcgaagaagaagaaagatgatgatgtggctgatagtcctgctgatgattctactgataattctaaagctgtgaggttcactatgggaaacaatgttggtttatttggggttactgccatagtacttattgcattaatttctttgtgattatagtaaaataaaaattttaaatatgggattttgaggggaaaaatatggtgagattgagtgcatgtttttttgtttttgtttttttttatattttgcgtttttaaaaaaaatattattatcctttaaatttctgttttttaccatatttgtatcatataaatagtactgtcacaagagttaatt

SEQ ID NO: 199815 - DNA, 771 bp, Gossypium hirsutum
caacgcagttggttctaaaggcccacaaagaggctgtcaattccttaagtgggaatggttctgcaaagttgggtacggttgcaactgtagttgctgctgcaaattcaacagccagggaatgttctaaagaaattgaagcggcaatgcagatatctttgagaaatgccttaggattggtgacaaatgtacccactgatggtccaatggatgaccttacaattatgaaggagacactaagagtcaaggatgaggaattgcagaatttggctcgagatcttcgggcccgtgattcaacaataagagaaatagcagacaaactttcagagactgctgaagctgctgaatctgcagcatctgcagctcatataatggatgaacaaagaagaatagcttgtgcagaaattgagcgcttaacaaaagattcagaaaatcaaaaggaagctttcatgttaaagctgagggagtctgaagaaaagcttgggtccctaagtaaagaaagagatcaattgattaggcagagagacactgccatgcaggaggcacatatgtggcgtactgagcttgcaaaagctcgagagagtgctgtgatattagaagcagcagttgtgagagcagaagagaaggtcagagttactgaaatggatgctgaggcaagaataaaagatgcagcacagaaagaggctgctgcggtgaaggaaaagcaagaacttcttgcttatgtgaatgtcttacaggcacatcttcaaagacaacaagagtgacacaaagcaa

SEQ ID NO: 199816 - DNA, 498 bp, Gossypium hirsutum
cccacgcgttcgcccacccgtcgcgtcggtgtgtgtgcaaaaatggggttaattcccatgagaaacatacacattcttcttgtttttacggtgacaatagtactccttgaaacaaatggttgcaaagctgcttttctagtgaagagcaacttcagctacaagtgcaaaggccgtctcaacgaatgcaggatcgctgaggctttggactcggagctagagttggagttggacatggtgatgaattctaacgttgttagaatccttcagagcagtaacacgccggtaaccagtaacacgggaaaccggaatacgccggtgcaacagacttgcccgagtcctcagtatgctagttgtcttgccacaggaggtagagctaattgtaggggaacttactgccgcggctaatccatcttttgtatcattcctcttgttattatatgggcaaatgctaaatgagccaagaatgatccaaaatcatgcgtagttgtattactttat

SEQ ID NO: 199817 - DNA, 511 bp, Gossypium hirsutum
tcggttaaaatccctaaatttttttttcttttaggtgcaagacctttgcttcaatggctgatgcaggtggttcagccgtctctaagaggatgtggtgctcggttcccgaaagactccagctgcatatggccatgttggccttgcagttcggatatgcagggttccatgttgtttctcgagctgcccttaacatgggcgttagcaaactcgtcttcccagtctacagaaacatcattgctttccttctcctcctcccatttgcatatttcctcgaaaagaaggaccgaccagccattacactaaattttcttttacagttcttcctcttagctcttgtcgggataacagcaaatcaaggtttctatttgcttggtttggataacacatcaccaacctttgcatctgcaatacaaaactcagtccccgccattacttttctaatggctgctttgcttaggatagaaaaagtgaggcttgatcgaaaagatgggatatcaaaggtaataggaac

SEQ ID NO: 199818 - DNA, 598 bp, Gossypium hirsutum
caattgttggacctaacaggctaatcaaagagtctgagatcccaaatcttccatatcttagagctgtcataagagaaactctaaggcttcatccttcagctcccttgatcatcagggaatgtggtgaagattgtactgtgaatgggttcatggtgaaagctaagacccgagtactggtcaactgctatgctgtcatgagagaccctgattcgtggaaaatccctgatgaattcgatcctgaaaggttcttagacagctctgatgagaaaatcggagagcatcaaaatggaattcaagggtcaaaactttaggttccttccattcgggagtggtcgaagaggatgcccaggagcttcacttgccatgttggtgatgcatgcagcagtagggtcgttggttcagtgctttgattgggaagtgaagggtggtgagaaagttaatttaaacccagggccagggttcggttcagaaatggctcaaccacttgtgtgctaccctattctacgttttaatcccttctaagcaacaccatatttgtgcttgaaatctgtagctgctgagcaaataaaataaatgtaaagcctgtagcttacatctt

SEQ ID NO: 199819 - DNA, 492 bp, Gossypium hirsutum
cccacttttcttttcttattctcttgttattctcaattcttacacttgaacagcaaaagaaatcactttcactttcagttcagttctactgaggtttccatctctgaggacatggagagtcagagaggtcctcttcttagctgggtttacttctgtcaaggaaagacaatggaagagcttaggtattctcttttctatacgactatggagctggaacagacaaggatggcagttcaggaagagctaagaaagagagatgatcaattaattcaactcaaggagttgctaagcaaggcaataagagagagggatgaagcacaggagaaatgccaaagactttttcttgagaaactcctgcttcatcaactgcagcagcaacaacaaaaacagcaagtttctcctctctctggagtttctggcgttgaggatgaacgcataaaaggaatagactccaacaatggcttctcatcatctgactgtgagggaagcatc

SEQ ID NO: 199820 - DNA, 514 bp, Gossypium hirsutum
gcaattagaaaaaatcactgcgcagctagggaaatacggcaagatcgaaggcaaattcgttttctactggttccaaaaccacaaagcacgcgagagacagaagatgaagcgcatcagccttggccttaccaattgtcccagaaactcacctcccattactaccataactttggagactaggatggaaataatggaaagatcagatgaggatagtccatataagaggaagtgcaagagctggtcatttgagtacttggatgaacaaagcatatccccatgtaaagagcaggaaaacagaactctggagctattcccattgcacccggaaggcagatgaagggtttgaaaataaaacaaatagacccaaaccaaaaagaagaaaaaaaagaaagctgttagaaaaccaaaactctgttcccattatgatctgctttgaagtagatgatgatgatgatatgtgctagatttttttctttctttttttttcttcttttggttcgggaaagaagaaaga

SEQ ID NO: 199821 - DNA, 893 bp, Gossypium hirsutum
ttccgataaacttgatgacactaaaggtgaaccggcgaatttagttgctgttgactcccctcgagtagaacatgaaccatgcagattatccccagaagcctctcctaggagccatatgacggttccggaatcccaaggaacgccttctagtcaagtatctataaaaagtaaaaagaagaaaactgaaaagagcggtcaaaagcgcaagtctttttctactgctaagggttctccaactgcggatcgtgatagtggtgccaaaagtagtacggaacaaccatccaaagatcaaagaagcgggaagagacacaattctttcggttcaacaaaacccgataacatcgatgaggaaccaagagatagtaacagtagcatttctcttccccgtttcatgcaagccacggaatctgcaagagctaaagttaatgctaataactcaccgagatcaagtcccgacgtgcaagatggagatctttatatcaagaagagacgttccttacccggtgctaatgggaagcagcattctccaagaatccaaccatcgtcgggtgcaaaaggaaatgatagaaaatggcaaaggtgaaggcttgtatgcgaagcaaccgtattaacatgttatcatggtaatcgacatttcggatcacaaaccagtgcagattgttggtctttactatctagttttatatatatacacacacacatatatatatacatattatcatgtataactttctgcatggatggtatgcttgtatgtttggttcaacagtgtattgtgtgatattattgctttcctgcaccaagtttttggaatgtcttttatgagtattggtcataaagtctttgaaactatcagacgtagatcagattataataacgttcatgcagtaagt

SEQ ID NO: 199822 - DNA, 386 bp, Gossypium hirsutum
  unsure (1)..(386): unsure at all n locations
tcgtaggctcttctacgctgcgcttcctctccgggtatgtgttcattggccctgtgctcgactttgttggctccatcaccatcgtcactttgctttacaaccttgacttcgtgtttgggtttaggagaaacaagcaaattgatgttggagactgtgaatcagggtgatcctactcgtacatgtaggctttaatgccctagcaaatgccatgcatgcggtactagattccttggtttgcttctctaattataagtatacgtgtgaagtgaagcaattcccgttgcttcactaataattaagtatgaaccccccccccccaatttgtaatgcaaatgatgaagtatatagctagtctctagctagcaactgagagcattcattcaana

SEQ ID NO: 199823 - DNA, 811 bp, Gossypium hirsutum
  unsure (1)..(811): unsure at all n locations
ttaccaaaaaatgaattcccagtcctggctggaattcctcttgtttctctccctttcctccctattcctttccctttcctcctccactaacgacaccgacaccctcactctcttccgccgtcaagccgacactcacggcaacctcatctccaactggacaggccgcgacgcttgttcctccgcctggcacggcgtcgtttgttcctcaaccggtcgtgtcatttccctctcactaccttccctttcccttcgtggtcccattgctgctctttctcttctagaccaacttcgtatcctcgaccttcaaaacaatcgtttgaacggcaccgtctcaccgttaactaattgttctaaccttaaactagtttatctttccgataatgatttctccggagacatcccaccggaaatttcgcgtctcaaaagggtgctccgacttgatttatcaaacaacaacatacgaggcaatgttcctaaagaaatctctggtttgaaacggcttattactctcaggcttcaaaacaatgcattaaccggcgaaatcccagatttcttttcttcttttaaaagcttaaaagaacttaatttaaccaataatgagtttttcgggcggttacctggaagtttactgaaaaaattcagtgaaaaaagctttgtaggtaacgaaggtctttgtggatcaaacccatttccggtttgttcttttacaggttctcctccgttggatacgccgacccaaacagttccatcgaacccaagttcaatgccgagaacacctataattgaacangagagacccaaagcacataaa

SEQ ID NO: 199824 - DNA, 632 bp, Gossypium hirsutum
cctacgcgtccgcccacgcgtccgcggacgcgtgggccagttgtgccggactcaccgcacctgctaattccgcaaccatgatgtcctcaaacatatccgattggagctcccctgatgggaaacttgattggggcattcaaggagatgagttaaacaagcttaggaagtcagcttccttcgggttccgtaacaccccaacaccaaccccaaccccaaccccatccatcatcgacgagccagatgtctcgtgggtccattccctcgttaaagatgttacacccgcctccagcggctcgatgcagcaacagcagcaacaatacaacatcggtaaaggtgttcgagaaaggcttccaccatgggtggaacaaatgtacatagaacaagagcagatggtagcataaaagagaccctttttgctcattgctttaaatctaacttccatcaagtttgtaatagtaattccgatagtagcgttagtcgacggtagaatactccgatcggtcggtccacgaagtaaaaagaaaaattacatgggcaggaaaggtttaagttactgctcatgctttagaggttttaggagaaagatgaaaactaagcaaaaacaaaataaatttattgattagttcatattc

SEQ ID NO: 199825 - DNA, 433 bp, Gossypium hirsutum
ttgatcagtgcagagcagagagagaacgagcgagagattggggaagccacttgtatcaacaggggaattcttcaagaggagggacgagtggaggaagcatccgatgctcagcaatcagctccgccacgccacccctggcctaggcatcgccctcgttgccttcggcatttatctggtcggggagcaggtctacaacaggatttatgctccttcctcctctcatcatcaccaacaacaatcttcttctcactcccattgagatcaggtagatgctctatggaaagaacacagtttggacatggtcatgtttcagtttccctctgtaggttgctgtaataagcttcgtactgacataaaacggacttgcttcaagtttgattattgaaaccttgtattggagctattctatggatgctttatctgtttcctcctc

SEQ ID NO: 199826 - DNA, 535 bp, Gossypium hirsutum
gttggccaggctcaacttcccccacctcaagcgccagggagctcatatttctggagaatttggtgactacaagcccctccattctgcagttgatgcaaagctccaagccatctgccagagcctacagaaacatgaattcaggaaaggcctgttctgttcacgattcaaagcccaaggttgagtttgattaccctgtgaagcgtgaggagtttgatcagtctccaagatttgctagtcctaaagttgagatgaactccctgtcatcatcatcatcctcatccccatccccggatttatccgatgagtcattggcaggatcttcttcaccagaatctgatatcactttcttcgatttctctgattcaaagtgggatgacaacgaacttttcggtttggaaaagtacccttcagtggaacttgattgggaagccatcagggaactatctgagtcttacaagaaaaaaaaaattacagctactatcatgtaatcttattgcaatttatcaggtcaagtatcttttgtttggccatgtag

SEQ ID NO: 199827 - DNA, 401 bp, Gossypium hirsutum
  unsure (1)..(401): unsure at all n locations
ctttatttgaaagaccgccctcgtaatctcgatttctccgtagacccgacagaaaaaggtcaaaggcgagactatctctagcgatcaaatatgttcaggctttacaaaggtttcaaggagctgttagcttcctctgcaacggcgtcggtaccgtcgacagcagccaagttttatgctgctgctgctgcgaaatcagcttctccaaaagtggctcagaaaactccgaaaaagccgaccgcttcaaaacccaagactaaaaaaccagctgctcttcgatccgagactcgacccactgggatttctaaagttacccccggtttctcctgctttgggacagttccttggagcgcaacaggtntcccgtacttaagctgtaagcagattctggtcctatatcaaat

SEQ ID NO: 199828 - DNA, 543 bp, Gossypium hirsutum
ttcacgcgtccgcccacgcgtccgcccacgcgtccgcccacgcgtccggtacaatctaagtctccctgtgagaaaatggcatcctaccaaatcttagctttcgcagctttgttcttgatcttgttacccgtagccgtcaatggagatttaggtgacttatctcctgctctatctcctttctatgataggttgtgtgatgatgttgattgtggaaagggaacatgcaaagcggacataagctaccctttgaactacatctgtgagtgtgatgctggttggaaaagaactcaagacgacagtgatgatgatgatgatcataagtttctgccatgcgttattcccaactgcactcttgactactcttgtcaaccagctcctcctccagtacctcagcgagaagttcctcgcaattcatctttatttgatccttgctattgggcatactgtggagaaggaacctgcaacaaaactgcaacatacaagtacgtatgcgaatgcagatctgggttttccaatcttctcaataggacatactttccttgc

SEQ ID NO: 199829 - DNA, 503 bp, Gossypium hirsutum
tgaagttttaaacttttatttatcattcaaatagctagatttcacggttcattcatcagctagatgaactagctaacggaaagcacagaatccagcaaacgacgaatactgggaaccatgacttcagccttcgtgctcaaggcagagtgtattctccacactggtaaccaacaggacgatcagccaatgttgcagcgttttggaatagtgatagcaatttccggcttgatcccagaactcttagccgtgttggaaagcatgacggcgcacaggcatcgcggattctggcctattttcttcacctgttggcagcaactgctggaaactggagcgttagaatcttgtgcaaccattgcacaaggagctaacttccaggcttccctatcaggggatgatctcccacattcaccagctccttctgcaacattaagcaaggcaatgcctaaaatagcaagaaacaccagaaaacagccaatgaacttcatattctccggacgagtggg

SEQ ID NO: 199830 - DNA, 660 bp, Gossypium hirsutum
cttgtacatcccctgttaattttactctcaaaaatggctagctcaagtgtgggaatggtctgtcttttgctagtctcgtgcatggttgtgccgagcttggccaaagattacactgttggtgacacctctggttggacaactggtgtagattatagcacatggactaaagataagaccttcaaagttggcgatagccttgttttcaattacccgacaagccacacagtggatgaagtaagttcaagtgactacagtacatgcacggtgggaaacgcaatcacaacagataacagtggagcgaccaccgttgctctcaagaccgccgggacacattacttcatttgtggtgtgggtgggtcactgtgcgaatggaatgaaactttcagtcaaagtggagtcaggttcatcggcagcaccatctaagtcgccgtctaagtcaccatcggctgcttcgtcatcctcgccggcttccaccgataaaccatcgaccggcacaccatctactacaactacaacaactaaagccccggactcctcatcctcatggagtctctccccatttatggctgttgtcacaacttgtcttgcgttgttgggtttggtcatttcgtaataagctttcggcaaagagtgttggccagccatggtcaggatagaggc

SEQ ID NO: 199831 - DNA, 603 bp, Gossypium hirsutum
  unsure (1)..(603): unsure at all n locations
acgaaaacagccatcgccccatggccatgggagattccgtccctactcctcgcatatcagttcatcaagcttttggcggcggcttagttgctgatgtgctgttatggagaaaatggtgtggcggagttgtcatgctagcctcggcaaccacgttttggtgcctctttgaattagctggttatagtatcttgtctttcgtggccaatgtattgttactccttgttgttattctcttcttctgggccaaatctgcttcacttctcaacagacccttgccaccacttcctaatttggagatctctgaaaggactgctgggaagattgctgatgagttacaagtgtgggtcaatattgcattgtcgattgcgcatgacattacccttggcagaaatttgaaacttctttttaaggttggtgttgccttgtggtttgtttcttttattggtagtttccttancttcctcactgtggtctatatcggagttattcttantctatcagttcccgtgttatatgataagtatcaacaccacattgatgaaaagctttctgtaacaaacaaaatcatacagacgcagtacaggaaaatcgatgaaacagtaa

SEQ ID NO: 199832 - DNA, 565 bp, Gossypium hirsutum
gtcagtaattcgcgagccacgcaagaaatcccgcatttgggtcggtactttccctactccagaaatggcagctcgggcacacgacgtggccgctttaagtatcaaaggcaactcagccattctcaacttccctgaactcgccaactctttacctcgacccgtgtcattagcaccccgcgacgtccaagctgcggcagccaaagctgcccaaatgggaaacttggactccccatcaccatccactacatcatcatcttccacttcaacattgtcatcatcgtcatccctatcctctctggtttctcacttggacttatcttcagcgtcagacgaattaaccgagatagtggagctaccaagtctagggacaagttacgagtcggtggagttggggagtgagtttatattcgcaaactcgatggacggatggttttaccctccaccatggcttgaaagcatggaagactgtgagtacgtttgtaatcagttagtagtacccgagagcgttttacaaaacggcttcaaacaaggtttgctatgggattactagtactttttttctttt

SEQ ID NO: 199833 - DNA, 597 bp, Gossypium hirsutum
ctgttgttggtgactttgggttggctaaacttatggactacaaggatacccatgtaactactgctgtacgtggcacaattggacatattgctcctgagtatctctctactggaaaatcttcagagaaaactgatgtttttgggtatggtatcatgcttttggagcttataactggacagcgggcctttgatcttgctcgtcttgcaaatgatgatgatgtcatgttgcttgattgggtcaaaggacttctgaaggagaagaagctggaattgctagttgatcctgatctgcaaaccaattatgtagaaactgaggtagagcagttaatccaggttgctctgctatgcacacaaggttccccaatggaccggccaaagatgtcggaagtggttagaatgctggaaggtgatgggttggccgagagatgggatgagtggcagaaagttgaagttctacggcaggaggttgaacttgcccctcatcctaattctgattggatcgtggactcaactgacaatctgcatgctgttgagttatccggtccaaggtgactacggcataattacagtaaaggaaagtttttactagttatttttt

SEQ ID NO: 199834 - DNA, 881 bp, Gossypium hirsutum
cccattcttccgaacaaagtgaatcacttccagctggggctttgaccacttcatgcgagccagtagaactgaactacgagtgcttcaacagcagcaacaatagagtggctgacgccatccttttcccagaactgaaagatgggtcatcagatagtgactcaagtgctatcttgaatgaagacgaccacaccaacaccaacaatggtgttgtttcgtcatctggggtcctacaaagccaacatcttttgatgtcaccaacgacaacctcttcattcaatttcgactcatcttcttcgtcttcaccatcctccatgaattgtttccagttctcaaaaacaacctatcttgtgaagatggaagagcacaatttctttactgcagatgaagcttgcaatttcttctctgatgagcaagctccaagtcttcaatggtgttacccggagcaatggaactaaaagcagaagccaaaatgaacatgtatgtaacaaaatgctaagaaataagccaaaaaagcaaagttgggtatctaaaatgaagctccaagagtgttgtaaaatgcgaattacgtaacaagttaaactactaataccgtgaaagaaagagaaaaatggggatttggagctgaagaagaggcacagagatgggttgatatggccgccgaaagagggcttaaagcatatggcgacaccaggccaggcgtgcgggaatgattaggtcgtaattgatagtacttatcttttttcgctcttctgctgtaaatggaaaaaatctcccccactccattgggggaaaagtaaacaaaatcatcaatcatcattttcttttatcttttctttatgcaatatagtaacaaatgatgaaagaattttagtttttcctaa

SEQ ID NO: 199835 - DNA, 390 bp, Gossypium hirsutum
atcctaatctgcaagcacgcgataccaacctaacgggttgttgtataggcaacaacaaacccgtcaggaatcctcattgctttctcttggattgagcttgtacggtaggcgaaccatggcaatcccaacatcatcatcaacaacaacaactagggctaatgacacctcaagcccatcaaaaacgtttgagatttatgatcatgttgatacttcacttcatctctagtagggtaaagaaaagaggttgtcaatactgggtttcgtttttcgaacccaaattcgatgttatttcctacatcaactaattaagttccattttctctttttttgggggtttgtaattgagaatgtaaaattaatagaattatatcaaaatcactaattcacttc

SEQ ID NO: 199836 - DNA, 358 bp, Gossypium hirsutum
tcgttggaactggcggacgatgatatccaagggattcaattgttgtacggcactaatcctaactataacggttccaccacttcgaatacgcaggagagagagagtagcgacggcgttccccgttatctgggtccacggtggggccttgctctattcttggccgttggatttgggtctttatttttgtagattctttatttcgtgctctgttgattatgaataatttatagacatacttcttattttattttttttataaattttagcggttggtcctttctatgtgagatttatcaccatgccgcgccatgtacattctcatttgttttatacatatacctactgatttgttgtagtt

SEQ ID NO: 199837 - DNA, 812 bp, Gossypium hirsutum
gaggaatcgatcaagcttttgttcaagaaccagaacaaaggccaaaatcaagtacaatcgaagtcgatggaatcccagtgatcgacatgtcggtttccggcaccggaggaatcgaaaaactggcttcggagatcggtaatgcgtgccggaaatggggtttctttcaagtgatcaaccatggggtgcctttggaattacgccaaagagtcgtgaaggtggctaaagcgttcttcgatcttcccatagaggaaaaaaggaaagctaagcgagatgacttgaattttacgggttaccatgatgaagaacatactaagaatgttagagactggaaagaggtttttgatatgttaattgaagacccaacatttctcccagcttcgccggatcccgatgatgaggaaataaggacgtacagtaacaaatggcctgagaatccccctgagtttagggagacatgccaggagtactgtagagaggtggagaaactggctttcaaattgctggaactcatatctttaagcttaggtttgcctgctaaccggttgagtgatttctttaaacaccaaactggtatgttgaggctgaattactatcctccttgcccttcacccgagctagcacttggcgtcggtaggcatagggatggtggtgccttaactgttcttgctcaggacgatgtcggtggattacaaattaggaggcattcagatggggagtggattcctatcaaaccaatcccaaatgcctacatcattaatattgctgatgctcttcaggactggagcaatgatctttatgtgagtgcggagcac

SEQ ID NO: 199838 - DNA, 423 bp, Gossypium hirsutum
cgcgagagaggtttttgagattttctgtctttttatttcaaaaatacaaaaaatatatattttttaaatgaactaaaactcccgcacaagtttcaaatcctcccaactcagttcaagcctagttcaataaagctacagtagggaagaagaggctttgaagtttctctaatggaaaagagagtgtgtgaagtttggaaaggaagtaataagtttatccttggtgggaggctgatattcgggccagatgctaagtctctgctcgttaccttattgctgatcactgttcctgttattatcttttgtgtatttgttgcaaggcatcttcggcatgcattttctccatataatgcgggatatgcaattctggctgtagcaattgtctttacatctatgtgttgattcttcttttcctcacatcagccc

SEQ ID NO: 199839 - DNA, 756 bp, Gossypium hirsutum
  unsure (1)..(756): unsure at all n locations
gtgcgacgaaaatgcaaacaaggaaaccatctctatgtgtagagtttttcttgttccgagtgacgaaatgcaggagaaagtgtctagggctcgtattggcactgaaaatcatttaccacaacctcctattctggaggctaactgcggtacgggaataggttcctcgagcaaccatcaggtgaacaagcatgatgagaaagaaggattggctgttgcagggaccattcccgttccagagcatcaagatgaaaatgatgttggaatggattgtttcacagatgcttatattgattctttttcacgtggtgactttctggaaatgaacgatctcgtcaaccatgtatcttcttcgagttccggtaattcaagcgctccgagcatgtcgtcagatgaatgtttcgactcaatggctttcttacaagatctagatcaagacctagttttggaacagaatgacatgggtaaaaagcttgatgtctctgcatccaacaggttggacgaggtggttttggttccggctactttagtatctgttgttagtattgaaggcaatgattcgtctagtaatgaattgttaaaaaccactagctctgtacctaattcagctaataacaatgagatctcaaagcatgctacggggaaccaaagggatgaaggtccatcatcatcatcatcatcatcatctgttaaaccgaaatctagtagaaggaagagagatgctntgggtagaatgaaagagcttcgaagaagtactat

SEQ ID NO: 199840 - DNA, 844 bp, Gossypium hirsutum
tcaagaaaattgcttccctttttttttttttttacattatcgtatctctcaacattcagctctttctttcctttttctaactttttaaggttcaaacatttcagtcactgctactccgtgcttatctggttgttagcggattactgaactttcatcgaaattgttcatccggatcatgtgttgggtgtgaatttgttttgttagtgagcttttcaggaaagggtagtcttagttttgttatataagggcaattgctgttattggagatctgggttttcttttattgatttgaagatggggatatcagatgagaaagtggttgctgtgatcatggtgggtggacccacgaaaggcactcggtttcgtccattgtcattgaacattccaaagcctttgtttcctttggctggacaacctatggttcatcaccccatttctgcttgtaaaaggattccaaatctagcacagatttatctagtcggtttctatgaagagcgtgaattcgctatgtatgtctcatcaatctctactgagttaagagttccagtcagatacttaagggaagacaaaccacatggttcagctggtgggctttacaacttcagagatctgatcatggaagataatccgtctcatatcttcttgctgaattgtgatgtttgctgcagttttccactcccagaaatgcttgaggctcacaaaagatatggtggtatgggaactatcctagtaatcaaggtttcagctgaatcagccagtgagtttggggagttggtagcagatcccatcaccaatgaactgttacattatacagagaaacctgaaactttcgtaagtgaccgaa

SEQ ID NO: 199841 - DNA, 944 bp, Gossypium hirsutum
  unsure (1)..(944): unsure at all n locations
cccactcgtccgcggacgcgtgggccgagccggcgcaggcgaaaaaagaaagaaaagttacgatgtggaggtccaagatggtagtagttggattgaactgctgaaatctcataggcttgctcaagtatcgttattccaaaagccaataaacaagattaaattggcggatttaatggtggcaacgaacaatttcgatgcggagaacgcagttatttcgaccaggactggagtttcctacatggcggtgttgccggacggctctgccttggcgatttccgggttaagcacttgtaagcttagtgagaaacagtttaggtcagaaatgaataggttaggacaacttaggcatccaaatttggttccgctcttagggtattgtgttgtggaagaagagaggcttttagtttataagcatatgcctagggggacattgtattctcagttgcatggaggaaatcttattggttttgggaatgggaagtttgaggttttggattggtcaactaggcttaagattggcgttggtgttgctagaggcttagcttggcttcaccatgggtgccaaccgccgtatgttcatcagtattttagttccaatgtcgtgcttcttgatgacgatttcgatgctcgaatagctgattttggtctagcaagattgatggggtctcgtgattcgaatgacagttcttttatgaatggggatttaggggagtttggatatgtggctcctgagtattctantaccatggttgcttccttgaaaggggatgtttttanttttggggtantgttgttggaactggttacgggtcaaaaaccgataggagttagcaatgcaaaggaaaggtttaaggggaatttggtggactgggttaatcaattgttcancactggtcgaancaaggatgctgttgataaagcattgttaggaaaaggctgcgacc

SEQ ID NO: 199842 - DNA, 894 bp, Gossypium hirsutum
  unsure (1)..(894): unsure at all n locations
ggtatattttgccgaattacgtggtggtggagcagcgttacttcgacgtgaaggagtttccggcgaacgacgaccacccgtcgcatgacgtggcgcgtgggcagaggttcgtgaaggaggtgtacgagatactgagaagtagcccgcagtggaaagagatggcgcttctgatcacgtacgatgagcacggagggttttatgatcacgttccgacacctgtctcgggtgttcctaacccggacggaataattggacccgacccgttttatttcaagttcaataggcttggtgttagggtccccactctcttggtctctcgctggatcgataaggcaactgtgatccacgagccaactgggccaacaccgtcttcccaatttgaacattcttccatccctgcaactgtgaagaagctcttcaacctgaattcaaatttcctgacaaagagggatgcctgggctgctacatttgaaaattattttaagctgcgtactactccacgaactgactgtcctgaaactcttccagaggtgacgacttcattgaggccatgggggccacaagaagatgctagcctctcagaattccaagttgagctggttcagcttgcatcacagctcaatggtgattatgtcctcaatacttacccttctattgggaaaagcatgcgagtaggtgaagccaaccgatacgtagaagatgcagtcnagaagtttcctgcaaccggataggctgctataaaatccggagctaatgaatctgcaattgttacaatgaagccttctcttaccantcgaatcgaagatcggagtcnacatgtggaaaccctatagtccttccatacgatcatctaccgccctaatgtaaatatatttctaaattatttcattaccc

SEQ ID NO: 199843 - DNA, 695 bp, Gossypium hirsutum
ctctctcgtccggtcaaaaaaaaaaaaaaccctagccgtagtcctcttggtttttaggtttctttctaggagggagagttctgtaagagatctattattttttagttcgtaagttttttcgtatactgaacaatcttctgttaccgattcataaatttctcgtggaagttctggggatttcgaaaagaaaaagccgataatgtctcggtgctttccttacccgcccccaggatatttaaggcaggggtttgccgaatccattaagctcgagaatgagaaggtaccgtccaaaacagaacagagattactcaagagaagtgagaagaagcagaaaaagaaggaaagagtaagaaaggataaaacgcacggtctcgccaagaaatttaagcatgatgattccctaaatgtctataaagatgaccaattggagaatagtgatcttaccgaagaacatgggccacctgtttgctacacatctgatgtcagccaaaacagcaacaagaagaaaagggaaactttattctttattgaatacagggttaatgataatgccttaaagataccgtttaccttgaaaaagccttgtcaatctgctgcatctcttagtgaagaaacagtctctacctctgtgaggtcggattccactcgggagcaatgttcatcttggaattataaagctaatacagttactcatt

SEQ ID NO: 199844 - DNA, 429 bp, Gossypium hirsutum
catgttcattatttattgaacaggtaaaaaaccaattattttttttccctttttcttaaattaaagaccatgccattaaggtaaatgcatattattgttaactattaattatattaactatttattttacattaaattaatgtttaaacataaaaaataaaataagaaacaatcaaaccaactggtttaacctgtggtccagtttctttaacattggcatttatgtcctttaatgtcgaacttctacatttatgtctttcattttgaatttttagatgatagtagtgtcaatcaattctttgtcccttgttatgctattagttcctttggttttcattttctttttttctttttttcccaaagccacttgtcccagttgtcatgtttttttatgcatttccttggctatggggttttgcttggtagtta

SEQ ID NO: 199845 - DNA, 604 bp, Gossypium hirsutum
gcgccgccggcgattggtggctccgcgtcggcgtcgactattaagcaagtgaagttagagagagaaagcgagctgagaatcgaggtgtgtaatgaaacgccgcttaaacttcgattacttaacggctcagccgagattttcgggtccgaattggcccctgagatgtggcttactttcccccctcgcctcaaattcgctgttttcacttggtatggtgctacaattgagatggatggtgctactgaaactgattatacggcagatgagacacctatggtcagttacgtgaatgtacatgctgtactcgaaggacgaagaaaccgtgctaaagctttgtcaccaaatgactctgaggcatcccagggacccagagtgattgttgtggggcctactgattctgggaagagcaccttatcaaggatgcttcttagttgggcagctaaacaaggttggaaacctacctttgtggatttagatataggccaagggtctataacagttcctggatgtatcgctgctacacctattgaactgcccattgatcctgtggaaggaattcctcttgagatgcctcttgtttatttttacggccatacaactcctt

SEQ ID NO: 199846 - DNA, 526 bp, Gossypium hirsutum
ggaaaatctggtaaaagtatatatttcaaggatatatggcctagcaatgatgagatcgcacaggttgttcaatctagtgtgttacctgatatgttcaagagcacctatgaagccatcacaaagggcaatctgatgtggaatcaactttccccccctgcggccacgctctattctggggggccaaactcaacatacattcacgagcctccatatttcaaacacatgaccgtagaaccaccacgcccgcatggagtgaaagatgcctattgcttgctcaattttggtgacagtattaccaccgatcacatctctcctgcaggtagcatccaaaaggatagccctgctgctaagtttcttcttgagcgtggggtggacaaaaaggacttcaattcctatggtagtcgccgaggcaatgatgaagtgatggcaaggggcacctttgccaatatccgcattgtcaacaagctcctgaagggagaagctggtccgaaaaatattcatgttccgacaggagaaaagctttatg

SEQ ID NO: 199847 - DNA, 841 bp, Gossypium hirsutum
  unsure (1)..(841): unsure at all n locations
gaatgatgggtttattgttcaagctggaaagtataatgatattctcaattcaggtactgattttatggaacttgtgggtgcacataagaaagctttgtcggcccttgatactgttgaagcaagttcggtttcggaacgaactaccagtgaaggagaatgtgatataggtactactaatgggaaagtgcagaaagaagaaaaccaaggtaacgaaagcggtaaagtagatgatgtcggaccaaaaggacagcttgttcaagaagaagaacgagagaaaggacaagtcgggtttttcggtctactggaagtacatcacaacagcatatggaggagctcttgtgcctttaatactgcttgctcagattctctttcaagatttttcaaataggcagcaactattggatggcttggggatcaccggtgtcggcagacataaagcctcctgttgggagcttgacactaatcatggtctatttggctttggccattgcaagtgccatttgtgtctttgccagatccattgttcttcgtatagctggatataaaactgccactcttctctttaaaaagatgcatctttgcattttccgagctcctatgtctttcttcgattctacaccgagtggaagaatcctcaacagagcttctacagatcaaagtgcagtagatatgaacatcccgtatcaagttgcctcatttgctttctcagttatccagctacttggaatcattgcagtcatgtctcaagttgcttggcagatctntgtcatttntattccagtgattgctacctgcatttggtatcagcaatattacatatcttctgcacgagaactttcgc

SEQ ID NO: 199848 - DNA, 802 bp, Gossypium hirsutum
tctccggataaggtggagagtgaatttgctgggctgctcaaagttgcagagaagacttgtggtctctttttctcttatgacaccaatttaacgctgagtgctcagcgattaaatgatctgggagatgaatctaaattgcttcctctttggagacaggcagaacccagatttctttggaacagttatatgttggaagcacttatagacaacaagcttgatccctatttgcttccagttgtccaagggagtatcctgtatggaactatcaattccagcattttgtggcatgagaagttcttatctcattttttaattaattcattattgttgttgacttctcggtctttcaatttgaagcatatccttaactgctaatgaggctttcataatttccaagcaactattggaaaagaaattgtagatgttacactgattgctaggagatgtacaaggagaaatggtactcaaagctggaaatgacttttcaatatcttttagcattcttcatataccttctaaaactacatttttcttgagaaataaggtcatttgctataacttttaaatatcctttctggtaagaagggaacaattccactttttgaatgatatgcaaaataatgaaattctatggcagattctccttctcttacaaacatttcttctgtgtcattcttttattggttaactttcatcgtttatatgaagcattaactaccaggattgtccatgcactttgagcttggtggaaaaaggagatagataatttttaaatgaacccggatgtggagaagaagaccgg

SEQ ID NO: 199849 - DNA, 612 bp, Gossypium hirsutum
ttccacgcgtccgcccacgcgtccgcttttttacagtagaacaatgatgggttcgagaatcaaaatctcagctctgggtgttactatgcttctgctgttgattgccccaacttccaacgctgccatttcgtgcagtgttgtgataaaggacctgaggccttgcgtgaactatcttacgaaggggagcggaaaaccaccgtccgcttgttgtgcgggagcctccgctctggcatccgccgcctcgtcgtctgccgacaagaaggctgcttgtgaatgcatcaaatcagcgtctaagaatattaaacccaataaccaattagctcaggctcttccttctaattgtggaatcactttgcccgtcgccatttcaccaaatgtcgattgttccaaggttggttgagagcttggaagctgaaactgggagtgcttggatgggcatgaagtaattaaaaaactccatgatagaagctcaattgttttgcttatcaataaactggaatcctccggtcttggaatttggattccttgggtgaataaaagtttaatgctaccatctacttgttttcctctttttcagggttcatacatatgagatgatcatgttgtgtattc

SEQ ID NO: 199850 - DNA, 412 bp, Gossypium hirsutum
cggtcgcgtggtctgacgcgtggggtttcttagtcttgagcttagcttttaggtgcatctcttttgtttttgcgagccaaaatggttaagttagcttttggtagctttggtgattctttcagtgtcgggtccctcaaggcttatttggctgaattcattgccaccttgctttttgtctttgctggtgttggatcggctattgcttatggtaagctcactgccgatgcagctctagacccagcgggtttagtggctgtagcagtggctcatgcatttgccctcttcgttggggtgtccattgcagccaacatctcaggtggtcatttgaatcccgccgtcacctttgggttagctgttggaggcaacatcaccatcttaactactattttctactggattgctcaatgctttg

SEQ ID NO: 199851 - DNA, 360 bp, Gossypium hirsutum
ccctctctttcgcctttttcaccaactcctctcccgttttcttgctctttttcttcctttgcatttacttctgatttgcaaaaagcaaaccaatccttttccccccagtggatcccaccagcactacaaccatgattgtgaatgtgaaagaatcaacaatggtaaggccggcgggggagactccccggcggagcctctggaacgccaacgtggacttggtggtaccaaggttccacacccctagcgtttacttctacaggcccaacggagcggccaatttcttcgatccgcaggtgatgaaggagggcgttgagcaaggccctggtgccattttaccccatggcggggcggctgaagagg

SEQ ID NO: 199852 - DNA, 833 bp, Gossypium hirsutum
  unsure (1)..(833): unsure at all n locations
ttcctcgcgtccgcccacgcgtccgcccacgcgtccggaggaaccaaatattttgaagtacataaagattgcagctagcttgcctgagaaaactgtacgtgatgttgcactgaggtgtaggtggatgcaaataaaggtactttttggaaattggcagagaaagcgtagaaaacctgaggaacataatgcgggaaagaaggtaaacaacaggaaggataagctggtggaatcatcttctaagatgactatgccttcatctctgccaccaaccatggctgcatatcctctcatgatgcgtcatctggatcagaatggaagaacgccttctgaaggaatatgtggtacaactatgcatcttttgaagcaaaatgctcaaacttttagtcaaatcacatccaatctttctcaatacaagttacaggataacattgacctcttttgtcacgcaaggaacaatattaccgccatgctaaatgacatgagagagatgccaggattaatgagccatatgccaccattgcctgtatctgttaatgaggatttagcaaatggcctcttgcctggagcaactaatgtcttgcctgttaatgagtttgcatgtgctgggttgcatggccaaaaaagtggagtcgtagacaccaccataagctaaaaatttgttcaatttatggaatctgtcgntatatttatctaattgaggtttcatgcaaagccttctttatgctggttgggaatgtaaactttccgggttgatctgaatttttcgctctttttggtcttacactctgttctcattattcagcttcaccaatttgcatttagtcatgtagtca

SEQ ID NO: 199853 - DNA, 496 bp, Gossypium hirsutum
  unsure (1)..(496): unsure at all n locations
gtcgctcacgcgtccgcccacgcgtccggcaaaaagaagtgaaaagagagaaaaaaactgctctattctctcttttactccacacgtcggcactctcccccttttcaactccgactgaagcgcaccaagggcaccgacggcgcaccaccactaaactggaggagaacatgggctatgcgagggcaacgtgctgcgatgttgaggcgattgttgcagcgcggaggaagggaagccagctgttgtgttgttgatttttttttagtttgggttactgtttgggtttggggctgttaattgggccgagcaatttgggcttgtgcaccatgaactgtatatatggtcaaaggacgttgaatagtgggtagacttgttgcataaatattgccatgatgttttggatactttcatagcttaattgttcttaggaattttggacttggaccttaatatgttgattcttgctcggccnnnnnnnnnnnnnnnnnnnnnnnnnnnn

SEQ ID NO: 199854 - DNA, 470 bp, Gossypium hirsutum
cccattcgttcgtttgtttttcctttatcaaaatgggggcctttttagagatcatattagcactcccaagaagaaaaagctggtatggcgacgactcttttttgtatcgaggcttctggtgtgactcgtttttcattgaaggagtgatgtcggctcaacaaaatttccgatctcaaccttccgatatcgtcatatgcagtgctccgaaaaccggaacaacatggttaaagtccctcacttttgccattgtcacaagatccaccttcgatgattccactaaccctctactcgccaatctatcacatgattgtgtaccccttttagaggttgatttagcccaatcttccaccaatcgagaccctaaaaatcctttgttagccacacatgccccttactgttctttaccaagatcaataattgattctagttgtaaaattgtttacatttgtagggaccctaaggattcatta

SEQ ID NO: 199855 - DNA, 868 bp, Gossypium hirsutum
ggaaaactcagttcaaaaaacccagaagagaaaagcaaagaattaggcctttttttgggggggagagatttctatcatttgctcgaattatgggatctgcttcgattgaccctgttcttttggatgatataatatgtcgtttattggagtttaagcaagcgaggcccgggaagcaagtgcagctaatggaaggagagatccgtcagctttgcaccgttgcaagagaaatctttcttcaacagcctaatcttcttgaacttgaagctcccatcaagatctgtggggacattcatgggcagtatgctgatcttctgcggctttttgaatatgggggttttcctcccaaagctaattatttattccttggggactatgttgatcgtggcaagcagagtctacaaacaatatgccttttgctagcctataagattaaatatcctgagaacttctttcttttgagagggaatcatgaatgtgcttctattaatcggatttatggattttatgatgaatgcaaacgaaggttcaatgtgagactttggaaaacctttactgattgttttaactgtcttccagtggctgctctaatagatgacaaaatattgtgcatgcatggtggcctttctcctgatctaacaaatttggatcaaattaggagtataacccgaccaactgatgttcccgattctggtttgctttgtgatttactttggtcagatcctggtagggatatcaaaggctggggcatgaatgatcgaggagtctcattcacctatggcccagatagagtctctgacttcttaatgaaaaatgacatggacctttgtttgccgtgcccatcaggttgttgaagatggatatgaatttt

SEQ ID NO: 199856 - DNA, 620 bp, Gossypium hirsutum
ctcaaaccataagatgctcgaaaaagggaaggatcttgttaagcgaatggctggtaatgggtgccaaattggcccattcacttgggatgctcttgtgaagcttcatgtggaagcaggggatgtggaaaaggctgactcaatcttgcagaaggcatgccagcaaaatgaaattaagcccatgtttactactttcatggttgtgatggagcagtatgctaggaagggtgatatccataacgccgaaaaaatgttacatagaatgagacaggccggatatgtagctcgagttagtcagttccaaactctagtcagagcgtatataaatgccaaagctccagcttatgggatcagggagagaatgaaagcagataacatattccctaataagtccttagctgctctgttgcctcaagttgatgcattcaggaggacttcagtgtctgatttgctcgactaaggatttcaatggttacttcaggtctccattttaatggcaacctctatttctatgcacagttcttatctgtttcatgtagtcaaatattggttgtctacttctaaacattctgttctgttcaaacttcaaaccgtactaagcttttgagaaatatgttattaac

SEQ ID NO: 199857 - DNA, 369 bp, Gossypium hirsutum
gtgatctccgagaggtgacgcggggcccccccaaactggaacgttggacaagccatgagaagagggattacaatatcaacagcaagtcatcaacttcctcgaagttaaaggagattgaaaatattaataatgtgggatcttcaggatcgtacaaaatctcggatgaatccagtaagtctattgaacctgctgagaatcatcattctgtgtcggacgataatggtgtttgtgagctagaaattagggatgctgatacaagaccatctgacactgttgagaagctgaagaaacgaagtgagaggtttaaacttccaatgcccatgaaaaagatacggttgcaataaaaaggatggagagcgaggcgatgcc

SEQ ID NO: 199858 - DNA, 606 bp, Gossypium hirsutum
  unsure (1)..(606): unsure at all n locations
gcattagctactgagcctccaaccgaccacttgatgcaccggccccctgttggtcgtagggaacctcttataacgaagatcatgtggaggaacttgctgatacaggccatataccaagtgaccgttctactcgtcctcaattttgatggcaagaagatattgcatctggagcatgaaagcagggagcatgctaacagagtgaagaatacgctgatatttaatgcatttgtcctttgtcaaatctttaatgagttcaatgctcggaagccggaagaagtgaacattttccgtggacttagcaaaaactatctgttcatcggaatagtggcgataaccataatacttcaggctattatcgttgagtttcttgggaagtttgctaaaactgagaagcttagctggcagctgtggctggtatcgattggtatcggttttatcagttggccccttgctacccttgggaagttcataccggttccagaaactccaatcaattcggttctttccaagaatttcctacgtccaaaaaattcaaattattcaaaaccttaaggctccnattctacatcctataaaatatgaaaaagggatgtttgttcatnagtg

SEQ ID NO: 199859 - DNA, 520 bp, Gossypium hirsutum
gacataaaaagaagctgcaagtagaagagctggagaggattgtcaggcttaaacaggcagaggctgatatgttccagcttaaggccaatgaggcaaaacgagaggctgagaggcttcaaaggattgcacttgcaaaatctgataaatcggaagaagagtatgctagcagttacctgaaactacggttgagtgaggcagaggctgagaagcaatatttgtttgaaaaactaaagctgcaggagtcctcacgggcatcgcagagtagtagtggaggtgacccttcacttatgtattccaaaatccgtgatctgctccatgggtacaatatacatccccgctgaaacagagtctcagccaaatgagcgccatggctttagagcaaatccctgactgtctgatgtgcgagttagaatatgttgctttgttggtaaattagtgtgttaaggtttgctgtttcattctaatgtatgaaaccttcaatgaattgtcagttaatagtttattatttgtcgtatgatat

SEQ ID NO: 199860 - DNA, 422 bp, Gossypium hirsutum
ggttttaaaaataccaataggaaaaagggagagagagagaaggtggtgactttacatatacctttgttatttatagtccactttcaagggcaagattcttgggctcctaacactataatatatccatttatttcaggctcagctttccattcattttttaaaggcaagaagaatatgatctagttcctataagatctgcaagtgggaaaatataacttaaaagcaagctccaatggatttggttcagttgcaaaggcagtttgttgactacaaaacctcactctatcatgaggtttttctggatgaacaatttacccaacttcaagaacttcaagatgaaaacaacccagattttgtggttgaagtggtgtctcttttctttgaagattttgaaagacttctcaatgaactggctagagctc

SEQ ID NO: 199861 - DNA, 454 bp, Gossypium hirsutum
tcgcccatgcgtccgcccacgcgtccgggagagcgccgtttctcattttcccttctatgccgtttcagatcctagcctccgcccgttcgactcctattcgcagaggagaagaaggcgccatcggctcacccgcgaaggtaagctctcctcccttttccttctcttttcttttattcaaaaaaaatgaatcaaacaaaacccgaaaagaaaaccccaaatgaaaaaagaaatcagatgatgcatgagaacgattcaaaaatcaccttttttttgaattgatttcgtgtttttgatacaatatgcgtgggtattccccctttcaatttttcgtaatggctttatatagccaaaaaggaaatacaaaatccctatttttgtttttcttttttctctgctattacaattttcgctcaatttgttgtgctattttttttcatctgtttctgcgtgtgct

SEQ ID NO: 199862 - DNA, 609 bp, Gossypium hirsutum
taatttgtgagagaggctgttatgaaaatcctgaaacctgatcctaaacttgctgatttcattgaggccgagtgcagcaaagattcatggcaagggatcatcacacggttatggcctaatacaaaatatgtggatgtgattgtgactgggacaatgtcacagtacattcccacacttgattactacagcaatggcctccctctcgtctgcaccatgtatgcatccagtgaatgctattttggtgtcaaccttaaccctctttgcaagccaagtgaagtttcctacactctcgttcccacaatggcctactttgaattcttgcgggttcaaaggaacaatggcgtcactagttctatttctgtgcccaaaactctcaatgagaaagaacaacaagaattggttgaccttgttgatgttaaacttggccaagagtatgagcttgttgtcaccacttattcaggactttatcgttatagagttggtgatgtgctaagggtagcagggtttaaaaacaacgcaccgcaattcaatttcatatgcaggaaaaatgtagttttgtgcatcgattcagataagactgatgaggttgaacttcaaaatgctgtgaag

SEQ ID NO: 199863 - DNA, 773 bp, Gossypium hirsutum
  unsure (1)..(773): unsure at all n locations
gtcaatacgtcggcactgaagtcctttccctcgatgctttccttcattctcttggctcttctggctcacgcctcaccaatccaatgtaaacacccacatccaaaaataaacataatcatcttagccgggcaaagcaacatggccggtcgtggaggagtgttcaacgacaccataaccgagacactaacttgggacggcatagttccgcctgaatgccagccaaacccttcgatcctcaggctaaccgcaaacctaacatgggttgaagcccatgaaccactccatgcagacattgattacaacaagacaaatggggctggacctggaatgccatttgccagcactgtgttgaacaaggaccctaactttggggtgatagggttggtgccttgtgccatcggagggactaatataagccaatggcagaaaggagagtttttgtatgagcaattggtgaaaaggtctcaatttgcaatgcaaagtggcgtgtatagagctatgctttggtatcaaggggaaagtgatacagaaaatcaacaggatgcagaattgtataaagataatttgaagaggtttttcaatgatttacgttttgatctgaaaacacctaagctaccaataatccangtancgttagcttcagggccaggggcttatataaaggaaatgagagaagctcagttaaagacagacatgccgtatgtgaaatgtgtggacggcaagggtctcccactcggaccaaatgggttgcacctcaccactccagcccaatt

SEQ ID NO: 199864 - DNA, 701 bp, Gossypium hirsutum
ttactttttccttcttcctttctttaaaaatgccaatcaacagagacccttctactcccccgcctatgatcggcaagatcggaccctacactgtcttcgttaccccaccttctactcctacccccactgaacctcctgtttttcagtctcctcagaaggcggtcgcgcctcctgcttctgctcctcctccggtccggccgccgcctcaacagtttgataagtcttttgttgcgtccgattctgatggctccattctgggttttttcaggaatgctatttttaaagtccaaaatgctcattcaagcttggatgaccatgcggcccgctggtttggcttaaatcagtccaagtatcagtgggcactggacgattattacgagagcaagggattggaaaaggaaggtgtaaaagtgaaagaaatatcaagcaaaatgcaaagtgtgtagcatgctttttgtgctggtaatgagatatttgaagtccctcttctcttcctctgtttctgtttcccccttctaatgttattattatgtatctaatgagaatgttttaatcacggtgcatattgttattctgctgaacttgcaccgagaattggtggttgtgtatcatttttgtattatatctatatatactttacgtatggaaaggccaaaagacatttggattcctgaagcgatctttgttggcatctttggact

SEQ ID NO: 199865 - DNA, 1041 bp, Gossypium hirsutum
ttgttaacaaccagctaagtcagcatatatcatagtgaaagggattcgctccattcttattgctttaggcctctttgcttttgcttgctcatcggcctcagcatatgaccccagtcctctccaggacttttgtgttgctatcaaggacatcaagaatggcgtgtttgtaaatggtaaattttgcaaagacccaaagcttgcagttgcagaagatttcttcttttcaggcctaaacaggccggggaacacatcaaatccagttggatcaaatgtcactatgatcaatgtagatataataccaggacttaacactctaggtatatctctggttcgaatcgactatgcaccttatggtgtcaaccctcctcacactcaccctcggggatccgagatcctgcttgttgtcgaaggcacactttatgtcggcttcgttacggcgaacccagacaaccgtctcttcactaaaatcctaaaccctggagatgtttttgttttcccctttggtatggttcatttccagttcaacataggaaaaactgcggcggttgcctttgctggtctcagcagccaaaatgctggggttatcaccatagctaacgcagtgtttggctcaaacccaccgatcaacccagatgttttggccaaggcgttccagttgaacaagaatgtggttaagtatcttcagtctcggttctaatgggattaacaactactttaagagtcaaatcaaaaccccaaaagtttgtttgcttgtttgaaacaatgtttgcatgcattttctaaatcaagtcatactattctgctaagtatcatgtaataaacagagaggtttaaatttacttctccagtctcctctcttgacattatcctttcagatataagaccagaatttgtagtgctctcggatttaaattacgaccacaatcaagggcaccaatgcatatgtagttcatgttgttattgttgtatttatgtcatgctagccctacttgcttgtattccttgttagttggacttgaatgcaaatgttggaattccttc

SEQ ID NO: 199866 - DNA, 640 bp, Gossypium hirsutum
caaacattgaaaacgccggatttgacccaactctcccaaactaaatcccatcttaaagttaagtttgatcccaacttctccaaaaacccagatcgaaatcccaccatgacatatactgcactaaaagcggtaagtttaactcatgtaaggtatcaaagaggtgaccaactaggccatttcttagcctgggtttctttagttcccgttttcatttcccttggtggcttcgtttctcatttcatcttccgtagagagcttcaaagcatgttctttgcattaggcctagtaatatcacagttcatcaatgaattcatcaaaaaatccgttcaacaagcccgccctgaaacctgtgctcttttagaaatgtgtgattctcacggctggccttcaagtcactctcaatacatgttctttttcgctgtttatttcacccttttgacatgccaagggatcggtggggatttggaatgttagaaccaagtgggctgctttgtttttaccttggtctttggctgtcttgactatgtattctagggtttatttgggttaccatacggtggcccaggttcttgctggagcttctttggggattttgcttggtgggctctggttttgggtggtgaattctatgctcttctgc

SEQ ID NO: 199867 - DNA, 129 bp, Gossypium hirsutum
tttataatctagtccttaagtacaaattgagaatatttgggcttttggcagatccttgttgtttataccatttttgtaagataaagcttcattattacagtaataatttgatggatgaaagttactttt

SEQ ID NO: 199868 - DNA, 203 bp, Gossypium hirsutum
tttgatttatataccaaggaggctccttcaagaagcgggtacctacattcttgcattttggtcctagaagtcggataaagtttacaatttcctcccttttttttgccaaaaagggctacaaattctaattagcatagtttttctttggtcatattgagtatgctttgcccacgaattcgcctagcttcaaaattttttatatg

SEQ ID NO: 199869 - DNA, 617 bp, Gossypium hirsutum
ccttttcgtccgatagtttccaatggctgctctgcaacttacgattgtattggttatgttcgtcttccttcaactattctcaggtgctcgttcgtcgacgtttaccatcataaacaaatgcagctatacagtttggccaggagtgttgtcaagtgctggaatcccaccactttcacctacaggttttgttcttcaacaaggagaatcgaaatctatcgatgttccgacatcttggtcaggtcggttatggggtcgaactctttgtacccaagactcttctggcaaattcacttgtctcactggagactgcggttcgtctacgatagaatgctctggtgctggtgctatccctcctgcaacccttgcggagtttacattgaacggagcttcgggattggatttttatgacgttagccttgtggatggatacaatttaccaatgatggtgtctccacatggtggtaaaggaggtaattgtagttcagccggatgtgctgcggaattgaacggtaactgtcctttggaacttaaagttgttgataggagtgaaggagtggcttgtaatagtgcatgcaatgctttcggggacccgaaatattgttgcagtggcgcttatt

SEQ ID NO: 199870 - DNA, 609 bp, Gossypium hirsutum
  unsure (1)..(609): unsure at all n locations
ttcttcgcgtccgaccacgcgtccgaaagagtagcggggtttttagataaacccttgctaattctcttacactctctctcttctcttctccatctttactctcttctattatactttcgtttcgcttctcttcgatctctcgccattggattcgatcaatcggcttaagttgatcctggtgattgcttgtttcgattttctggttcaaaaaatgattgctgcagaaagtgtagtgccaaagcataagttgaagattaagttccccattctaaggattgaatcggtttctgcgccacaatcacttgagtttgggcagcaactgagcagctcttttgatgggaaaaggaagtcatatcctggcaattcaaaagagacttatggtgcttctaagcgtcgaccaaaaggggtgataatgggtggtccacaaaagaagaggcgaaagatggaccgcagcatgactcagcagtgtactaccctactgaatgctttgatgaagcatccagctggttgggttttcaatcaaccagtggatcctatagctttaaagattcctgattatttttcaataataaaaaaccccatggatttgggtacaattaagtccaanct

SEQ ID NO: 199871 - DNA, 962 bp, Gossypium hirsutum
aagtttgggggacttcatttttctttgatcaatataaacctatctgggtatttctaagatttcctaaatctctatgaatccgattctgggtcttctccaaattcactaattttcaatacccagatttccttttacaattctctttgaaatttcgttgtcaaaaaatgatgggattctattaatatatcagggttttcaaagtttttttttcatttctctcaaagaaaaaatgactagtgcgaccttttcatcaagtttattggggtcgttccctgtagttacatcaactaggcattgtgatttgggcaaagaaaggagcaaattttgttgtttcaatgagaaaaaggagcaaagaaatgttatctgtgcttgtatggctcctcctactaaaaacctgggacgtgatgaattccatggaactaaatttactgaatcatccaaatatgggaatttcagcaaggaagtgaagcatgagaatgattctgatgttctcattgaatgtcgaaatgtttacgtcccatttggagaaaaacatatcttgcgaggtgtgagcttcaagattaggcatggtgaagctgtgggaattattggtccttccggcactgggaaatctacgattctgaagattattgctggacttcttgcaccagacaagggagaggtatatattcgaggcaaaaagagaatgggtttgattggtgatgatgagatatctggtcttcgaattggattggtttttcagagtgcagcactttttgattctttgaccgttggtgaaaatgttggtttccttttatacgaaaattcatgcatgtctgatgaacaaatttcacagctcgtgacggagaccttggctgctgttggtttaaagggagttgaagaaagattaccttctgagttgtccggaggaatgaagaaaagagttgctttagctcgttctataatttgtgacatctccaaag

SEQ ID NO: 199872 - DNA, 338 bp, Gossypium hirsutum
tttcttccacgcgtccggagaaatggagggaagcaaaatgagcatgattttgattgcctacatcacacttgttgcgagcggagcgatgggtttgagggaggaccaaggagcggttgcaccctcaccaatggaaagtggcggagtggctctgggtgttccggccgcacttgctgctgccttagcttctatgcttgcatttggctgcttcttttgattttaattcctttggtgaatactgttttccagtttccatttcctttcatttgccaactagtttctttctctgtaaatttcattggtatttttaagaaattgaataaaatcttgatttatttaaa

SEQ ID NO: 199873 - DNA, 854 bp, Gossypium hirsutum
gcagccacttcactgtatttctgttccaagtttcaactgttgagttgaaatcttaaatttctttctaataaactacttatttttaaagatgtcggaggggtcgatctctatagtgtacgctatggagaaggcatcgggacctcacttctccggcttccgtactccgaccgccacctctgtctcctccaccaccttttccgacgccaatgttcctcgtgagcccttcgtcattggggtttcaggaggtacggcttctggtaaaacgacagtctgtgacatgatcatccaacagcttcacgatcaccgcgttgttcttgtaaatcaggattccttttaccgtggtttaaattcagaagagttaaaacgcgttcacgagtataattttgatcatcctgatgcttttgatactgaacagcttttggagtgtattaagaagcttaaaattgggcactcggttcaagtcccagtttatgattttaagcttcatcgtcggtcttctgatagttttcgacaggtgaatgcttctgatgtcataattttggaaggaattcttgttttccatgaccagcgtgtgaggaaccttatgaatatgaagatttttgtcgatgcagatgctgatgtgaggcttgctcgtagaataagacgagatacagttgagaggggtagggatgtaaactctgttcttgaacaatacgcgaagtttgtcaagcctgcatttgatgattttgttctgccatcaaagaaatatgctgatgacatcatcccccgaggaggtgataatcatgttgcgattgacttgattgtgcaacatatccgcactaagcttgatgagcatgacctctgcaaaatatatc

SEQ ID NO: 199874 - DNA, 489 bp, Gossypium hirsutum
tttattttaaaaaaataaaagagaaaaaatctgagcaatgccggaggagacgaatctccatagactacattatggagaaggcatcggggcctcacttctccggcctccgtagtccgacctccgcctcttcctcttcgtcctttttcgccgacgccaacgctcctcgtcagcccttcgtcatcggtgtttctggaggtacagcttcaggtaaaacgacagtctgtgacatgatcatccaacagctccacgatcaccgcgttgtacttgtcaatcaggattcggtttatcggggtttaaatactgaagagttaaaacgcgtgcacgagtataattttgatcaccctgatgcttttggtactgagcagcttctggaatgtgttgagaagcttaaaagtgggcaatctgttcaggtcccgatctatgattttaagcaacatcgtcggtcttcggatagtttccgacaggttaatgcttctgatgtcataattt

SEQ ID NO: 199875 - DNA, 660 bp, Gossypium hirsutum
taaaaagagaaaatctctcctctgcacacagggcatttcaaatgaaaagcaaagtgatttgagaaatttccaatctattcaaagcgatagggaaaaaaaaagttatagagtgaattggagggaaattgatttttacgtatgtaatgcatcagaagaaatcggaagttcagatcggaaaagaaagcagcggcgtctcctccggttttaatcccaaaccttccaccggtcaccaccaccaccaccaccaccaccaccagcatttcaattaccaccaccgtttacaacagctttccgatacaacagcgccggcgggtaccgggacgtctccggtttacgttttccctcagataattactcagaccacgtctggaaatgatgcgattgcacctcctccgtcttcatcttccacttctccgaccccttacaagagacgccttttgacccaaacgccgtctctcaccaaatcccctactttgtaccatttcaccactcccccgcagttcaattcccggaatacggcgtcgttcttttccttctccgtcgctgctaaatcgtccttttatcgaatcctccaccgtttcaagcacctgcgtcgtcttcgagtttacctacgcttaatcctccttttatctctcccctttttgtacttcttactttcac

SEQ ID NO: 199876 - DNA, 510 bp, Gossypium hirsutum
ccttctcgtccgcccacgcgtccgagctgattcactggaacattggctgcgcatgaatggttttcctgcaactaccattcatggtgatagaagccagcaggaaagggaacaagcattacggtcatttaaaaccggtgctaccccaattctagtagcaactgatggggcagctcgtggtcttgatattcctcacgttgcacacgtggtgaacttcgaccttcctaatgatatcgatgactatgttcatcgaattggacgtacagggcgtgcaggcaaaactggcttagccacagccttcttcaatgagaacaatactaatatggcaaaggcattagcagatctaatgcaagaagcgaatcaagaggtacctgcttggctcactcgatatgcagctcgttcattcggagcgaggaatcgtcgtcctggaggacgaggccgattcggtggacgtgactttcgaagggattcatcttacaacagaggtggtgcagattactatagtggaggcaa

SEQ ID NO: 199877 - DNA, 649 bp, Gossypium hirsutum
tgttcacgcgtccgcccacgcgtccgcccacgcgtccgaggacattgatctccattctccctcacacagcaaaaacctaaggctacaaggaagaagaaaaagctaacagcagcagcatgagtttccaaagagtacctcaagacccttaccctcctcctgggtatgcctctccttatccacccccacccccatctggatacccttctgctccaccttacgaaggctacccaccaccgccgcctccaggttatccaccgtatcctcagccgcaacgccagccttacgagggttaccaagggtattttgctgaagggtatcccccaccaccacctccacctccacctccaggtcatcctcaatatcaccactgccactacgagcatcaccatcaccacaatcattctgatgatggctgtttctctttcttaaaaggctgtttggctgctctatgttgttgctgcatgttggaggaatgctgcttttagtgaagttctactttgcattttgtggaggtcaggtcatatgctatgtattcggttccgtacccatctattattataatttatctactcaaaccttataaaccaaagtttccattataaatacaagctgctctgagttcccgttgtataaaaaaaaaaaaaaaaaa

SEQ ID NO: 199878 - DNA, 435 bp, Gossypium hirsutum
gtaaggccagggtcagatcaagcaaaagcagatgcttgggagaaagcagagatggttaaaatcaaagaccggtaataatacattgacaccgagaagcactaattgtttagtactaaacagttgtaggcaattagaagcatatgatcttcttcactaacaatgaattacaggtatgtgaagttaaataacactatactcgaatgggaggaaaagaagaaaaagaaggccagaagcaagctggacaaagcagagaagagtgaatcggagaaaaagagagcaagagccttaaccaaatttaggaatgaaatggactacatcaaacaagttgcagatggagcaagagcacaggcaaatgctagacaaagaaatgatgagcttaaagcaaaggaaaaggcaaacataattagaacaacaggagagcttccaatgacatgc

SEQ ID NO: 199879 - DNA, 350 bp, Gossypium hirsutum
tcgataacagagggtcagaaaccgatcttcagtgtgaaaagatcgtccataatcggacggtgcgggatgacagtggaagtgttcaacaatccagggctggagtaccagatagaaggggaatttcggacaacggagctgcacgatcttcaacgcggccaaggaatcagtggctgagattaaacgcaaagttgatgcttccactaacgtggtgcttggtaaagacgttttcttgctttctttaaaacccggttttgatggggcctttgctatgggtttggagctcgttcttgatcaggttaacggtggtgattacgttgaaaatgatgaggcggagatgatccctaccacag

SEQ ID NO: 199880 - DNA, 393 bp, Gossypium hirsutum
ccctcgcgtccgcccacgcgtccgcgatcctcccttaggttcaggtgatggaggttctgaacagaaaactgagaggcctttagaggaggaacctatgcttgcagctagaatcaccattgaagacggtctgtctcttcttcttgatgtagatgatattgaccggctcatacaatttagtcaaccccaggatggtgggatccagctcagacggaggcggcagatcctgcttgaaggtatggcagcatcactgcagcttgttgatccacttagcaaaggtgcgcatgcagttaaatgtgttgccaaagacgacattgtgttcctaagattagtctctcttgcaaagggccgtaagctggtcaccaggttcctttagcttcttatccctggaagtga

SEQ ID NO: 199881 - DNA, 310 bp, Gossypium hirsutum
agttcgtggcattggtagaggtctatccgggcagccttcatctactataccccttgtttctggaagtgtggcttctggtaacggagcccttggcgctgcccctcctgcctctgacatggcaaaaagaaatattttgggagttgatgagagacttgggaatagcagcatggggcaatctttgacatcacctattagtaacagaatgatcttgcctcacgcagccaaggcaaatgatggaagcgcacctgttgattctagtaatcctaatgagcctgctggactacctggcagagcattttctccttcaatg

SEQ ID NO: 199882 - DNA, 806 bp, Gossypium hirsutum
  unsure (1)..(806): unsure at all n locations
aaatgagaggtttggtaaatgcttgcttgaactaagtggaaacaatgcaataattgtcatggatgatgctgacataaaattagctgttcggtctgtactatttgctgctgttggtactgctggtcagcgctgtaccacatgtcgtagactgcttcttcatgaaagtatatatcggactgtagttgaccagctacttgatgtgtacaaacaagttaagataggggacccattagaaaagggtaccttgcttgggccattgcacacttcttcttcaaggaagaactttgagaaaggaatagagattattaagtcacaggggcggaaagattcttactggttggcggtataataagagtcttaagggaacacttggtccagccacacaatggtggagatttccttcagaagcccattggtgtgtaaagaagaagcttgttgcacccagttctnnttatgtcatgaaaatttaagacttnntgaaagaangcattttgantattaaacaactcttgttccctcaagggatttgagcaagtcccattctatcnntaataaacctttgtattcatatacagagggatggcccccaaagggaaaacccttgtttttaatagggaaaccacaccaccagggtcgaaaaaatggtgttcttttggagaacaccctaggaggggcaggaatcgtgagtatttttgagataaattctggcaaggtaacctgcacataatataccgtaggattccgttgcacaagaaatatctggtagatatcncactgggagcgcaggaactattgttttccaaaag

SEQ ID NO: 199883 - DNA, 365 bp, Gossypium hirsutum
  unsure (1)..(365): unsure at all n locations
cgcgtccgcttcaatagagcagtttgttggtctaagcttggactctgggaaaaatctgtagaggactgcaaccaggctcttaggatccaaccaaattacctaaaagccttacttcgaagggctgcctcgaacgcaaagcttggacggtggccagatgctgtgagagattatgagctcttgagaaaggaacttcctggagataatgaagtggctgagtctctgcataatgcacaggttgcactgaagaaatcccgtggaatggatgttcttaacatgaaaatcagcgntgaagtagaagaaatttctagcctagagagattcaaaactgcaatatcgacaccagtggtccactttaaagtggcaac

SEQ ID NO: 199884 - DNA, 286 bp, Gossypium hirsutum
tcgttcacgcgtccgtatcaccccaccaacgaatccataacgaaaagaaaaaccacagaagttgaatggcttgtattgcggtcggtgacacgattcccgatggtactctctcatatgctgatgaggcccatcagattctaaacgtgtccgtacactcccttgctgccgctaaacaggtcattctctgtggagttcccggtgcttttacccccacatgcatgcttgaaacatgtgccaggtttcattgacaaggcagaggagctcaagtcaaaaggcattagtgaga

SEQ ID NO: 199885 - DNA, 326 bp, Gossypium hirsutum
ttctttcgtccggctgccccaagacccaaatacaatcaaggaccgagaaacacacagtgattgccccccgtaccaatatctgaaccatgttcgaacttatccgacattcatgttcggcggatctctgggagcacatgttgctactgtcgcattcgtacggaactaaaggtaactgaaggctaggtctttgggattggtggttgacccacataacaccatagatagataatatgtatgtatatatttaattgcacaatcatggtctgtctcccaagtggctctgcacctttggtttattgttgctgaaatgctttaatgaaattgat

SEQ ID NO: 199886 - DNA, 351 bp, Gossypium hirsutum
taatgcttttaaggtcacctacataaatccaagtaaacctcaccaaaatgcaaattcctgccaagtttgatttagaccttgtcttctttcactcttttttttttcccaattttcattcaattatcttggtttgtttcctttaaagtcattcctcattaaagtagagtctttgatcattattactaagtaattgcgtcatagatttttttttcttacgaccttaatttccaggacggttttattattttgaaggagatgaacccatcaaacgcactacctcagacatcacctccatcagatgcggtggacacgtcacccctcctgacccattccatattcgaccaccttctt

SEQ ID NO: 199887 - DNA, 404 bp, Gossypium hirsutum
cccacttgtccttataaaaaagaaactggcctggccgtggaaagatgaaccaaatgacgccgtcgaatccactgctcgcgacggtgatcattgctctaccagaaaggtgatccaatcgaagtgcaagaccgaagaagtcgagcccggaaagttcgttcgaaagtgcgagaaaactgaagaagttcttagagaatgctttggaaggccggtcgaagtgctgcaatcaaccaaggagtctactgaggacgatggcacagagctctggctgaaagggagtttctcatctggatcacacgtagaaggttcgtttgattctcccgggctacgtagtgacatggaggcaattgaacgccagttctttggtgggataaaccgtttctttgatgctgctgaggagatgaaaa

SEQ ID NO: 199888 - DNA, 487 bp, Gossypium hirsutum
aactcttagatgagctcaacaactcaggcaatggttccagttatagatttctcaaaccaaaacctgaaaccgggcagccctgaatgggatttagtgaaatcccaagttcgagaagcattgggggagtacggttgtttcgaggcattgtttgatccaatcctggagcttcgaaaggcagtgtttggggctttgcaagagacctttgacttgcctttacaaaccaagaaactgtgtgtttccgataagccctttcgtggctatttcaatccttcatctggaccgtttcaaagcttggcgatggaagatgctcatattgctgaaaacattgaacaatgcctcaccaacactttatggcctcaaggaaacataagtttcagtaaaactctggcgtctttcactcaactagcatccgagttacagaagaaaattttgaagatgattttggagagttttggacttgagaaatacatggatgagctcactgaca

SEQ ID NO: 199889 - DNA, 727 bp, Gossypium hirsutum
  unsure (1)..(727): unsure at all n locations
ccctaatgaagattntggaattaaatacaacatggaaaatgggggacctgcttcaaaggccctcactgataagatctttgagaacacaaaaacaataaaagagtacttgattgctgatgagctacgagaagtagacattagtacaattaggtgttaccaacttttcggggcctgatggaccgtttgttgtcgagggtttttgattcagcaagtgactatgtgaatttgtggaagtcaatctttgacttcgagcttatccgcaagctgcttttatctccgaaagtttacattctgctatgatgcacttcttgcgggttgctggagcttatgcaaatcgcatctttgtggggaagagcttggggcacaacaaagctcacttttgaactgcacacccaaggaggacatttggcggaggacatccggatcccaatctgacttacgccagggtgttggttgaccgcatgggattgggaaaatcgaactctgtgtgttgaaccaccagagtttggtgctgctgctgatggtgatgctgatcgtaacatgatcttgggtaaaaggttctttgtcactccttcgatcaataccatattgctgaaatgctttgggcaatcctaatttccttggttcaagggttcccagattcccacttaattgcctttgctggccagattgaaccaaatttgagagcctgtggggaattttagaatgagatggcaatgttttgtag

SEQ ID NO: 199890 - DNA, 417 bp, Gossypium hirsutum
tccacgcgtccgctgtaaaactccaccgtttctttctatcttcgtcaattgggttttggctcagatcgactcccggattccatttcaaatgatgagacaagtgctagggctagtctatccagaatcgttatgttagttgaagctttatttgaggttctggatgaaatcccccagcagtctgtggttttatcttctcgaccttctgtatcttcaattggatctgttcccgctcctaatgaagttgtggaattgcttcctgtcaaaatttataacaagtcacacaaacttcataatgatgaggctggacagtaagtatttattcttctctgctgtttgagaaatgtgaagcacacttgaattttttttttttgttgacgaatagttgaagatgagatttaactgtgtgtgccttgactt

SEQ ID NO: 199891 - DNA, 969 bp, Gossypium hirsutum
cccacttcttccgctggtctttgctttccagttatggagcttcaactcccttcattccaggtcctcctcagcatcctccttgtttccttcttcatattcagaagtttaaagaaatcaaaacccaaaaatcccgaccttaagccaattccagggccgagaaaatacccggtgatcgggaatttgcaccaaatcgctagcccatcaccccacaagaccttgagagacttggccctgaaacatggaccactgatgcatctccagctgggggagatatcgacggtgatagtatcttcaccggaagtggctaaagaggtgacgaaaacccacgacattaacttctcgtacaggccagccatggaagttcccagggtctacacctacgatttcaccaacatcgcctttgcaccctacgggaactactggagataccttcgcaaactgtgcaacacggacctgttgaccgcctcgagggtccagtcctttcgctctataggagacgcagaggttttaaatcttggggaaaccgatccttgagagccagggggaggccgggaaccttagcgacatgattttctcaatgacatatgggatagttgccagagcgggcctttgggaaaaaatgccaggagcaacagacttacattgacagcataaccgaactcacaaagttgctttctggcgtcagtttgtctgatttttatccttccattataccgcttcagctttttagtggtatgaagaccacagttgagaagatgcctatggagaatgataagatcatcgcgaacatcattgcggaacatagagagagaagggtcagagaaaaaacggacaacagaactgaccagaaaactcgtgagtgcccttaagatctgagggaataattccctggttcaagacataatcaccatgggaccttttggccgaatgaaatttcccacccgagaggccgtccaagaaaaaactggg

SEQ ID NO: 199892 - DNA, 572 bp, Gossypium hirsutum
gtttgctgatttttatccttccattaaaccgcttcagctttttagtggtatgaagaccaaagttgagaagatgcataaggagaatgataagatcatcgcgaacatcattaaggaacatagagagagaagggccagagaaaagagcggacaagcagaagctgaacaagaagatctcgttgatgtgctcttaaggattcaggaggagaatgagttccccttggctgacaagaacatcaaatcagtcattgtggacgtttttggtgcgggaagtgaaacatcatccacaacccgtggagtgggcactctccgaaatgataaaaaatccatgggtgatgaaggaggcccaagctgaagtaaggcgagttttcggaccaaaaggaaacgttgacgaaacaggccttcatgaactcaaatacttgaaagcagtcattagggaaaccttccgaatgcgcccatccgtgccattgttgctcccaagagaatgtcaccaagcttgcgaaattaatggctaccatgtcccggaaaaaaccagagtcctcattaacgcatgggccctcggaagagaccctaat

SEQ ID NO: 199893 - DNA, 664 bp, Gossypium hirsutum
cttgtcttgattttaatctgcagaagacaaaaatgcagttaggagtccaagtcttggtcaccgatcctagggagctggagaaaattcgtcaaagagaagctgatatgacaaaagaacgtattgagaaacttctgaaagctggagcaaatgttgttctgactacaaaagggatagatgacatggcactcaagtattttgtggaggcaggagctattgctgtgagacgtgtccgaaaagaggatatgcgccatgttgctaaggcaactggtgcaaccatggtttcgacatttgctgatatggagggtgaagaaacttttgattcatcacttcttggatttgctgatgaagttgtagaggaacgcattgctgatgatgatgtggttatgattaaagggaccaagagcacaagtgcggtttccatgatcctcaggggagcaaatgactatatgcttgatgaaatggaaagagctctacatgatgctttatctattgtgaaaaggactcttgaatccaacacggtagtagcaggtggaggtgcagttgaagctgctttatcagtgtatttggagtatcttgccacgactttaggatcacgtgagcagttggcaattgcagagtttgcagaagctcttttaattataccgaaggtgcttgcagtcaatgc

SEQ ID NO: 199894 - DNA, 474 bp, Gossypium hirsutum
cggacgtgtgggcggacgcgtgggcaagaccaggtgatgatgaccaccacagatgccttgccctcgcctcgtgactacggaaacggaagctcttcttggttttggtagtgtcataacaatgatcattttcaatttgtatacacctacccctgtcaatgtcttggacttactagaccacgacgaccacgtctctcttgattttgtttggcatggctttgcctaaccttgtaatctctgcactcctttttgtcacctcaattattgttttctactttggattgtattgcaacatttattatttttttactactttccctgttttccttctttctttggtgttatattacatggattgggattgcattgctataattaataattgagtatcccttattcctcccgtttccctctattctagtctaatttattcataaaagtaaataaaagtttagtccaaattaagattatgctttt

SEQ ID NO: 199895 - DNA, 436 bp, Gossypium hirsutum
attttctctctctacaaaatctctgctcccctctctttatgtggggtttctcgacatcctaacgctccctccacactttaaaattttgacactcttttgcagtctgctccttataaaatctccctatctttctatgtatccaatgacaagttactatattgaacactaagctttcttttccaatttcctgaaacattttccaatggaaaatgacgataacagaggcgacaagaagagtgcccgggaagagtttgagaattttgagtcagaggctaactcggttcccttcttaaaactctctcgagtccactcgcccgagtccactcgtgtggaatccgcccttgattacgtggacgttcagttgccggagtcaaagcatatccaggaggatttgctgaacttcctggacgattccgacccggtcattggacctgga

SEQ ID NO: 199896 - DNA, 598 bp, Gossypium hirsutum
tcccacgcgtccgcaaacattcggaaatgttagtgttgatggtagaagttatgcagttaataagatgggatcttctgctcttgctgctacacttcatgctgctgctttgcttcttaagattaattcagattgggattggtttatacctttaagtgcctcttcttatcccctaatgaatcaagatgatctcctccatgcttttactttccttccaagggatctcaacttcattgattatactagcaatccgggttggaaacagaggggagagataaaccgaattgttgtagacccccaacttatattataagagcaataccccaattaactatgatgttgaaactcgaaaaccagacgctttcgagatttttggaggttcaccatgggtgattctttcaagaccattcatggagttttgcatctatggatgggataacattccaagaaagctattaatgtatttcaccaatgtagcttaccctcttgaaacctatttccacacagtgatttgcaattcatttgagtttcaaaacacaacattgagcaatgatttaaggtacgacattattccgaaatcccctaagcccaagattttaaa

SEQ ID NO: 199897 - DNA, 398 bp, Gossypium hirsutum
tccacgcgtccgcccacgcgtccgcccacgcgtccgcccacgcgcccgctccatttctgtctcaacggcgctcgtcttcctcgtccgctcagatcaagcctcgtcaactcgtactctaacttttcagcggtccggtcaagcgccgactcggccatggcagcactcaactcagtccgagtagccgcggttcagatgacctccgtcaacgatctcgcctccaatttctccacttgttctcgcctcgtcaaagaagcagcttcagctggggcaaaaatgatttgtttccctgaaagtttctcctttctgggtcccaagtctgaggatagtcttttggttgcagaagctttagatggaccaattatgcataaattttgctctttagcaagagaatatagcat

SEQ ID NO: 199898 - DNA, 588 bp, Gossypium hirsutum
  unsure (1)..(588): unsure at all n locations
agggaattcaaattccaaagagaaaagcgcgagaaatcccatatatttatctacacagcaaaaagaagagaataaaaagggaattcaaattccgaaagagaagaaaaaaaaatcgatggatttggatcagcggatagcaaaggctaaagaaggccagcatctttcggaagacgagcttcagctcctttgcgaatacgtaaaagaaattctcattgaggagtcgaatgtgcaacctgtcaacaggccggtaaccgtctgtggtgatatccatggccagtttcatgacctgatgaaactctttcagacaggaggtcaagtgccagaaacaaattacatttttatgggagattttgttgatcgaggttataatantcttgaagttttcactattcttttgcttcttaaggcaaggcacccanctaatatcactctcttgcgggggaatcatgaaagcaaacaattaactcaggtttatggtttctatgatgagtgccagaggaagtatggaaatgctaatgcatggcggtattgtacaaatgtttttgattatcttacactttcagcaattataaatgggactgtactctc

SEQ ID NO: 199899 - DNA, 635 bp, Gossypium hirsutum
cccacgcgtccgaaaaaattgtgtttagatcagaaatggggtcccaaactcctctaaagctcccagtcattgatttcagtaagccagacctaaaagcaggcagcaatgagtgggatttggtgaaagggcaagtccagcaagcacttcaagagtacggttgcttcgaggctttgttcgacaagatccctctccaccttcgagaggcaatattcggatccttgcaagagcttttcgatctccctttacaagccaaaattcggaatgtttccaataagccttatcatggttacgtcggccaataccctcaagtcccattatatgaaagcatgggcgttgatgatgcaaacattactgaaaaagttgaagccctgactactaccttatggcctcaagggaattcaagtttcagcaacactatacaatctttctcagaacaattgtcggagttagatcaaattgttagaagaatgatattggagagttttgatcttgaaaaatatatggatgaacacatgggttcaaccaactacctgctcagggtaatgaaatataaagggccaaaaaccactgaaacaaagcttggattacacagtcacaccgacaaaaacattgtgacaatattgtaccaaaatgag

SEQ ID NO: 199900 - DNA, 757 bp, Gossypium hirsutum
atccggctgaacatatatattcattgacagcaagtgggaatatttttctgtttgcttccaattctcaaaaggcagttattgctgttaatttggttagtaaggcagttaaaaagatccgcgccatgtccattaggtccacgtggtacctcttcctggaggagatccgggatgaagctagtacccgaatcatcggattccggccatttccggtttttgttcgtggaactagtggggaacagtccggctgtgttcgaatacaattcagagaccgaaaaatggcagtgcagagaagcaagagaggggaaggggaacttcgcagggaatgattgtatgtttctcaatgcacataatgcacctcaggagagtttggtggttgcgattggatctgaatacatcccaccaaagatcctacgaccaagattcggaaacagagagcagcaggcaagctgggtgaacgtaaatgaccgaagacacgtgtatggtgacggacacgtgatgataatgagatcgcgggatcaaagaagggcaaaggtgttgtgcagcatagaagtgtgggggataagcctaagaagtgggaattgggagtatgtgtcaaatgtcccgagtgagataatggagcaaatagggaaaccttacggggtgatgatagggtgtttagaggcgagaaatgggagaattcgggtggtgttgatgtcgaattacgagggctcatgggacattatttggctgacttaccatcaacagagcggcgtatgga

SEQ ID NO: 199901 - DNA, 622 bp, Gossypium hirsutum
  unsure (1)..(622): unsure at all n locations
gaatcctgcaaaaacgattattaatgaaccgaaggaagtgactctcatgaatggtctcatggctcctttgaacatgcaggtgcgtggcatttcattctcggcccatgcagactatgcacaaacgagtacattcttgaaagagctcatgcctcccaacataattcttgttcacggagaagcaaacgagatgggaaggcttaaacagaagcttatcactgagttcactgatggcaacaccaaaatcattacccctaagaattgtcagtctgttgagatgtattttagctccgagaaaatggctaaaacaatcggaaggttggctgaaaagaccccacacgtaggtgaaactgttagtggtgttctggtaaagaaaggtttcacatatcagataatggctcccgatgatctccacatcttctcacagctttcaaccgcaaacatcactcagaggatcactatcccattcactggcgcctttggtgtgataaagcatcgactccagcagatatacgagagtgtggaatcttcaccagatgaaaagtctggggttccgacattgcgagtgcatgatagtgtgactgtgaagcaggattcagatangcacntctcattgcattggaca

SEQ ID NO: 199902 - DNA, 406 bp, Gossypium hirsutum
tcatgacctcagcatgatctctcatttttatccgggggggttttctcttttcaaccgtttcttcccatcctctttatcctctctctctgcaaccttacctctcctcccatttccctcaccatgccaggcaaccaagaagttatgtggcccagattagtggctaacaagatcctcagaaagagattaggaagcaacaatttcgtcgctgatttcccatgcaacaaagaaattccaagcttagatcgtccatcgttgagtcccaacagtatattcagtcaccacaaggatacccataactacaggattttcgttagtacatggaatgttggaggggttgcaccacctgaagatttggatatagaggatttgttagatactggcaacacctcctgcgaaatctacgttc

SEQ ID NO: 199903 - DNA, 650 bp, Gossypium hirsutum
  unsure (1)..(650): unsure at all n locations
nnnnnnnnnnnnnnnnnnnnnnnnnnnngaatttatttaaagccctttgcatttgactgcaaacattttttctcttctctcatcgcccttcaccttctttcttgctttcttgctaaccaaaacctctctattccctttccattcccaccgctttccttctgctttccttttgattctctccacaaaaggaaaagaaaagaattccatctttcctttttctctccttctttattcccttattctttcctggctagctataattgtagttggaagctgtgggtaaattcagttcgatccaaggaaatgggggtttcagggaagccaaaagcggatgagggtctagattcacaaggccaaaaatgggttttagctgtgatttctatacgagctccattgaagcctatatacacaagtggtccattggagacaaataatgatgaacaaagtgacgactcatgttccaccactccaacgggtgaagatgccaaaattcaaacctctttgacttgtccgcctgctcctaggaagccaaagccttcttgaagtgtagctatgaagaagtgtagagagtnttcactcctccgatttgagatgcctttatgcatgtcnaagggaagcttgtaacgactattataacccagttgtagacn

SEQ ID NO: 199904 - DNA, 528 bp, Gossypium hirsutum
tctttttgcgtcctgaagaagaagcaacaaatggtgcggagagcaatgctgcttgccggagccatgtatgagtatggacgaggcaacgaaaaacaagcactagaaatactcggtccagattttgatgcttatagttttaagattattggggcatctgatgaacagcttgatgtatttaatgaagtctggtacactatgttgctgaatactggacaagttaccaaagcaattgaatcaatcgagaaacagataccgaagagggaaggggctcctttcctgtggcgtctgctggagaaaggttataagctgactggcaggcaggaagccgcgactattggtgagagggccagactgttggaggcagcatatttcaactagcctgaatgtgcactagtagctacatatatgatatagcatttgtattaagaacagattgaatcaccgttccagtcaccaccataatgaaactagaatgtaacatgtcctttaaatttgcatatttacattacatcgtctgatatgtaatac

SEQ ID NO: 199905 - DNA, 499 bp, Gossypium hirsutum
cccacgcgtccgagaaagcgagagagtgataaatggatttattggcgactgtcctgctgggtttgcccgattgactaggctcctgctgcaagctttcctctccattaaaaatggaaataaatcaagccaacgcaagctcccgcctggtccacgccggattccaatcttcggcaacctcttcgatcttggggataaaccccacaggtctttggcaaagtttgctcggattcatggccctgctatgagtctcaaactcggcagcttaatcaccgtcgtcgtctcctcggaaacaacggccaaagacgatccttcaaaaactaggatcttatattctgcaaccgaaccattgtggatgcagctcgagccagccaacactatgaatttgggctgccatggttgcctgtgtcgccgctttggagaactcttcgcagagtcagtaatacccatattttctctagtctgaaactcgattccaatgaatacctgcgtcggcacaaga

SEQ ID NO: 199906 - DNA, 677 bp, Gossypium hirsutum
tgttcgaaactaatagaaagccaagacggttccccaatatttcttcttcttgaaaacccagcaactgtttatcaaaaagattttatatattgccttgtttctttctttgtttttggggttttgcaaaaatggcaacaagtaggatcttttttggttcaaaaccacgatatatctacccaactatggaatttgatgatgggaatctcatcaacaacccttcatttgatcatcatcatcatcatcatctgctggagttcgatgaggtggatgtatggaacaattcaaatgatcaagcaacaaccaacttagaagccaaaaaaccattgccaagttaccgagcttcctctaagaaagctttcaaaaagaaggagtttcagattagcgataataataaccataggagtgcccaaatgactgctgcttctgcttcattgccggtcaacatccctgactggtccacgattctcaaagcggagtacagggaacatgggaagaccgatgaagatcctgtcgacggcgatgacgacggtgttcgcgacggaagggttccaccgcatgagtacttggctaggagacgaggagcttccttttctctccatgaaggaatggacttgactggaaaatttctcggtaggatgctgtgaaaaaacaggttagataccacacatctcacacca

SEQ ID NO: 199907 - DNA, 407 bp, Gossypium hirsutum
cttttttattgctggccttgcatttacaaatggcttaatgtccaaacttcttccctcgatacagacccgcgacagaagaactgccccgtgtgcaaggcaagcatctcttcctgttcattggttcccctgtacggtcacggcacatcttcacattctcaacccaagactccacattcagatctgatcattccccaaagaccacctccttctacatcgaacatgaccgccccttcttcacatctaaatcaacagcttcacgaaaactttttccattctcagtcccaagcatttcataaccaacaatacttcccaccttatggaggatatgcaaccttggcatcatccgaccttagtggtataccgatgacgaatttcttccattcgatgatcggaactttgggagaaat

SEQ ID NO: 199908 - DNA, 472 bp, Gossypium hirsutum
ctctttcattcaatacccaccctctgatcattaccggaagccctcttgtactacccgcgggcccaaccttggttactctccctccctctccctctttttcaagttcaacacttttcaactggttcggttttgtaagtaagagggaaggaaaggaagaagagttttctttttatttatgattttcctgtatttgtttgtaattattaaaacttagattcagatgacagttttttccacttatagaagttaaagcttcttcagatctatgaagaaaattcccactgattttcttcctttattttctttgctccgttaaactgtagtgtaaattctatttctttgggtttttgaagatgatccttgaaaagaatccatttttctctttcattttcactccaaaaatattctctgtttttctcgagagaattcgagttccttttcactcttcttttacttgggttcttgagagaga

SEQ ID NO: 199909 - DNA, 391 bp, Gossypium hirsutum
agcgctttctctcatattgctccctgctgataggggtagaaagggtttctgtaggaatttattagttttgaaaacatggcaggcatttctttcagggttcttatgagagttgtgaccatctttgctcttatttttgctattgtctcacccaaagttgaagctcagtctgctgcacctgctccttctcctacaagtgatggaacttcaattgaccaagggattgcttacgttctgatgcttgtggcactggtgcttacataccttatccaccctctagacgcatcctcctacaccttcttttaaatcatattattcattttggtaacagagtactatatggataaatctatcaagttcctttctttttccctttctttttgggtgatggatg

SEQ ID NO: 199910 - DNA, 266 bp, Gossypium hirsutum
ttggtttagctcttgaacaaataccataagaggtacatgttgattggccgtgtaaaccagttccattacatagtgaagatttttaaagtggactaaggtcccgtggttttttcccctcaaggggttttccacgtaaattttggtgtcccctttttctgtttatgttgcgcacttatgtcaatatcttttgcagttttgataatgttcctttagcaggtatgataactgtgagctgtttaatttatcagtaaattactctgtttatt

SEQ ID NO: 199911 - DNA, 486 bp, Gossypium hirsutum
tcgtggacgcgtgggttgttgtgccagctgagatcttcccttcaagattgcgatcaacgtgtcacggaatatcggctgccgctgggaaagccggggccatcgtcggggcatttggattcttatatgcggctcaaagcactgatccggccaagaccgatgctggctacccaccaggcatcggtgtccgatactcacttatcatgctcggggtcatcaatctctttggaatgctactcactctactggcgccagaatcaaagggcacatcacttgacgaactaacaggtgaaaatggagatgaaaatgatgaaaaacagattcaaatggatccttcaaggactgttcccgtctgattctcaccactaatttgaagttcttaccaagtttcatgtcgcttcctagttactttcgtatttttttcttgctggttttatgttcaactacatgtatattgtgtgaatgtttgctttcactcgggtcgttggg

SEQ ID NO: 199912 - DNA, 366 bp, Gossypium hirsutum
gatcattttcttttcggatgtatgaaaatgatggaacctcggcactgacattcgtggagctgagctgcttctctagctgagaatgtaaccccacctcggactaatgggagcaaccttcaacacatgctcgtggacgacaaaaaagtaagcaaagaagaaactgaggaggtgtgatgaatatcaattttgtggttaagaaatctgattgtaaagggtttagcttcaataaggattcttaattcttggtttgtttttctaattttagatatgatggtttttgctcgatgcaatctataatccgattccccttttttgtaacgttacttatagccatttttttaaaaaaagtctgcatccatagtgttt

SEQ ID NO: 199913 - DNA, 328 bp, Gossypium hirsutum
ccctcgcgtccgttcttcaacttcagcatcttcaggatacttcgtgatcccccgcacttgctcctctcacctaccaccgccacatcacttcactccctttgctttcgcttttttcaaaaatgttgggggctccgatcaaaatatcttcttcgccttcttgctgttcttcttctgaaaatagaaaggcgatcatgttgtcgccggtttgtttagataaatcgaggtcttttcagtttcttttctcgggttctaaattgcggtgctccaaaactttggataccaagcagctctccagcgccaagttcaaggtctcccgaggatcgaaatt

SEQ ID NO: 199914 - DNA, 639 bp, Gossypium hirsutum
aataatcccttcagccctagcaatttgcatatcttagaagttgtcagcacccaccaaagaaaaagggtgacccctgaatcttgaacgcccagccatatatggaaggaggtgaaagagggagctcagccatccctgaatctgtgatgaattcagtgaagacaacgctagtaaacgttgaaaacctaaggacccatttgctcgaattcttgtccctctctgaccccgatgtccttgctcaaatgccccctcttcaacgcgctcaggctttcttcacccttgccaaagccaccactactcttttcgctttgaagttgagatgcagtggagtgcacccagatgaacatcctattaaatcagagcttgagagattaagcttgtatcaagagaagctagagcggttcatagagttaagtaaagcaccgttgcgaccttcaaccaccttgaactctcaggccgcaacccgtttcattgagcattcgttaccagacctgacccctgagcagaggcaaagtatgaggcaaatcagtaaaggggaggggccaacgataaaatattctggtagtaatggtaaaaagaagagaaaatatcaatcctctgaaaaacaatctgttgaagatgctgctaaagaattccttgagc

SEQ ID NO: 199915 - DNA, 516 bp, Gossypium hirsutum
agtcttttctaggatgccaacacagcctacacaagggggaggttattaggtccaatcattccctcagtatcagcagcaatggcctcaacaattatcacagcaagtgcaaccgcagcagcagtcctctatgcaaccacagatgagggccccatcaacaccagcttactctccctaccctccaactcaatcaacaaatcaatctcaaccagaggcgttgccaaacagcatggccatgcaggtctcatattctggacttcctcaacccgtgtctagccgtgctgataccattacttatgggtacggagtacctggcagaacagctccccaacaacctcctcaacaaatcaaaggcacttttggagcacaaccgactgataggtacacaggacctggctccaatcccacctttcctccaggaagtgcatacatggtatatgatagtgaagggggtagaacacatcacccgtcccagcagcctaacttcacacagggtgggtatcccccaacagcaaatgt

SEQ ID NO: 199916 - DNA, 476 bp, Gossypium hirsutum
cccactcgttcggacgtcgatgatttcttcaacttcgctcccattttcccaggtttcgagtctaaccgaatggatgtttttgaatttgactcgaaacctcaatttatccatctaaccgctcctaagccctttgaatttgcacctcaaatcactgaactttcagctggtaaacctccagctccttcgagttcgagttcgagttccagctctcataatcgaaaaccgtcgctcaaaatatcgttaccgcataaagtagagtggattcagttccgcaaaccggattcgactaaggcacagccgacgaattcaaattccgaagacaaaaataagcattacagaggtgtccgacagagaccgtgggggaagtttgcggccgagatccgagatccgaaccgaagaggttcacggatctggttgggaacctttgataccgcaatagaagccgcaaaggcttacgaccgagccgcttttaagct

SEQ ID NO: 199917 - DNA, 342 bp, Gossypium hirsutum
ttccacgcgtccgcaaccaacaataccaacattgccaaccactcagccatcgttacccaagcctggtgctctacctccacttcctaccatgccaacattgccgaccatacctaatgccccaaaactgagcatgccacctctgccgaacattccctccttccctacaataccagctactatgccatctattccattcttctcgccaccaccggccaaaaactagcccttcaaaatggtgtcatctggattatgcgtctttgctttggtgcgatggtgttttgttgcatctcttagggaatacatagatggttttttagacatttgtttcattccatcatactt

SEQ ID NO: 199918 - DNA, 478 bp, Gossypium hirsutum
cccacgcgttcgctcggtctcgctcacgctcacgctcaaagaggttttgtggactttgacgtggcccctccagctccagcaatgttagctgctggtgctgtggcagctgctgctgcagggcagattccggggacaactaacccaaccatacctggagtgtttcctaacatgtttcctattgcaactggacagccatttggtgctctcccagttatgccaggtcaggcaatgactcagcaggctactaggcatgctcgtcgggtgtatgttggagggctttctcctactgctaatgaacagtctgttgcaactttcttcagccatgttatggctgcaattggtggaaatactgctggtccaggggatgctgttgttaatgtctacataaaccatgaaaagaagtttgctttcgtagagatgagatctgtagaggaggctagtaatgcaatggccttagatgggattatctttgagggag

SEQ ID NO: 199919 - DNA, 607 bp, Gossypium hirsutum
ggacaaagtaccatttaggttatccttataatctggacttcgattacggtgcattagcacagttgcaatatttctcggtgcgaccagtcttggagatccattcattgaaagcaactatggagttcattcaaggcagtttgaagttggtgtgctagattggtttgcccgtttgtgggaaatagaaaaggatgaatactggggttacattacaaattgtggtacagaaggcaatcttcatggaattttagttgggagggaagtgtttcccgatggaattttgtatgcttcacgagagtctcattactctgtctttaaagctgcacgaatgtatcgtatggagtgtgtgaaggttgacactttggtctcgggtgagattgattgcagtgatttgagaccgaagttgcttgctaataaagacaaaccggctatactcaacgttaacataggaacaactgtaaaaggagcagtagatgatcttgatgttgtgatacaaacccttgaagaatgtggattttcacatgatcgattctacattcattgtgatggagctttatttggactcatgatgccttttgtcaaacgggcaccgaaggttagtttcaaaaag

SEQ ID NO: 199920 - DNA, 427 bp, Gossypium hirsutum
tcttcttcttcttcttcttccagtgctcgtcaacaatggctatctctttgctttccaagttctccactcaaaccctactcattgcgtccattttcgtagtttcagctctgggtcacgatttctccatcgtgggctattcgccggaagatttgggttctgccgataaactcatcgagctcttcgagtcatggatatcgaagcacggaaaaatctacgagtccatcgaggagaagctaatgaggttcgaggtttttaaggataatcttaaacacatcgataagaggaacaaggcaatcagtagctactggctggggttgaatgagttcgctgatttgagtcatgacgagttcaagaaaatgtatttgggactcagaccagatgttagacgaagatcccagtcgactaaagactttagttatggcgatgt

SEQ ID NO: 199921 - DNA, 434 bp, Gossypium hirsutum
gaaagtaacactcacgcttgggaatgatggggtttttagcagtgtgaatgagacgactggttattatgggggaccctcataaaagatggctaagtgcacgccgcttaggtggttattgggtcccaatcttcactttcttcttctccccttttgtttgtgcgtatcgtctttcctttgatgttgaatatattgcataagcaaaagagcatgcaaacaaatttgctttgaaagcccctttcaatggccttttatatggggtagtgttgttatgcatgtatgtacgtttggtccttttttttcatgtatgctgtcatcaagggggttaaccatagtttttttagtgctttgatgtgatgggaatgatgttatatcagtcatggatggatgtaattttatataaaaaaaaaaaaaaagggcggtcgttttagaggatc

SEQ ID NO: 199922 - DNA, 172 bp, Gossypium hirsutum
tcgttgcattaaatccggatgaaggtggataccatgtactgcttgctaacatatacgcaacagcttcgatgtggggtgaagtagccaaagttcgaactacaatgaaaagaaagggcttcagaaaacgccccggctgcagtgtagttgcgttgagaaatgaagttcacagttt

SEQ ID NO: 199923 - DNA, 658 bp, Gossypium hirsutum
  unsure (1)..(658): unsure at all n locations
gaaaaagagagaactagtctcgagttttatttgggcttcgtgctttctgtttccgaggagaaagaagagagatcactgcgaaacagaaaaaggaaaacttattgtggccgtacgattactcctcatcaacggctttgatttgcttgttctcttagatccctccttccttcatcgttcatctcacctcctttggtctaggtctctttaattgagcaatattacaatgggaaaactacgccaatggtagaatagctcggttgcgtctacttggctatcaaaacctcatataacttgcctcaactgatagatcatctgcttttgctttcacaaggccgtcgagatattgaaatgcagtcacctcctgaaaaagcttttgttatgttgaaaagggaagcaactgacttggctgggtcaagttttacaagtcacgtggatagtactttccaagatgctgtanatgctgctgcttcttctgcttcatcatcctcttcagatgatgactctcaggtgacacannatgaagacgaccctttatatggggaatacttctaacagtggtgcttatgatcctgctgtagtantactgtggttgtcgcctcctaacccatcaatggcgactnctgtggtccaagatttctcatcaaactttgcatcgtgg

SEQ ID NO: 199924 - DNA, 241 bp, Gossypium hirsutum
gctgttttcaggatctttgcagaaccttctgaaactcgggactaaaaatgtcggtgtgggccgcaactatgccgcgctcgccaaagaactcggcaacgccctccccaaggaaccattactgcttttaaagccgacatcatcttatttggaaagtggaggtacaattgaggatccacattcattgaattcattggattatgaagttgaacttgctgtcgtgatcggaaaaacggctcgggat

SEQ ID NO: 199925 - DNA, 510 bp, Gossypium hirsutum
tcaatttcacttccattttattaattttagcttcccaagaatggcttctttcggagaaacatcatctgctttagaactcataaatcaacaccttaatgattttgcttcaatggaaacctttcttttcacctcctccaacaccccagtttcataaacaatccaccctaagccaacgtcgtccttctattaacgtcacaattccaccatcgaaagttgaaataacctccaccgccacgaaagccatcgaggaacatgacgagaaaaggcattacaggggcgtaagaagacgaccatggggaaagttcgcagccgaaattagagaccctaatcgaaaaggttctagaatttggctcggaactttcgaaaccgctatcgaagccgctaaagcttatgatagagctgcttttaagctacgtggaagtaaagcaattttgaatttccctctcgaaatcggaaactcgaactcaactgaatcccaaccctcgaataaaagaaaaagagaagaagaag

SEQ ID NO: 199926 - DNA, 773 bp, Gossypium hirsutum
agggatctccacggcgctgtggtggccaaggtgatattctttctggaagtgttgcggtatttttatcttgggctcgtcaatgcaatctggccgccgaaaggggatcaactatcaatcgaacaaatccaaccgtgttgggttgcattgctggctcagctttattgaggaaggctgcagctcttgcttttgagcacaaaaaaaggtcaactcttactaccgatatcatcgaacacttggggcaaagcttggaagcgatttctccagtatcttgataatagacaccaacacagatatctgtccccgtatgcactcagaaggctgtttcgatgacaaaagtatagcgcgctaaaaacttttctttcatgtaatggaatataataatatttcagcgtttgcatggaatgttgatgaacataatgtaaaaggcgagaggattctattataggttggagagcaatgaagatctctactattttatcttgaggtgattaaagtaccttggtccttaacccgttgaccatttgggtactttcactttctagcgtcacatcgcaagccaatattgtcttcttttgagtacctgcaagtctctcaagatccctccattcggtctggcagggcaggtgggtacttgaagaagacaataccagtttgtgatcactatgccaacacagtgcaactacccagggaaatgatagtattaggttggtcggtgagtcgtgacggttgtacaggcatgtcaaaaacatcaacaataaagatgaatgaattca

SEQ ID NO: 199927 - DNA, 270 bp, Gossypium hirsutum
ggccctccaaactcctctctttgccccatgagaaataggaaactatagtttttatttataccttttggatggatggtgcttgtaaagctctcttgtttttgattcatagcttgtttccttcagtaaatgccatctgttgtaaaaatactagtccacgaagtacacagactttgacattttagagttggctttacctggaaatctctttgtcttggagtctgtatctgtaatttgtgtgtaagatgttatatatttataaaattttgaccc

SEQ ID NO: 199928 - DNA, 529 bp, Gossypium hirsutum
ggcatgttgttggatgaaggagatagtggctttcctagggaagaagacaccaataatgcagattttgaggaagatcaagcttccttgcacttaagggactctgatgaagaaactgaaaatgattcagtgatgatggaaggggacaatatgacaagggaacagatagaggatgagattaaaaaaataaaagaggcacatgccgaagatgaggaatttccagatgaagtggatactccactagatgttcctgctagaaagcggtttgcaaaatatagaggcctcaagtcttttaggacatcctcgtgggaccccaaagaatctctacctccagaatatgccagaatttttgcttttgatagttttgccagaacacaaaagcatgttgttgcacaagctttaaaagtggagcaagagggcagggatgactgtgcaccagttggttcatttgctaggttttatatcaaggaggttccttttcatgttgcttccaacttgtgtgtggcctcaagaactgcacccattgttttat

SEQ ID NO: 199929 - DNA, 956 bp, Gossypium hirsutum
gatagcagaggaagtcggtggtgctgttgcagcagctccacttgatgcgcagattgagctcttcaatgcgctagttgaaggatgcagggaagctgttgaattaggaaatatagaacctaagggaccattattagatttctttggtgttcctgttaaggcaaatgatctgattaatcgtgtccaagaacttcagctcttagcaaaacgaataagtcgatacgaggatcccataaaacagttccgtgtgttgatgtaccttaaaccctctaattggtctaaagggtgtgggtggaatcagattgatgatgcaagattgcttctgggaatatactaccatggatttggtaattgggaaaagataagattagatgaaaggcttggcctcacaaagaagattgctcctgccgaaacttcagcaccatgaaacctttctgccacgtgcacctaatttgaaggagcgtgctaatgcactcttggaaatggaacttgcagctgttggtggtaagaatgctggtgtcaaagctggtcgtaaaccttcaaagaaggaaaagccgaattcttttaactgatctatatctcatgtcagagaccataaaagtgaaccgggttcttactaagggagttttaaaatgggttgggccaaaacgctagacccctaaagggtaaccttattttaaaaaaaagggaaattttttcactcggggaatttgtcccctttaggggttaatgtgttgaaggggtaaaattttatgtgtgtaaataaacccttcggggttagaaattgggactttgtggaaatttcccgggaaaggtcttcaaaattggaattttggtctttttgagggaggtaaatattgtttaaaaatgaacgtttttttcaaaaatcggtacacctctttagatattttctcattaaaattcttggggaggttcttattttttctttattcagagga

SEQ ID NO: 199930 - DNA, 441 bp, Gossypium hirsutum
cccactcgttcgcccacgcgtccggactctgctgttcgacatgttcttctgagacagggagtactgggcatcaaggtgtcggtgcatgcctcgctcgtgaatatagaatggtttgccatgttatgcgcggagaattcagcaaagactttttcgagggttgcagggctatgctactggataaagataagaacccaaagtgggagccgtcgaaattggagcatattgctgatactacaatagacaggtatttctccaaggtgaaggatgaagattgggaagatcttaagcctccaactagatccaaattcaacttgccaccatatgtcattgcaaagctttagatgaccactgagatgatcatgttaagagtatagagcacacagctgtaatgtctataatgaagcaaagcccattgggtctaaatatatatatatatgcatg

SEQ ID NO: 199931 - DNA, 874 bp, Gossypium hirsutum
aaaaagttgaaaaaaagccaacccaaaattaaaaaaagagccgccttttctattttttttgctgcttttcgccaaggaagcttttttttttcccccttttactactgttattcttcatttctctctacttaattgagaggaaaggaaaaaggttgaaattttggaagatgaacggttttcagcctcctcgaccagatttggctgatgaagctaatcatggtgatggtttcattagaacttataaagcttggaaaggcagcaatgtatttgttttgggaggaagatttatatttggacctgatgtgagatcccttttcttcaccatcttcttaattgttgctcctgttgctgtcttctgcgtctttgtagcaagaaaattaatggatgacttccctcatcacctcggaatatcaataatggctgttgttgtggctctcactttatctgatataactcttcttctactagcctcaggaagagatcccggtataattccacgaaacttgcacccgcccgaacctgaaggttatgaaggaatgactgaagttcggcctggccaaactccaccattacgattaccgcgtacaaaggatgtgattgtcaatggtataagtgtgaagatcaaatattgtgatacatgcatgctgtacagacctccccgatgttctcactggtctatatgcaataactgcgttgacagattcgaccaccactgcccttgggttggtcagtgtatcggactgcggaattaccgattcttcttcatgtgtgtgttctctacaactctactttgtttatacgtgcatggattatgctgggtttatatccggaggatcatgaatggcgaggaggctacaatctggaaagcgatgac

SEQ ID NO: 199932 - DNA, 543 bp, Gossypium hirsutum
aaagttcacggcaaaaccctcgagatattccacgatgatcattcaagtcaagctacatcaatcaaacagagagcagaagaaacattccagcagacatatatggattatgagccgagtgggacgactccaatacgaagcgaacaagatgtaccgaccaaggggactattgaatcattacgagccatgccaatggaagccttggtcgaagaatttcgagaaaacaactcgtacgagtcatttgaaccaaagttgttaaagtcatcagttgtaccaacacgctctccccttaccgaaatcaactaaaatccagtgtgctctctcttacattcataatattctttgcaaaaattatatttgtattttgtatgattaaggccacacctgttagtcatcattcatcatcatcattggatgattgtaaggttgcagccagtaaatggaggtgaaagggggtatactacaagttaccagaggcatcacttggtaagaaaaatggaaaaaaaaaggtaataagttttttttctttcggtttattgatttttt

SEQ ID NO: 199933 - DNA, 479 bp, Gossypium hirsutum
cccacgcgttcggaagaactgttgaaaacattttggagctagctgggttcaagaatgtcaaatctaaggttattggctcaaggaaccctcacaacaccgtcaaggctgtttttaaagccctcaatgcagttgaaacaccaaaagacattcaggagaagtttgggagaacggttgttgagaaacacttgctgcaatagccccccccccccccaattcataccctgtattttggatcagataaattgaaaagaaaaaccccttcaaagttttgtcattgtttgatgctttgccatgtatttggtttcatagcccagcacccatttcaaccatttttttttcttttgaaataattcggggctctggttttgtgcctaaatattttagataatttttttttctttttctgaacttggttttctcctcttttttttgttcttttcttttaagtccaattagtgctttggaaaaggtcttttagc

SEQ ID NO: 199934 - DNA, 730 bp, Gossypium hirsutum
tttgttgtagttggtcattgtacatacataatggtgttgaacttagtgaagatgataacgatggctaatctgctaagtatgcttatattaatggaggtggtggcgggtgggtttccatttggagttgatggtcttcgcatggactactacataatgagttgcccatttgctgaatccatagtgaagaacactgttaatagagctttgcaagatgacccaacgttggcagcagctttggttaggatgcatttccatgattgcttcgttgagggatgtgatggctccattctgattgactcgaccaaggacaacacagcagaaaaagactcacctggaaacttaagcttgcgaggctatgaagttattgatgatgcaaaggagcagctggaagatcagtgccctggcattgtctcctgtgctgatattgttgcaatggctgccagagatgccattttctggtcagagggacctgtgtatgatataccaaaaggaagaaaagatggaaggaggtccaagatagaagacaccataaacctgccattccccaccttcaacacctcagagctcatcagcgccttcggcaagcgaggtttcactgctcaagaaatggctgctttatctggggcacatacgttaggagtggcaaggtgttcatccttcaaaaacagattgagatacgcagatgctaacctggattcgaatttcgcaaagacgttgtccaagacatgca

SEQ ID NO: 199935 - DNA, 577 bp, Gossypium hirsutum
ttgtaagggtacccaaaaagactgaagactatttcatcatttattcacattcttcaatcttcagctatagacgaagaaaaaaagaaaagatgaatcaaaacatgagctctttgttgatcggaatagttggagcagcagtgactttatcagcatattcgcagactttcatctccccgactcagtgtgtcactgttggtctcctcgttctcatgtttggtttgctcgtcagggaaggcctcatctctctctaatcttctttttttcttccatggaattgagaatcccagatttgcagtttgacttgtttcaatcttatattatgatgttcttctttagcaagactgagatttatatatatatatacgtatatatatgttgtaattctgtatttcctgcttaattactccgtgatctacttatgctgtttatttatacatattataagatgaaacatgcttgaattcatggtagtttttcatttagtaaatgaaaaacatatcttggtaaaattaccatgaaggaccttgtactacaaattagtcctcgtatgttagattaaagaacgatttgatccttt

SEQ ID NO: 199936 - DNA, 558 bp, Gossypium hirsutum
  unsure (1)..(558): unsure at all n locations
atgagttccaaaaacacaggcttggagctgggcagaactgctcagccaccacagagggcaatcaccaactcactgatgtcgtcctccctgaatcgaaagattggagggaagcagacattgtcagccctgttaaagaacaaggctcctgtggatcttgctggacattcagtaccactggggcactagaggctgcttatcatcaggcatttgggaaagggatctctctatcagagcagcagctagtggactgtgctggagcctttaataactttggttgtcacggagggttgccgtctcaagccttcgaatacatcaaatacaacggtggcctcgacactgaggaagcttacccttacactgctaaagatggtgaatgcaaattctcacctgaaaatgtgggtgtccaagtcattgactctgtcaacattaccttgggtgccgaagacgaattgaagcatgcagtcgcgttggtccggccggttagtgttgcgtttcaagttatcactagtttccggttttacaagactggngttttcaccagtgacaaatgtggtacca

SEQ ID NO: 199937 - DNA, 886 bp, Gossypium hirsutum
  unsure (1)..(886): unsure at all n locations
caacataatttccctctgtttctttcttctcatctcatttgcctgaaaatcaaacgagaataaaagaaaagaaaagcaggagaaaaaaaaatgtacagatacgagcgtgtgagcagcacgagtgtcagtaaggcggataaggtagatctagagtcaggagacactctgtacccgggactcagctacggtgagaaccagctccgatggggctttatccgaaaggtttacggcatcgttgcggcacagctagtgttaaccaccgtggtctccgcctttgtggtgttctcggctccggtcaacgagctcctccgtggaaactctggcatcttgctcttcctctgtttagtccctttcatcttgttgtggcccttgcacgtctatcaccaaaaacaccccgtaaatctgatcatcctcggcctcttcaccgtgtctctgagtctcacagttggtgtgagctgcgccaacactgacggaagaattgtgcttgaagcactaattttgacagcatgtgtggttgcatctcttactggctacactttctgggcatctaagaagggcaaggacttcagctttcttgggccaattttgttcaccagccttattattctcatcttaagtggtctaatccagatgttcttcccacttggctcaacgtcgactgctgtctatggcggcattagtgccttgattttctgtggatacatagtctatgacaccgacaacctgatcaagcgcttcacatacgatgattacatattggcctctgccactctctatttggacatcttgaacttgttcatttccattttgcgggtgctgagatcaggcgacaactagttgtatgatatntctcaccaaggtcggatcagtaagaaaatggacatac

SEQ ID NO: 199938 - DNA, 948 bp, Gossypium hirsutum
  unsure (1)..(948): unsure at all n locations
atttggttgcatttggtggatacaatgggaaatataataatgaggtttttgttatgaaactcaaaccaagagacttatctcatccgaagattttccagtccccagcagcagctgcagcagcggcttctgttactgctgcatatgccttggcaaagtctgaaaaattggattttccacaaataatagatctgaactttaatggagttgaaaacaatgttcctaaaaaggatatcaaccttgaaattaatgcaattaaagaaaagaaggtggtgttggagtcgtcaattgatgaagccagggctgaaaattctaggctgagagagaagattgatgaattannaagcaatcatactgaattgtcgaaggaactccaatctgtccaaagtcagctgatatcggagagatcaagatgctttaaacttgaggctcaaattgcagaactacagaagatgttggaatcattagagtccatagaaaacgaagtgcaaatacttaggagacaaaagtccgcactggagcaggagatggaggtttcatctacccagcaacaaggttcaggtggtgtttggcggtggatagcccggggcacatagaagttgcatatttttcataccatcattgctacggtatctccgaagcaatggctaggtaagttccaatcccactgatatcagagagtgcaatctactcgaatatcacttagattgtacatgcggtttacatttgtttcgttacttttcttaataagtgtttgtgagctttcgagtttgaccattaaaattttctcgaagctatagaatctgaagttgttaaaattgtactttccgttgtcggttgtatcagctcttcttttaattttcaagtctttttattccgtatcctgtaaaccagtatactcacgcatgttttcatatttgattgatcatattataccaaatcttgacattt

SEQ ID NO: 199939 - DNA, 453 bp, Gossypium hirsutum
tcgacaacagcccagattcagaaacaacaaaagaagcaacccagttgggtcgacgacgatgatgaatcggatttagtgtcggagttccgggatctaccggctaagttccagcaaacacttataccggacctggagagaatctcgacaacctcgaaagtttacatcaacatatacagcaaagagttcaccaaacagttcaaaccatatgtcggcaacaaacatgctcccaccattgctactgtaatctcttgtgctttccttttaatcccgttactattagtttccctcatttttaaccgcatcaaagcttatttttcactccaaaagattctcatcttcatccaagtttacctctcgatttacttttcaatcctttgccttacctccctcgtcactggacttgagccgcttaagttcttttacgccacttcgccgtcgacctacgtgtgttta

SEQ ID NO: 199940 - DNA, 446 bp, Gossypium hirsutum
gttctttatcatgttcaacaatgcaggcattcctgggggcaatgttgtaagagtgacacatgccggtactggggacttcaagagagtgttcgatgtcaatgtattgggtggtttcttgggtgccaagtatgctgccagggccatggttccggctaagaaaggctgcatactcttcacagcaagtcttgcgtcaaaaatctccgtcggtctcccccatgcatacaaggcatcaaagcatgccgtcgcagggctgacgaagagcttgagcgtggagttaggtgagcatggaattagagttaactgcatttcgcctaatggaattgtgaccccaatgttacaaaaagcaattgggaatgtcgataagaagaaaggagaggagatggttgcggtttcagccgtgttgaaaggcaccgtattggagcctgaagattttgcgcatgcagcac

SEQ ID NO: 199941 - DNA, 735 bp, Gossypium hirsutum
tgatgttcattgttgattgcaaattgtatttctctaactggttcatgttcattgcttcatttagcccagagggtaactcaacttttcatctgaagcattgcggttttctttaatcagaaatttatcagctctgtcaagactttgtataaggcgtgtgttcattaaattggttttttgacaggctggatactattgctcagtttgcgagtgtgttgtgaaagattctgctaactacttggatcacatcaatgggaagaaacatcaaagagctttaggcatgtccatgcgagtagaacgggcatcccttaaacaggttcaagagcgatttgagcaattaaaaaagcgaaagcctcctggaagcttcacagagcaagatcttgatgaacggatcatcaaacagcaggaagaagaggaagagcgaaagcgccaacgacgagaaagaaagaaagagaaaaagaaagagaaggccgcagaagaggaacctgaaattgatcctgatgtggcagctatgatggggtttggtgggttcggatcatctaaaaaatgatcgcatttgtttatgtatgattacatattgttttatttgactctagttattcaggcttttggtggttgactgacttgtaaggtttcccggttcaaaagggtagaaaagtaaaaattgctcaacatgcttcatgtcgtcttccagattccgagttcagtcatggaaaaattactaaacttgagcatcta

SEQ ID NO: 199942 - DNA, 826 bp, Gossypium hirsutum
tcagacccagtttgccatggcctactatgtcatcaactattccaagctgcgtatctgggagtttgtggagtattccaagatgatatacttggacggagacatccaagtattcgataacatagaccacttgttcgacatggaagatggttacttttatgctgtgatggactgcttctgtgagaaaacatggagccacacccctcagtacaagatcggctactgccagcagtgccctgataaggtccaatggccttcgcagcttggtcctaaacctcctctttacttcaacgctggaatgtttgtatatgaacctagcctttctacatatgatgacctcttgactaccctcagagtcacccctcctaccccatttgcggagcaggattatctgaacatgtactttaggggcgtttacaggcccatccctcccatttacaacctggtgatggccatgctatggcgccaccctgagaacattgagctagacatggccaaggtggttcactactgtgctgctggctccaaaccctggaggtataccggcaaagaagacaacatggacagggaagacattaagacgctggtggctaaatggtgggagatttacgatgatgagtcgcttgactacaacaatgtcgtggcttctggccaagcagcagaagctgatgaggataagcaaagcggcctgcaactgcttttggcagctttgtcaaaggccggcggctttgttcaccgtattaacgccccttccgctgcttaatttggtgacgatacagattagtaatacaatacaatccacctaagctaaagcagtgtaagaatgaat

SEQ ID NO: 199943 - DNA, 497 bp, Gossypium hirsutum
ccctcgcgtccgttagcttctggtttcttcttctcaaactcttttcttggggggtgggtttaattattaactcaaaggaggaggagagacgatgagaatggaatcactcggaaaatcatttgaaggccaagttttgaagaaagattttaaatttacattcgagtcatggcctatataaaaaatttgcagcaaattaagaagaaggtgatgatgctgatgacgacttcgaggaattattaacctcctaggcaagtctaatgcttggctttttatcctccttttttttattttctttttcttttttggggtttttatcatgtttggttgctgagaaaatggaggaggatagatactatatgaataagatttcaaggctatgtatgtctttcagtaaccaaacagctcttcttctttttcttgatttggagttcttggatgctccgacactgtaagagaaagctttgtgaattgtgaagacattaaattacttttaattc

SEQ ID NO: 199944 - DNA, 574 bp, Gossypium hirsutum
  unsure (1)..(574): unsure at all n locations
tccattcgtccggccaggttcaggttcagctgagggttgttggattattttcagataacaaaagatggcagctgcaatgaaactcatctctgttatgggattgattgtgcttattagcctgggaaaggtggttgatgcagcaggggaatgtgggaaatcatctcctgataatgaggcaatgaagctagccccatgtgctgaagctgcacaagatgagaatgcccctgtttcagccagttgctgcgcccaggtgaggaaaatcggccaaagtccgaaatgtctctgtgccgttatgctctctaacactgctaaagcatctggaatcaagcctgagattgccctaaccatccctaaacgctgcaacatagccaaccgtccagtcggttacaaatgtggagcatatacacttccttgaatggaaaatttgggagacataaaaagtgctggagctcacttgttgtaccacttaatatgtagctttaagcttacctttgtatgaataacagcttaaagcatgtttatattatatccaatnttgaagttcaataaaatcatccatgtttctgcttttaaa

SEQ ID NO: 199945 - DNA, 460 bp, Gossypium hirsutum
tcttaaaaatgggctccacccaatccgttcaagcagtcgaagaagaacacgaagaaagcccagacgatgacgaagacgacgacgaagacgaagaagaagacaataaccaaggaggacccaacatgaggcaactcgaaaacaaccacttggtgaagaaagtactggaacaggagccggaaatgttaccctgttacgcttcagcgacccctctctctccacaactatcttccctgggtactcctaggatgggtccttctatcaaagtgtgggacccatataatgttttagctccacctcctccgctgcctccgcctcctgttttctccccttctttctctttccaccatgatcgattgctgctcgaggtttatttcatttgccatggcgagtctgatttgaatttgaggcctgatattgtcggtggaagatgcgacggtgccgccttgacctctaatggcaa

SEQ ID NO: 199946 - DNA, 384 bp, Gossypium hirsutum
ctctcaatgtcattccatagttccatcaatcggactacggctccgattcggtcataactcttctctttgaagcggcgaaagccgcttagcttgtttgaaaacgaagcataaacgtttgttcgtaacactaatacggaaaatatacatcgaattacttacgatggaagctgatcctggtcttataatgggtcactataaccgaatgagcttcctagattcagattcgaagcttgatgaagcgagattttgatggtgtgagtttgagatgatttgtatatatcgatacactcctccccgtcggcatcgcacgtcaaccccccccattcgttgtcgtcgtccaagtacttgagattgattctgtcgacatcttcaatattgaaatgc

SEQ ID NO: 199947 - DNA, 410 bp, Gossypium hirsutum
tttatatttcaatcagccatctcctcctctaaatatgcttagacggtgtcggtgatctcctcctccgctcagattttttagccttcgatttttttttatttccttttgttctttaaagatccgtttcactggttttcggatatatttttttgcaccgaatccgattcagatcggataaaaaatggcagcatcgagacgattacgtgatctccaatcgcagccgggtaacaagacttgcgtcgattgcaatcaaaagaatcctcaatgggcatcggtttcgtacgggatcttcatgtgtttggagtgttccggtaaacaccgtggtttaggtgttcacatctcgttcgtccgatctgttactatggattcgtggtctgagatccagatcaagaaaatggaatcgggtggca

SEQ ID NO: 199948 - DNA, 775 bp, Gossypium hirsutum
tggtgctatgcagaggagaaccctggacatagcagactctatagacgaagcaatggcttgcgatgctagagtggcggtgcgtgccttaatcgaaggatgtcctcgagtgtttgatggcattaaaagtttggttgatgttggtggaggcaatgggactgctttatctatgatggtaaaggcattcccttggatgcatggcatcaacttcgatcttccccatgttgttgccggtgccccgaaagtcgatggcattgaatacgtaggaggagacatgttcgagtgtgtcccaaaggcagacgctgctttctttatgtgggtgttgcatgactgggatgatgaggaatgcatacaaatcctaaagaaatgtagagaagccatcccacaagacaaagggaaggtcataattgttgaatctgtgcttgaagaagatgaaaatgacaagctagaatttgtggggttgatgttggacatggtgatgatggcacatacgaacaaaggcaaagaaaggaccttaaaggaatggaagtatgttcttggagaggctggattcaccagaatcgatgtaaaacccattcatgctgttcaatctgtcattgaagcttatatttagaaattccaccttgcctgctttctttcaactttgtgttaataaatggcttcttttactattaaaccttaaatcctgtcgggtcttttattggccaaaccatatgagatctgttgtgggaaagatgtaattttctttttccatctgtttattattagtttggcttgc

SEQ ID NO: 199949 - DNA, 505 bp, Gossypium hirsutum
cggtcgtttgggcaagactagataaaagtccgggggagaaaaaaatcactgcccgtgtagtgtgaactttgatcccatatttatgctctccggaaaaagaagggaacaaaagggatcgaggtgagcccgagtctgagcctttactcgctcttgttttagttttcattaatttttgaaaatttaactctgaattagatatataatatatacagtttgtactgaaggcaccgaggtagtttcatagcctcgtgatcggcggcccttctctatttagatcttaattttcccaaaaggaaagaaccgttatacttgtatgattgttcttggtttttatttaggtttgccattagaagaaatgcctgaatgactgtttctcaatggcggaatcatttgtgagaattaggataggttaaagttttaccattttctcgttgtacatcgcacacattttaaccttgtcattttgtcacgcttttgaatatccaagtccacttcttcttctttc

SEQ ID NO: 199950 - DNA, 439 bp, Gossypium hirsutum
tgataaaccatcattttgatctgcagttcacggccggcattccatattctcacgtgcaacagcaggtgtcaatggctcaagtagcagcagctctctctctctctttcctcatcttttccttcattccaggtggaactttgatgatggtaaatggacagaaaagttggtgtgtggctaagccatcatcggatcaggcaactctactggcaaacattaatttcgcttgttctcaagtggattgccgcgtaatgcaaaagggttgtccttgtttcagccctgataatctgatgaaccatgcttccattgctatgaatctttactaccaagccaagggtagaaacaagtggaactgtgatttcagaggctcaggtcttattgtcatcactaatccaagttatgctgactgcatttatgactagcctaagcttatgactggaca

SEQ ID NO: 199951 - DNA, 492 bp, Gossypium hirsutum
agtttgtaatcagatttccccgatttcatttttcccaattcagaattagatttccccaatttcctaacttctttccgcgattttcttcacatctgattcaagctcctccaagtcctcttcggaggtaggctccgattcagctcgtcgactgtcgatgcaggtctcaaaggcgacggtttgaaattgcttgttttgtctttcttctggaaggacgttagggttttgtaatttgagaactcgagtcgagcttagacggaagtcttgtcaattttagaggctaaggctgcatgtgttctgattgatctatgttgtggtgtgctagccccttggataactcaggtcattgcaaaggttggtctgacgctggaactcatggaggaccttttgggtataatccagggagcctgccactcaacagctcgtgctcgtgctcgtgctgcacttaagtacatagtgataggtctgtctagtcacatggatgatatacttggg

SEQ ID NO: 199952 - DNA, 752 bp, Gossypium hirsutum
  unsure (1)..(752): unsure at all n locations
cagcagccagagattgtacgagagattacagatgttcttgatgctgttgggaacacgacaaaagctaccaccaaaggttttgccattggatctgcagcacttgcttctttccttctgtttagtgcatatatggacgaggttgcatcttttgctaatgaatcttttaaacaggtcgatattgcaattcctgaggtttttgttggtggattgttgggatctatgcttatattcttgtttagtgcatgggcctgttctgcagttggtcgaacggctcaggaggttgttaangaagtaagaaaacaatttattgagaggcctggtatcatggactacaaggagaaaccagattatggtcgctgtgttgctattgtagccgcggcatctttgtgggagatgataaagcctggtgcattggctatcatatcaccaatagtagttggttttctgttccgtgttttgggacactatactggacatcctctacttggagcaaaagttgtagctgctatgttgatgtttgcaacagtttctggcattttaatggctctctttcttaacactgccggaggtgcatgggataatgccaagaagtttattgagacaggagctcctggtggaaaaggcagtgattctcctaaagcacctattaccggagataccggtggagatccattcaaagacacggctggaccatcacttcacgtgctaattaaaatgctagctacaataacgcttgatatggcaccagtgtt

SEQ ID NO: 199953 - DNA, 498 bp, Gossypium hirsutum
tcgcccacgcgtccgctttcccttgagctctgtccaagaatgtcaaactacacagtggaacgcatcaaagttgcaactcctgataaagtggagctgatgccaaaagtttttaaacctaatgaagagatcaaagacaacttagtggtagtccttgtccatccctactcgatcctgggtgggcgtcaggctcttttgaaggggattgcttctgggttagctcaaaatggtcacagggctgttacttttgatatgaggggagttggagagtccactggaagagcttctcttacaggttttgctgaagtcaaggatgttattgctgtctgcaattgggtttctgaacatcttgattctcacagaatcctgttggtgggttcttctgcaggggcgccaattgcggggtctgcagttgatcaaatcgggcaagttgtggggtacgtaagtttggggtacccttttggcatgatggcctccatcctttttggaagacaccacaaa

SEQ ID NO: 199954 - DNA, 433 bp, Gossypium hirsutum
tcggcgagagccaatggcaacatgaaagagggggtcattttgacacctgtttacgaatcgaagaggcgactttcattcccattaacgcaagggatagtcggatcgttaaaatggagtaaagggtcgtcgttgttttcgggcgtggattctaggtcacaaagggggttagataagcatcaaacattgcaatcgttggggaatttgagtgtggattctactgtttctatgcctgctacgatgggaagaaagccatttaatagatttgtgtgatttgttgttcaatttggttatttttttaaaattgagtgaatgatgatatgttgaatttataaaattttttcatgttaaataaaaaagaacagaaacttaaggaaaatggtgctttgaatgttgaagactttggggtatggagagatattatagtaattttttt

SEQ ID NO: 199955 - DNA, 752 bp, Gossypium hirsutum
  unsure (1)..(752): unsure at all n locations
actatgctgcaaatgtgttgtttctcgagtcacctgctggggtgggattttcgtacgccaacacaacatcagattatgatgatagtggtgatagtaaaacagctgtcgacaattatgtttttctgttaaactggttggagaggttccctgaatacagcatcaggaaattttacatcgctggagaaagctatgcggggcattatgtccctcaacttgctcacaccattctccaacacaacaagaacgctaacaccaccattattaatctcaaaggaatcctaattgggaatggctgtgatcaatgatgaaactgatgtccgaggaatgtatgatgacctagcatgccatgctctcatttcagatgaaactgcaaatgggattgaaaaacactgtaatttcgcacccgaggatgactcggagtccagtcgcgagtgtgacgcagccactgatgaggcaggccaggatatttactatgttgatatatataatatctatgcccctttatgccataattccagtctcacgatccgtcccaaggagccctttcgtgganaantcgatcccatgagtgactactaggatatgcctatctaaaccgggatgtgtcaagagccatgcntgcatgtaacaaacttgacatgatgggaccctgcacgcntcatcaaagatggagatgccttnacaatattccttttcagatatggtacggnctagaatggatcangggtcnatganaatcagtcttacagccc

SEQ ID NO: 199956 - DNA, 702 bp, Gossypium hirsutum
caagaacgctaacaccaccattattaatctcaaaggaatcctaattgggaatgctgtgatcaatgatgaaactgatgtccgaggaatgtatgattacctagcaagccatgctctcatttcagatgaaactgcaaatgggattgaaaaacactgtaatttcgcacccgaggatgactcggagtccagtcgcgagtgtgacgcagccactgatgaggcaggccaggatatttactatgttgatatatataatatctatgcccctttatgccataattccagtctcacgatccgtcccaaggagccttccgtggcaaatttcgatccatgcagtgactactatgtatatgcttatctaaacagggttgatgttcaagaggccatgcatgccaatgtaacaaaacttgaccatgattgggaaccctgcagcgacatcatcagaagatggggagatagcccttcaacaatcattccccttctacaagagttaatggctaacggactaagagtctggattttcagtggggatgcacatggaagaataccagttacttcaacaaagtactccattaagaagatgaagcttgcagttaaaaccaagtggcatccatggtaccttgatggtgaggtgtgaggttatactcaggtatataagggagatttaacatttgctactgtaagagccgccgggcaccaagtgccaag

SEQ ID NO: 199957 - DNA, 435 bp, Gossypium hirsutum
tcgtttatgaattgacggacctggatttgtagcactgaagtgttcccatgaaaatccatcgaaatctcgcgaaattcaacgggataaaaatagaaaatgataagtacttaaaatcatgaaattaaacttgaaatacatagaaatgataattatttgatctactgaaatatgacatggaaaatacatgtctgtgaaacttgcctgataattatgcatattcaagattatgaactactactcaaataaatataccttgaacttatagaaaattatggtacatgaaatattgtcataatgaattgaatgattcatatttaagacgaaacaaaaagaaaatgatatgtaccatgacatgtaaatatgaaactatatttgatacgttgatacaaggaaaattatgtgtattaagacgagtaataaatttaagagagacat

SEQ ID NO: 199958 - DNA, 720 bp, Gossypium hirsutum
gcattttgagaaatatggtgagatccttgaagctgtcattatttctgataaaatcactggcagatccaaaggttatggattcgttacttttaaggatgctgaagctgcaaagaaggcttgcgaggacgctgctcctatcattaacggccgtcgtgccaactgtaacatcgcctccctcggtgctcgccgcccgaggtccgcctcctctgctcctccgccgcaacaagggtcaaacgttggaccgagggccacgccagttgctccagccaatcaggggcaggggttttacccggctggggcagcagcaccgccgtttcaccatcagcaccatcaggccgttcctttttacgggtactctcctgcctacgttgccacaaacatcagctacaaccataagctaggctacaatggaggatcctacatgaatgggcatttgtctcaagtatatccagcggggcaagctattgtaggtgccaacacattgatgccagtgtaccctttttatcactaccatcaatcacaaacattgggatttccatcatcaccagcatcagccgctctcaccttcccatcaccaacagcatggcccatcagcaattgctcctagttcaggtacaattggaggagctggtgacagttttaagaaggttgggtgaagaaagatggaaatctggcagcgacattattctctgatttttttttcccttttttttcaatatg

SEQ ID NO: 199959 - DNA, 376 bp, Gossypium hirsutum
tccctcgcgtccgcccacgcgtccgagagaaagaaggtttgtactgaaacaaaagttgcagtgggggaatgccaattttagcgaaagcatgcattcatttatatgtttaatcaaagcgaaggacaagcagtggaaatcaaagtcatgcgactgattaggcctttgttacagtgaatctttgtatctcattagaatcacaaaaattgttctttgtagatatagagggttaagcatcataggattcatttcatgctcggttgcatgtatcagaggtattttttgttttaatccactattcttcacactatttatttacgtatttttggctggataaatgttgaatataaataaatcaaatagaccacttattattctc

SEQ ID NO: 199960 - DNA, 491 bp, Gossypium hirsutum
ccttcgcgtccgcccacgcgtccggaacttttaggtacatatagaaacaagggtcgcatagagagagggacagtgaagtttctttttgtgttttttcagtatcgttgaagatggcgagtttgcaattgaggcgagagagtagcatggatcagcaagagagtccgaggagtccagaggcaaagcttgggatgaaagtggaggatctatggggtgttcaagaaccaaagcttagtcctaatgaaaagctcaacgcttgctttgagagcattcctgtctctgctttccctcttgctcctcaagggattgagataaaatcggatgctagtttagcagaggctgttcaaatactggctcaaaacaagattcttagcgcaccagttgttgatgttaatgcccctgaggatgcaacctggattgacagatacattggcattgtagagttcgctggaattgctatatggattttgcaacagtcagaaccaccttcacct

SEQ ID NO: 199961 - DNA, 618 bp, Gossypium hirsutum
gaagcgctcgttgttttggagaaaatagcgagaataaatggagcaaaattgcctactggagttcttgtttccgagaatgaaatcgagttagtgggaaaaagtaccccaacagaagatacattgttgcttcaagcagaagataacggatacgaagctcctaaggaaatgaatcctaaagccggaggcatctcgacgctgttacaacttctttctccagaattggttcggtcaaccacactcttatggatggtattcttcggaaatgcattttcggattatggccttgtattactcacaacggaattgcacaatggacgtaatacatgtcgtccggaagaattgcaaacagtaaaatacgagggcgttagctacaaagatgttttcattactacttttgctgagttccccggcctcctgatatccgctttcactgtcgatcgatttggtcgtaagttctcaatgtcagctatgttcttcctgtgttgcattttcctgtttcctttggtagtccatcagcctcagggtcttacaaccggcctcctctttggtgctcgaatatgcatcactgccagcttcacggttatgtatatatacgcgccagagatatatccaacgtct

SEQ ID NO: 199962 - DNA, 362 bp, Gossypium hirsutum
gagatttcaactttccctctccttataatttcctcagagaaatatggaggaaaaagaaaaggttccagagaaaaaagcaatacacaaccttccacacgaccaaccagcactgatggatgggattatgatgatgaaggtgaagcaagtactgctgaagaatgaattccaattcggtgcagctgccacctccattgccacttgttcatcttaatttggtgctatcctacctgagcttctttttttattttaatttcttagtatttttttctttcttttttaaatataaaatattaatcttcttgaccttgtaagaccttttcttgaccttgtaagacccagtccagtatttccaactcttcttc

SEQ ID NO: 199963 - DNA, 1008 bp, Gossypium hirsutum
  unsure (1)..(1008): unsure at all n locations
ctaaattccaatgatggcgggaccgaatccgccaaaacaaccgtcatcctcctccaacaaccaccgcaaatcccgctgggaatcttcctcttccagcgccaataaaaacccctcctccacaaccgccgaccacaagtcctccaccaagcccagcccatccaccaggactggcccacctccaagctccgctgctcataacaagtcacaatccgaccccaatcaagctcatccccccttccccttccccgatcctgccgcccttggccctccgcctccaccggcgtatggattccacatgctggagcgtcggacaatcgtcctttacgacggcagcgtccgctcctactttgctctcccgcccgattaccaggactttccgactcgacccatactcggacctcgtgacttcggtagcccatcaatgggcttccgcgataatcgcgattattggaattcgccgagtgacgggcctggcccgttaaagagaaagtacggcgatgaaggcaaagacctaagagaggagaagatagaaaagatctaccctttggggcaggcgggtcagaccgcctaacggantgagtagcccgcttggaaatgaggaaactagggcagccaagtatatgaagttgggggggggaatttcaaaataatatgccgggggtttaatcataagcttgggagggntgatccaaagtgctctaagaaaggncgtttttgcactttgtganggcagtttttgagaatacggngcagaaaaagaatacttcgaggatggtaaacaagggcggctttaatgcttggcttgtggcaagtcctatgcccatnttanggtcctctaaagacttctctgatatgcatnggtctgataatgcacacatactactcagataatgctgactgcgtgtgggtcacttaggcttacacanggcntatgtgtgcttatggatggaactactcnaggctcctgatattcaaaggcctatcgtcttcctgcaaaagacagctcan

SEQ ID NO: 199964 - DNA, 674 bp, Gossypium hirsutum
  unsure (1)..(674): unsure at all n locations
cccacgcgttcgtgcaagaaactaaggcggctttagagaagatagttaatgtgagattgagcgctgcacagcctaagaatgttccgaaacagtcttcggattcaaagtatattaagtataagccttcacagcaatcggctgcgtttaattcaggtgctaaggagaggataattagaatggtagagatgcctgttgatcctcttgagcctcccaagtttaagcataagagggtacctaaggcttcggggtctccacctgtgccagtgatgcattcccctccacgtcctgttactgtgaaggatcagcaggactggaaaattccaccttgtatttcaaactggaagaatccaaaagggtatactattccgctggataagcgtcttgctgctgatggaagaggtttacaggaggttcagattaacgataactttgcaaagctgtctgaggctttgtatgttgcagagcagaaggctagagaagctgtggcaatgagatcaaaggtgcagaaagagatgatgatgaaggagatggataggaaggagcaggagttgcgagctttagctgctaaagcccgttctgagagaactgggacggtggcaccatctactgctgttccaatgtcatctgatanaaatgcgatggatactgatatgagagtggattatgagcctgtt

SEQ ID NO: 199965 - DNA, 387 bp, Gossypium hirsutum
cgttcgctagcttttgatatcctctttgccattttggggtcttttagggttccaattggtacatgttggatgaaggtgagggagatgatgagcatggaattacctcgcggaattgagggacgatttcaaggccaagtcttcaacggttatatcattgcacagcccaagaatggttttgcatacgagccatgggcttaaataattggagcaaattatgtagtcgatgatcttggcttcgaggatctattaacctctaggcaagtctaatgcttggcttatcctcctctctctgggttttcttttggttttttttgttggctgttcttgatcgtgtttggttgctgagaatatggaggatatcatatgaataagatttggaatcttgac

SEQ ID NO: 199966 - DNA, 574 bp, Gossypium hirsutum
acttctctccacgcgtacggaaaatgcatcattcaggcatgtttttgatatagctgccattatcactggaactgctaggcctaaattcaacatccctttaggcttgattgaagcttatggatggatttctgttctttttgcccgaattacaggaaagcttgctctcattagtcccccgactgtgcacgtcttaagacatcaatgggcatatacttgtgacaaggccaaactggagttggattatagacctagaagcttgaaagacgggcttgaagaaatgctcccctggttgaagagcttgggcgtgataaaatactaattactaatatgaattatgaagatgtacgaacttgatctcattctttaggccattgagaagtattccattaaatgctgagaggaatctatgttgctccttctgtttcatgcttgatgtagctttagccggtaatggcagtaataagaaactggttggcttgtttctttgtgttcaatgttgatgaataaggatcactgttgtacgatgattatgattcaggaattcttaatgaaatacttgaagctcatttgtatt

SEQ ID NO: 199967 - DNA, 216 bp, Gossypium hirsutum
ttcacgcgtccggatttaatagctttgtttgcataaagtgttgtatgtcttgagttgaagtattgctagggaacttatttggcattatcaatatagtggttgtaagaacaaagacgaggacttcaggttatgtctgtaatagcccaaattttaactttttctattgttagtgttacagaatttactatttattaaaataagagatgataaattctc

SEQ ID NO: 199968 - DNA, 844 bp, Gossypium hirsutum
attttactgaatgtgttggtaaaacaaccgcttacgggtgtcatattagtgcgaaaacgccgataaaccaaagaaatgaaacagaaaaacgagaaagctcaaaacagattcttactacaaaatggcagcaaatgcaaagctttcttcagtttaattatgggtgtttgcaattgtggtgcctaaactaaatccacctcctccctcctccttttagtttaggaaaagaatctctacttcataatttctagggtttcgtttctttgccatctcatttcctcggctttttttggatttaggcggggattggaatcaatgagagatcaattgaattcggatctgtttgacccgagaactgagatggtcccagatttttcgcgaggggcgtctagctccgatggtgatttcggtttcgctttcaacgatagtaatttctccgacagacttcttcggattgagattatgggcgggccccctcagtgccgccccgatggagagggttgcaccagcatcgccgactgggctcgccaccgcaaaaggcgtcgagaggatatcaagaaggaaaccgttttggatcttagtttatgtcctgaggagcagatgttaaatgacatccagcctgatatggacgatggtggaggctgtgagaatcaagacgaggagccagtggcaatggttgaagaaacacaatcaggtgatgaggatgcgaatagcaatgaatcaagctggagcatggattgttctgcagttctgagagttaaaacattgcatatcagttctcccattttagcagcaaaaagtcccttcttctacaagcttttctcaaatgggatgagggagtcggagc

SEQ ID NO: 199969 - DNA, 378 bp, Gossypium hirsutum
tgctatagcaagagcaattatgaaggctcttcgaatccttgttgtggatgaagcaacaagtgcactagactggaatctgaacgagtggtgcaagaagcaatgaccaagcctccattggccgaaccaccatagtaatcgcccaccgcctgtctaccatccgcaacgctgagcttatagcagttttccaaaatggccaggttatagaaattggatcacatgatgagctgatagaaaatcaaaatggtcactacacttcattagtccaccttcaacaaacagagaaagaaaagaaccctgaagaagctaactcaactttacctacttgtgcttcatcttcaatcacaaatatggatatcaacaacacaagtagtagaagac

SEQ ID NO: 199970 - DNA, 330 bp, Gossypium hirsutum
ccctcgcgtccgggattttggcttggagaaatcggtacttgaagtgagttttcgggatttcgacttttatggcaatcggctatggaggttttgcggaggatgctgccattttcatggcacttgcagcagctgttgacctcagcattgaggcatgcaagcctttccgaagaaagataaggatagggtcccgccattctttatgaaaaaaaaaaaaagaattaaggtgatgtatttccatgaacaaagaatggctctatatttgtgttgatttgtgtaacatttggcactgtgtatagatcttgtggttgataaattcctagacataaccaa

SEQ ID NO: 199971 - DNA, 322 bp, Gossypium hirsutum
ctcttgcgtccggccacgcgtccgattccttgggatttccttccttatatgctcgaacttgctttatataaaccctaaatcgtaccattgtagaactttggtcagttattgctaagattttatcagggtttagagaatcgcatgttttgttcgatcggggttgatatttgctaacaaattctatcgaaatgtgtgactgtgtttcgattttttgccttgcggattggatttctttgcaaataggtaaactcaagaactaagaccatgaaattatatgtttaagaaaaaaatgatgaatgatttgaacattgcactttcgagt

SEQ ID NO: 199972 - DNA, 294 bp, Gossypium hirsutum
  unsure (1)..(294): unsure at all n locations
ccctctcgtccgggggaaggggaggaggaagtgggcggctatgttgagtgctatgcctgaataagcgggaaagggtatatttgtaaatatgagatcgtattggggtattttagtcaaatcactgtgaaataaagtggctgaccaaacattttgatgaactcacttgtcttctttacgttcttgggtaagcccatttgagggtagttttacaattttacccctatttgggtcaaaatgaatattcttttaaaatgatccatatatnnnnnnnnnnnnnnnnnnnnnnnnnnnnnn

SEQ ID NO: 199973 - DNA, 909 bp, Gossypium hirsutum
  unsure (1)..(909): unsure at all n locations
tcttagcttttcagacaaagcatcataggcccaaatcctattcacctgtctcctgtctcaacacccaaatctgaaggcaaagtcatgtcggacgacgaaggcactggagaagactaccttttcaagattgtaataatcggggactcagccgttggcaaatccaacctcctttcccgctatgcccgaaacgaattcaacccacattccaaagccaccattggagtcgagttccagacccaaaccatggaaatcaatggaaaagaggttaaagctcagatttgggacactgctggtcaaaaaaggttccgtgccgtcacttctgcttattacagaggcgctgctggtgctcttattgtttatgatattagccgccgcaccacctttgacagtgtcggccggtggctcgatgaactcaagactcattctgatgcgactgtancaaggatattggtcggcaataaatgtgacttgganaactatcaggatgtgagtgttgaannangcaaaagccttgcttaagcaaaggggttgtttttcatggaaacatccgctttaaattcaacaaatgtcaacaaagctttcccattanttattccaaaaatttaccaccatgtccgcacgaaggttctgaattccgatactcaaaaactgaattaacccttaaccgggttaccctttcccaaactgatgggttgaagaaaacccacaatttttcttgctgttccaggtgatcttgttctttngaaaggggttaagactccaggtcttcccctgttttgtttcatcaatttgggttgtgttacccaaaaatatccattgccctatttaattaatgtttttgttgtttaagaaaaataaaaacccttatttctggtttgggcttttgatacaaacatgtaatctcaaata

SEQ ID NO: 199974 - DNA, 430 bp, Gossypium hirsutum
tctcttacgcgttcgaaaaaaattcatgaactcaacccaatatgtaatgaatccttaatttttttcatttcttttttaccctttttcaaaagaaaaatggattgttgttctttttcatcgtcattaagcttaagtttaagcttaatgttgaaacctcgtccgccattaatgaccattaactataatggtaactctcactggagtaaaaggaagaagaaaaggcattgtttgcttcaagtctctgcaatttcttaccagaacttcattcatttttcttttaatgaaactaaacgacatacccttttgcttccttctcctctacaggaaaagtatggttctatgatcgcaatggatgaacaaacatggcttgaaatgttatcattcgaaactcccaaaatcagactacttagaagtatgagcattgaaggtg

SEQ ID NO: 199975 - DNA, 489 bp, Gossypium hirsutum
tacttcgtccggcaattcctgttcttgagcgctcgatcgagattccagtggttgtggatggccaaactcatgcacttgctaaatttgctggatgcatgcagttaggtgatacctatgcaatgcagggccaaatcgagaactcaatattgtgttatacagcaggtttggagatccaaagacaagttcttggagaaactgatcctcgagtaggcgagacatgtcggtatgtggctgaagcacacggacaagcactgcagtttgatgaggctgagaagctttgtcaaatagctcttgacatccacggtgagaatggtgcaccggcttctatcgaagaagctgctgatagaaaactcatgggactcatttgtgactcaaaaggagactacgaatcagccctcgagcactatgttttagctagcatggccatggcagcaaatggcaatgaagtggatgttgcttcaattgattgtagtatcggagatgcatatt

SEQ ID NO: 199976 - DNA, 520 bp, Gossypium hirsutum
tgattgacaagtcacctcctataggatcgattgcacgcaccctgtcgtgggatgatttgtgttcagatacagccacattaaattcatcaaaaccatctaaggtgtccccaggtgccaaggaagaagaacatgattgggttttatcggtccaaacactgttatcatctgctggtctcaatgacaaggagtattttgagtcatttattgatggatggcattcacctgaaagtccattggacccgtccttgagagacaaatatgccaacttgaacgacaaggaacctctacatgaggctaagcgacgacaatggagatcaaacaagacgctcgtgggcgactgtgtgaatgcagccgtggtggatatcacaggttatggatcaaacaatcgcatgaacgagatgtcattgcgcaggtctcatatgagggacatggagagtgcatcgcccacattggttgaccatgtgtgtgcccaaattaaggaatgggcttccggtgacggtaatcatgtggtggacaatga

SEQ ID NO: 199977 - DNA, 638 bp, Gossypium hirsutum
ggaaaaatcaaacattgctgtgaagaaaacaatatagcattccatttcgtggaaactcaattagggaaagggaaattaacagctcccgggctataaaccctaaaagctcttcccaaatttggttgaggggaaatggagaattcaactcaagaatcccacctgagatccgataattcggtgacctacgaatcagcttacacagtttatgccatggccttatcttccacgccttcctccaccaatatcaaccatcaacgcatcgctctcggcagcttcctcgaagattacactaacagagtcgacataatctcatttgatccagaaaccctctccttcaagacccacccaaagcttgccttcgaccacccttatccacccaccaagctcatgttccaacccaatcgaaaatccgcttcatcctcttcttcttgttccgatcttctcgcttcaaccggcgatttcctgcgtctctgggaagttcgagaatcttccattgaacctgtcactgttctaaacaatagcaaaaccagcgagttttgtgccccgttaacttccttcgattggaacgatgttgaacccaagagaattgggaattccagcatcgacacaacttgcaccatttgggacatcgagaaatt

SEQ ID NO: 199978 - DNA, 391 bp, Gossypium hirsutum
tttgtattcaactcgacgagttgcctattcgatcgccgcgtgccagtcctttgcctgcttacctcacccgaaagggaggctttgattaggctacccgtcaaggttgtttagtttacgtatgtatctttctttctttctctcttggtgtaagctacgtgttgcgtttctattggtggttatggttgagatcgacggtctcaggtgacgaactcgttttgctaaaaaaacccgttttaaaagaaaaaattgctcttctctataaattagtgaggtaattctgcgtctagaattttctttttattttttacttgaatgtatttgtacaaaggtttaggaaaaaaatggaaaattgcattgtagaactttgaataatataatgtttacttttatt

SEQ ID NO: 199979 - DNA, 439 bp, Gossypium hirsutum
tgttcacgcgtccggtgctagttgacaaggatcttaagaacaactacgaccggatcgagctcgaagagatggttcaagtagcattgttatgcacacaataccttccaggccataggccgaaaatgtcggaagtggtccgaatgcttggaggtgacggcttagcggaacgatgggaagcttcacacagagccgaatcaaccaaatgcaagcctcctcatgaattctcatcgtcggaccgatattccgatctcaccgacgactcatcattactcgttcaagccatggaactgtctggaccaaggtgaagcagaaccaaccccttataaaacgtaactataaatcttttcttcttttctttccggagatttcagggagacttagaaaattatagctaaaactcctatagttgcataataacgggatagcataggatcaaagg

SEQ ID NO: 199980 - DNA, 488 bp, Gossypium hirsutum
gtcaagttcggggactaaacgttgccttatccgtaaaattttttttaaacaaaaatgatatttaaactattaattccatctcgttttgtcccaaaacacgttacctgccaataagagtgtgacatcatttttttgggtaaaataagatcaaattaatagtttaagtactattttggattaaaaaaatatattttaggtacctaaataggaaaatcgatatagtttaggggttaaatttgtagtaagactatgtttgttttaatctttttatttcttcatataattgtacattgaagacaatgctaaaagctcaaatctggttgtggtagtgattataggagaaaagattggtaggctttgagggggcaaaaattaaatgtaaagtgtaatttttttaaaaccagaaataattgttcaaagtaggagaaaaaaaataacatttttaatctttgaataactattccatgtggaaaaaatctggtggaatt

SEQ ID NO: 199981 - DNA, 387 bp, Gossypium hirsutum
cgtactcgtgggggcaactccggtgaaagtgcatggccccccattgtctactgctgtgtctagggtcttagcttgtctcattgagaaagatgttcaattccagcttattcccgttaacatgtccaagggcgagcacaaaagtcctgatttcctcaagatccagccctttggtcaagtaccggcatttcaagacgaaagcacctccctgtttgagtcacgggcgatttgtaggtatgtatgtgaaaagtatgcagagaaggggaacaagggattgtatgggagcaacccgttggcgaaagcttcaatagatcaatggttggaggcagaagggcagagctttaaccccccaagctcagttctggtattccaacttgcatttgcaccccg

SEQ ID NO: 199982 - DNA, 492 bp, Gossypium hirsutum
ttcactcgtccgggtgaatttaccatggtcgagcttgctgtgactgttaagtagcttattaaacccgatgtggagataaacatggtggagaacactccggatgatccacggcagagaaaacccgacatcacaaaggccaaagaattgctaggttgggagccgaaagtcaagttgcgggatggtcttccgctcatggaggaagatttccgattgaggcttggaatctctaaagagtgatcaaacctattagcggattatactaatagagatgagattcacttcttgcggggaacaatacctccagccttcggtctttgttctccaatgcctcctattggtctttactatatcaaaggaaaaaaaaaaccatagccattgaaagtaggaattttgtgcaactattttaatttccggtccttaaagtggacattgatgatggtcttgatgccatgaattttgtttgctactgctatcaataaaaaaaaatggtga

SEQ ID NO: 199983 - DNA, 528 bp, Gossypium hirsutum
tctgattgttctaaggctccgagatgatgttttgaaagaaaaagatggtggtcataacccttctgtaggtgctgatgctctctactcgggtggtgcaagtctttcagtatcatctctcttgtcttctgttcctccagttgctactttggcttttgatcggggggctgaaagtggaagtgaccgtggtgttctttcttcaagcagcctctatggatatggaaccctgccaatgggggaaaacggctatgggtccatgccctcatattcatcgaagctctatggaggcttgcctgcatcttcaactcttgaaatattgatcccttcaaatgcagtcggtaaagtgatgggcaaaggagggctcaatttagccaacataagaaagtgatccggggcaatgattgaaatttctgaatccaaatcctctcgaggggaacgtgtggctcttataactggcactccacagcagaagcgtgaagctgaaaacttgattcaagcatttataatggctacttgaatcttaaagatctt

SEQ ID NO: 199984 - DNA, 671 bp, Gossypium hirsutum
  unsure (1)..(671): unsure at all n locations
caaggttgccactattgagctcctctcaaatcaccgactcgaattacttaaacatgtaagggaatccgaggtgaagacatctctgcaacagttgtaccagctgtggaacaagaagagaagtgctaactccgataaagtattggtggagatgaagggatggttcaaagaagttactctgaacgtgattatgaggatgattgtagggaagcgaattccaaattccagtgaaggaggtgaaaacttgaaatggaggaaatcgatggatgacttctttgtcctgagtggaaagttcctaatatcagatgcgttgccgtttctgagatgcctggacataggtggagacatcaagttcatgaagaagacagcgaaagaattggaccaagttctgcagggatggctacgagagcacaagcagaagagagctgaaaataaggcaaacggtgaggaagatttcatgggagtgatgctgtctattctcagtgaggcggaggaactccatgctgatacaatcaacaaagccacttgtctaggacttatcttaggcgccgaggataccacatncatcacattgacatgggcctnatctntgctactcaaatatcgtgacaaattgagtaaagtccaacaagaactagatggtcacattgtaaggatagactacttttgccgaa

SEQ ID NO: 199985 - DNA, 744 bp, Gossypium hirsutum
gacatggcgaggcaccgagatttgcaaatacaaaggcttcacgtgcgatatccgtcccgacgtgaacgaaacagccgttgcttccgtcgatttcaacggcgctaaatttgcggggccgaacggttatcttcccctcgatggcttcatcgacaagttagacgacttagctattttccatgccaattcaaacaacttcaccggcaccatcccatacgaggtctccaaaatcaaatacttatacgagctcgatttaagcaacaatcagttgtccggtgatttcccgatgaacgtccttaaagccaccaacttaacctttctggacttacggttcaactccattaaaggtctggttccacaacaagttttcaacttagaccttgatgttctcttcatcaacaacaataatttcgaacaaagactccccgagaatctcggtgacacaccggttttatacctcacttttgcaaacaacaagttcaccggtccgattccgacaagcatcggcaaagcacccaacttgctcgaagtgctttttcttaacaacaagcttactgggtgtttaccatatgagatcggcaacttgagtcaagccaccgtgttcgacgtcgggtcgaataagttaactggtcccataccatactcgtttgggtgtttaaaaaagatcgagcttctcaacttggccggcaatgaattctatggcgaagtaccggaaaccgtttgtcaactcaaaaatctacaaaattt

SEQ ID NO: 199986 - DNA, 785 bp, Gossypium hirsutum
tccacgcgtccgcaactggctaagccattcaggcctcatgatacgatcacaccccaaacctgcattaaagacaaaagatcaggtgaaagacaaatattccaaagttacacccaagcctgcagccaaggaaaatactaagcctcaagagttcaagcttcacactggacaaagagccgttaagcgtgctatgttcaattactcagtggcgaccaagttttatctcttggaaatacagaagaaacaagttgagaaagtgcaaaagatgattgaagatgaagagatacgttgtttaagaaaggagatggttccaaaagctcaactcatgcctttcttcgacagaccctttttccctcaaagatcgaaccggcctttaacgatcccgagagaaccgagtttccgcgcagtgaattctaaatgttggagttgcatatcggagaatgagctctattattttcaccatgctcatgcttggaaccccatcaaatgaacacacagttaataaaggttgcacacagtactcaaattagtgtgattgatggactacgtgcgtgcgtgcgtgcatgcatgatccatgtacaatatatcaacatatgtagttgtaggatgttccattctatctcatctcatctcttttgtcatcgccttttgtgttttgtcggcttagacagtgtgagtaaggtagatatataacccctttccactagtcttttagtttcaaaataaagacgtgattgtatgtatctttttaatttttttggcataaaaaaactcataattttcccttt

SEQ ID NO: 199987 - DNA, 415 bp, Gossypium hirsutum
tctcggacgcgtgggcggacgcgtggggaagggcccatgttgggggttgtccttccccataggaccgcaggcatgcgaatggttcggattatagtgcaagtcctaggggaaggagctgaagccccgatgctgaggatggggcttatcggagctctaggaaggaaaatggccacagccgcagccttagtccaccccctaggaatgacaggagccctgtttacaatgatgatgatgataatcatgcgtctgccagacgcagtgaatcaaattaaggcaggcaggcaggcggtggttcaaattcatgttttagggacattgtgtgttttcgcaacaactttgaattcttgcttgatatattgatggatatttaaggtgctgttaaagacttgcaagttatgaagaagaatgactgctt

SEQ ID NO: 199988 - DNA, 353 bp, Gossypium hirsutum
  unsure (1)..(353): unsure at all n locations
cccacgcgtccgggaaaaccagtatggatcggttccgcaagcttgagcgccaagaatctggttgtcttcatggatactgcaactggtgatggcatagaagcttggattaatctagaggaggaagacatggctaaatttggaagtgatgaagaattgcttgcaacattcaaaagcacttttgtttgggaatgatagctactacagctgtcagagttgtaggttgctttccatataatttgattaaggaataaagattatttggtcctacacctgctgtgaaatatctgtatttgacgacataataggtggattatatcaaagagattatacactntaaaattaatttagtctat

SEQ ID NO: 199989 - DNA, 383 bp, Gossypium hirsutum
gtcttttccacttctaaaacctttagcttttctcagagatggcgcggggaaggggcagtgcaagtcaggcgaccatgtccgcaattgcattgctattgtgcttaatggtttgcctggaaaccattgatgcagctacttacactgtcggtggctctaatggttggacttttaacacggctacttggccaaaagggaagcggttcagggccggcgacgtgctagtgttcaactacgatgcgactatccacaatgtagtagcagtgaacagacgagggtacactaattgtaccacacctgcaggtgccaaagtgtacaactcacggaaagataagataaaactggccaagggactcaacttctttatgtgcagcactgctggtcac

SEQ ID NO: 199990 - DNA, 535 bp, Gossypium hirsutum
gattctaactcctactggactccaaagcaaaacaagctatttgaaagggcacttgctgtatatgacaaggacactccagaccgctggcaaaaggtggctgcagctgtgggggagaaatcagtcgaggaagtaagaaggcattatgagatcctagtgagggatctcatgtatatagaatctggtcaaatccctatacccaattacaaaagcactgggagtaacagaagatgaattgctggggtgcaaaggtttatgaagaatctaaggctccaatgaagcacaagtttcagctgcactgtcagagaatctgtaaaaactaaaataaaaagaataaattataaagaactggagaatttgcatcgtgattctccctgtcttattttacattgagtgatcgagtcagtttggttttttctttttgtgtgtgtgtgtcagtttgttaatatgacaacaaaagttgaactctacaattattaagtttgtgagtattgtactgaagttaccagttttaaattaaaaaaaaaaggtattacta

SEQ ID NO: 199991 - DNA, 489 bp, Gossypium hirsutum
tttgttaagcactacagggtttgatcatggtcacgagttctcatcgttcgatgatgctgatccatttgggtcaacggggccatttaggacatcactggagagtcagacaccaaggagagatgccaataaatggagtgcgttttagatataaaagtatataatataatataaattggattaaatggactaatggggttgtggttatcatgttaagccttgtaggtgaagaagggggtggtcatttgtgtggcggctgtgattcttttattagtataaatagcgactggtaatggagtggctgtggcagtgtctttattgttttttttcttttctgcaactttataccgttgctcgttttgtcttttctttgaactggttgcttttagttgtagaagcttcaatcatccttgttcatggacaggtctggactcacgaaatgttgttgtttcaaaatagttggtaataatcattgtacgtgatatcgaacgt

SEQ ID NO: 199992 - DNA, 511 bp, Gossypium hirsutum
aaaagatcgaaaaagactgcaccgatgtttcgaattctatgttatccattcccctcatgattcctggcaccagatactacaaaggcatgaagggacgtgaaaagctgaatgaaacctttggaaatatgattgccagaagacgtagtggagaggaatattttgatgattttctgcagaccatggtcaatagagattcgtatccagaagatgaaaagcttgatgatcaagagatcatagataacctaataacactgatacttgcagggcaaaccaccactgcatctgctatgatgtggtgtgtcaagttcctatctgaaaataaagatgcactcgacaagcttagggaagaacaattgccaatagtcagaaataaggctgaaggagcctcactcacccttgaagatcttactgaaaagtcatatggcttcaaggttgtaaaagaaacactgcgaatggcaaatgtcttgatttggctttcccgcgttgcgatggacgactgcatacttgatgg

SEQ ID NO: 199993 - DNA, 469 bp, Gossypium hirsutum
gtggttcaagcagctagggttttcgacgatttggctgtcggtttggtttccgggttggacaatgatgtcgggtataatttgagctcagttgaactacctgctccctggttcatatactcttttatgggaataggaattacgatatgtcgtcttgctctcattggttgcatagctgctgaatctattaatggatgctgcctttgtttctatacacttctcaaaattattctcgttctaatagaagctgctttggtagcatttattgcaattgaccgtagctgggagaaggatcttccgtgggacccaactggagaaattgatagcttccggtcctttgtcgaagacaacgttgatatatgtaaatgggttggcatcagtgtggtcattattcaagcattagcaatgctagtggcaataattttgcgggcaatggtttctgctagaagaagagacatcgatgatgaagatg

SEQ ID NO: 199994 - DNA, 757 bp, Gossypium hirsutum
aatatatgtccctgttcctgtggtccctcagaatgaaagattctttttcaggcgagtctgccccaaaagttaccatctgtttcggtgtattgctaggtatggttacaaggatgtccgtaaggaaaatcaccaggcatttgagcagctgctgatcgagagtcttgagaagctcattcgtcgggaagctcagcaaaggcaattggaaagtgatggtgacgaagatgcagattccgaggaggatacatctttctcaagagttctcatagatcctaacggaggtgtttactcacttggtgttcctctgctggctgagtttaggggctccagcaattccatttcagaagcaagcatttctgaggagctaaaccccaactcccctgcaagtccatcgatatctgatgccgagcatagtctagaaagggagctatcttttatacgacaggctaaggaatctggggtagtttatcttctcggacacggagacattagggctagaaaagattcttggtttataaagaaactggttataaattacttctatgctttcttgagaaagaactgcaggaggggtattgcaaatttgagcgtgccgcattcacatcttattcaggtgggcatgacttacatggtttaagaaccgatgtgtactgaaatcacggaggagtggttaacaaaggccggcgctcaaataccatgctacaagagatgcaaattcaccattgtgttgagcaaaactgggcgcttgaatcagcaaatt

SEQ ID NO: 199995 - DNA, 471 bp, Gossypium hirsutum
ataagaaagatgttctgcgagatggatgaagagcttctgctcgcctgtcagcacaagttggaggaagaaaactcccaattgattgaagcagctgagaagcggaaactagcatgggaacgcctggaaaccactgccgctgctttcaaacctgcagctactaacaatgtccctcctgtaaaaccagccacaccgcctgtcgcctgttgattggcaaaagatagatatatgcatatagtatatatatataaatagcctgctctgattgcagtgttggatgttggtttcttgaatacgatggccgaagttgtgattcaatagggtctgtatgtcattaccaaaaataggagggggtttgtattttgtatctaaaagctgaaattgctgtactgaaaattactagtggtactacattacagttgcctggaaaggtcgagaggcattgatgaatgatgagttgttgggttgcaagtt

SEQ ID NO: 199996 - DNA, 433 bp, Gossypium hirsutum
ttctcttttgaagaacttgaaaaaggatcagtcgaaaaaatgcggaacatgtgtagtttcgagaatttaagcaatgtggaagtgaataaaagcggagatcaccgtgagggaactccagtggtgattgaaaacaagatgtatttccgaaaaggtaaggttggggattgggagaattatttgacacctgaaatggctgttcggttggactcgataacgttgcagaagctaaatggttcaggcttaactctatgattgaataataaagcagccatggggtacattttgccttctctgcaatttcacatattatgtttctaaaaataaattgggtatgctttttgcaagtagcaacacttctcgtgttgttcatgttaagatcaattaaaagtatagttggttcaattgaaatcgattcaatcaataaaatttgata

SEQ ID NO: 199997 - DNA, 182 bp, Gossypium hirsutum
tttactgtctcgacccacgcgtgcgctttcgaaaaagagggaaaagaaaaaaagcggtcgagactctcacagccatggcgagcacctatgtactgaggttcatgcaccagcacatggtccatacccttttgtacatgcattcgagtccttcatcaatggcgtttcacacttcggtccatttt

SEQ ID NO: 199998 - DNA, 719 bp, Gossypium hirsutum
  unsure (1)..(719): unsure at all n locations
cccactcgtccgcccacgcgtccgcccacgcgtccggttgcaaagaggctctcagcctttggctgcaccattgcctacaccgcaagaaacaagaagcaatctgttccaattccattctatgctaatgtccgggaccttgctgcaaacagtgatgttcttgttctttgttgtgcactgacaaaggaaacttaccacttggtcaataaggatgtcatggtagcattagggaaggaaggagtgataatcaacgtcgggcgtggctcgttgatcaacgagaaggaattagtgcagtgtttagtgggaggagaaattggtggtgctggtcttgatgtgtatgaaaatgagcctaatgtccccaaggagctatttggacttgataatgtcgtgttgtctccacacagtgctcccgcaacaccagaatcctttgaagctgtgctacagctgactgttggcaacttaaaagccttcttttcgaataaacctttggtatcagtagtctcaaatgaatgaaccctttaattcttttgctttaatttaaggcattgacaaatgctcaatgaaggaaggataaaaatttgggttaataattgaatgccatactcttgttgctggagacnaaatgtgggtattcttggttaaattgaatttcttttgttagttttgttgaanaaagttttcagcttttaaaaaaaaaaaaaaaaaattcttccggcgccaaa

SEQ ID NO: 199999 - DNA, 415 bp, Gossypium hirsutum
ttattttgcccccttaaaaagctctcaagtctctcccttgaatccaattccttcaaagcttggttctcagacattcaaacccgtaaattttgagatcgaagaggtggaatttagcaatgtcagggctggaatcaggttcaggttctcggtatgttcatcagctactcggaccagagcttcagctgcaaccccaactgagggacaccaagcactcaccggacaaagaaggaaccgatcatggcggtaccaccaccagttctggtggtggagaaagaaggcctcgaggtcgtccagctggctctaagaataaacctaaaccaccgatcatcgtcactcgcgacagtccaaattcactaagatcccatgtgcttgaaatatcttctggttcggacatagttgacttggtagcaaacta

SEQ ID NO: 200000 - DNA, 685 bp, Gossypium hirsutum
tcgtttagatcgcgagcggccgtcctttttttctgcttcgtgttaaatcctttattcttatatatataatgcaactaatgcattgatacaaacatgaaagtcataagcatatacatatataacaacataataaaaaaccctaattaacacacaaatattgattaacgctaactaatccatgcaagagcaaagcgttaatcctttattctcatatatatatatataatgcatgatagcataaataaaaaaaccctaagtaacacaaaaacattgattaacgctaactattatttaattttcgcccccactaatgaacatgttagcgccgttgcttatactgagttaccagggcttcaagtgtccaaagctccactgagtcagtcccaccggtaccactcagctgaggcataatctcatggggagtgttctaaaacccgaataatttctcggtccacatatatttttttaaaacctacaaattatttatcacccttaaagggggtttaaaattcccactttcttatatcccaaccccttagaaaaagggggaaatcatttgaaaaccgggtgattactgaggaacaaccctttttttagcgggagaacaaataaaactggaaaactttttatttgggggcctttaaagaatttacttgtttatcacaggaccctggggttatgaagc

SEQ ID NO: 200001 - DNA, 405 bp, Gossypium hirsutum
gtataactagaacatacatcgacatcgctatttcgatttgcaaccatgagaagagtcaacggactcgctatcgtcggcagaaccttaacctgtggcggcgccgttgagaaacggctggctcaagcggcgttgatgagtacatgctcttcttcatcgctaaattctcatattttctcgcagaaactcgctgatcgattagggctgtcgcgtccttccctcgtgcgcagggttgcggggaccatgctgttttctgtggcagcatcgtctttggctcaagatgctcttgctaaggagaagcctcgctctgaaaagttcctccccaaggaagtcgttctctaccagtatgaagcttgccctttctgtaacaaggttaaagcatttttggattattataacattccatat

SEQ ID NO: 200002 - DNA, 688 bp, Gossypium hirsutum
  unsure (1)..(688): unsure at all n locations
gtcgtcacacntggaagcccttccttctctctttgattatcgattaaaaagaaaacacagatggaagatattaaaccattaattgaagctttgaagactaaattaaagcaagctttgattctatgggcagagggtttcagagaagcttgttgtcttcacagagttatcgttctttgtcgcaggtcgaagaagcttatgattagaacgggacagtgttttcttttaaatggcttcatattcttaggaagtttgtttgtcctaaattcagtagttatcccaacactacaatggatattgcctgatcattactcacaaaccagttgtgaagcgatgtctgaattccatggtgtcttcaaattttattccttcttacgtggcttcctcatacaactattctatgtattttggttctatcccttatacgtattcagctttattctgagcaatctatggtacaatgacattgctacacatggttttgctgcaatggggagatccgggccttctacggtggaatcctcgaaacaaaacgatacgttgacctcagacagcaaagtgcatgcaactaagcctgctgggctcggaaggatcatgattggaatatgggaacaggtgttttccttgcttcttttaactttctttttcctccaagtttatgccacaagatttattccttacattgggaaag

SEQ ID NO: 200003 - DNA, 729 bp, Gossypium hirsutum
cccaattcagcatctgctcttacaacttctgccggttcatatggatggtggcgaggagaagcctagcagtaggaaaaagatgagtgtggtggtaggaccatggggaggcaatggtggagctgcttgggatgatggaatttataatggggtaagagaaatcactcttgtttatgatcgttgcatcgactccatcagagtggtttacgataagaacggtaagcctgtaacggcggagaaacacggcggtgtaggaggaaacaagacagctgagattaagctaaaattcccagaagaattcttgatcagcgtaactggttattactgtcctgtggtttatggcggtagccctgtgattcgatcactgacgtttaagagtaaccgaaggacgtttggtccgtatggagttgaagaaggaacacccttcgctttctccgtagagggagcgcgagtcgccgggttcaacgggagaagtggatggtatgttgattcaatcggatttcgattgtgtcgtgttcaatctcccaaactctttcagaaggtgcagaaaggatttcaaaggcttactagtagtgtctcaaaagcctctgtctagcctagagaggattgtcactcaaaaggccccttccattaatacctggaggtgctaaagttcatcatcaaaattatagcagcaaccaccttagagtttaaaatcaaacaatcttgaatgtatacagatatatatatata

SEQ ID NO: 200004 - DNA, 871 bp, Gossypium hirsutum
  unsure (1)..(871): unsure at all n locations
ttctctctttttcttggtttttctttccacctgtttcttacttatcaaaaacaaaaatttataaagaacaaaacaagaaatcacctccttttaaagctttgaaagatgattttttggtaggaaacagattgtaaatacccaaaaaaaaaaagggaagaaatgaatggggataggttcaaaaactgttttcttccgacgccggcgggttcttcatcaacggcgatcaagcttttgatgattacagttccattgattcttgtttcgttcgtcattttcgttttggttccaaggaattcaaggtattgggtcttctgtttctccttctggaaatagcagtactgggaatttcggtgcagttagtgaaagaagtatcaacggcggcggaagcggtggctgtgtcgggtgaggcggcgcttaatcggtcatctaataagtcacttgatgttgaagctcaagtcatggaaattcacgaatttgatgaaacaaaggaagatagcttaaatatcaccaccaacgagctaaacaacttaaacatttccgtcaccggtgtcccgaacgctacgatatccctgaacgagtcgatatctcttcctttaaaacgaaaccgacgagtccgaaccaaattggataagctcgaagcaagactgcaacgagctcgagccgcgatcaaagacgctaaaaactcgagtcaattactggatcccgagtacgttccgataggtcccatgtattgggatgctaaagcctttcacaggagttatatggaaatggagaaacaattcaaggtgtttgtatataaaagaggggagcccccggtgtttcatgatggtccttgcangagcatatattcaatggaaggaaacttcatcta

SEQ ID NO: 200005 - DNA, 644 bp, Gossypium hirsutum
cagagaggtccctcgctctgtttcaccccccccccccttcattttcactcacactttctatctaccatgtcggcaaaggaatgcggccaccatggcaaaggccacaataaattccgccgaaaactcctcttcggcattctgttcttcatcctgattgttctaatcacagtccttctcatttgggcaatccttcgtcccagcaagcccagattcattctccaggacaccaccgtctacggtttcaacgcctccgtccccaatttcctaacttccagtttccaagtcaccgtatcgtctcgaaaccccaatgacagaataggaatatactacgacaggctcgacctctacgccacctacaggaaccaacagatcacaccccggacctcactccctcccacttaccagggtcacaaggatgtcaacgtttggtcgcctttcataaacgggaacatgatacctatctccccggacttttccacgtctttaagttcggaacaggcttccgggtcggtttttcttaccattaagattgatgggcgggtgagatggaaagttggagctttcgtgtccgggagataccatctttacgttagatgtccggcaataattacttttggaagcaaatctaacggtgtgattgtccc

SEQ ID NO: 200006 - DNA, 578 bp, Gossypium hirsutum
aaaaaagagaacagagataaagaatatttttaatatgggtgttgatttagagtcgatatcggaggcaacttcaggtgccataggatcactattaagcacaacgattttgtaccctcttgatacctgcaaaaccaagtatcaagccgaggttcaagcccatggtcaacgaaaatacaggaatctctctgatgtattatgggaagcggtatctaccggccaagttctttccttataccagggcctaggcacaaaaaacctgcagtcattcattgcacaatttgtctacttctatggatatagctacttcaaaagactgtacctagaaaaccagtggttccaagtctattggaacgaaagtaaacttgattcttgccgctggagcaggggcctgcactgctattgtcactcagcccctggatacagcctcctcaaggatgcagacaagtgcctttggaaaatcgaaaggactctggaaaaccctcacagaaggcactttgagtgatgcatttgatggccttggcatctcgcttttgctgacctccaaccctgcaattcagtatacagtttttgatcaactg

SEQ ID NO: 200007 - DNA, 821 bp, Gossypium hirsutum
cttcaattaacactcacggcctttatgtaatccttggaaacatgcataagctgaaaactatcaccatttctcatgctaatcttaccgggtctcttccaaggcacctgcatccggatctcacccatgttgatgtatccgacaacaagctcaaaggaaaggtaccaacttcccttacgcttcttgaagaccttgaattcttgaatctttcttcaaacgggctagatggggtgattcccaccgagcttggtgacttgatatccttgaagaatctgtctttggcttccaattcgttctccgggccgatcccaggttccttgtcagctatcccaggcttggtccatgtcgatctgagcaacaaccagctaaacggaactgttccaaggtttttctcagagctgaaagggctgaaagtcttgaatctggagaacaatcagctccatggggttttacctttcaatgctagcttcataaagcggttggctgttttcaaggttggtgggaatagcaatttgtgttacaatcattctgttttgtcatcaaaactgaagcttggggttgctcgttgcgataagaatggatttccgattgtagcgccgcctccgaaggagtcctctgcagatagtgagagtgattatggtgatgatgatgcagttgattcaggtaataagaaggagaagcatcacgggccaagtaaggttgtacttggttttgcaattggtatttcttcaatcgttttcctcattattttcttggttctgatcgcaaaatgctgtcgttgaagtgggggaaaagacttttggctatgagttggatctatagat

SEQ ID NO: 200008 - DNA, 530 bp, Gossypium hirsutum
attatttcatttgggaaagatgtggctgaggcacattcctccaagattgaaagggtggatttgctggattctatgaaggctgatatgctagccaacttaaccaactgtgatatatggatcgagtatcatgacattggcgatcatcgtattaaagcagttgctgattacaaggtttacacagctggatcaattttggacctgcttcattttgtttcccccaggttgatggcacgaggaggcgcgcattcctcatatgggatagctgataattcggatgacccgaaatatcaacactacaaatattggtcaaatcctctagaaacgaagttaccagatgctccagacatggagatatactcaatgtacggagttggaatccccactgaaagagcttatgtttacaaagtaactactgccactgattgctctattccgcttcagatagacacctcagctgagggtggcagtgaagatctcatgtctaaaaggtggcgttttctctgctgatggagatgaaacagttcctgttc

SEQ ID NO: 200009 - DNA, 650 bp, Gossypium hirsutum
  unsure (1)..(650): unsure at all n locations
aatctccattccaatcttgaaatggtgaggaagcgagtacctgattggctcaacagttctctctggtctacaactccggccgacgatcgtctccaccgctgtgccccttctcccaccaccacaaccaccacctcttccgccaccgtttccgagccaactcttcagcctccggctccagtgcctcctcccgccgcagcctcgaaacctcagtccactcctacttctccgaaactcgaaatcagagatccagttaatagaaatagtaacaacaatagcggtggtaacgatcaaaacggcgactcttctggcgtttctcccgatgatatctctcgccaggctcagctcttggccgagttatctaagaaggtgataaatatgtgggaattacngaggattgcgtcgcaggggattcctgatggtgcaggaatcaaatctactgtctggaaattgttgttagggtatttaccacctgatcgttcgcagtggtcttctgaattanctaaaaaaaggtctcagtacaggcattttaaaaaaaagctcttgatgaatccttcaaaaatcacaaggaggttggagaantctgtgggttgtgacaatgatgaatcaaaacctgaaggcaggggtctgctatcaaaatcacaaataactct

SEQ ID NO: 200010 - DNA, 319 bp, Gossypium hirsutum
cccatgctatcgcccacgcgtccgtccaatttgcttttgagtagctccccaaatatccttccgcttattgcaatggagaccccttcatctacaagacgagtcaccaggtcccagactttggctgctttgaacaacagcaatatccctctttccaaggggatatagggaaaagccacacgaaaggtctgctcttattgatataacagatgactcccctattgttgggcttgcggcggaaacaccgccatctgttataggtaagcaccggagtagtagagccaagagcatgatgatgactcctggttctggtgaggctttg

SEQ ID NO: 200011 - DNA, 468 bp, Gossypium hirsutum
gctgaatatgcagcattgaaagaaagaaacaagtccatggaagattaattgaagtatatgcgagatcggtattccgagataagcctcaattcgcagaggtggaaggtgaacgacaacggcttctgatgacggtacgtaaaataaagaatgccaagaagagctgaaaggtattcatttcttcgtatacaagttactacaatgtatagttgaagtagcagctggatttgtacccacacggaaattgcaggtgagacagtttcctctttagaatgaaaaagaaattaagttgtacaaaaaaatcaaaaacgcattcacctcacctagtagtttccatatatagtttattttttataaaaaattttactttgcatgttttgcatgtttggttcttgctcttatattaaagattgtcatgaacatttccacaaatatatatatattgacaaagcataaactagctcttctttt

SEQ ID NO: 200012 - DNA, 320 bp, Gossypium hirsutum
tctacgcgtccgcccacgcgtccggtgagaagtagctctagaagcagttgggggtgatgaaaacctggcccttgaaaagcttttatccagctgatctgtgctggagctgccaattgttctacatcttttagtaattcttcacctacctggtgaatttgaacgccatacaatgacacaattatatctgaatataagctgtttctaattactgagttctgattccataaatttccatttttcgttgaccatgcttataacttttgttcgatgaaatgttgttacttgcattttgtttaacggcagcttcgagttgccattgc

SEQ ID NO: 200013 - DNA, 400 bp, Gossypium hirsutum
ttttcctttaaaaaaaaaattaaaaaaaaaaccaaatccaaattccccccctttaagtacccctctgccgtctccctcactctcaccacaacccccactcttgctctctcttctcttcccttcttctctacagattttcagtaactttataagagttttaattatagtgttgaagttgttggaggaagggcaaaaatggcagtggcgagtgcagtagcatgcatgttgctgtttatctcctccacagtgtggatgggtgaagctagaattccaggagtttattctggtggcgcatggcaaaacgcccatgctaccttctatggtggttctgacgcttcgggcaccatgggaggagcttgtgggtatggaaacttgtacagccaaggatatggagttaaca

SEQ ID NO: 200014 - DNA, 455 bp, Gossypium hirsutum
ccctttctttcgggaaattagtgcagttcctcaatataaaggggaagtatatgatgatgaagaaaccgtagatttagatgatgttgaagacgacagtgacgacgaaaagaacgacaaaaatggtagttggttaactacaactccttcgacaaaattgggatcatacgaatactttgagaaagttttaagaaaaccaaagcacattcttgcccctatggtcgatcaaagtgaattagcatttaggcttctatgtagaaagtacaacgtcaatttatgctatactcctatggttcacagtcgcctattggtagaacaaagaaaatacagaaagaaatacctcgtaacatgccctgaagaccgccctctcgtaactcagctttgtggaaacgacccagcaattgttttacaagctgcactcattgctcaagaaagaaccgacgctattgacatgaact

SEQ ID NO: 200015 - DNA, 561 bp, Gossypium hirsutum
ttttgttttcatggcttctttacttgtcaagattttttctatcttcttcatcatcatctgcatcttcacaccacaagcactttcagtagtaccagaggaatgtaaaaccgaaaccgatggctgcaccaacaaggaaaaggccttaccccttaagatcatagccattttctccatattgatcgctagtattatcggtgtatgttcgcctttattcacacgttcggtcccagctcttaatcccgaaagaagtttatttgtgatcgtcaagtgcttcgcatcagggattattctggctactggtttcatgcacgttttaccggactcttttgacatgttaacatctaagtgcttgaaagagaatccatggcacaagtttcccttcacagggttcgtcgccatgttatccgcaatcgtgactttatatagtggattccgtggctacatcgatatacagcaagaaaagcaacaatgaggttatcccagaagttgcatcacctgctgggggtacacaacaggacatggctgtggtgaatgttggacactctcatggtcatcatcatg

SEQ ID NO: 200016 - DNA, 557 bp, Gossypium hirsutum
cccacgcgttcgtttgccttcaatcttcccaaatagatctcatttcccttctctccggtcgttcttctttgatccgctaagggaatcaatcacttcgaattctctcagcatagaaaagaaagcggcaggaaattttagttatgttggggacaggattggggtttgggagagttcgtggagaagataggttttacaatccggccaaggcgagaaggtcgtaccagaaacagcaaaccgatcaactacggagggctcaaagcgattatacggtcagtcaatcgaatgtgacccgggattcagagaaggggcttggttcaactgaccctcctaagccagttttggttcccgtttcagaaccggttgtctctccattgagtaattcagagcggtttttggactctgtcattccttccgtccccgcactttacctctctaagaggacgatgagagggtggcggacgtatgacggagaatttcagccatattttgtgttgggcgatttatgggagtcattcaaagaatggagtgcttatggagcaggagtcccactgattttg

SEQ ID NO: 200017 - DNA, 486 bp, Gossypium hirsutum
  unsure (1)..(486): unsure at all n locations
cccattcgttcgcccacgcgtccgcaaaactcgatctatgcgtgaagatcctcttcctgatgctgaccctaatgagaagttctatgaaggtgataatcaatacacaatgagtgggcaagctttggagttcaagcagctcaatatccatgcatgggaagcatttgataaaggtcaagatattcatatgcaggctgctccatctcaagctgaactcctcttcaggaattataaggtcatcaaagagaagttgaaatcaaagaccaaagataccattatggaaaaatatggcaatgcagcgactgaagaagagataccgatggagcttctcttggggcaaagtgagaggcaagtcgaatatgatcgtgctggcagagttataaagggaatggaaacatcgcttccaaaaagcaagtatgaaaaggatgttttcatcaacaaccacacanagtgttggggttcatggtggaaggatcgccaatggggcta

SEQ ID NO: 200018 - DNA, 439 bp, Gossypium hirsutum
cctactcgtccgagttgatattcaaaaaccactttctaaccatactattcccagttgaccggttttccgagatgggtccttcttcacgaacatatttcagcaataacggctttacgtgtctgcagattttggattatatctattccttttatcaggagaacatgtcgagtcatgaaatagaagctgctatccacacggactcgaggcatgctgaccggcttcgagcattgtactctagcaaagagacagttgaatgcggtggaaacatgattttcaaacgaatcgatttcttaggaagtcgtagaagcttcgaaatgttaaagcgtgttagtggggataataacagtaatgtatatgagctcttgattagagcctaaaatatcatcatatatagcattactggtaaaggattgaatcttcagtcacagcatcaatactc

SEQ ID NO: 200019 - DNA, 759 bp, Gossypium hirsutum
gttgtgtttttactctcaccttctcccactcctcgtgaaaccctagttctcagacgccactaaaaccttagtcctctcactcgtctttcatcatcctcatcaatggagttctggggtattgaagttaaagctggacagcctattaaaacggaccctggtgccagtcatgtcatccatctttcccaggcaacacttggtgagtcaaagaacaaagcagagtcggttcctctctatgtgaatgttaatgggaagaaactcgttctcggaacactttcccaccagaattgcccgcaattgtgttttgatttagtatttgagcaaggctttgagctctctcacaactggaaaaatgggagcgtctatttccttggttacagagcttttgtcccagaggaaggctctgatgaggaatttgatagtgaggaagaaagtagcgaggatgaggaacttcctgtagctgctgaaaacggaaaagctaagacagatgcaaaaacagccaaagctaatgctgggaaacctgatgctgtaaaacaagctgtcaagatagcagaaccaagcaataacaagaaaaatgaggacgatgatgatgatagtgattccgaggatggaagtggttctgatgatgaagatgattccgaggatgaagacgaagagatgtctgtggatgaaagttcagatgaggatgaggagacacctaagaaggttgagtcgagcaaaaagagaccagcagaagctgcaacacctgtttctgcaaagaag

SEQ ID NO: 200020 - DNA, 439 bp, Gossypium hirsutum
ccctctcgtccgccaaatctctctctttgtctgtcggataattccaatggagggtcttattccttttgtttatagagcaataatccgatacaaaaacggaagacggggccatcatgttttagcaacatggttcaatgactcaccttcagcttcttacatgagactcccaactggtgattctggtcggtttcaaacatctgatacacaacaactgtttcaatcagattgtgtcaatttttcaacctcttcgcctgtctcttctgccaccaccaccacttcctcttcacctctctgtcgtcgtttcatcacctctcgccgtgtcgtttcataattattacatcgaatgcagtgacatgtctgaaggaagctgaaggtgtgccacttacaatacatatggtgttttctttttctttttaatcaattcggtcgagggacggat

SEQ ID NO: 200021 - DNA, 555 bp, Gossypium hirsutum
gttgcatctgtttccggtagtatattttcaaggctagtgatgggtgctgtttgtgaccttttgggacctcgttatggttgcgcatttttggtcatgttatcagctccaaccgtcttttgcatgtcgtttgtttcggacgctggagggtatatcgctgttcggttcatgatcggcttctccctagctacatttgtgtcttgccagtactggatgagcacgatgtttaatagcaagatcattgggctggtcaatggaactgcagccggatggggtaacatgggaggaggtgcaactcagttgttgatgcccttagtttatgacattattcgtcatgctggagcaactccattcactgcttggagaatcgctttcttcattcctggatgtcttcatatcatcatggggatcctggtcttaacacttggccaggacttgcccgatgggaacctaagcagtctacaaaagaagggtgatgttgctaaggataaattcggcaaggtgctatggtatgccatcacatattacaggacctggatttttgtccttctttatggc

SEQ ID NO: 200022 - DNA, 406 bp, Gossypium hirsutum
ttggttttagactctcttctagaagtagtggatatgttggggatgataatgataacagacctggtgatggtcgccgtgcatcttgcaaaagaaaagctcttgaaggaaacgttgggcagtcctcttcgagtggaagttctagctacttccattgtgcagaaagtagcgctgggcatggtgtttctgctagttctagtgtaggaaacggcatgaatatatctgcctcctcaggacaggcacaccctagacttggtttagaggtgggaggatcaggttctgatgccaaccctggaccaatcgttttaccagctgcaaagggctcccacaggaacttccggctaagaataagtccatcaagcatacaggaaccctattgctcctccggtattttctacaggtgatatga

SEQ ID NO: 200023 - DNA, 756 bp, Gossypium hirsutum
  unsure (1)..(756): unsure at all n locations
cccccagttagttctgaagtcggtggtctgaggctcttcatcgatatctctgttccacgaaacgtgggatcctgtgtctcagatgttgaaggtgcacgtctctacaatgttgatgacctgaaggaggttgtagctgctaataaagaggaccggcttcgaaaagcaatggaagctcaggccattattgccgaggaatcgaaacagtttgaagcatggagggattcactggaaactgttcctaccatcaagaagttgagagcctacgccgagagaattcgacttgcagagttggagaaatgcttatcaaagatgggtgaagatatcccaaagaaaacaaggaaggcagtcgacgatctcagccgtggtatcgtcaataaacttctccacggtccaatgcagcacctgagatgtgatggtaatgatggtcgaacccttaacgaggcccttgagaacatgaatgcgcttaacagaatgtttgggctggagtcagatttgtcacttgttgaacagaaaattagagccaaggtagaacaaagccaaaagtaggaattgaatacagaatctctcaccctacaatcaactacacttccttgcaatcgaataagtggtcagttgtaacgtagtagctaatcaatttgaggtccttgtgggggcatctttcaattcattaattggtgtaaaacaccattgcttgactctgatttggcttcaccatttctacaatggtttnttagaggtctttcggctatgtagatt

SEQ ID NO: 200024 - DNA, 607 bp, Gossypium hirsutum
cataggatcacttcaaagcctgtcaagtttgaaaagtttgttacaagagccatgtctgaaccaagtgacaacaagcctttgtctggacttcctattgatttgagaggtaaaagagcatttatagctggtgttgctgatgacaatggatatggttgggcaatagcaaaatctcttgctgctgctggagctgaaattcttgttggaacatgggtgcctgcactcaacatattcgagagcagtctaagacgtgggaaatttgatgaatcacgcgtattgccagatgggtcattaatggagatcaccaaagtttatcccatggatgctgtttatgactctcccgaggatgtacctgtagatgtgaaaacaaacaaacgttacgccgggtcttcaaactggacagttcaggagcttgttgaatgtgtgaaaaaggattttggcagcattgacattcttgttcactcccttgcaaatggaccaaaggtaagcaaacctcttttagagacatcaagaaatggatatcttgctgccctatctgcatcaagttactcctatatttctctactcaagcatttccttccaataatgaatccaggaggtgcttctattt

SEQ ID NO: 200025 - DNA, 461 bp, Gossypium hirsutum
gtgatgtctccaagctttctagaggcctcgaaaacatgggtgacgtcctacggttaaacgaaacaatggggttggacgagagcaaagagaaattttcggaatcaatgaaccagtttatgaaaatggctgaacaggaaatcccaaggattcaagcacatgaaaggctagcactatcactaggcaaggagattactgaatacttccatgggaattcagcaaaggaagaaactcatccctttagaatcttcatgggggtgagggatttccttacggttctcgatcgagtctgtaaggaagtcgggacgataaacgaacgaaccattgttagttctgcgcataaatttccagtcccagtgaacccaatgatgcaacaaacattcccagttccagtaaatccaatgatgcaacaagcttttcctggatttcaagggaacccacactatgattctgatgatgacact

SEQ ID NO: 200026 - DNA, 503 bp, Gossypium hirsutum
tatagttcaaaaggagcagaggtcacaattcggcatcaagaatcccaggacggttatcgtggtcactccgacgtatgtacgcactttccaagcgctgcatttgaccggtgtgatgcactctctaatgctggttccctacgatctggtttggatcgtggtggaagctggtggcgtcagcaacgaaacggcgtcgcttattgcgaaatcgggtttgaaaactatccacgtcggattcaatcaacggatgccgaattcctgggaagaacgacataaattagagtccaagatgcgtcttcgtgctctaagaattattagagagaagaaattggatggaattgttatgtttgccgatgatagcaatatgcatagtatggaactttttgatgagatccaaaatgtgaaatggtttggggctgtttcagttggaatacttactcattcggttaatactgatgagatggcggatcggaaaaggatgaagaggagaatcctagaatgcctgt

SEQ ID NO: 200027 - DNA, 433 bp, Gossypium hirsutum
tgaaatcttagttgttgtccaaggcacactttacgtcggttttgttacgtcaaacccagataatcgtctcttcaccaaagtgctataccctggagatgtctttgttttcccactaggtctgattcacttccagttcaacatagggcataccaatgcggttgcctttgctgctctcagtagccaaaacccgggggtcgtcaccattgcaagtgcagtgtttggctcagacccggatatcaatcctgatgttcttgccaaggcctttcaactggacaagaatattgttaaccaacttcaatcccggttttggtcggataacgacagtaggaattaatgttgacttctacagccccatcaaacttaactgtgtacccaattctctgctattgctaattttattttacattttaattcaaatttaattactcttttt

SEQ ID NO: 200028 - DNA, 497 bp, Gossypium hirsutum
aaatttgataatcaaaatgtcactgttgagtgttgaaatttagttaaaacaacaccccccttaattgttccatctatcaaatgctttcttctttcaaatcctgggttttcagcagctactagtctgccactgctccctcatgggattgagatgtgtgctaatttacttgcagcattttgttttacttacaacagggttaactaaaggagctttgtgcggtaaagcacatggtctaattaacaagtaactatcatttgaaggaagggagcttttacctatgttggtgcttcatctgtacattttagggaattagtgatcaaaacgaggtgtaaagttttactattgcttacatttcccatcatactttttccattttttgctctggcttctttattcatggtccgtggaagctgagcaacagaacacagcaaagaaacagttgattagaagtttggcagagatgagatgagtttatctaggcctatatcagggcctta

SEQ ID NO: 200029 - DNA, 754 bp, Gossypium hirsutum
cattttctctctctctaggtcatagagatttcagcttgcttcccatcatcccagtccctcccattactccatataacttgttcatttgttctactctctagctagcctttttccccacaaatcaaatataatcttcgtttcctttacttttgggttcccatggcgtcggctttgactgttctcaggcggctctacctttccatctataattggctcgtcttcatcggctggtttcaggttctgtttttagcgttaaaggctttgaaagaatcaggtcatgaacatgtctataatgctgtcgaaaagcctctccttctagctcaatccgctgccgttatggagattcttcatggcttaataggtctggttaggtcaccggtgtcatcaactctgccgcagataggatcaagattgtatttaacttggggaattttatggagttttcctgagattcgaactcacattcttgttacttctttggtcatcagttgggccattacagagattattcgctattcattctttggcatgaaggaggcctttggttttgcaccttcatggcatttgtggcttaggtatagcacattcttggttttgtatccaactggcatcagcagtgaagttggtctgatctactttgccttgccatatatcaaggcttctgagaaatattgctttaaaatgccaaacaaggggaatttctcctttgattacttctatgctgcaattcttgcccttggaatctatgtcccat

SEQ ID NO: 200030 - DNA, 479 bp, Gossypium hirsutum
cttggtggggtgcataaaagcataatattgaaaggaatttgctgcaacacaagcaatcaactgctcgccaacagaaatgggccgctctctgatgtcatgcccgtcgacagtcccaacattcttcagacatcccaagattgcacgagcacagacgttcgagaattccttggagaatttactcaaaagctaagaaacattaaggccaggcctccattcaagattctcagcaaactctggtcacctaccgtactttctccagcacctgctcgggactagtaaaacatacctttaagccatggacttcacagggctgatagcttttcctttttctttattaccctgaaacataaaaataaaaaataaaaaaaaatctaaatatatatccctgatatttgtacattccttaaaaaatgtcctttttctgtttgggttttgcagcatataaagtttgaataccagcttgttgaacttgaatttat

SEQ ID NO: 200031 - DNA, 415 bp, Gossypium hirsutum
ggatcgtggccaatgacgcttcgggcactcagcagcccggccctgacgcctcattatgtattgcgtagtctaatagctcaatggtgtgaggcaaatggggttgaaccaccctagagacccagcactcgtcccagtaaaactacatctgcctgctcaccagctgagcgtactaagattgaaattctcctccgtaagctcgcatccagcagtcctgaagaccagagaatggctgcaggtgaaatccgtcttcttgccaaacgcattgcagataaccgtgtggccattgctgaagctggggccatacctctccttgtgagccttctttcaacacctgattcacgcatccaagaacatgctgttacagcacttcttaacttttctatttgtgaagataacaaagcatgtatcatatcct

SEQ ID NO: 200032 - DNA, 298 bp, Gossypium hirsutum
ggctttcgtagggtacggaacaacagaggcgtcggattacgctgtagtgaagaactcgtggggagccaaatggggagaaaaagggttcatacggatgaagaggaacaccggcaaagctgaaggcctttgtggtatcaacaaaatggcttcttatcccaccaagaaaaactgatcaacacctttgatttcttcctctttttaagctttttttttatttttatttttatttttctatgttcacaaaatttgctgcccaatgtccctttggttataataaaaattcctcataatttcgttt

SEQ ID NO: 200033 - DNA, 875 bp, Gossypium hirsutum
ctttttcgtccgattgcattccaattcactttcgagaaccacttgagggatgacgtggcttctatggctcgtcaatatgtacgtagtgttgtgggatctgttcaaagggttgccatggctattgctccatcccgtattagccctggcttgggaccaaaaagcctccctggttctcctgaggctcttactttggcgcgttggatttgccgaagctacaggattcataccggtggagaactcctacgagctgattcacaatccggtgatactttgctggagcaactgtggaaccattcagatgcgataatgtgttgttcattgaaaacaaatgcgtctccagttttcacctttgcaaaccaggctgggcttgatatgctagaaactacattggtagcccttcaagacataatgctggacaagattctcgatgaagccggccgaaagagcctatgcaccgagttctcaaagatcatgcaacaggggtttgcacatctaccagcagggatatgcgtatcgagtatgggaaggccgttgtcctacgagcaggccattgtgtggaaggttgtcgatgatgacaacgatgatgctgccaatcactgcctcggcttgatgtttgtaaactggtcttttgtgtgagatctttactgatagatgtatcgaaaaattaactcttaggtatctatctatctatccatctatatatattaagttatatatatatgtttttagtgcttaaaaaagattatattatatatatttatgaagttattggcaggatttaatggatattatcaagtgttttatgggatatatatggctagacatggatgttggtttgcttatttcttgatatagaatggataatttatgctaaa

SEQ ID NO: 200034 - DNA, 701 bp, Gossypium hirsutum
  unsure (1)..(701): unsure at all n locations
cccactttttccgccaatagttagatctcagtttcctttgctaccaaactttggcaatggcggatccagcacttcaccaccaaatccaacccatcaaagaaatagccatagactacaccccagaggcctgcacccactgccctgtctccaactccatcacactcacctttgatcatcgtggaggcgccaggtggcgttccaccactcgcttcctctacggcactttcacttccctcatccaatgccctaaaggcaacaccagtggtctcaacttcaacatttacctttcctcactcgaaggcgacaaatcgcaagacgagatcgacttcgaattccttggcaaagacaaaactattgtccaaaccaattactacactacaggaactgggaacagagagcagattcatgatctgggttttgactgttctgatgggttccatgaatacaccatcaagtggaatcccgattctatagagtgggttattgtgggggtggtgaggaaaagcagaaaagaagggaagtgaggcatttcctgagaaacccatgtttttgtatgcttcattctgggatgccagctacattgctgaaagtaatggactggacctacattgtgcgagttcctatgttgcttataagatatcaggcctgctcactgtgcnagtgtctggatctgactgctctatttcgcactggtatcgggg

SEQ ID NO: 200035 - DNA, 556 bp, Gossypium hirsutum
ttcatgttttcggcaaaagggtgttcggtactaaggcacagttttgcgataccggtcggattcatgatcttgtgattgaatgcgacatgatcggggtaaatgatccgtgtcttgtgattcgtgtggacggcaagagtttgatgcaagtgaagcggctacgatggaagtttcgagggaattatactattttggttgatgggatggctgttgaagtttattgggatgttcataattggctcttcggatcatcggtcgggaatgctgtttttatgttcaaggcattgccttcatcggaggagaagttgtggattagccaatcgatcactaatccgagtacgttgcaatggtctttctcacaacggtttcaagattcgaagacacgaaatctcggcttttcattggttttgtatgcttggaagaatgagtagaaaaacagactatagattcttcttcaactctctcaaaagtgctaacaaaaaaaaacttttattgagtggtgatgtttatatacacttatgatcaaagttcgattaattcgactgaaaaatcgatccat

SEQ ID NO: 200036 - DNA, 640 bp, Gossypium hirsutum
  unsure (1)..(640): unsure at all n locations
gctgatcatcgggcaaaaaccaattaaacccgcacttaggaaataaaaaccataaaggaaaagagagtaaaaccaccttaagccaaattaagcaaggcagaaaccaacaaaatagtcagccaagtagcttccatatccgatgaaaggatgaccaaaatgtgaaccagaggaaacccaaaagctttgagtccagccatggagattccaagaaccttctccattttcaaagccttctacgacaagctgtgatgacttcgttagcaaattctttgatcccttgctatcaacatcttgacagaaaccgaaacctcatcgacccaaaatccagaccgctgtcttctccttccttccatcgccagggtatgggccactccattaactaaacgggaagaaacaggtaacatatttcgtcaaaacacttttccaagttacacatttggtgaatattggtcagataaccctctcttctcctgctccttttaaatcttcttctttgtcaccatctttgccatcatctctagtctcatcctcctcttactctccaccacttncaccaccatcatcattgtaatcatcatcatcatcatcatcatcatcatcatcatcatcatcatcatcatcatcatcatcatcatcatca

SEQ ID NO: 200037 - DNA, 276 bp, Gossypium hirsutum
cccactcgtccggaaaagacgggcatcgcttaatgattttgataggttcaagctcatgttggcaaagattaagaaagctggaatcgttaggcaggagctagctaaacttaaaaaggagacggcagcctatacttatttctatttaagcctttccttgttatacatttcagtttgagatcttgtaaacttttaccgactttttttctcataattgttacttatggctcctgctatcaaacctctctatctgaaattgatggttgactttttaatctg

SEQ ID NO: 200038 - DNA, 522 bp, Gossypium hirsutum
ctgttatagctagctaagaaagcaagtcagccatggaaagaactctctttcacctattccttgttttgttagggttttctcatattataagcttgaatgcggtctcggttacaagaatcgaaagcttggtgcatggacctcaagttcatcatgttccagagaatcctcacccggtaattgcagagaaaagttctaaggaaggaagggtttttatggagttgaatgattatccaggttcaggagctaattatcgtcacactccaaggccacaatttggcagatgtgccgattgttgagtgtagatgtatgttttctcatagtgcttttggtccataatctctcattttattgcttcttaaatttgtttctttgtttcttgtctgttttcagagttgggaagttaatctgtatttagagctattcatagaagtaagtttctggcaatagcatgaatgtttagatactttaaaaccaattgataatcctccatattatagttttatgagatggactattaactgc

SEQ ID NO: 200039 - DNA, 727 bp, Gossypium hirsutum
tcgtgtaacgggcttgtgacagtcgagggtgaaaaatgggtgaagcaacggacgttggggaattatgcttttcatggggaaagcttaaagaacatgacaccggcagtaattgccagcgttgaaacaatgctagaaatgtggagaggctatgtgggcaaagagattgaactgtttcaagaatttagattattaacttcagaagttatatcgagaacagcttttggtagcagctacttggaagggcagaagatttttgacatgttgagcaagttggcaataattttgcaccgaaatcttttcaagaccagaattacttggatcagcaagttatggaaacctgctgatattcttgagtcggaagaacttgcaaatgaaatacaaggttgtgtgatgaagatgattaagaaaagagaagacagagttgtgaatggagaagctgatagctttggcaatgattttctaggattacttgtaaatgcctatcatgatttggacgacaaaaacatgccttcactgggagacttggtagatgagtgcaaaacattctaccttgcgggataagatactgttaattccttacttacttggacagtcttccttttagcaatccacggagattggcaagagaaagctcgaagagaggtgattgaggtttttggtaaccaaaatccacatcctgatggcattgtctaaactcaaaattatgaccatgatcattaatgaaact

SEQ ID NO: 200040 - DNA, 712 bp, Gossypium hirsutum
ttacaataaggtttcaaaggaatacattaagcaactggtggacgatccaaggatcaaccgggtaccaggaatcggtcttttgtactcggagttggttcaaggcatacctcccatatttcctcatttcatttctagcattccttccatgcattcagttctagtctttgtctccattaagaaacttccaatcagtaaagtaagaccagaggagcgttttctcttcagacatgtcgaaccaagagagtatcgaatgtttcgttgtgttgtaagatatggttataaggatttcatgggagcacctgtagagttcgagcaacaactggttgagaagctgaaggaattcattcgtcatgaatatttcatggctgaaggagaggccgcagctgtagagaacccgccccagagctccaatattctagcaaatcaaggtaaagataaaggaagtagtagaagggctgtttttgtggaggaaacactgaaccagctcaaccaatctcatagttcctcagcctccatccagtcattcaatgtggccaaatcaaataactcgacgagtgggatcatatcagcagcaccacccatactgggggctgaagaagagattcagtttgttcagaaagcaaaggatgaaggaattatttacctcctaggagaagctgaagtgatggctaaacccaattctttctacacaaagaggatgattgtggattat

SEQ ID NO: 200041 - DNA, 650 bp, Gossypium hirsutum
aaaaaggaaaagtcgaagatcatggcaactacaccaccaactcggagccccgaactccgaaaagacccggttacaaaccaatgggtcatcttctctccggcccgagccaagcgtccttccgatttcaaatccaaatcgccgcaaaatcctaacaataattcttcatcatgccccttctgcatcggcaacgagcaccagtgtgcacccgagatatttcgagtcccgcccgatccttccgggaaactccggggtattgagaacttgtatccagctttaagcaggaaactcgatcacccaaatggccagaatgacgattcgagtagcgagttgagcgggttgggttgggttgtagcgggattcgggtttcacgatgtggtgattgaaactccagttcactcggttcagttgtcggatttggatccgagtgagattggtgatgttttgattgcctataagaggaggattgagcagattaagcagtttgattcaatcaaatatattcaggtgttcaagaaccatggagcttcagctggggcttcaatgagtcactctcacagtcagatgctatctcttcccattgttcctcctagtgtttctactcgactcaacagtatgaaggagcattttaatcggacagggaaatgtagtct

SEQ ID NO: 200042 - DNA, 742 bp, Gossypium hirsutum
  unsure (1)..(742): unsure at all n locations
atttctcnttaattaatttattttccatcgaaacgcgggtttcttataaaattcctatctcctgtctccagaaatctctggaaattcctttgggaaacttgacctctacttccgatggttggaggaatccaccgcctttttttgatcagcaaaccgaggctggtagtgataagcagccaaagcttctttgccctctttgtcgaggagagatttatggctggagcgtggtagaagctgcacgtgagtttatgaactccaaacccaggagttgttcttcagagacatgcgatttcactgggacttacggtgaactcaggaagcatgctaggtctgctcatcctttggtccggccaactgaagttgatccagaacgacagcgtgattggtctaggttggagcgtgaaagggattatgaggatatgctgagttcaatccaaccagttgctagggaagaaagtaatggagaaagcatttcagatcttgaggattttcgttcgtggttgacaataaatcttgcatacttgacacttgcacttgagttcattagtgattcaagaaataacgaacatgatagatttaggaggagaccacggaataggaggttcacgtatgatcganagtctgatcatggtacaagggagaataatagttccacaccagacagagcactctttggccaccgcaacaatcctacaccagaagagagagttccaggtagacatcgtggctcacagggaattct

SEQ ID NO: 200043 - DNA, 491 bp, Gossypium hirsutum
tatacccaacatttgtacaaatctacattctcaggctgcttgtctagctttaggtcaccaaacttttctgggtcattgagacttgggcctaaaggtcagcctattaggatcaaatacacccaattgttgaagaaccctagaagaccctcactctactttgtgaatttgattggaattagggttggaaggagggttgtcgatatcccaccaaaggcattggctttcaacccttccactggtgctgggaccatctttgattctggtactgttttcacccggctagtagaaccagcctacgtagcagtccggaatgcgttccgaaggcgagttaaggtggccaatgtgacatccctgggagggttcgacacatgttacacggtccccatcgtggcgcccaccataactttcatgttcactggcatgaacgcaacactgccacaagagaacctactaatccacagcacagcaggcagcataacatgcttggcaat

SEQ ID NO: 200044 - DNA, 824 bp, Gossypium hirsutum
ggcgaagatggaatacgtgagccctgaaggtctccgcttggatggccgccgtccgatggaaatgagacagcttcgtgcagagatcggtaccgtcgccaaagctaatggttctgctgtttttgagatgggcaacaccaaagtcattgcagctgtgtatggccctagagaggtgcaaaataggagccaacaaattaatgaccaggcactggtgcgctgtgaatatagcatggctaatttcagtaccggagatcgcatgagaaaaccaaagggtgacagacggtcaacagagatatctcttgtcatccgtcaaaccatggaggcatgcattttgactcatctaatgcctcgttctcagatagatatatttgttcaagttcttcaggctgatggaggaactagatctgcatgcatcaacgctgcaactttagcccttgcagatgctgggatcccaatgcgagatatcgtcacttcttgcagtgctgggtatctaaatagcactcctttgctagatttgaactacattgaagatagtgctggaggtcctgatgtcactgtagggatcttgcctaagttggacaaagtgactcttcttcagatggatgcaaagttatctgtggatatctttgaaaatgtgatgggacttgcaatcgaaggctgcaaggccatagcaaactacattagagaagtattactagagaataccaagcaactggagtatcgccggggtctataactctatgtaagcggaagtatttgattgttgacttatcgtgttaaagattcaacaaaatatactatacagcattctgcttatgtttagatac

SEQ ID NO: 200045 - DNA, 389 bp, Gossypium hirsutum
cccacgcgtccgctgctttaacagcatgtgctcatggaaaactttctccacgtgagctggctacaggcctaaaggattcacctgattttcttcctgcatctttggcaaccatggttggcatccttctctgctgaagtaagtcgatgtgtatggaaacctgttgttatgaacggtatggactggccaagccctgctgcaaatttgtccaatgttgaagagcatatcaaaaaatttctagcagccaccggtgttgatgtccctagactctctgcaggtggtagctctacagctactcttccactaccggtggctgcttttgtacgtctcaccattacttataaaatcgacaaaacctcggaaagatttctcaatttggctggtccagcttt

SEQ ID NO: 200046 - DNA, 426 bp, Gossypium hirsutum
gtcgacgttggttatggtgctgtaaagtatgctgacttgaagaacaacagattgactaattatacacttaattttgaccagatgcttaacgataagaaagcaatttgcaaggagcctcaagagtcaaagattcccccatctcttctttttagtgataaattttgattttcttgacgcagccatgccatttatacatttctgcgaaattttgaagttgtaatgaagttgtaaaatggcttgtgttattcaagttgttgttattaaattttggactctgagtaatatttgaatccgctttatttttgttgataggatattgaatccttttttttgtatccattttgtttttggggatgacaaattctgatatacgaattgattagctactttactttttacaaaaaaaaaaaaaagtcgacgcggccg

SEQ ID NO: 200047 - DNA, 444 bp, Gossypium hirsutum
ttccacgcgtccgcccacgcgtccggtttgggcttgctgtaccctctacaactgttgatgaggaagagaaaaggaaagctcgtcttgcccgattttcaccatattccaaacctgacaccattgaaggagaaaaaaagaaaagcaagggcaatcaggttttcggatcccctgtcaacttctttagcacaggaggctcctgttgctggaaaggctgctggaggactctaaataaaaattaccatagttagaaggtctagtgtcctaacagcttgtgattcgctcagcagcttccttacaatgttttatttctaacatcaaaatttaagatgcaatactccatctccagatgaatttctaaagaattggcaatgttcttttggcagtttggaaggtgttttacagtgtctattcatttggtgaggcctattggaatcaacaaccacc

SEQ ID NO: 200048 - DNA, 563 bp, Gossypium hirsutum
ctactatgtttgaagtataccagcttttaagagctattggagagcgatacaattttaccaccgaggatgaaattttgatgccttcagatactggtgatgctgattatttagaggaacttattgttgctcgagaagtcaacgagagtcagtgaagagctatgggatatggtgagtattgtatcttagcatagtgcatgtgtaagtatttgctcttgtgcatgtttaaataaaggttgaagttacatgtatgatgctttacttactatttcaacttcctacatccagtactcactgtaattgtatcaggtatattttttagcatctacattaggtctttgtgtctgttatttcatattagaatccttcacctatgtcctcgaggaaaaaaaaaactttagattgattagtatcatacataatctttcgaggctttctccctaaattatcatgtatgtaggatgattagcttcacaccaatcaaatgctacgtataatgtaattaagatcacttcacaattgtgggatctgttttccttattgattaatgtgataatttcttgctg

SEQ ID NO: 200049 - DNA, 268 bp, Gossypium hirsutum
tttatatgaaactatgtatgaataaaatctcctgctttaggcggcatcaagaaatagaggccatcttagccgcattatctatgatccgtgaaaataggtttctctttagatccaattaggtaccgtaccaaaatatcattggtaaaatgaaagtagtaagtactgtcctggtgaggaacgatgtgtgcttttgtatgttgcatgaaagagttagcttgcaaataaataaacacaagtgtgatgctttctagctcaaaatggaaaggca

SEQ ID NO: 200050 - DNA, 611 bp, Gossypium hirsutum
aatggtattgataagaaaagattgattgatgatgttaggcaagctttatatgcgtccaagatatgcagttatgctcaagggatgaatttgttgagagcgaaaagtgttgaaaaaggatggaatttgaactttggagagttggctaggatttggaaaggtgggtgtattattagggctgtgtttttggataggatcaagaaggcttaccagaggaaccctaatttggctagcttggttgtagaccctgagtttgctagggagatggttcagaggcaagctgcttggaggagagttgtggggttggccatctctgctgggatcagcacaccaggaatgggtgctagtcttgcctatttcgatacctataggcgtgcaaggctcccggccaatctcgtgcaggcacagagggacttgttcggggcacacacctatgagaggatcgatcgtccagggtcatttcatacagagtggaaaaagtccgctcaaaagattaatgccggtgttggtgcactcaattgaggtttctgagtttagtttgttgtactgtggctttacttgtttgtttcaaatgagcattggttatgttatgtttttatgttggaataggattc

SEQ ID NO: 200051 - DNA, 498 bp, Gossypium hirsutum
cccacgcttccggtgtcatagatcaccttttttggctgatgatgataggcacatgggctgctgcactgaaataccaagaaggaaaggaaatggagagtaataaacaaattggtacttcttcctcattcactgctcacctatttggttccaaggaatcatcaccatcgtcaaaagggattttcagttccattttcccacctccatcaatggtgggtgggaggaactcttcaagctctcaggtgttagaatcatggccaaaacagcctttagaaggatcagactggagacatggaatgcaagttgcagagagtgcaacatataccaaagccaacagagacagtaattctgtttttcaggaagaaaggatggaaccattccatttaagttcatctctttactatggaggccgagacatatatggtcattcttcaagtacacaagcttctacatcatatcctattttcaagaaagatggagaagatgaccctaatggaagca

SEQ ID NO: 200052 - DNA, 644 bp, Gossypium hirsutum
gttaaactctatttttaccagatttgcagagcacttgcttacattcataacagtattggtgtgtgccacagggacataaagccacaaaatttattggtcaacccgcacactcatcagctaaaactgtgtgattttggaagtgccaaagttttggtgaaaggggaaccaaacatatcttacatctgttctaggtactatcgagcacctgaattaatatttggtgcaactgaatacaccacagccattgacatttggtctgccggctgtgttttggctgagctattgcttgggcagcctctgtttcctggtgagagtggagtagaccagcttgttgaaattattaaggttctaggtaccccaacatgagaagaaatcaagtgcatgaatcctaactacacagagttcatattcccccaaattaaagctcacccatggcacatggatatttcataagcgtatgcctctggaagctgtggaatcttgtttcacggctattgcagttctctccaaatctgcgtagcacagctattgaggctttggttcatccattctttgatgagctacgtgatcctaacacccgcttcctatgggcgattcttccctcatgtcaacttaacctatcaatgtatgggttcttaaattgt

SEQ ID NO: 200053 - DNA, 728 bp, Gossypium hirsutum
  unsure (1)..(728): unsure at all n locations
gaatccnaacttagcaagttcatagatgtgtgtgctcatcactgtaannnaataagatctcaagaagatgtcaccaatcaagttaatcttccaggtcatctggaccctcaaagagtcatggagtcaatttaagcatttcaatgatgtggaaagggtttgaaaagagtaaccaaaaagaagaactacattcagcagcagtagcagcaatcaaagaagagcgatttcagttggtgctcctcaattctatcgagtctttttgcagcaaggccagccccgaggcggcgaaggaggtggcgttggttcttaaagtgctgtatgacgatgatattttggaagaagagtttatcatggagtggtaccagaagggtaatagctggtagcaataagggttctcagatatggaagaacctcaagcccttcatcgagtggctccagactgccgagtctgaatcggaagacgagtgaatcccgaagctctccgtatggtgtcttcaccatgttaagcctctacttctagtgcaataaatattagcgtcgtcttctattatatgttggtgtttggctttcccgtgtcgtgtttcctagaataaaagacagtgagctacatcccgtacgtgctctctgctgttctgtggtttattatgttgtgaactggtcattgtttattcccctaatgtgttaattgagtttatgttttatttcaaaaaaaaaaaaaaaaaactcgagac

SEQ ID NO: 200054 - DNA, 878 bp, Gossypium hirsutum
  unsure (1)..(878): unsure at all n locations
tcctcgcgtccggccccattccataaactgtcaccaccttcgcttactttcctttcaaagttctaatcttcgagatctccgaagatccaaagatctaactctcccaaaccttaaaaagcttcaaagggtttctccctttagccataacaaaaactgggtctcatttgttttgatctcaaaaaggatgaaggtcactctagtttctcggagtgggagagagttcatcaaaggtggccttgagcttaatgactcggctactgtggctgatctgcaggaagcaattcacaagagaactaaaaagttctatccttcaagacaaagactaacacttcccgtgccatcgggatcaagggagaggcctgtcgtccttaactacaagaagagtctcaaagactactgcgatggaaatgagaacagcttaaccatagtgttcaaggacttgggtccacaagtgtcgtatcgaacacttttcttcttcgaatacttgggtcctttgatcctctaccctgtcttctactacttccctgtatacaagtactttggatacgaagaaaagcgtgtcatccaccctgttcaaacatatgctttatattactggtgtttccactacttcaaacgaatcatggaaacattcttcatccaccgtttcagccatgcaacgtccccactatcaaacgttttcagaaactgtgcttattactggaccttcggttcatacattgcttactacgtcaaccacccactttacacacctgttagtgatcttcagatgaagatcgggttcgggtttggtatantttgtcaacttgcaaacttctattgtcatattatactgaagaatctacgcagtcctgatggtagtggagggtatcaaatcc

SEQ ID NO: 200055 - DNA, 633 bp, Gossypium hirsutum
atcctaattgccaacgtgctgaattatttcttcgctaagatcaaaggagggtggggatggcgcctgagtttgggtggcgcaatggtccctgcccttattatcaccgttggatccctagttctacctgacacaccaaactccatgatcgaacgtggtcaaaccgaggaagccagagccaaactcaagaaaatccgaggggttgatgatgttgatgaggagtttaaggacctagtcgctgccagtgatgcctcgaagcttgttcatcacccttggaccaacttgttgcagaggaaatacaggccccatctaaccatggccatcttaattcctttcttccaacaactaaccggcattaatgtcattatgttttatgcacctgtattgttcaacacaattggtttcggggacgatgctcccctcatgtccgcagtgatcacccgtatggttaacgtaggtgcaacattggtttcaatctatggtgttgataagtggggaaggaggtccctttccctaaaaggtggacttcaaatgttgatttgccaccctgttgttggcgcattcatcggtgcaaattttggggttatcgggaacccagttgaacttcccaaatggtacgccattattgtggtgctt

SEQ ID NO: 200056 - DNA, 916 bp, Gossypium hirsutum
  unsure (1)..(916): unsure at all n locations
ctgtatttcagctgttattaacattacaccataaaaatctttctttcaattcgggttctgagttgggttcgggttatatccaggaaacatgtcaatggggccaggggatcaaagcatcaaaggtataccaactcatggtggacgctatgttcagtacaacgtttatggtaacctcttcgaagttccctcaaaatatgttgctcctcttcgccccatcggccgtggtgcttatggtattgtctgtgctgctgtgaattcagagacacaggaggaggttgctatcaagaaaatcggtaatgcatttgacaatcggatcgatgccaaaaggacattgcgagagatcaagcttcttcgtcacatggatcacgagaatgtggttgccatcaaggacatcatacggcctccgctgtgggagaactttaatgatgtctacctcgtttatgaactgatggacactgatcttcatcaaatcatacgatccgaccaacaattgacagatgatcattgtcggtactttctatatcagattttacgagggctcaagtatgtacattcagcaaatgtattgcatcgtgatttaaagcccagcaatttgcttctgaatgctaattgcgaccttaaaattggggattttgggcttgcaaggacgacatccgaaactgattttatgacagaatatgtagtcactcgttggtatcgagcgccagaattacttctaaattgttctgagtacactgctgcaattgatatttggtcggtaggttgcatacttggtgaaatgatgaccangcaacccctcttccctggaagagactatgtgcatcagttgaggcttatcacagagcttataggttcacctgatgattccanccttgggttccttcgaagtgacaatgccagaagatatgttagacac

SEQ ID NO: 200057 - DNA, 548 bp, Gossypium hirsutum
attttatacttccatttttccactttccgacactttctgggcagccaaacacactaaaccctcaagtatatcgtaaaatggcgaagaagaacacggagaggaaagtaaacgtgtcgggtaaacctaagcactcgctagacgtgaaccggagcgatggcaagaacaattcaagaaccgccgccacggtgcgccgccttaagatgtacaacacacggcccaagcgtaacgctaaagggaaaatcttgagtcatgagtttcagtctaaagacctaccgaatacacgtatccaacctgatcgccgatggttcgggaatactcgagttgtgaatcaaaaggagctagaattttttcgagaagagctccaaagccggatgtcaagcaattacaatgtcattttgaaggagaagaaattgcccttatctctcttaaaggaccatgctaagcaagctagagctcatcttctggacacagagcctttcgagaatgcatttggacctaagacaaagaggaagcgcccaaagctcctagctgtagattatgagtcttta

SEQ ID NO: 200058 - DNA, 848 bp, Gossypium hirsutum
gaagaaaacgatggaggatcttgccgtcgataagattgtcaatattggtatcggattagtgccgccggagatggctgatcaactttatgaaggaattcattctcatttggaaaatgttggaattgacggagttaaagttgacgtgattcatctgttggaaatgctgtgtgaaaactatggtggaagagttgatcttgcaaaagcttattataaagctttaacagattcagttaaaaagcatttcaaaggcaatggtgttattgccagtatggaacactgcaacgatttcatgtttcttggaacagaagccatttgtcttggtcgtgtcggggacgatttttggtgcactgatccatcaggtgaccctaatgggacattttggctccaaggttgtcacatggtgcactgtgcttacaacagtttatggatgggcaactttatccaccctgattgggacatgttccagtcctcccacccttgtgctgagttccacgctgcttcaagggccatctccggtggcccaatttacatcagcgacaccgttggcaaccacaactttgctctcctcaaacgcctcgttttacccgatggttcgatcctccgctgccagtactacgctcttccaaccagggattgcctatttgaggaccctctccatgatggcaaaaccatgctcaaaatctggaacttgaataagtatactggtgtgattggcgcatttaactgccaaggaggcggatggtgccgagaaactagaagaaaccaatgcttttccgagttttcgcatacggtaaaggccgagatgaatccaaaaagcattgagtggaacagtggaaagaacccaattt

SEQ ID NO: 200059 - DNA, 632 bp, Gossypium hirsutum
cccacgcgtttgcccacgcgtccggaaaaacatggtgttacatgaattctacgagcttgttgctgcaactgaggtaaacagtgagcatcccttagccaaagccattatcgagtatgccaagaagttcagagaagatgaagagaaccctgcatggccagaagcacgtgacttcgtctctataacaggacatggagtgaaagccattgttaggaacaaggaagtaattgtgggaaacaagagcttaatgttggaaaaaaaacattgctattccagttgatgctcaagacatgttaaccgaaaccgaatcaatggctcaaaccggcattttagtatcgatagacggtgaagtaacgggagttctcgccatatccgatccagtgaaaccaggtgcacaagaagttatttccattctcaagtcaatgaatgtaagaagcatcatggtgactggtgataattggggaactgcaagttccattgctagtcaaattggcattgaaactgttgttgcagaagctaaacctgaacaaaaagcagagaaagtaaaagagctacaagcggaaggttatgctgtggcaatggtaggggatggcatcaatgattcgccggcacttgtagccgcccatgttggtatg

SEQ ID NO: 200060 - DNA, 579 bp, Gossypium hirsutum
gtcatttgctggagtcacctgggaaaaaagtgggaatagttggcctggggggtctgggtcacgttgctgttaaaatggcaaaggcatttggtcatcaagtaaccgtcatcagcacttctccgtcaaaagaaaatgaggctaaacagcgtttgggcgctgattatttcctagttagcacagatgctaagcaaatgcagggaggtaagaggtcgctagatgttattttggacactgtctcagctaaacactcactcggaccaatcttggaactactcaaagtaaatgggactttggtagttgtgggggcacccgacaggccaattgagcttcccgcttttccattaatatttggaaagagagcagtaaagggaagcatgacagggggtatgaaagagacgcaagaaatgatggatgtgtgtgggaagcacaacatcacgtgcgatgtagagcttatcaagccagataaaatcaaccaagctttggaccgccttgccagaaacgatgtcagataccgttttgttatcgacattgccggaacctctaagctttgaagatcgaatcagtgttcccttgcatgtt

SEQ ID NO: 200061 - DNA, 638 bp, Gossypium hirsutum
  unsure (1)..(638): unsure at all n locations
gggaaattcgctaagatcattcgagctcgtggatgaagggaaggagccgcggaagaagggttgtccgggcgtggtatctggggcggagttcctaataagggccgccagagatgatgttgctctcgcagggggacccgactgggtggcggggctaggaagaaaagtcagctcgacacccagtcaagaggattccgacaacataatgccaagcccaagagctaacgcaacttctctcatcgatctcttcaccaaattcaatctatccgtcaaggatctggtagccctctcaggctcacactccattggagaagcaaggtgtttctcaatcatgttcaggctctacaaccaatcaggctccggcaagcctgaccctgccatcgaaccagggtttagagaaaagcttgacaagctttgcccacttggtggagatgagaatgtgaccggagatctggatgcaacacccaagctgttcgataaccagtatttcaaggacttggttgcagggagagggtttctgaattcggatcaaaccctgttcacattcccacagaccagagagtatgtgaagcttttgggcttggcattatgttgtcggaatcctcttgantggctgtcaagctatnttttnttcctagtct

SEQ ID NO: 200062 - DNA, 766 bp, Gossypium hirsutum
gcccccttcattgggtctttaaatctcattcctgctacttcatttctttttgtgttttttccctttgatctttaactaaagggatctgcttcgttgcctttgtctaccaggaagcagagcttacgatcacaacttgagctcaaaaaatgtcaggagaagaagttgcagttgcccaaccggacgcagcagcagtcattggtgagccaatggacattaacacagccttgccacttgtgattaggaagtcaaaagctcacagtgggcttgctcgaggcttacacgaagctgccaaggcaattgaaaaacacagcgcgcatctttgtgttatagccgatgactgtgatcagccagattatgttaaactggtcaaggccctctgcgctgatcataatgttaaaatgctacgtgctcctagtgccaaagctctcggcgagtgggctggtttatgcaagatagattccgaggggaaagcaaggaaggtagttggctgctcttgtgtagttgtcaaggattacggtgaacaacacgaggctgtcgaggttgttcagcagcacaaggattaagcaaattagagggatggttccctttatttattattattttttttgtagaagcagttttttgttttgtgttttatggatttgatagtgaacaacagaccaatgatgttgagattttgtttctttgagaaatgttgcaatgctgagttgctgccttgctggtgtggttgattgaaatatatataaattcatgggattgtggtttt

SEQ ID NO: 200063 - DNA, 540 bp, Gossypium hirsutum
cctattcgtacgcccactcgtccgcttttctttatgggacttatttaaccaaatccgtgcagtttttgttcccagtgaccctttggggtgctttttgttatcatagccactcctccttcttcagatggggtggcttcaatccctgttttctccattgatgaaactctggtttcgtctccactcatctcagagaaaaaggagagggatatacattttgtatgaagatgtgaaatcttgcccttgtgaggatgtgcatgctttatggcacaatactgggggaatcaaatgcacctgctaaaacattgaactgatcaagaaccctttttctgggtatgattttttctaaagaagcacatctattgtacataagtatgtatatgatatatccgttttcaggtgagtgtattatacgagtatgtatcctatatgagaaagtttaagttttttttatacttatattcgaatatatgttgaatgtaaatattaaaaattaaaaaaatataagaaatttgaatgactcagcataattatttatgattc

SEQ ID NO: 200064 - DNA, 305 bp, Gossypium hirsutum
ttttccacgcgtacggtagatttcattatcgttaaggggccccatttgataggaaagagggtaaaagagtagtaatctaatggttgaaattcatgcatacgatcatatcgatgtatgctatatgttcttggtcgagtcattagattagacgtgttcctttcaattttcctttactttccttcttaccaaacagagtgttagtgtttgtggcggcaagtggtggcttggcggcttggcggctttggtatttggttgaattcttcattgcagattcatttgcatcattttatgtataattttgcatt

SEQ ID NO: 200065 - DNA, 693 bp, Gossypium hirsutum
tgtttattttgtgaaagctgagaaaaaggggaggaaagatggtgaagctgactacgattgcccgtgttactgatggtcttcctctggcggagggactagatgatggtcgtgatctggtagatgctgaaatgtacaaacagcaagttaaggctttatttaagaatctctccaaaggccataatgaggcttcaaggatgtctgtcgagaccggcccttatgtattccactatatcattgaaggtcgtgtttgttacttgacaatgtgcgaccgttcttatcctaagaaacttgcctttcaatatctggaagacctcaagaatgaatttgagcgtgttaatggagctcaaattgaaacggctgccaggccttacgcctttattaaatttgacacattcatacagaagacaaaaaagttgtaccaggacacccgtactcaacggaatattgcaaagttgaatgacgaactctatgaagttcaccaaataatgactcgcaatgtacaagaagttctcggtgttggtgaaaagttggaccaggtcagccaaatgtccagtcgtttgacatcagaatctcgcatatatgctgacaaggcaagagatttaaatatacaggctttgattcgaaagtgggctcctgttgccattgtgttgggagttgtgttcctcctcttctgggtgaaagcaacattatggc

SEQ ID NO: 200066 - DNA, 527 bp, Gossypium hirsutum
  unsure (1)..(527): unsure at all n locations
agggtcctttcccgaactccgaattcnagggctggtcgatccctgcaacgatgaagaaaatgttcaatctatcgtccaacttcttgactcatagagatgcttgggccggcacttgcgaacgcctggtcggagagctatcctctcctagaactgattgcccagagaagttaccggaggcagcaccactgacgacaacagcagcaaacgaagacgctggtctctctgaatttcagagcgaggtggttcaactagccagggcgcttaatggtgaccacttcttgagcggctttgccgaggagatgcacacaaagatgagcgtaaaaggagctcatgagtacgagaaaggcgcagtttcaaggtttataagagcaagcaaagaggccataaagttgggagccgatgaatctgccatatgtgatatgagatcatcgcttacaactcgatcttcttcgatccacaactagtttatctattacaggttttacaaatgtcttgtaatatgtactaaaactaactttttgtgaaag

SEQ ID NO: 200067 - DNA, 665 bp, Gossypium hirsutum
ttgttgggcgctggcgctggagggtacggagacgggggcgatgtagctgctgaggcgttggcaccatgcaggatctagaggctgcagagggttgcggcgcaaacgagggagggatgacctagggttgctgaaaccttttgggccatttgggctcactttcagtattgggccatcagatttgggctagagggactgttttgggtatttgggtttgtaataggacattattggccatgtaatttttttggggtttttaattatatttatttatttacttggtttgtttgtaacgggcctaggcatatttggcccactatacccccttctaacatttttcccttatcggtaaacttcctttcgttttcctttgattcagtctgtgaatcctttattcaatcatcgctactgtgatttcttggttcttcaatcggctggtgaaggttatgaggcggagaattgcactccaacagattgtgtttctaaaggctcgggatatgttttcgcattcaatcgaaataagtgtgcactttctacacgaaaaaatctagcttatgagaaagtcgtataagcattctgtctacgccacacggacagttggctgaccttgttactgttttcgtgataacactcgatttttatatcttagggcttccctgtactactag

SEQ ID NO: 200068 - DNA, 437 bp, Gossypium hirsutum
tttcgaggtatatggaagcccgtttttatgggtggaacagattggcctagtcccttggcaaatttatccgtcgttctgcaacaaatcaaaaaagggattgctgccactggtgttgatgtcccaagccttgaaacagggggaagctctccggctatgcttcctttgcccttggctgctctcgttagcctcacgataacctataaacttgataaatcctctgagcgctcccttgtattacttggcccagcaatgagttccctaggtgggaagttgtccttggccatgtatgcccatcatatctgcactatgggctcagaaggttaagcggcggaatgatttccttgtattctcttctgcccgtactgtcttccaccacaacagcgatgctgtagttcagcttcttaggagttgcttcacggctactctcggattaagcc

SEQ ID NO: 200069 - DNA, 662 bp, Gossypium hirsutum
tttttcacgcgtccgcccacgcgtccgccgacgggttcggaaatctgttaaggtgaggcctaacttggttgtttacaatactttgatagaggcaatggggagggcagggaaaccggggtttgcaaggaaccttttcgaggacttgattgagtctggtttaactccgaacgagaagactttaactgccattgcaaagatatacggcaaggcgaggtgggagaaagatgcactgaaattatgggaggaaatgaagtcgaaaaactggcctgttgattttattctgtataatactttgttaactatgtttgcagatatcggtttagttgaggaggcagagcagctctttattgacatgaagcgatcagagaattttaagccggatagttggagttacacggcaatgctaaacatatatgcaagtggaggaaatgtcgataaggcgatggagttgtttgaagagatgtttgaagtaggtgttgagcttaatgtaatgggaaccacttgtttgattcaatgcttggggaagacccaaagaatccaagagttggtgagggtctttactgtctcgattcaacaagagatcgaaccggatgataaactttgtgggtgcttgttgtctgttgtgtccctatgtgataacagggaggatattgataaagtcc

SEQ ID NO: 200070 - DNA, 716 bp, Gossypium hirsutum
gtttgtgcgtggagttacgccaaatacgcggtgtcatttgattgtggaatatgggttctccaatttttccccttttctttttccaacgatttcgcattatttttcattttcatttttgatttttctttcttccatttcaaattttaattccgatcgagcaccaaaatccttatttccttttcattcttttgaaaattttaattgattgattaactgttgcaaagttgagtttttgatcggcaatggtgaaagaaactgatttctacgacattttaggggtcagcccttctgcgacagagtctgaaatcaagaaagcttattatatgaacgcacggcaggtccatccagataaaaatcctaatgatcctcaagcagctcagaattttcaggtgttgggagaggcttaccaagtattaagtgatccggcacaacgacaagcatatgatgctcatgggaaagcaggaatctcaactgaagcaattattgatcctgcagcaatatttgcaatgctctttggtagtgagctttttgaggaatatataggtcaacttgctatggcatcaatggcctcattagacattttcacagagggggagcactttgatgctagaaaggtgcatgaaaaaatgaaggttgttcacaacgaaagagaaaataagcttgcacaattattgaaagatcgactaaatcaatatgtgcaaggaaacaaagcggat

SEQ ID NO: 200071 - DNA, 741 bp, Gossypium hirsutum
  unsure (1)..(741): unsure at all n locations
tctacgcgtccgttctctaaaaccaaacaaattccctctattgttgggttgtcgtccttgtttttctttttccatgtctgacaaacaagctcaccttaatggggcctactacggcccttcaatcccaccacctacaagaaactaccaccgtcccggccgtggctccggctgtggctgtggctgctgtcttctcaaatgccttttcaacatcatcatcaccgccatcgtcatcatcggcctagccgttttcatcttttggctcatcttccgtcccaacaaggtcaaattccatgtcaccgacgtccaactcacccaattcaacctcacttccaacaacactttgcattacaaccttgctcttaacatgacaatacgtaatccaaccgtangatcggcatatctacgnatcgtatcgaggctaaagcttactcgaggatcanagattcataccgtaacgttaccccgtttatcaggacataagacactagttacttaaccctgtttcgtaggcagcaatttgtaggcttggtgctgatgaaactcgnagttaatgaagacgggttaacgggtttatgatatcatgtgaatggatttgaggattgtttaagcttggaggtcaaaactgtagttaancctgnaatcatggaattgaggtcttgaacacgggatggnaccttgtggacgtaaacccctnatggatgatttagataaccgataagcttgtcatcggatcacttattg

SEQ ID NO: 200072 - DNA, 381 bp, Gossypium hirsutum
tcgcaggatcctcggtcctaaggcttcttgcatttccttcaaggactctgcttgtcgttgctttggttacatggtgtccaaggggaagtacatttttaccatcgacgatgactgctttgttgctaaggacccatctggcaaagcaatcaatgcacttgagcagcacatcaagaacctgctatcaccatccactcccttcttcttcaacaccttgtatgacccatttccgagagggtgcagatttcgtccgtgggtacccattcagtctccgcgagggcgttccaactgctgcttctcatggactttggctaaacatcccggattatgatgctccaacccaactggtgaagcctcttgagaagaacactaggtatgtggatg

SEQ ID NO: 200073 - DNA, 566 bp, Gossypium hirsutum
tgtgcttcttcctgaactttgtggtgcattcttaacccagtacttcttggaactggttaagactctctgttaatgccaccacctgaaggtgtgcaacctttttcaagcggttcaaagaagttattcttggttcatccctcatgcattggaaattttctccatgctatatactatcaagagcactcaagcttgatatggcgtcatcataaaccatgctggtatataaactgtttgaagcaggtagatttgaaagaaaggaatcgttctttggttcatcccttggtgcagtggaatttttcttgggctatatcctatcaagggtactcgggcttgatatggtgtcatcacgaaccatgcaggtatgagaactgtctcaaacagttaatttcgaagtttttctttagttcatcggttataatgaaaccttactactgaaccatgttggtattagtttgtattacgtggcctccggatggatgagtattgaatatgagcatagcatgttttactgttcaacttttcttatatagtcggaggatcatattcttatatctatatttgaatat

SEQ ID NO: 200074 - DNA, 769 bp, Gossypium hirsutum
tttttcgcgtccgcccacgcgtccgcaaagacaagacatgttttaccatatctgggtgtcaccatcatcttcaacctccattgttttagcaatggttttagctttaactctcacatttgttcattcactaacattgagatcagatacggaagctcttcaagcacttacgcgttccattgatcccaacatgattccaccatcatcatatatcagttcatgggatttctcagctgatccatgtgatagtactggtgctaaatttctggggattttgtgttcaaaccctggggataattcaacaaaccggatcatatcgatcgagctcgatagtgctggatatgatggttttttgacacacaatataggaaaccttactgagttaacctcgcttgatcttagcaggaaccagtttagagggccattaccagataccttaaaaaatctcaagaaactaacccagatttctctttcagggaatttcttcacaggtggcattgctggatggatcaatggattgaggaacgttgaatcgattgacttatcggaaaacctcctttctggtccgataccaccgaggatttccgagttaagaaggttaacggacataagtttctccaacaatgaattctcagggagaattcccgacattaatggattatggaaattgcagacattagaccttggatccaacatgtttgttgggaacttaccaaagcttcctacaaaactaagatcattaacattgtcgcataatcaactttcaggacat

SEQ ID NO: 200075 - DNA, 584 bp, Gossypium hirsutum
tttcactcgtccggaaaatttgagagaaatggaggtggagagagtgcaagagattgctaatttctcgaaagaaacaatcccggaagaattcattagaacaacgtacgagcagccagcactgactacggttcaggggacggtgctagaggtcccggttatcgatctaagcgaccccgatgaagagaaggttgtacgaaccattgtggacgcgagcagtaattggggaatgttccaagttgtgaaccatggcattccccatgaaaccgtaaggaagctgaaagaggtcggaaaggctttcttcgagctcccaccacaggaaaaggaagcttacgccaagtccccgggatctcaatccattgaaggctatggaacgaagcttcaaagagaagttgaagggaagaaagcttgggttgatcatctcttccataagatctggcctccttctgaaattaactatcaattttggcctaaaaacccaccttcttacagaaagaataacgaggaatacgcaaagcacatgcatggggtggtcaacaagctgtttagaatgtctgtcattagggttagggctggaagggaatgag

SEQ ID NO: 200076 - DNA, 498 bp, Gossypium hirsutum
acttttagattctaggaataatctaggtttaaattatataaataataaaaatggcgttgttttggagagggcttattatattacctctcctatttgtgtatgcaagcagccattttatatatactaaacgacatttcgataaacccgaggtagtcgggtttaaggaccttgattacctccacggcgatggcggcggtttccttagtggccccatagaagccgatgatggtgtcaaagcttcgaagaccgtcgttgaagctgagagtgacgatgatgacaatgacgatgacgacggtgataagaagagtaaaaagaagaaggaaaagaagaacaagaagaataagaaggagaaaaagatgagcaagaaagacaaaaaaatacgatgaaagtttccatacattgccggtcgaaagccttgtaaacgaaaagggtggtgacgggaataccgacgattcgtctcaactcgtcggctataatgtagtgacggctcaaactacg

SEQ ID NO: 200077 - DNA, 447 bp, Gossypium hirsutum
aaaacattatctttttaaagttcctttgttccccttcggttttcataaaaattaacgccggagaattatgctctgccggagaattttactaataaaagtctggaacaacggtcgccgatggcttcttccttcttcatctctgtcgccggttccaacgacggcggactacaaacgtcacttctccactcacattatggcggcgttttcgttgccccaaaataaccaattcactctgaaaattccatatatggaaaatagatgtaagttttcaagtaatgctgtggctgatcttcatactaatggaatagttgatgtcccattggctcaaactggtgaaggtattgctgaatgtgagcttcttaaatggttcattcaagagggtgatgaagttgaagagtttcaacctctttgtgaagttcaaagcgacaaagcgacgatcgaaatcac

SEQ ID NO: 200078 - DNA, 507 bp, Gossypium hirsutum
cccacgctttcgattttaaacaaaaatggaagttcatgacaatctttttttagttttttcacaaggatgcaacatgggaatggtgatgctagcttgcatgtttatttcatggatctttgtttacagatggaaccagaggaacaaaaatggccccaaaacatggccactcatcggagcagcgttcgaacaattaattaactatgatcgaatgcacgattggctcgtcgaatacctgtccgcatcgaaaacggttgtagttccaatgccttgcacaacttatacttacattgctgatcctgctaatgttgaacatgtacttaagaccaattttgccaattaccccaagggtgaaacgtaccattcatatttggaagtgctgcttggagatgggattttcaacgtagatggtgagctatggaagaagcaaaggaaaacagctagttttgagtttgcatcaaagaatttgagggatttcagcactgtagtattcagggaatatagtctaca

SEQ ID NO: 200079 - DNA, 553 bp, Gossypium hirsutum
tctcacgcgtccggtacccgtactggcagttggagtccctcagtgagatgtcctactgtgcgcatcaaaggaagttgaccatcatccctgttcccctactccttggctttgtacttgccgggtttctgaaagaaactgccttggaactttctcctcttctcaaggatgcagaagttccatggcacctgattgcaatagcaatattcttcacattgatcaaactgccaggcccatattacccgtactgggggcggattttcattcctcacattgcaaatggagcattattcaggactctatggtttatgtttttgtggtatcgcagatccaaaatatcaggagctgagttgccaaatagtctggtaaatgtcagagattctgaagttgaataagcagtaatctcaacagcttgcattttgtgtctgagaaacgagccaggacaagctgcttgggaaaatatatcagaactggagaaggcttcgacaaacctaaccggctggtgcttgggattttcagcttgaaactttgagcacaaaaaatgccccaatctttt

SEQ ID NO: 200080 - DNA, 352 bp, Gossypium hirsutum
tttacgctttcgaaagcccagaaatcgactatgaatcaacccctgtttcatctctaatttctcaatcctttgccacaaccaatcgaaaatctgttgcgaatcatttcctctccacaaaattctttcaatttcttttgctctctacttcaagatcccttagttttacccgaatgttgcaagccctagcttaattgttgtgatttaggactctcggttttgccactatttaaggcgttaccccatttgcgagaaaccctagtcttcgattttttttaaaattttttgtagtttgtgtacagattttgtgtacagatttcggaatttttttctaggaatttgtggtgttttggag

SEQ ID NO: 200081 - DNA, 445 bp, Gossypium hirsutum
cccacgcgtccgatagaataaaaaaagttaatttataaattatatagtaacataataaataatgacgtcgttgttttggagaggtcttattatattacctcttctttttgtatatgtcaacggcgagcattttttgtaccctaaacgtcatactggcaaagccgagttagccggttacaaggggccagactctcttgccgtcgacggtggtggtttctatagcggtcccttgattgccgatgacgatggatctactgctgacggcaatcctggtggaactaccgaggtgaaggttgaaaaccttggaaaggccgacggtgataatactaatggcagtgcaaatagtgtcgaatcgactcaagttgctgccaaaaatggaattggcaacggaaatatttttgaggctaaaactacgtttaaagggagttgggaattgtttgttgag

SEQ ID NO: 200082 - DNA, 414 bp, Gossypium hirsutum
gtttcatccccatggatttctcctactcatttacgggtacagctaaggttctgctcctctccctaatctccctcaccttcttcactgcgaaactgaaacaaaaacagacaaagaacaagtaccaccccgttgccggcacgattattaacctgctactcaactttaatagattgcatcattatatggctcatcttgcagccaagtatcggacctacaggctgctttctccttacaggagtgagattcatacctcggaacctgccaacgttgaatatatactcaaaaccaacttcgataattatggcaagggtgagtataatcacagcctgctaagggatttttttggcgagggaattttcacagtggatggggataaatggcgtcaacagaggaaggcatcaagctatgaattct

SEQ ID NO: 200083 - DNA, 429 bp, Gossypium hirsutum
ttttccataacttccctttcccagaaaactagaacattttaataattctccaagtttcaactattcacattcattcataaaactacaaaaccatttcccacttccatgtttgtcaaacaagccacccattaaatccatctgaaaacaacttcccaacactgcgtttgttttgctctgtctcactttttttttttccttccatgcaacgaaaacaatgaagctaatccttttttcattgtttttttgggcatcattggtggtgagtgtgagctcagatctagcttccgacagggcagccttgttggctcttcgtgcagctgttggtggacgcatccgtttgtggaatctttcaagcagcccatgtagttggactggtgtaaattgtgtccaaaacagagtcgtcgagttaaggctccctggaatgggact

SEQ ID NO: 200084 - DNA, 622 bp, Gossypium hirsutum
gtcatcggagaactacgtcagggttccctcgttcgatggtttagaactgaacccgaatgccaagtatttgcatatatgcgccggggagaccatttacggggttgagttcaaggactacccagttccccgcaatccaaatggggttcttgttgctgatatgtcttccaatttttgttccaaacctgttgatgtaaccaagtttgggttgatttatgctggtgcgcaaaaaaatgtggggccatccggggtttgcatcgtgatcgtgaggaaggatcttctaggaaatgcacaagagagtacccctgtgatgcttgattacaagatccacgccgacaacaactctttgtacaacacacctccatgttatgggatttatatgtgcgggctggtgtttgaagaccttttgaagcagggaggactggaagaggttgagaagaagaaccacaagaaagctggtatattgtacaatgccatcgatgaaagcaaaggattctacaggtgccctgttgagaaatctgtaaggtcgctgatgaatgttccattcacattggagaagtcagacttgggggctgagtttttaaaggaagccgaaaaagagaagatggtgcagctcaagggacat

SEQ ID NO: 200085 - DNA, 452 bp, Gossypium hirsutum
gcgtccgattatttataatcacatgtattaactttttttgtgtttgtaggaagaagaaaagaatatgaagagggtttcctttgttatgatcttgtgtgcggtggcactagcggcagcggtggtgttttcaggtgaaacacgctcggtggaagcagtgacatgcagccccatcgagctcatcccatgcttgccggcaatctcaacaccgccaaagcctccatccgccgcttgttgcggaaaggtgaaggaacagctaccatgcttttgtggctaccttaaggacccaagtgctaagccattcattgacaatcccaatattccaaaggtggctagctcttgtggagttgcacatgcatatcctcctaagtgttaaaatgttgctttcattagagcatttcccactcaaggactagtatgaataaattaataattaaatggaaaattatctaata

SEQ ID NO: 200086 - DNA, 570 bp, Gossypium hirsutum
ctaaaattacagatcctaccctcctcttcttcttcttcactctaaaatattttatcaattctcgaaacccaatttccctttctatattcgtccctttgctttgattcgctgaacaaatagcaattcaattgagcttttaagttgaattcttgaacaaatttaaaaaggaatttacaatatgggaagtccaaataaagatcagaataaagggtttttctcagcgatgacctcgggtttatctttgtttggcaacgccatgcacagatctgtcaacgggttacttggttatgaaggggtagaagtcataaatccagaaggaggaaaagaagatgctgaggaggaagctcatagaggaagatggaagcaggaggtatgcatctttaactgtgttatttagatctctcttttatagaccaattcaacagatgctcttgtttttgctttgctctctctatctctgggaacttttaggaatagttaattgtacttgtaaccttttcttacgggcgatggagatcaagagagacattcgttaatttcactagttttcgaagctgatattttgactac

SEQ ID NO: 200087 - DNA, 525 bp, Gossypium hirsutum
atatacttggtgaagatcaacaaaacgttggcccttatgcaatttctgagttacgtgagcatttcttaaacggatacctcactgaaagtacacttgcatggtctgaagggagaagtcagcggcaaccattgtcctcaattcccgagtttgttgctgtaatttctcatcaggccaacaatttttctgctacaggtggtgatgatgctttcttgaacagtatgaaggagggtgataattcaaatgcagtgccttccaatgatggtgatggtagtgatgaatttgagaaatggcagagagagattagagaggcagaagctgagacagaacgtttgaaaactggatctgtttctagaagtactggtgatgcctttggttttgatgatcaggataggcctctaacaccgccagaaggtgaagacgaattcactgatgatgatggaaccaggtacaagtgggatagaaatctgcgagcatgggttcctcaggatgacatgtcaacacaaaatgggaactatggagtagaag

SEQ ID NO: 200088 - DNA, 536 bp, Gossypium hirsutum
cccacgcgtccgctcgagttccacaatttggaatcgtagcttgtctctccaatcctatcaaggtcctgtttgcatccaactagttgtttccaggacctaggctttgatagttaaaataaaaaccactatgggttttgctggttatagttatagttggtttttgttgtcatttttcgccctaatcccaacactaagagctcacatcgctgaatatgatgagtattggaaagcacgagaattggaagccattgagaacctgaacaaggtttatcaccccaatccggaggaggtggtccggcattacaatgaccactttgtcaataccatgcttgagtataataacaccagaagggtgttgaaaggaaagaaaaacggtccctgtgagattactaaccccgttgatagttgttggcgatgtgatcctaactgggtaaagaacaggaagaggttggccgactgtgcccctggatttgctcgtggtactaccggtggaaaggacggaaagttctacgtggtcactgaccctagtgatgata

SEQ ID NO: 200089 - DNA, 466 bp, Gossypium hirsutum
tttgacgcgtgggtttaactagttggcgtggctttttttctcctatcagggtcctgtctgcaaccaacctgttgtttgcaggatttgggctttgattacaccttttccaattttgctttataaaagaaagaagaagataaaaccacgatggctgctcatagttatagcttgtttctcttaatttccttgtcttttgttgtcctaatcccaacccctcaagctcacattgctgaatatgacgattattggaaggcacggaaattggaagccattgagaacctgaacaaggcttatcaccccaatcctgaggaggtggtccaccattacaacgaccaatttgccaaaaccatgattaagcttaatagcaccagaagggtgttgaagggaacgaaagaaaatggtccatgtgaaataaccaaccccgttgatagctgctggcggtgtgatcctaactgggaaaaaaaca

SEQ ID NO: 200090 - DNA, 723 bp, Gossypium hirsutum
gtccaatttctcttcttctcttgtttcccataattttcaacaaacccagaaatagagaagagaatcgaaaacaaaaatgggagacgagaaagtaaaggaggaagccatgcggatgattgggatgttccaagttcttcctcgtttggtcgttttcgatctcgattacactctctggcctttttactgtgagtgtcgatccaaacgcgaaatgccatcgatgtacccccatgttaaaggcataatagccgcactcaaggacaaagggattgatctagctattgcctctaggtctcctactgcagatatagctaacacatttcttgacaaattgaatatcaagtctatgtttgttgctaaggaaatattttcctgctggtctcaccagaccgatcatttccagagaattcactcaaggactgggattcccttcaactcagtgctcttttttgatgatgaggataggaacatacaagctgtttctgaatgtgacaaccagaagaaacctgagaagagatttgtaactttggaggaaataggaaaaagaaataccagtgctggaaatactgtagatggtactcaactagatgcggagattgctggtccagagaacattaatgtaacaatatatagcttttatatattgaaacaatataagaaggttacttatgcaataccgaccaatgattctgctcagttcgttcacttgatatgtaacatgataac

SEQ ID NO: 200091 - DNA, 605 bp, Gossypium hirsutum
tcaaaatcccctttttctctgcagcctttagcataatctggagtattttcgaaccaaaaaaaaaggaagtataacaacaatgaaactgagactgagaaatcatgaatccagagaaaccctgagaatccaactcctatctccttgttcttttcttcaactccaggaaaccctttccctctccctccctccgccccatcctcctccctcttccctccgtttttccctcaacgccaacgatttgctcctcccgccctcccctcacgcttccctccattccctcggcgtcgccgccggcgaccttctctatttctcctccaaccccaccgctttttccgctgtttcagtaacccaaatggatgaccccaatcgggtgccggacaacaacaacaatcaagagacccaaatgcaagaattgcctcaatttgaagaacccatgtcgcaagatcccgaattttctccagaaactatggacatcgatgcctctgcccttagcgaaaggttgtcggagccctacttcttgaggaaggttttgggggaagagctgggtgataatggctgcattcacaagctgttggcgatttcggtccacgccgttttacttgatt

SEQ ID NO: 200092 - DNA, 359 bp, Gossypium hirsutum
tcctcgcgtccggggctttaggctcaaaaggagttcgtgttatagccattgatttgcctggaaatgggttttctgaaaaatctaggttagagatcgaagaaggaacaaatggcattttggcgaggtttaaggaagtttatagtttgattcaagacaagggtttgttttgggctttcgatcaaatggttgaaactggtgaactaccttatgaggagataaaatctagagttttggttaaaaagaatgttaaggttattgaaattggaagtgaagaaatggggatggttctggggcaggttataggaacaatgggattagctcctgtgcatttagttttacatgattctgcttttcttatg

SEQ ID NO: 200093 - DNA, 587 bp, Gossypium hirsutum
  unsure (1)..(587): unsure at all n locations
gcagccttggcacccaaatcatcgcaattttgcaatatattttcccccttttatttcccttgtccgaagaaacaacattgaaaaccctaaccctagccacatcttcacccaaatctttaattatttgcgcttttctcatcaaaattcatcaaatcatcggaatcgatggcagctaaaccgcttacaagtgaagcaatcgctctgacagaaaagaagatggacatgacattggatgatatcattaaaatgtcaaaaactagttcaaataaaaccaagaagcagcgaagggtactgaataaaggtccgaaaccttttaataatgctgctaaagcaaaggctttgaagggtcaacagttaggtgannncggtcctctgtcaacagggatttctagctannagaagatcaaacatcccggggaatcaatttcctttggcagctgaggctgcacgcagccttgcagttgccccagttcgaataagatgtanatgtgtcaaggtggctaatttgacaacctaggactgagtccacctgtcanaggagggctaaatgaggttttgagcaaacacgccacacacccgacagaaca

SEQ ID NO: 200094 - DNA, 602 bp, Gossypium hirsutum
  unsure (1)..(602): unsure at all n locations
aacaggtttattttggggaggcaaaaatggctgcaaagttctttgctgaagtaggatttccatgtccaagtcgaagaaatccatcagaccacttccttcgttgcataaattcagattttgacattgttgcagaggctctgaagggatctaacagaataactgaacttaaaaatacattagatcctttggcacacctaccaacagcacagataaagacatggctcgttaagaaatacagaagctcagattatgcggcaaaggcaagagcaagaattcgagaaatttcaggcattgagggactcgttattgagaaaaaacacagtggtgaagcaaaatggttgactcaactatcaactttgacgaataggtcctttgtaaacatgtcaagagatttggggtattactggttaaggatagcaatctacgtggctttatctatttgtgttggctctattttcttcgatgttggaacaaactacaattcaatcttanctcgtggggcctgtggcggtttcatatcaggtttcatgacattcatgtccataggaggcttcccatccttcattgaagaactcaaggttttttatcgggaaaggcgcaat

SEQ ID NO: 200095 - DNA, 428 bp, Gossypium hirsutum
ttaaaacaagttaggttttgcattatttatctaaataataaaagatgggattgttttggagagttcttgttgcattacctctcttttttgcatatgtcaacggtgaacactttacgtacccttcccgtcatcctggcaaagccgagttagccggtttcaaggggccggactctcttgctaccgatggtggcggtttctttagcggtcccttggttgtcaatgatgatgtaactgctactcccggcaaccaaggtggaactactgaggtgacagttgaaaagcccggagacgatatcctcgatgcgtctctagctgatggcaatgatggagttggcaaggcaaatatgattgaggctgcaactacgtttaaagggagctgggaattgttccttgagactggcggtgtttccgccatgcatttgatatta

SEQ ID NO: 200096 - DNA, 465 bp, Gossypium hirsutum
gtccattgatcaagtctcatcgccaaagatcaccgctggttttggggtgccttcaatccatccctgaaatctggttccccattccgtccccagctcagctctctttctaaaatacaactcctgatttagctttttaatttttgtggatcaagatgccagagaggtcaaaatcttcttctgtaagtaatcttccactcatcctggacattgatgactttaagggtgatttttcatttgatgcattatttgggaacctggttaacgagctcctgccatctttccaagaagaagaagcagatacagcaggtggacatggccttggtgggactgaggctctaccaaatggacatgcccgtgcctcttccgatgcagcaaaatttgcacaaggagactctatccctctatttccagaagtagatgctttgctatcactgttcaaggattcttgtaaagagttgattgatc

SEQ ID NO: 200097 - DNA, 398 bp, Gossypium hirsutum
ttgagatccaatctctctctgtgcataatcaaagcttcttctccattctctgtgattgaaggaaaataaaatggataagcctttgctgtttggagaaactagcaatggcggtggaaggcgagatcgtttatatcgtcgctctgaagctattacgtatggctctcattaccacagagcagctgccctcgtccatctggctgaggatggtgttggcctgcccgaacaaattcttgataaatcaagcttcggaagtgctgcacagttctacttcatgttcattaactttgatattatttggacccttaattattttgcattgggtgtcctaaactttcttgagaagccgctgtggtgtttgagtagttcatattcttgcagtgatagggactacttttttc

SEQ ID NO: 200098 - DNA, 401 bp, Gossypium hirsutum
atcaattatcatcaaatcaaaatcatcctcaaactgttcaacaatttcgtctcccgttaccaaatttccccattaaaaccaaaaatgagaatcccaaatctcaccaaagcctttattttgttaatggcaataactctgatgtcaacccaagccagcggcctaatcccttacggtagatccttatgggacgtgatgctcgctgaagacccattcaaaatcctggaacaaaccccagtgaccgtccccaaaggatcagaacccgtcgctttagctcgagccgactggaaagaaaccccacggtaccatgccattaccctggacatcccagggatgaaaaaggaggatttgaagatcgaggttgaagagaacaagagtgttaaggatcagtggtgaaaggaaag

SEQ ID NO: 200099 - DNA, 700 bp, Gossypium hirsutum
cttgtttctatctgtatataaccaagggaattagacacccgttcagttgaaagagttcagctgaacaccccaaagatggccaaccacaccgttacctttctccctaaactatccattgaagctattcagacagtgactccgatgaggataactgaaccacgacagacacgacaagtattggcaggggagcttgtaggacctgggattttccaaaggtgtttgaacgtggtccagtattacatgaaggagaaagaagaagactctggttggttattggctgggtggatcaaggaaacacttgggagagctttacatgagcaaccaatgatttctggtcgtcttcggaaaggggaacgaaacgatggagaattggagattgtttccaatgactgcggcattagactcattgaggcaaggattcagatgaatctgtcggattttcttgatttgaaacaaagggaagatgctgaagctcagcttgttttctggaaagatattgatgagcaaaacccacagttctcccccctcttttatgttcaggttactaatttccagtgtggtggatattcaattgggattagctgcagtattcttctggcagatcttttgttaatgaaagagttccttaagacatgggcagatattcacaacaaggttattatcaacaaaaacgatgaacaaaagcttcctttattctacg

SEQ ID NO: 200100 - DNA, 631 bp, Gossypium hirsutum
cccacgcgtccgatttcttcgccctttctttttctctaaccttccgcttgtcgtttctttgctttcgaggcctgaatgataatattagtaaaacagaccaaaaatcaaatccgctgaaatttttccctcaaagttccaccgtgaaatcaggaagtcatcagctttttagttcttttacacctggtgctgctataaatgattccggtttgctgcagcaaattattgtctcgtttctgatggtcattttgctctacgaaaatgtcattagaagaagttttgaaggttgtttttccttttttagatggtgtagaccttgcagcttgtatggtggtctgtaagcaatggagacacatagctaaagatgattacttttggaaatgtgtatgtgcaaagagatggccctccatttgcaaacgacccaatcctcctactgtaacctactataaactatatcaaacgttttacaaacggaagcatcagcgaacgctcctccctccaagactttcctttgatgatttggaattcttcattgacatttggactgaagataaattgattttctccgaagttgtccccggtcctgtcctccaaagaggaatcaagatcccacctgctggaatctgcgacatgc

SEQ ID NO: 200101 - DNA, 490 bp, Gossypium hirsutum
gtttgtggaagcataaaaaagaatcctccctggggggctcactggaagttacttaagttcgcaactctcgaggtctctttctaaaccatcatagatacacagttcggtaatgagatcaaacacattagagacaacaagcaataaaacccatcatctttcttcgctaataatttaagcaaactttatctttttgctgggtgatggatccaccagctatgatgagcgatggggggtacaatctagcagagatctggcagtatcccgtgagtgaatctgggttaaggaggggtcagtttgggaatgtgccgccgcctcattacgaccaccccaatccagaggtatcgggtggtatgaggagaaggcgtgatggagaagatgaggcagctaaggttgtctccaccagtagtggcaatggcgtgagttttggtgatggaaagagacttaaagcatcaggatgcagagaggagaatgatgattctaaagttgaagc

SEQ ID NO: 200102 - DNA, 659 bp, Gossypium hirsutum
atgaagacttaaaaacaatttttggtgagtatggcgaaattactagtgccgtagttatgagggatgcagatgggaattctaagtgttttggatttgtcaacttcgaaaatgctgatgatgctgctaaagctgttggagctcttaatggaaagaaatttgatgaaagatgggacccggattcagacatggaggttgatgagaagcggccaatccctagcagagtaaagagagaagcaattgaacccgagagaaaagattcggaggctccgaaaggcactgcggagcaagctagaggtttcgacaacatggcaacaaatgagaccctaagtacaaagtctgtagatgtcaggcctatggctatcgatgaaccaactgtgaaagttgagcaagaaacatcgaacaaagcatctgatccaatatacccgaagtcttaaatggaaacctttcaaataggtactggatgtaacttgcaggtattagcaacactgtaacattatggccccccctttgtttgttgttcagtgtaatctgtagaagccatgaaaaacctagctttccttttaagtttttatttgaaggtaatcctgtattttatttgatactatatttaatatttgcaacaaatttatatgaacatgctattagaatctgctccattt

SEQ ID NO: 200103 - DNA, 501 bp, Gossypium hirsutum
tttcctttccttcgttgctttcgccttaagcggtcacaatatttcgggtttgtaggttaatatgggaaccaccgtcaaaggggttgtgctgtcgctgttcatctcgtccctgttgtgttctgtagtacttgcatccaatgatgggctggttagaattgggctgaaaaagatgaaattggatccaaacaaccggcttgctgcgcagcttgactcaaaggatagagaggctctcagagcatctattgctagaaagtatcgcttccgtaatgatctaggagactctgaggaaactgatattgttgcactgaagaattacatggatgctcagtactatggtgagattggtatcggaactccaccgcaaaagttcactgtgatatttgacacaggaagctcaaatctgtgggtaccatcaactaagtgctatttctcggttgcatgtttcttccattccaagtacaagtcaagtgagtcaagtacttataagaagaatgggaaatc

SEQ ID NO: 200104 - DNA, 1457 bp, Gossypium hirsutum
  unsure (1)..(1457): unsure at all n locations
ctaattttctctctactcgaattttatttttctcgagaaacaatcactcccttctgatctccaattcccttcaaatttcaaccaaccctaatcaatcattccttattctttcaacattttaaatcaaatctcgttattaacatctcgatctcagtgttctttaaaaaattcgtatattcgtcgattcaactttttcgatttcgattttggtggtgaaatggtgggtggaggtagcaggagagacgaaggatcattagtgatcaccaacacgaacgtgttcgctgctctcgaaactctccggaagaagaagaaatccgacaaggaccggcggtcgaagaaatcttcttccaagtctgaaaaacaacaacagaagtcgcaacaagaagccgagtctcaggtgttttgggctccggcacctctcaccgtcaagtcgtgggccgatgttgatgatgaagacgatgaccattattatgctaccactgctccacctcagtccgtttggggatcctcggagccttctcagagtcacgaagagaagacagctaatgtagaggacagtgagagtgaagaagaattttagatgaaggagatgatgatatagaggaagatcatgaacatgaaccggaaattcaagtacatccagagcctgtgctaaaaagggatcctgaaattcctgcaccgcccaaagaggcagaaaggcaactttcaaagaaagagaggaagaaaaaggaactcgaagagttggaggctcttcttgctgattttggagtcacacagaaggaaaacaacagcaatgacgagtcacgtgatgttgcacaagaaaagaaaggaggagaaagagaaaagaaagataatccacccggagagtctaaaagtgccnngaagaagaaaaagaaggataaatcanaggaaggaaaagaatcacaagatcaacctactagtacagacactaccaacgggctagatgactttgctgggaccgaacaaactgaggaggatgtanctgctgttgatgtgaaagagcggctaaagaaggtggcatctatgaagaaaaagaaatctagtnnagagatggacgctgctgcaaaagctgctgcacaaaaagctgctgcaaggaattgcgaacttgctgctgcnnaaaaaaaagagaagaaccgttncnaccnacagcctgtacggtaaaacatcttttttgtgcgacatacatacgtatatgaacatgtctttcttgttgttcatataacaatgccaaaattaacagtccgggtttgcttccttaaaanaatgaacactttattttattttgaattgcttgttggaactaaccaaaattttaagttttattaccttttgggttcgtattggttgcccctttttaccttgaacccttttttattggcatttttttttctcaaaattcttcttccgaacaaacctgaactttaaaaaaaaaaatt

SEQ ID NO: 200105 - DNA, 407 bp, Gossypium hirsutum
tcgtatattttatttatttttatttaattatctttgaagattcttcctgggttgggccctagactctctaatcttcgctgtttatcttactttcttcatcttttttctcagatcctttcgattttcttcactgatttctgtcattaatcttcgtcttggcttttatggagatttgatttaactcacactttacgagtgttgcagtgtgtgatggattcggataatctcttgtctgcgggtgggcttgaggttgcccatcaaaatggtgtttatccgcaacttcgggtgtctggggacgacagtggtattttgaataatgttaatggaaatgctgaggaaactgtcgggacttgttcgcagaatggaatagatgaccatggagcaactatggaagctagagaacgatc

SEQ ID NO: 200106 - DNA, 324 bp, Gossypium hirsutum
ttcttcacgcgtccggttttattatcagctctcatttgtcagacgtaaaacccagaaaaagggcaagttgcttcttttttcttgtccaatagttcctttgtttgttcaaaaacatattcttttttaaggttgaaacaagtttaagcttaagggaaaatggcattcacgggaactttggacaaatgcaaggcttgtgataagactgtccatgtggttgatatgatgactcttgaaggagttccttaccataaaacttgtctcaaatgcagccattgcaagggaaaccttgtgatgaacacctactccttcatggatggagtcctg

SEQ ID NO: 200107 - DNA, 519 bp, Gossypium hirsutum
tctttaacctgctggtgatgtccaaggacctgttgggggaattatgattgaatgcggtactgattcccccatggaacaagtgctttcccaggatgatgcagaatgttgcatctgcctttctgcttacgaggatggagttgagctaagggaacttccttgtcgccaccatttccactgtgcctgtgtagataagtggctatacataaatgctacctgtcctctctgcaagtacaacattttaaagagtagttcccaagaggaagtgtagaagaaccaaaaataaaacaatcatttacagtcacgtctaagacctttgcatagggattttagctcgagagcattataatgcagtatgttccctgtcgaccgatccaggctattctgttattgttgttcttgttgttgtggtagatgcagatgttgatgtagtttctcttagtgccggtgacagtcaatgatacacttgttttagctaggtccttcatggagttgtcgggtatatcgatgtttcccggggca

SEQ ID NO: 200108 - DNA, 637 bp, Gossypium hirsutum
  unsure (1)..(637): unsure at all n locations
gtgaaaccttgggaatctcctccaatctctaccgtaaagcttgtaaaaagctttggaaaaccagaatcagcattggaaatcctccggccctgaaaatggaccccaacctgaaaagctacccgctcctctcctatgttttgtcccgccttccttccatctcatccaggctccagtcctcaccctcctctgatacccccttcgacctcgaacaaccaccgcctatcgacgccgcctcttcctccactgctccgccaccaatagtcgaccagatgccccacctttcccatcccaaagtcctcgcttccatgacccatgccatctacgacgtcgcccaaacccgctctgtcctccaaaccctcggcccccgacccgaccacgagtccgtcgacatggctcaccacaagctcgccgagatcgattccaacctctccaaatccctggaagaactcgtcctctctcctcgacccgagggtgtggatcaagccgaatggcgtgccaacttggccgacaaagagcaacagattcgacaacaagctgagcaggaaaaatctatgtacaagtcgatactgcaattggacgaaatgcacgatgcgtacgggaagctcgtgaancaacccgaagagatgttggttaacat

SEQ ID NO: 200109 - DNA, 706 bp, Gossypium hirsutum
gctgacttgtttaataattttgtccgaaaatattgcccatctcgtctggctccgtctccgatcaggttgaaggtgattatgtttactggatatatcttggagaggggctgtgatcttttcaggtgttctggtagcagtagcctttctgaaagattccatttcaattatccccttggttggtaacaactatgctaccgactggggcaaaagatactcatctccgtgatagcagcaatcaaaaagtccaccctcaacccatggaagagagcatgaaccagaacccagaagctgtggaagctctaatatccaaattatttacgaacatctcctccctcaagtcagcttatattcagctacaaactgctcatactccctatgaccctgaaaaaattcaagctgctgataaacttgtaatatctgagctgaagaatatatctgaactgaagcacttctatagagaaaagaaccccaagccagtgtgcgtttctcctcaagattctcgtttagctgctgagatccaagaacaacagatcctgttgaaaacctatgaggtcatggttaagaaatttcagtctgaaattcagaacaaggattctgagattcgacagttgcaggagaaaattgaagatgccaaccacaagagattgaaactggaaaagaatataaagcttatgggcttgtctatgaaggaatctgaaggctcacc

SEQ ID NO: 200110 - DNA, 561 bp, Gossypium hirsutum
cctactcgtccgccccacctcaccttctcatacgacgccgtctcccttcctttactcgcctcctcactctctctctccaccctcacgacaacccccacgatgctcgccgccgctcctccgcagtctctcggcgcgccgttctcctcactccgtttctcgccgccgctggctctctcctcctacaacaatcccagtccttggccgaggagataacgccgccttcccctccggtgacttcgcctccgcctaaggtggtcgtagaggaggcccttgtgtcggcgaggatatacgacgctacagctatcggggagccgttggcggtggggaaagataagagcagagtgtgggagaagttgatgaatgccaggattgtttatttaggagaagctgagcaagttccaattagagacgattaagaattggagcttgagattgttaagaatttggaaaaccgctgcgttgagaaccaaaagccggtgggcttggctttcgaacttttcttccgatttccaaaaccacttgatcagttatgcctaaagatagctggagaagactgaaatt

SEQ ID NO: 200111 - DNA, 549 bp, Gossypium hirsutum
ttttctacgcgtcttgtaagaatcaacaatggcgacggctcttcttacaacaatcctcttgtcttctttccttgttgtttcatcagctgaaatctcgagcaagattggtataaactacggtcgaataggaaacaatttgccatcaccatatcgaaccatcgagaccatgaaatcgatgaatgccgggcgtattaagctctatgattccgaccctgaaatactgaaacttttatcaggtaccaacattcatgtatctgttatggtacaaaacaatgacataatccgtatcgcttcgagccaagctgttgccgaacaatgggtacaagacaatgtcttggcttattaccccgacacgatgattcggttcgtgttggttggtaacgaagtccttagccaccaagatcgaagaatttggattagtcttgtccctgccatgcgtaggatcaagaactcgttgaacacgcacgatatcaagaacattaaggtcagtacgccattggctatggacgtaatgcaatcaacttttccaccgtcgagcggtaggtttag

SEQ ID NO: 200112 - DNA, 405 bp, Gossypium hirsutum
tgtgttttgcctctcgtttgctttctgcttctctactgcttaagaggtaagtatcatggacctccaaagagtttcccacttgttgggatgataccacagtttctcttcaacattcctcgactgcacgactggtttaccgacacactcgagatatgtcactgcacttttcttttcaaagggtttgctaagatgaacgtactggttacctgcgatccttccaacattcactacattatgagttccaactttaacaacttccccaaaggacctggattcaaacagatttttgacatcttgggagacgggattttcaatgtggatatggatttgtggagaaaacaaaggatagctgctcaagggttcatgaggcatcagctgttctaccggtttttgtcaaggactacc

SEQ ID NO: 200113 - DNA, 348 bp, Gossypium hirsutum
tgttgaactaatcgtcgtttcctttttatcatcttctctagatccctttacctctccaataaatactttcaaacaccaaagacaaaaataaaggcttcagttttctaaagactaaagaagatttttttttctttttttttaaattttcagtttggctttttgcagattcaaatggttgtgggagagatttaaaatcctacactgtttgggggaaagagacagagagataggcttgctctgctatgggtctttgcacttccaaaccatccccaaacccttcttttcctcctgattcaaggaatactcctatccatcccccgaataaagatatccaccataagtctaact

SEQ ID NO: 200114 - DNA, 880 bp, Gossypium hirsutum
agaagaccaaactgagagtgaaaccgatcacaatgacgacatagtgatcgtagaagaacaaccgcccaatgtggctgcttctgctacgaatttgatagaagagaaagttgaagaaattgtggaagaatacgaaaaggaactgtgccaagaagagcagctgaagcccatgaaggatcatatagatcttgattcgcaaacaaagaacgcttctggacgagatctcaaagagattgctgggagtttctggtcagctgcttcagtcttcagcaagaaattacaaaaatggaggcaaaaacaaaaacttaaaaagaggggaaatggatgtgggtcagcgagattgccagtggagaagcccatagggagacaatacagagaaacccagtcagaaattgcggattatgggttcgggagaaggtcttgtgatacagacccaaggttttcccttgatgctgggaggatgtcatttgatgcaccaaggatgtcttttgatgcagcaagaatgtcatgtgatgatcccagatattcttttgatgaaccaagagcttcctgcgatggatatctgatggggagaaatgttcccaagaatgcccacaatgggttccgttgcggaagaatgctccagttcatcatggtatgaggtctgatactcagatccctgtggaggacccgacggctatgaattctgttactgaggaggatgaatcgcttcctggagggtcagctcaaacaagggattattattctgattctaggagaagaaaaagtcttgacaggtccagttctagtaggaagactgctgcagctatagtggctgaaatggaggaaatgaggtcggtttctagtacaaaggtttcccctgcaactgttgattacacccatg

SEQ ID NO: 200115 - DNA, 399 bp, Gossypium hirsutum
ttcacgcgtccgcccacgcgtccgctatgtagttccccccacatcatcccaattctccttgcatcaagtcactctaaatccttcccattttcttctcaaacttcttcttcttcacaaggcagtaatggcgatttcctttgggatttatcttctttttctactgaatttcttctcatttggggcgatattttcttcagcaacaagctttacactcgaaaatcgttgtagtttcacagtatggcctggttccctgaccgcaaatggccctccccttggtgatggtggttttgcattggctcctggttcatcatcccggctccaccctccacctggttggtctggtcgcttttggggtcgaactggctgcaatttcgacaactctggctcaggaaaatgtgt

SEQ ID NO: 200116 - DNA, 440 bp, Gossypium hirsutum
tctttcacgcgtccgaaaaaattgaattcgttgagcctggaaaaacaatggtgataacaatcacaattcgggatcttctatttccagtttcatttctcttgcttcttccatgtgaagcagttgctgcaacacttggaatctgctatggccgtgttgccaacaacctcccaccaacctcggaagtgatcaacattctcaaaaccaatggcatttcgaatgtccggatcttcgatcctgatccgtttactttacagtcattttcaggcaccgggatcaatctcatgaccggtgtccctaatgaagccctcccttcacttgcctcaggcccacctgcctctgcactccaatggctccaaaccgacatattcgcgcatattgttccgagccaaatccgatatattgcggttgggaatgaggtcctctttaaagactcattatat

SEQ ID NO: 200117 - DNA, 701 bp, Gossypium hirsutum
tttttaagtgctactgatgcttctgctgctgttgctgatgcttctgttagagaaaatgttaacggaggtggtgagcaaacagaagtaaactgtaatgccaagagaaaactgttggaaaaaccagttgataagaaggaagctaataaacctcccgattcttggtttcaactgaaagtaaatacgcatgtctatgtgactggactacctgatgatgtaactgcagaagaattggttgaggttttttccaagtgtggaataatcaaagaggaccctgaaacaaaaagacctcgtgtgaagatctatgttgacaaggagacaggaagaaaaaagggggatgcgcttgttacatatctaaaggagccctctgttgctttagctgttcaaattttggatggaacacctttacatcctgatggaaaaatccctatgtctgtaagccaagctaaatttgagcagaaaggggataaatttatagccaagcaagtggacagcaggaagaaaaagaaactgaagaaagttgaggagaggatgctcagctggggtggccgtgatgatgcaaaggtgacaattccagccactgttgtccttcgtaacatgttcacgcctgctgaaatgagggcggatgaaaatttgtgttcagagctggaggaggatgttaaagaggaatgcttaaagcttggtcttctggactcagtcaaggt

SEQ ID NO: 200118 - DNA, 715 bp, Gossypium hirsutum
  unsure (1)..(715): unsure at all n locations
ttgccatctgcaattacaagcagtccccttcttcctctgccattaaaataaaataaaaacctaaccctagaaatccaaaacaacaagagtcccaacaagtaaaggattaagaagatatcgtgggagtgggatactgaagccgtcgatgcttagttttggtggagtagaagaggatcagagagggggtgcttccaataaatgctctctctgtatctccccttcgaagttgcttcctttttcatgtcttcttcaatcacaccctctttattctttgcttcattcagggtcttctcaatccctaggctttcatctttgctctatacctttccttaactctcaatcttctcctttgtataaaacatgactgattctaaggttttcgtttttgggtccttcactgaagatgaaaccaggtcattgctgtcaaagcagtcattgggaattctgaaggcctgtgcactaaggattgcattttgggtctttcatttgcattgnaggatctgggcccatgtcatgggtaatttagcacagagccaggttcccatggaccttggattttatcctaactttttaattaagatggnnaagttaaaaccccccggtttatcttgagcgcttaaattctaaggacttgattccatggttcacagtatggactctatatgtgaagccctgatcaaagcctgtgtactagtactaacatatgactcatccc

SEQ ID NO: 200119 - DNA, 462 bp, Gossypium hirsutum
gtgagtagaagaattttgctcctttccttcaaacggtgattcatgcgggacttgtccgttgaaagaccctaaacccatatcaccattccggaaaggcaattaagcaaccctccttacctactctaagtaacctttttgtctaattaacctttttgtctttttcacttcatttccaaactcacggtgttgcagtagtggagcaatggaaggcgaaggatttgttgccgcaagcaaagtgaacatctatgaaggccgtgtcaccgccttcgtcatctgcacttgcctcattgctgccagtggtggtctgctcttcggctatgacctgggtatctcaggtggggtcacatcaatggagccttttctgaacaagttcttccctagtgttttggaacaacagagtaaggcatcccaaaccgagaaccagtactgcaaattcgatagccaactactcactcttttcac

SEQ ID NO: 200120 - DNA, 402 bp, Gossypium hirsutum
cttcttttccggttcttgaattctcccaaagccaaggacaaagccttccctttcacacttttcaagtttcaatctaaaaaagaacatgggaagcagaatctagggtttgacaacaccaagtcttaacaaggtctgtttttttcttttcttttgggggtattttcccttttgtttgctcattgatcctttgcctgtttctgttcttcttcgccttctagggaaaaagatttgtcccttaaagctaaatttggtttgaattctgtttgaaaaaggtccttgtttggtctttggattatctcaaatttgaattttgagtgatgggtctttttttgttttcctttaaagatctagttttttaatgaaacttcgttgctgtttttgtgtggttaattttgggtttgg

SEQ ID NO: 200121 - DNA, 423 bp, Gossypium hirsutum
attgtgttctcgtgtgttgctctctcctatccacgcctttcatcccactctctcttcctctgttttggtttccgtttctttattttccagtaaacatggagatggtgacgatagcataattatctctagtattagattatcctatcttttttcttaaagatcgaagcaatgagaagtagtagaattcagagctcaacttggtattcagcatcatcttcctccacgtttcctcgtcctccatgtctcacctctacctctcgccattgcaggctgtctatctctcagagggtgtctagaatttctctactttcaagctgttcctccggattgtctaagacacaattgtcagtttctacacaacggaacgaacagaatttgttgtccgtgggcgtcggtgcggatgctttggtgacttcaaacgct

SEQ ID NO: 200122 - DNA, 397 bp, Gossypium hirsutum
tcgtttaggccaagatttgaattgccagaagctgtggttatggaaattctaaatgcttccagttaaatcccttactcgcttcaactgtgtttgtaagtattggtgttcttcttttcaaactcctcatttcatttccaaaaattatcacaacaaccttgaaaacaacaaccttaatctacttcttagtcgctgtgatggtaacaccttccaaccttatttatcttcactttcaaatgaaaaagatcaaaactatatagtaaaacaaaacattcacttgcccttttttgaggatgatagcccctctgtttatggtgcatgtcatggattattgtgtttatttgattcttcaaaggataaggctgccatttggaacccatcaacaagagagtttaaaatc

SEQ ID NO: 200123 - DNA, 439 bp, Gossypium hirsutum
gttccctatcgagccagcaccatggagatatgcaaatggaagtcgaggtactcagaaacaacctcttaaacatgtaaaggttccacccaagcctccgaattgttccccttcggtttatagtgagatcgagaaaagattgaaagatctcgaatttagacactcgggaaaggatctcagagctcttaaacagatacttgaagcaatgcaagcaaagggactacttgagactgggaaagaagaacaagctgcgaacttggtgtctcaaagagactatgaaccgaaatgcacgagccccggtcagcatctgagaggtcagcgaagccaacggggttcggattctattggaacatatgaatcacctattgtgatcatgaaaccagcaaaacttgttgagcaagttagtatgcatgcttcaactgtagttcccatagttgacatc

SEQ ID NO: 200124 - DNA, 439 bp, Gossypium hirsutum
gtcatgacaaggtgcagcaggtgttgcttgcactactccatgaaaatagtgaatctcatcatgaattttcttgggattgcaatcattgtttactccctttggctccaaaagaagtggaatattggtgttgctcaattgctttcttttccttcaattcccaacccttggtttatatatacgtgttttggtgtgggaattgcagtgtgcttgagctcactattcagtttcattgtctctaattgtatcagcacatctgtactttgtatttatattttcagcgtttgctcccttcttcttctggaaattgccgtgattgtcaccattctcttcaagaacgactggagttcgctaatttcaaaatacattgatgagaatcatgaatttttcaagaactttgttgtcttccatgaaaagatgtgtcgcttgattactcttttga

SEQ ID NO: 200125 - DNA, 466 bp, Gossypium hirsutum
ctcacgcgtccgaaaagaggttatagaatctttgttacttaaacggtgccctcatctttcagaaatccaaagtattgtacttactgaaatagaaagcactggttacttagtattggcaagtgtggatgcttatggtcatcttattgtctctaaactggatgccagtggtaaagatgctgacaagattacttattcagtgttacctcgggattttggtgttggagaaggtagttggtctgggatgtgcttcagtccaactcaatggtccatggcagctgtggcacgaagcttctgcaaaagtgttgatgtttatgaccaggatatccatcttcggactttgcgtacactttggtatccatcttcgctaagcttcatgcggaatttaggtcatgggaatgagagttctatattagccgtaactgaaggctgccagttgtctgtatgggacttgagaataaaagaaaat

SEQ ID NO: 200126 - DNA, 680 bp, Gossypium hirsutum
gtgtttggtgaatggttaagaaatgcttttcgctggaaagcaagtgttggaccttgggaagaaagaccagggcactttggtgacgtttggatgtactggactgatgatggacttggttactttgagtttcttcaattagcagaggatcttggtgcattgccaatatgggtgttcaacaatggaattagtcataatgatcaagttgatacatccagtgttctgccttttgtgcaagaggcccttgatggcattgagtttgctagaggtgatgctagttctacatggggtgctgttcgagctgcaatgggacaccctgaccctttcgatttgaaatatgttgctattgggaatgaggattgtgggaagaagaattatcgaggaaattacctcaagttctatgatgctataaagcgggcctacccagatatcgaaatcattacaaactgtgatggatcttctcgcccgcttgaccacccaactgatctttatgattttcatgtttatacatctgccaacaacttgttttccatgtcccatcaatttgatcgtacaacacgacagggtccaaaggccttgttagtgaatatgctgtgtctgggaaagatgctggcactgggaagtcttttagcagcacttgctgaggctgcatccttaatgggtctgggaaaagaacagcggtg

SEQ ID NO: 200127 - DNA, 491 bp, Gossypium hirsutum
tttgttcacgcgtccgcttcacatctcttcccttaaaattcctctttgatttccaaccaaatcagagagcacaaagaaaacaacaaagggggaaaagagaagtagaagtagaagatagaagaacacatcagaagatctctttctctctctctctctagctggtgttttagcgatgtttcgttaagaatcatttggaggttgatgtatgaaatccagcactggggaataatgggtaaaacaatggaggttcagcgtatgaaggaattgctgttactttggtcgaggttccaaagtaatcgtgtggctctcgtgggtggaaatcacactgccgctcgattttgcactcgctaagttttgccttcttcattcctctctttctcgcctgttataatctcttccttgttttactttaatatgctatctctagattttcttttccggaaaagttttctatttttcttttcgtacaatctaccttggctttgatcacc

SEQ ID NO: 200128 - DNA, 554 bp, Gossypium hirsutum
  unsure (1)..(554): unsure at all n locations
ggccctatcacaccaacagttttggctccgcccacgcggccgtatactatcccataccatgagatagattggaatcgagcacggaatgcatgtgcaaaggaagatttgtactaccctcacccattggtgcaggatattctttgggcatcccttcacaagattgttgaacctattctgatgtgttggcccggaaagaagttgagagaaaaggctctccaaactgcaatagagcacatacactatgaagacgaaaatactcgttatatctgcattgggcctgtaaacaaggtgttaaacatgctttgctgttgggtggaagacccaaattcagaggcgttcaagttgcatcttccaagactttatgattacctatgggttgctgaagatggcatgaaaatgcagggttacaatggaagtcaactatgggacactcgcctttgcagttcaagcaattctttcaaccaaccttactgaagagtacagctcaactttgaggaaagcaaacatgtacttacggaacacacaggttctanaaaattgccctggggatcttt

SEQ ID NO: 200129 - DNA, 465 bp, Gossypium hirsutum
ttttctaatggctcttctacctctcctcttctcttctcttcttgttgtttctttggcagaaatgtcgggcaagattggagtaaactatggtcgagaaggggacaatttgccatcgccatatgaatcaattcagatcatgaaatccattaaagttggccaaataaagctcaatgattccaaccctgaaatattgacactcttgtcaggaaccaagatccatgtcgccgttacggttcctaacgatgatataatccgaattggttcgaacgattccatggccgaacaatgggtgcgaaacaacatcctgcctcactatccggataccatgatccggttcgtgttggtcggcgatcgagtcgtcaactccaacatggatgtcaatgggacaatggagcagagccttgtgcctgcaatgcgtgggattaagagtgccctgactgctcatggtgttaaaaacgtcaaggt

SEQ ID NO: 200130 - DNA, 679 bp, Gossypium hirsutum
ttcttttgaaagagggcaggcaaattataagaggaggatgaaattaacctcctcttttctttttcttattgtgcctcctctcagatcttagctttttttttttggccagatttggcacttgggttttcttttgattattgggtcattgctgaatctggatttttcccagaaaaattttaaagctgtatcgattgatcatctatctgggtagcttattattattattttttggctttttgggattcttttcgtttacatttctctctctacaatatctccaggtgaagctaaattctgggttttgttcggttgattgatcgtggaaagatctgttcgtttccaaattttgaatcagagagaaaaaaatcatttttgtataaaataaaggaaaaaaaagatgtttgagaatggaaagctatttattggtgggatatcttgggacaccaatgaagggcatctcaaggagtatttcaatacttttggtgaagtaatagaggcagtgatcatgaaggatcggaccactgggcgtgctcgtggtttcggtttcgttgttttcgctgaccccatcgttgccgagagagtaatcaaggagaaacacagcattgatggcaggatggttgaagcaaaaaaggcggttcctagggatgaccagaacgttatgagtagaagcactagtagc

SEQ ID NO: 200131 - DNA, 879 bp, Gossypium hirsutum
gttgagagagaaatatctattgcggctcagagttctagaagacagcttgagaggatcttctaacagtgttagtcgcagtacatcagatggaagaagtgtgagcaatgggcgttctaggcgtcagtctcttggtggagctgataacttctcaaaacttacccccagtggggttttatccaagagatcaccaagctttcaattgagatcatctttctcgtctagtacagtattgaagcatgctaaaggaacatccaagtcatttgatggaggcacaagatcgttagatgtgacaaaagtgcttttaaatggaacagactcaaatagttcactcaaccagccttctgagggaaaggctcaggcaccaagtgatgaaaaaccaaataatttcctggcagtggatgcagaggataatgtacctggagtattgtatgatttgttgcaaaaagaggtcatagctttgaggaaagctggtcacgagaaagatctaagccttaaggataaggatgaggcaattgagatgcttgccaagaaggtggaaacattgacaaaggcaatggaagttgaggctaaaaagatgcgacgtgaagtagccccactatggagaaagaggttgctgccatgcgtgtcgagaaagaacatgagaatcgggccaagcggtttggtaactcccaggggtctgctgctcagctgccttaccggaagaaacgtatctcgaagtgggttaacacgcagcactcaatgacaacaagattctaattggagctgccgcaaggacttgcataggtctcttctgtctgttctatttattatatattacctctttggtgattgattataaagatgataagtttttgtgttgatgaactcatgttcactgaa

SEQ ID NO: 200132 - DNA, 644 bp, Gossypium hirsutum
ttatccttacattttcagcaatgcacttggaagcattttagagccgccattgactgacctcactgctgctcacatttcccccctatcagagaatattgctttccgttacctggtgaaagttgaagttggcatcaagcataacactaggccaaaattccaacatattgctgcctttgtattagacgtattaatctaataatggctgtctctttgtctcatgtttcatactcatccaccttcacctcttcagcatcaaaaaccagagtctccggaccttctctctcccctcattccatcaaagttcccaccttctcgtctttgactgtcaaacccctaaattctagcttcaccccacatggcgcacgtgcgatcaccattgcgccacatgccacctccaccccctcttccattccttctgacacctcaactacaacctttcatggcctttgttacgttgttggtgataatattgacacagaccaaataattcctgctgaataccttacgttggttccttcaaacccagatgagtatgagaaattgggctcatatgctcttattggcctcccttcatcatatgctacacgttttattgaaccaaatgagactaagaccaaatactccatcgtgataggtggtgctag

SEQ ID NO: 200133 - DNA, 448 bp, Gossypium hirsutum
ttctatggaaaatccaacccaagtgcaacatgctgaagatgaagatgaacatattttccgtagcaaatacccaccggtttcagtgccggataacttgacgttgccggaatttgttctccaggatgctgagttatatgctgacaaggtagcattcgttgaagcagtgtccgggaaatcatacacgtaccgtgatgtggttagggacacgaggaggtttgccaaggccttgaggtcgcttggccttaggaaaggccatgtagttctggtattactcccaaatattgctgagtatggcattgttgctcttggaatcatggctgccggcggtgttttctcaggtgcaaaccccgcatcgcacccatcggaaataaagaaacaagcttatgctgcaaatgctaagctgatagtaacaaatggcccaaactatgaaaaggtgaagaatctggag

SEQ ID NO: 200134 - DNA, 342 bp, Gossypium hirsutum
tccccgcgtccgcccacgcgtccgcccacgcgtccggaatttctaatccttatctgctaatggcttcttcacatcatttctgatttcttcttgcttgcttctttccttttagtattttctttcttgcctctttttttactctctctgacagtcatctgtatccccaaagcaaaaaaataaaataaaaatggaagcaattggtactggtgctgctgccaatgtctcttccgaggctgccaaaggtattttccaccaagttaaacgtcatattagatatgtagtcttctaccagaaaattgttgacaagttcgagcagaaacacaggacgttgattgcaaaaag

SEQ ID NO: 200135 - DNA, 433 bp, Gossypium hirsutum
tttcagtgtatcttctttccaggccctcctaaggatgtcaaaaattgacaataacaatgctccatggcaccgtctcaggcgtgcttccacaccagggaaggcaacggtgctcgccatcggcaaggcctttccacggcaactaattcctcaagaatacttggtggagggctatatacgcgatacaaattgccaagatgtctccatcaaagagaaactggaacgtttatgtaaaacaactactgtgaagactaggtacacagtgatgtgcaaggagattttagatcaatacccagaattggcaactgaagggttcatcaactatcagacaaaggcttgaaatagcaaacccggcagttgttgagatggcatttgaagcaagcttagcttgcataaaggaatgggggaggcctgcaactgatatcacccatatcat

SEQ ID NO: 200136 - DNA, 696 bp, Gossypium hirsutum
ttggacgcgtgggtttccctttccgaatctcagatctttcgatggctctgaaccagagctacgatctgttcttcatcttcaacctctcactccttttcgctctcttacccttctctttctctcaaaccgtcgccgatgccccatcacccgccgccgatacttgcaatgggatcttcttatcttacgcttacacctccggaaccaagttaaaaccaacggatcccaagcaccagccgtacagattcgagtcagtcttaacggtgctgaataacggcgacgagaagcttaaatcgtggagggttttcgtggggtttaaaaacgacgagtatttagtttcagcgtcgaatgcggttttggctgatgggacgagcttgcctgccaatgttgggaacggtaccgtttttgctgggtaccccatgactgatctgaaaacagcgattgagactgccggagatttgaatcagattcaagttcaagttaagcttcttgggactcagtttggagtggcggctcctagtgttcccttgcctgaaactattcatcttgctaatgatggcttcctttgtcctaagccttctttgcaaggtaaaagtgagatgcaagtttgttgcaccaaagacccgaaattcaagacgaatgttacggtagaggatgagttcctaccttcgcaagtggtgatcttacattatgtatgat

SEQ ID NO: 200137 - DNA, 641 bp, Gossypium hirsutum
  unsure (1)..(641): unsure at all n locations
tctttcaacgataggttcaaagaacaaagaacattttcttcttcatcgcctgccctccgtctcctcggttccctcatgctctctgtccggcgatcctcggcctccatctccgccgcgccggaatgtacctgattcgccagataagttgattcccttctttttattccttccgatgcaatgatgtgctcaaccttattagcttctctgtttgtaaaaaggaagatgcaagtctgaaaatcaagacataaattttttgagtcatgaataaacacagcaatatcagatctatcctctttctcttctagcttgcgaatcaccgaccgagaatcaccctcaatctccacctccctcaagccaagatttaaagaactttttatcttcttttgaaaaaaaaacatattgagggaataaggtattaataaattgttgatttttagaggccaacgggccaacagaacttttctcagcccagttaanaaggggtatatatttgttttggaattaggggaggtttcaattgtgggggtatcananatananatgttcatactttgggaanaaagcgaaacatggcggtggctattgangaagacagggattcnaancgttctttcttggcttnntgcacctctgcggcgttt

SEQ ID NO: 200138 - DNA, 355 bp, Gossypium hirsutum
ttcacttttccggccgctcaaccctgaaaagctgcggagatacctagcaccaaatccctaaaatcattttctttgaagagaaaaaaacaactttttttgtgccaggaaaagtgacttctgtacaagctgactcattaatggctaccgccacttccatcgtacggtctccagcggccctactctctgccaaagtcactgtctccgatcacaaaccaaccccaaccgttcaattctcccgattcccttcaaaacggaggtggttcactgctcttttgtcttccctccacgacaacaacaacgacgacgacaacaacaacaacgggatctcgcatcccaagactctttcttcatccca

SEQ ID NO: 200139 - DNA, 639 bp, Gossypium hirsutum
  unsure (1)..(639): unsure at all n locations
ttcttttgctttagttctttctacacacactctctgcctgcctccccttatccactctttcccaaaaacccagaaaccaaaacaaagcctttatcttctttattgttttacttatcctttttgttcatcaaactacaataaaaagaaatggcctctgcaaatgctctttcttcagcttctattctttgctctcccaacaaggggagtttaaggaggaagggaaatcagagacagaaccaaagggtaaattataggcaaggaaacaacccgtttggtgtgaaggcttgtgctaaagaaattgcttttgaccaaagttcaagagctgcaatgcaggctggcattgataagttagctgatgctgttggccttacacttggtcctnaggggaggaatgttgtgttggatgaattcngaaatccgaaagtagtcnatgaatggggtgacnatagctaaagctattgagcttcctaatgccatggaaaatgctggtgctgctcttatcaaaaaagttgcgaagtanaactaatgactctgcaggtgatgggacgactacngcatcngtacttgcacgggaaatcatcaaactaggacttttgactgttacttcgggtgcaaatccggtctcactgaaaaggggtc

SEQ ID NO: 200140 - DNA, 610 bp, Gossypium hirsutum
  unsure (1)..(610): unsure at all n locations
ggcgagggtaataacggtgtcccaagacggcaatggcgactaccgaacagtgcaggaagccattgacactgtcccactctgcaacacctgccgcaccatcattcgactgtcacccggggtttacaagcaacctgtttacattcccaagaccaagaacctcatcaccttggctggtctccgccctgaactcactgttcttacatggaacaataccgctactaaaattcaacatcaccagggttcgaggttaattgggactggaacgttcggttgtggcactgtgattgttgaaggagaagatttcattgctgaaaatgtcacatttgaaaactcttccccagagggttcaggacaagctgttgcaatcagagtaacagcggatcgatgtgcattctataattgcaaattcctgggctggcaggatactctatacttgcatcatggaagacagtacttgaaagactgctacattgaaggaagtgtaaacttcatttttggaaatagcacagctcttttagagcattgtcatatacactgcaagtcagctggaattataactgcacagaaccggaanacctctcangaatcgactggttacctgtttttaaaa

SEQ ID NO: 200141 - DNA, 608 bp, Gossypium hirsutum
gtttataaacagcttccttctcattgtaaaagacgatgcagatgtgagaggaaaacccaagtgctttgaaaccagtcatggagattcagagaaccttctccactacaaagcaaactatgacagtctttgattcgtctgcatccagctcctccaatccctttccacagaccgcgttactgaagccggaactccatcaaccccaaacccagatctttggcttcttcgcccttccgctgccagggtatgggctgcatcattaacagaacgaggaataaaaagctttttgataactgtcaaagaatccccttctacgaccaggcaccggaaacccatcattcgcgcgaacagtaacgacctttcacatgcccgtgcttcagcaatgaacgcatcagcaacatcctctatcagataagtttcggctcctctaatttcacctctagaatctctggctaaaactgctatcgtagaagttctagaatctctttgaaaggtagcatcaaaattaatcttgatgaaacccaaaactggaggcctccaatacccttttatcagaaaaccatcagaaccaccgaggttctctttgcaaagatttactttctaaacataac

SEQ ID NO: 200142 - DNA, 665 bp, Gossypium hirsutum
  unsure (1)..(665): unsure at all n locations
gaagcgtcacgtcatcacgactcaaacggagcacaaatgcgttttagattcttgccggcatcttcaacaggaaggttttgaggtaacttatttgcctgtcgggtctgatgggcttattgatttggatagattaaggaaagaaatccggcccgataccgggttaatttctgttatggcggttaataatgaaattggtgtggttcaaccggttgaagaaatcggtaagatttgtaaagaatttaatgtcccttttcatactgatgctgcacaagctttagggaagattaaggttgatgtagagaagtggaacgtaagtttaatgagtttaagtgggcataagatttatggtcctaaaggagttggggctttgtatatgaaaaggcgacctcggattaaagttgagccgcaaatgaacggaggtgggcaagagagagggataaggagtgggacggtgccgactccacttgtggttgggatangagcggcgtgtgacttggcaatgaaagaaatggagtatgatgagaagagaattaaagggttgcaagagatgttattgaatgggattagggagaagattgatggggtggtggtgaatggaactatggatacgaggtatgttgggaacttaaacttgtcgtttgcgtatgtcgaacgggagagtctgt

SEQ ID NO: 200143 - DNA, 536 bp, Gossypium hirsutum
atgatcatggctcggatttgtattgaggcagaatcttcccttgactatggagcaatcttcaaagaaatgatccgatcgactccacttccaatgagtccactggagagtcttgcatcctcagctgtacgaacagctaacaaggccaaagctaaactcatcgttgtcttaacccgtggtggaacgacagccaaattggtcgccaagtacagaccagctgttcctatcctatccgtggttgtcccagtcttgacaaccgattcatttgattggacctgcagtgacgaaggtccagccagacacagtctgatatataggggcttggttcccatcctggcagaagggtcagccaaggcaactgatgccgaatccaccgaggtcatcttagaagcagcaatgaagtcagctacggagaaggggttgtgcaagcctggtgatgccatcgttgcactgcaccgtatcggggctgcttcggttattaagatctgcatagtgaagtgatgatcaaaactggctttttagatattgcatttaattat

SEQ ID NO: 200144 - DNA, 289 bp, Gossypium hirsutum
cgaaaggggttattacgaggaagagttgcaggcgagttcttgggatcacggtgaacctgataggttgaagaaagatcgggaaagagattgtgagacgataattgtcgatagggatgattcggctaattttgtgtcgagatctgatagaattgatagaattggaggggtatcgggctttgcttcgaacccgaatgtaccaccaccacagatgcacttgcaggctccggcaagggtgccttcacctgtaaggccaccacctgtgaagtcattgaagcagccgaagccaaag

SEQ ID NO: 200145 - DNA, 351 bp, Gossypium hirsutum
ggggtgtatgtgatatatacataggataaaaggtttattggatatgttggaattgcagcagaaagaactaagaaaatggggttccaagaaaggtggaaattgatcttatagcaaatggcatttttagttactaaagtcggactgccatccttggtttaatctgcaaaattacattaccttgcatttgcattgtcatgctttggaattttaactggttggatttatagctctaagctcagagaggatttttactacccaaccagaggtcaacattcaataaataaaaaggggctaaatgaccgagggaggacctgaaaaggctaaaggacagtagcttttagcttcattttt

SEQ ID NO: 200146 - DNA, 577 bp, Gossypium hirsutum
cggacgcgtggggcaaatatctcacttgtttttttgtttaattgcaccttttcagccttttcatttcatcaccttggacctctataatcttgacatatttttatagcatttttatcactattaatcctataattttcagttcattgtttactgctcatcttcctccccttgaaaacttgcgctttgatgactttctttgttctcatgctgaaaatctgaaatcttttgtgtgttcgaaattattactgtgtcagtccttttgtttttgatttccttttgttgcagtccttttcttttcaagctaagtgttgatcatatatggattctcttcagggtttccaaacatcaaatataaacccttcttccaccaccaatttgaatccaaatttccctgcaaacctctccatcaccaccgtgggaaccaccgccggcgccaccaccaacacgatccctttatcagcagccgcggcctcctcctcctcctcctcttcttccacttctccttcgacactcagtcgctacgaaaaccaaaagcgccgtgactggaacacgttcgggcaataccttcgcaaccacc

SEQ ID NO: 200147 - DNA, 345 bp, Gossypium hirsutum
tcttttacgcgtccgcccacgcgtccggaggaatccaggaacaagcttttgcaagaaaatcagcagcttaatgaaaatatatctagcatgcagttacattattcaaaacctcgagaggaacagttcctccaattcccaatcagaagacgttgaaaagcaagcttctggcaatgaggacctgaaatctcagattgaagcagcaaatgtgtttgctcgacaaactgatgatggagaacgctgagcttgttgagaaggtgaatgtgttgtatgccatgcttgagcaacaaagtaaggcagcagaacattccaaggtcattgaaacgactaattctgtgcctcgatccc

SEQ ID NO: 200148 - DNA, 581 bp, Gossypium hirsutum
atcttcgtcaccctttggtaatgcggggatggtgcctcctcctatgcctggaaaccctgcattctcacaagctcaactcagcgctggttttcaagctcagtatcagctatcccaagctcaggcccttgctcaggctcagtcgaaagctcaagctcaagctcaagctcaagctcatgcccaactccaagcacgcttacaagcccaaggtttggcccttaaccaggctcagaatgctggctttgggacattaggttcgtcttcaccctccatgtctactcctggcagtgcaagtgcaaagaggatccttcaaaggccccccatgcgccctcctggtgttcctatgatgaacacaatgtcacctttgagaacaatggaacttacagccgctgcacgtagaaagaagcagaagcttcctgagaaacaactacaggatggagtggcagcaattcttcctgaatctgctttgtatacccagcttcttgagtttgaggcacgtgttgatgctgcattagctaggaaaaaagttgacatccaggaagcacttaagaacccaccttgtgttcagaaaactcttcgaatat

SEQ ID NO: 200149 - DNA, 686 bp, Gossypium hirsutum
  unsure (1)..(686): unsure at all n locations
tttgaaaacaggtatagctcgtataatagtgcagccatcgacgaagcgcatccatcacgattccctctacgaggatgttggttgtcacatatcagatgacttatcagaatgtggtcttattttgggtatcaagcaaccaaagttagacatgattcttcctaatagagcttatgccttcttctcacatactcacaaagctcagaaggagaatatgccattattggataagatcctcgcggagagggtatcgttgtatgactatgagcttattgttggggacaatggtaaaaggttacttgcatttggcaaatatgctggcagagcaggaatgatcgatttattacgcggattgggacagcggtatttgagtcttggatattcaacaccattcctgtctctgggtgcatcatatatgtatccttccttggctgctgcaaaggctgcantgatcaccgtggggtgaagagatagcttctcagggactgccttcagggatatgtcctgtaatcttcgtatcacgggttccgaaatgtttctgttggtgctcaagagatattaaactacttctcaggttttgttgaaccagagacttcagactcttggaaagttttaaccatctcagggagaatgtcatcaagaggtcttcagttatggtgatctgactatgcgactgttacacagatctn

SEQ ID NO: 200150 - DNA, 490 bp, Gossypium hirsutum
gcattctctgaggtcaaagctggcatttttattgttcttttatattgcctttgttttttttcttttcccctcacccccttcccttatttactactcttcccaatccttccttttctctcattttctcatccttatttattagtgaaaagaaaaaaaatgtgcagcattctttgagagcaagccaaaataaaaacaggttcatggttgattgagttttggttcttcttcaacaaaacaaaaaacacaatccaaccccaatggctgtttctccttgtttgagtgttaatgatcaaaagaaacactggtggcttagcaaccgaaaggttgtggataagtacattaaagatgcgaggagtctgattgcaacccatgaacaaagcgagattgtttcggctttgaatctactcgatgcagcattggctatttcgcctcgttttgaggttgcccttgagctcaaagctagatctttgctgtacttgagacgatttaa

SEQ ID NO: 200151 - DNA, 335 bp, Gossypium hirsutum
gtcttgggcctcaacgatcactgccacgtgttggatttatgatagtccgtcgtatcggagcgttaatcctccggcgtatttcccaacttccccttccagatcgtaccttattccattcatccgcagcttcaaatcgcaggttctcaaaccatttcgtcgacgatgacgaaggaggtagcgcgatttaccggcttgcgcttaaattccagcggccgacgactgtggaagtggagccttcatcgcggaaccgcatcagcttaataggaacagtggacgagcctctcaaagttatgaataccaggagcgataactttggggttcagactcgcctcaat

SEQ ID NO: 200152 - DNA, 449 bp, Gossypium hirsutum
tgaaatctcaactggggaaatagagaggggagccttttaaagtagataaatattaaataatcgcagtagttgacatttcgagtagcaatggctcctggaggcagcgcttgcaaagaagtcattgaatctcattcccctgttgcagattatgacatagcttcagcaaaatctgagagtaataatgccactagtactactacaacaacaacaatgaaaacttcagttaatttagttggaaaacatggaattcattcaaacaacggtgtttatgagctccttgagtgtcctgtatgcacgaatttgatgtatccaccaattcaccagtgcccaaatggacacactttgtgttcgaactgcaagattagagtgcacaactgttgcccaacatgccgctatgatcttggaaatataaggtgcttagctttggagaaagttgcagaatccttgga

SEQ ID NO: 200153 - DNA, 433 bp, Gossypium hirsutum
attagctttccacacagaaatgggtgtgagtgcgaatgccaataccggagccttcctcgtcttcttcatcgctgcaatcttgctggccttgtccactacctgtacagctttaaacatcactaagtcgcttgcgccgtactctgattacagcactctcagcgatcttttcagtaagaccaagctgactgatgctataaaccgtcgccagaccattaccatactagccctggacaataattccatccaatccatcacagacaggtccagcgatgaactgaggaagattctcatgaatcacatttatcctcgactattacgataggcaaaagatccaaaagctggggaagaagagcgccctcctcaccaccttgtatcaaaccactggttccgctataaatcaacaaggtttcgtcaacattaccaggatagcacg

SEQ ID NO: 200154 - DNA, 739 bp, Gossypium hirsutum
tcaaattacggcaaaaacggtaatggcgtccctaacgactttacaagttacggtaaagattcgaatgtgatggggtcggacttttctggctatggaaaaacggcgaatggagctaaagatactttcacttcgtatgcattcgattccaataatcctgtaaatggtttcaagagttatggagacggtggcaatgcggctgttgacagtttctcaagttaccgggaccaatccaatgtgggtgacagctctttccaatcttatgccaaaagttctaacggagcgaaagttgatttcgacaactatggccaatctttcaacgaaggaaccgaaaaattcactggatatgggcaaggagccgatgggcagtccataggattcaagatctatggaagaaacaccactttcaaggattatacaaagaagggtgtcactttcagtagatacagcaatgagagttcaacagcttcaggtaaagttgtggtaagtaagtgggtggagccgggtaagttcttccgggaaaagatgttgaagcgaggaatggtgattccaatgccggacattaaggataagatgccggcgaggtcgtttttgccacggactatcctttccaaaatacccttttcgtcttccgagattgatcaactgaaacggatattccacgcaggggacaactccacactggcgaccataatgctggatgctttaaaagagtgcgagcgaccgccgagcccgggcgaga

SEQ ID NO: 200155 - DNA, 391 bp, Gossypium hirsutum
tcggttttgatgatggttgttatgaagattggagtcgtgaccttcttgtggcacggaagatattgggaaatgagaggcttcctagaattcctcatacgatgattcttgaaggtggaagtatacatgtagatggagaaggaacttgcctcactaccgaggagtgccttttgaacaaaaacaggaacccaaatatgactaaagaagaaatagaaaatgaacttaaggcatatcttggtgttgagaaggttatctggctgcctcgtggattatatggtgatgatgatacgaatggtcatattgataatttgcgttgctttgcaaagcctggtgttgttgtgttgtcttggattgatgatgaaaaggaccctcaatatgaacgttccatggaagc

SEQ ID NO: 200156 - DNA, 572 bp, Gossypium hirsutum
  unsure (1)..(572): unsure at all n locations
ttgcccacgcgtccgcgcaacgagaacggttttggaaacccaagaaaaagaataccttttttattagtatttttcaatttcatataagtatatacaatcattgcaatttcaatcattttctcaatccgtctttctcaaagggatagttgagcaatttgggaataaaatgggagtgaaggtggagcactgatgtcactgttctggtttgtgattcgtcaactagctgaaattgaagaacaaatggctacctcgaagaaagtgattacacgggaagagtgggaaaagagattaaacgatgtttaaataaggaaagaagacatgaataaattggtgatgaattttctcgtcaccgagggttatgttgaagctgctgaaaaattccaaatggaatcgggaactgagccatatattgatcttgcaacaatcacggatcgcatggctgttaaaaaggctgtacaaagtggaaatgttgaggatgcgatcgagaaagttaacgatttanatcccgagatattggatacaaatccgcaactctttttccatctccaacaacagagattgatagaattgat

SEQ ID NO: 200157 - DNA, 667 bp, Gossypium hirsutum
gcaaaaaccaaaccctccgaaaagaagcaccccactttagtttagccctggtttttctactttttctaatcaaatcacacccaaacaaacacaaaatagaacctgtctttacaaatcgcacatttgatccttttcttgcagagacctcagaataatacaagtttattttttgtttttttttttaaataattttggccatgaaacttggatacccaggctctctctcttcctctttaggtccacctcaatcccgattcaaacataaccctgaaggtgatgcacaatttccggaggatgagagcaccaagatttttgctaggaaagtagctgatcattatagtgcaagaactaatcagactttggaagaacgagaagcaagtccaatcattcacttaaagaagttgaataattggattaaaagtgtcttgattcagctttatgctcgtaagggggatgctgttcttgatcttgcctgtggcaagggtggtgatctcatcaagtgggataaagcaaaagttgaatattatgttggtgttgatatagctgaaggctcgatagaagattgccgtacgcgttataatggtgatgcagaccatcatcaacgtcgcaaaaagttcacgtgtcctgcccatctcatatgcggggattgttttgaggtgcgcttgga

SEQ ID NO: 200158 - DNA, 745 bp, Gossypium hirsutum
ctatgttgcaggggatagagtcataacagatcctctttgcaagcctttcagcatgggaagaaaccttatatgcgtgtactccaaaaagcacatgtatgatgttcctgagcttgctgatatgaaaagaaaagccaacatacgaagtttaaaagagatggctttgctgctaaggactggctcgaaattagtatggattgcaccaagtggcggccgggaccgtccaaatcctgttacaggagaatggaatccagcaccctttgattcttcatcagtggacaatatgagaaggctgatagaaagttcaggtgctccagggcacatgtatcccttggctctattgtgctatgacattatgccccctccatccaaggtggaaaaagaaattggagaaagaagaatcataagctttcatggggccggattatcagtagctccagaagttgctgctaattgtgaaaagtctgaagaggttaaggatgtatttacacaagctctatacaagtctgtgacagagcaatacaatgtcctcaaatctgccatacatggaaaacaagggttagaggcatccactgcaggtatagctttgtctcagccatggaactagtttatagttaaaaccatgtcaagttatcaacgtaactgcacccaaagccgtagccataggcaattcttacattacgtgtgtatcatgtttgatctacgtgcctattcaaatttgatgttttatgtcatgacatattttgga

SEQ ID NO: 200159 - DNA, 467 bp, Gossypium hirsutum
cttgttgaaatatatttttatatatatatcattaagggatcttgttctgtatgtctttctctggcaattcaacaagaatccatattacaatcagaatcttttttatcttcacagtgttggtgtcttggctccttcttcaaagcttcttttagctgtaaatgtagcttggtttaaccctatccttttgaatggggatgaaaggagggacttcatggttgactgctgtgaaaagggcttgtagatctcctactaaagatagcccatgatgatgaaaagaagagagataaacggaggtggatctttaggaaacaagatacaagtcctgtgaagagtgtaggtaataatggcggtggtggtggtggtgcaagtacggcagcagcggagcaaaggcatgctattgctgtggcggtggctaaagcagcggaagctgaagctgcggtggcgactgcagaagcagctttacaagc

SEQ ID NO: 200160 - DNA, 809 bp, Gossypium hirsutum
gggaagttctcttactgtttggtcgacaggtccgcttcttcaaaaccgtcctccatgattttcggtgatgcggccattccccgaaccgccgtctttactcctcttcttacaaaccctaagctcgacactttctactacgttgagctgcttgggattagcgtcggtgggacacgtgtccgagggatcacgccttctttattcaaaatggatccagctggtaacggaggggtcattattgactcaggcacgtctgtcacccgcttgacccgacccgcttacatcgcaatgagggatgcgttccgtatcagggcctcgaatctgaagcgggcgcctgacttctcattgttcgatacatgcttcgacctgtccggcaagacttccgttaaggtaccgacggttgttctacattttagaggggcggacgtgtcattgccggcgacgaattatttgattccagtagacagcagcggaaccttttgctttgctttcgcgggtaccatgagtggtttgtccataattggaaacattcagcagcaaagtttccgggtggcttttgattcagcgggttctcggatcgggtttgctccccgtggatgcgcttaaacatgggtatgggtcttttatctatttttactaaggtaagggataaatctctttccctgcctctattttagggtaagaagggaagaacaaaaacgatcttccatggatttgaatgtaagacaggaggagagggagatgataaaaggcgggtagtttgttagaaatagcgaatcaacgttgttttgcggtttttcaggtgttatcaa

SEQ ID NO: 200161 - DNA, 498 bp, Gossypium hirsutum
ctttactctcaacaaaaatagggccgtgaactaagtgctgcttggtgtacttatctgtttatgatggagttacttgcttccatccactgttacttttggagtccttcgagaactatttgcttatggatgtctctggtgcttttgctccaatatagtaaaacagtagtctccaaatccgattatttgatcggacttggaagctacgacattactggtcctgcagccgacgttaacatgatgggatatgctaacgcggaacaaattgcctcggggattcacttgaggctgcgagctcgctcattcattgtggctgagccacaggggaaaagagttgtatttgttaacctcgatgcttgcatggcttctcaattagtgacgatcaaagtgattgagagattgaaagcaagatatggggagttatatactgaacagaatgttgctatcagtggtattcatacccatgccggtccaggaggttatctccaatatgtagtgtat

SEQ ID NO: 200162 - DNA, 610 bp, Gossypium hirsutum
  unsure (1)..(610): unsure at all n locations
atacctagaattttcaattgagggttcgttcttcccacgaagccttaatcttctttcttttctgaactccaattctcaatttcccaaaacccacaactctaaaagaaggaaaccctaaagaggaagatggatggtattgaaccctactcttttaatcgccatccgcaataccctcgttcaaccagaactcgccatgtatacagttacggaccagacgaagagctcgacgatgaagaagaaatggaactagataacgaagatgtagatgacgataacgacgacgacccagatgtttattaccaccgcgtcaaagaaagcgagcgttttgaaaggtacccaaagcgtcaaaaggtgagttctgctctccctagcttccaatatgcacctgaccatagagatagcttaaaaaatgcctatgattggacccaacaggagatttatgttctgttanaggtttgggggaataggtttttgcaattagggaggaggagtttgagaggtgaaaattgggttgatatanctgagaaagttagtgatgctttgaaaagtgtgaaaaatgaagctcagtgtaggcgtatgattgatgggttgaagaagaagtctaagacat

SEQ ID NO: 200163 - DNA, 334 bp, Gossypium hirsutum
tttacaccccgcatattgctgttgccatcttcttccacctatttggtggttattgggctacgcaattttttatagcgtgttcttcaaccgcgattgcgggttctgttgctttcttactattgggctcggggtgaaacatcgccagagatcccatttcttcctgtttttgcctctatgaagcgtcttatacgatacaaccttgggtcagtggcccttggctcattggttgtatcctttgtggaatcaattcgtttcattcttgagtcaattcgtcgtaaactcaaagttgctggtgttacatcagatggttggcttggaaagatcggacatcata

SEQ ID NO: 200164 - DNA, 462 bp, Gossypium hirsutum
ttgtttttttagttaaataaatgtacctacctttcataaattctttccgtctttcttaccttttgaaaagctttgtttgaataaaaaccaaaatcctttgaataaaagccatggtggtagcaatggtagcagcatccatggcttccggtttgagaataaaagcaatggcagagctttgttgttatttgacggtggtgctttgtgcattcttggttccatgtttggcgaagcttacagcgattgaacaccccgtcgaacctaatcgctcccttagctttttgggcgtcggagattggggcagaaaaggattttacaatcaatctgaagttgcttttcagatgggaaggattggagagaaactaaaaatagatttcggcatctcaacaggtgataatttctatgataatggtttaaccagcgtatatgacccatcttttagagactctgtcacaaacatatata

SEQ ID NO: 200165 - DNA, 618 bp, Gossypium hirsutum
ctggctgaaaaagcataagacacacactgtcataacatttcacaaaacatgatccaactacacaatgctagattgttaatcacagagtagcatcattttttcaccaaaaattcaagctttcttttttttttcttcaaaattgaagtgaaaatggaaactatctcagttcccaaattcatatttttcttcatcacagccatgtttatgagcatcaatctgatccactgcaccattacctatgacaagaaatctattgtcatcaatggacaaagaagaatcctcatctctggttccattcattatccaagaagcacccctgatatgtgggaaagtcttatcaaaaaggctaaaaatggtggcttggatgttatagacacatatgttttttggaatggccatgaaccttcaccgggcaattataatttcgagggcagatatgatttagtacggttcatcaagacagtgcaaaaaatgggtttatatgttcatcttcgaattggtccttatgtttgtgcagagtggaatttcggaggatttccagtttggttaaagtatgttccgggtattagctttagaacagacaatgagcccttcaagagagcaatgcaaggatttacc

SEQ ID NO: 200166 - DNA, 655 bp, Gossypium hirsutum
ttctttccacaaataaaaaagaagaagaaaaaagcttctgcctttgttagctgttgttccgtttctttggttttatcctatttccaagctcagatctttcttgcttttaagtgtttcagtttcatatggcatttgaatatcaggaggatcatataaggaattcaagaggaactttgctttttacttgcagatggttgcctttgatctcttctccgaaggctcttgttttcctttgccatgggtatggcatggagtgcagtggattcatgagagaatgtggaaccaggctagccgcagctggatatggtgtgtttgggattgattacaaaggacatggaaggtccaagggtgctcgatgttatattaagaagtttgaaaacattgttaatgactgcagtaattttttcaaatctatctgtgctcaagaagaatacagggacaagagcagattcttatatggagaatcaatgggaggtgcagtggccttattgcttcataaaaaggatccttccttttggaatggtgctgttcttgttgcacccatgtgttagatatcagagaaagtgaagccacatccggtggtggtgaatatattgactaaaatggaagaaattatacctaaattggaaatagttaccgccaaaaaagttcttgt

SEQ ID NO: 200167 - DNA, 594 bp, Gossypium hirsutum
  unsure (1)..(594): unsure at all n locations
ctcaagcaagtaacttactcaagcagaggagaaacctggagagagttctgagaaattactgagcaatggaagccatggcggcagcgaaaccagtgatcaaagttgctgccctttgtgggtctttaagggaaggctcttacaatagaggcttacttcgttatgcaatggagctaactaaggaagagattgatgggattcagattgattacattgacatttcgccgcttcctatgctcaacactgacctcgaggttgatggaaagtatccgcctgttgtcgaggctttcaggcagaggattttggcggctgatagcatcctatttgcttcccctgagtacaactactctgttactggacccctgaagaatgcaattgactgggcttctcgatcgccaaatgtttttgccaataaagctgctgccatcgtaagtgtcgcaggaagtttaggtggtgcgcgagcacaatatcattatcgccagattggggtttatcttgatcttcattttataaacaaacccgagtttttcttgaatgcatatgattctccancgaagtttgatagtgatggcaaccttattgatccagcatctaaga

SEQ ID NO: 200168 - DNA, 749 bp, Gossypium hirsutum
  unsure (1)..(749): unsure at all n locations
gttccccatctggttttttattttctttttacgaagaattggggaggtcatggctagattattatcgtcaaacgcggtgttgaaggccatcgctactctcccagctgctctttctagtagaaacgtaattggatccttctacccgagtgggttgaaatactcaacatctgttcccggtgaccctggtacacatgaagattttagaccaacaaataagattcagagttctgatgtttctttgaaggatgttgttgagcaggatgtcaaggaaaatcctgtgatgatttacatgaaaggggtacctgattttcctcaatgtggattcagttcattggcagtaagagtgttgaaacactacaatgttcctttaagtgcaagaaatattctggaagatgctgagctgaaaagtgctgttaaagccttcagccattggcccacatttccacagatatttattaagggagagttcattgggggttcagatattattctcaacatgcatcanaatggagaactgaaagaaaagctcaaggatattgtaggcagtccgaagctcgaataaatactgttgaatctcagaatggagtaggtttgctttaatgaanaattttgntgccctttttttttcgagatgatanattaaggttatgttctatgttgagacctgctgttaaactcaatataaacttggctactttttaaaaaaaaaaaaatctggggggcgccaattccctttggcgttcatcctg

SEQ ID NO: 200169 - DNA, 341 bp, Gossypium hirsutum
tcttgcaggttcatgtatgtgacgatacttgtcgagaagtcattttggatcccaacaatgagcttttggtctgcacaatttcaggccactgttttgataggttactgtcaccatccgaaatggaattggatgctgaacagcagcaagctggtggcacagatgaagcagaaccattcttgggatctggtcgctttgcacgagcttacttattaggatacaactgcgaggatgaaaaggagctggaagctgctttgaggttttgttgatccaaatcttttattactttcttttaggtgggtattagtcaaatgtctcagtttgagattgatatgtggatgctc

SEQ ID NO: 200170 - DNA, 458 bp, Gossypium hirsutum
cttatttcaaatcatcaatggcgtatttgaaagtggcttttggcttcctagtaacagctttcctgtcagccgcagtttctctggctcaccctggtttgggtttcggctggggaggtgttggtgcgccaggtggtcaatctggtgcaccttcatatggccttttcccacagttctatcagttttcatgccctcaagctgaggacatcgtcatttcagttctagagatggccatagcaaaagagcctaggatggctgcctctttgctaaggcttcatttccacgattgtttcgtgcagggctgtgatgcatccatattgttggacaacagtgcgaccatcgttagtgaaaagaattcactaccaaacaggaactccgttagaggctttgaagtgattgatgagatcaaagctaaactagaagaagcatgtccccaaactgtttcttgtgctgacatactc

SEQ ID NO: 200171 - DNA, 746 bp, Gossypium hirsutum
  unsure (1)..(746): unsure at all n locations
atttcttcacctctaagaatttaccgatacatatgggtaacatcttcaatctttgtttcccaaaattaccatgccaaagccaggccgggtgtgggtcttcttccttgttgctctttgtctatgcaccagttcaaatgccagcagtactaccaatgagttcctagaaactgagtgcttgaaagtaccagcaactgagtttataggttctttgaaaaccaccattgatgctattcgaaaagctacctccgttgtttctcaatttggcggcttttttcatgattttcgtctctctaatgccatttctgattgtcttgatctgcttgactcttctgctgatgaactaagttggaccatgtctgcttcccagaatcctaatgctaaagataacagtactggtgatctaagttctgatttaagaacatggttaagtgctgcaatggttaaccaacagacatgcattgatgggtttgaaggtacaaatagcatggtcaaaactgtagtatccggtagcttgaaccaaatcacttcactggttcgtaatcttctcatcatggtgcaccctggtcctaattccaagtccaacggtacccgtaatggcagccaaaaaggtggtggtggtgggggtcatccangccaaaaccggtttccggtatggttcaaaagggaggatcggagattgttgcaaataaatggggtaacagcaaatgttgtggtggcagcaaatgggagtgngaatntcacacgcc

SEQ ID NO: 200172 - DNA, 409 bp, Gossypium hirsutum
gtgtgaaatcgccttcaaaagagaaaagaagaaaactgacaaagacggaaaaagaatagttggaaataattaactttcgatttagaaacattggatttcaaatctcagttcttcaatctctgaaaggaacgggaggttgttggccatggcaaattctaaaggctcaacaaacataaggaactttatggtttctggaaagcatgctttactccctccgaaaagtccatttcccactgtttccccagcatatactgattatatccctaacagtgttattgggtcaaaagcagctcacaagcctagagaaggaaatatacatcaccaacgcacttactcctaaagcctccgaatggaggaacagccttcttggcttgactatctccttaatgaaccagagactcctgtgcgc

SEQ ID NO: 200173 - DNA, 631 bp, Gossypium hirsutum
ttgtttcgtgggatggctggtcctctgcttctgggggcatcctgaacctccggctgcggctgcaacggtacaactgtctctccgccagaatcgtttcttctccgtgccgtccttggtgcgccgccgcagagccgactgggcaccaggacggggtatcctcttcggagaagagtagcgtggtgctgaccgtgaaggatccaccgaagtaccataggtgggatgatcctgattacaggaaatggaaggataaggaggaagagatgcttcgagacatcgaacctatcatttcgctagttaaggagattcttcactctaggaggcatatggatggggagcgcttaactgttgcagacgaggaaactgtggtagagaagcttcttcgtcatcatccacattctgaagataaaattggatgtggatttgattgcattatgggtgatcgacatcctcaatttaaacactcaagatgtctctttgttgttagaactgatggtggatggatagatttctcataccaaaagtgtctccgagcgtacattcgagataaatacccatctcatgcagaaagatttattagagaacattttaagcgtggtagtggctaaaatgtgaaaacataatgttaatagtg

SEQ ID NO: 200174 - DNA, 422 bp, Gossypium hirsutum
taacaagtcttttttttttttaaactaagttcaagctggcgatcgagaatcaagaatccactgtccgtgaaatcaagcctaagaacagaagaatcatgggaggtggtggacctgatgaagaagacaacaataacgagaagtggccgccatggttgaaacctttattgaaagaacaattctttgttcaatgcaagcttcatattgagtctcataagagtgaatgcaatatgtattgcttggattgtatgaatggttctctttgttctttttgccttgcttatcacagggatcataattacattcagataaggagatcttcgtaccatgatgtaataagggtatctgagatacaaaaatatttggacatatctggtgttcaaacttatgtaataaacagtgctaaggtagtcttcctcaatgaa

SEQ ID NO: 200175 - DNA, 1026 bp, Gossypium hirsutum
  unsure (1)..(1026): unsure at all n locations
attcaattttatctgttcaaagtctagttctttgtggcactgtgtgaggtatcaggctaagactgttgggggtgattgagagtgaatgaagaaagggtctgtttctttgagccatctgggtacttttccaagcccaggagattcagattaccgtgataatggggcggtggtgagtcaaaaaggttggagttcaaagcgagtgccgcgttcggctaacagcaatggcagtagcagaagacatatcagtgcttcatctttgacacctttttacagtggaagaactttgccttccaaatgggaagatgctgagatgtggatttgtagccctgttttgggttatggtgttagcaagaacgtaaactatcatctccagaggcggccaaagtctaaaagtgggccgattgtgccccctgggattgctttctactccaattgctcgccttccatgaacttgcttgatggtggaggaagtgggactgtgangaatttgatggcagggtctccattttcaactggggttttgatggctgatggggtttccgttcattatcttggttgtagagccgccccacctgctggagatgttgaccgcgatcggtcttgtttgggtgcagagtgatagtaatgtaccacgatccgctattatacctggatggtcgtcagatttggtcagtgagtcttcattgccaagctctcaagatgaaaaacttgatgaaatcaaggatgccgaaatgatgctgtgtcgtgtagcttcgcggagggatatggcgacgcaaatgagcccggacaacagtagcagccactcatctactagagagaggtcttcattcggccactcacctccccctatccttcctcttcctgctgtggacaacaatgatcatccttctaaactggacatcagggaagtgcagatagacaagcgagccactgttactaaccggtcaaaaaggcatggatcgagaagaatcaagaaaggcgagccggattttgaaggcttctaccgaaacagcgccccaacttctg

SEQ ID NO: 200176 - DNA, 494 bp, Gossypium hirsutum
tttcttcgttctgctaaaccctccaacctggtttaaaatttagttaaaacgaggaaaaaatgccactgggattgatattagggattggaaggacgtttcgaaggaagcgtacctcatcgctcgatattctctcgtctaaacgagcaccaagagattattacaaggggaaaaattgcaagtctactggtttccacactcgcaaaggtggatatgttgtgatgcaggagaagttgccaaactatgtggttcctgatttgactgacttcaagctcaaaccatatgtatcccagtgcccaactgaagtcaaaaccgcagaggctgctgaatcagctaaataatcagcagatggagtgagtataggttgtttgatcatgtctttcatcatctaaccgcagccttgttaaactagaacatagtcttttggggtgcactgccttaggtcaaggtcttgcgagttctttatttttggcctacattctaaactattaacaatt

SEQ ID NO: 200177 - DNA, 1003 bp, Gossypium hirsutum
accaatcacaaatcctctccattcgatactcgcttctcaaccgtcacctcagtgctgtggaactgacccattcctacctgaaccgtctcaaacaaacggagccccatatcaactgtttccttcacatctctgaccctgacaaggtcctgaaacaggcgcaggatattgacgacaagataaaaaggaatgaagaagtgggtccccttgctggtgtcctcgtcgctatcaaagacaacatttgtactgctgatatgccttccactggtggctcttacatcctggaaggctaccgtcctccgttcgatgccactgccgtgaagaggttgaaggacttgggcgccattgttgttggaaagaccaacttggatgagtttggttgggggagtactactgaagcttctgcatttaaggtgacagcgaacccatgggacctttctcgggtgccagggggatcttccggtggctctgctgcatctgtatctgccaggcaatgtgttgtgtcacttgggagtgacactggtggaagtgtgaggcaaccagcatcattttgcggtgtagttggtttgaagccaacttatggacgtgtttcaagatttggacttatggcatatgcgtcatcccttgatgttatcggatgttctggttcctctgttgccgacaccgggattcttcttcatgcaatttctggtcatgattcacttgatgctactagcagtaaacgagaggtgcctgacttcacttctcagttcacttctgcaagttctttgaaatccagaccattaaaggggttaagggttggtcttatccgtgaaactgttgatgctggtgttgattctggagttaaatcagcaattcagggtgctgcagctcatctggaacaattaggatgtgttttgaaaaaggtttcattgccatccttctctcttggtttgccagcttactatattcttgcatcaccagaatcaccttcaaatttatcaagatatcattgtgttacatatcc

SEQ ID NO: 200178 - DNA, 693 bp, Gossypium hirsutum
ggccagtctcctctgtgacaatattctaggtcttgcttatccttgtctagtggcggcgccaagacttagggtatccaggctattcagctatctatctgccttcaccggcaatccttcgccacctcgttcattttcgtcactccccaagtccgcgacgatgccgggtgttgacccgccggcggtagagtggcctgcgaagaaggtgcgagacaccttcatcaagttcttcgaaggcaaaaatcacgtttattggaattctagtcccgttgttcctcacaacgatcctactctcttgttcgctaatgccggtatgaaccagtataaaccaatctttttggggactgtggatccgaacactgctatgagcaagctcaccagggcgtgcaacactcaaaaatgcattcgagctggcgggaagcataacgatctcgatgatgtaggaaaagacacttatcaccataccttctttgagatgttgggaaattggtcttttggggattatttcaagaaggaagcaattgagtgggcttgggaactcctcactaaggtttatggcctgcctacagatcggatttatgccacttactttggtggtgatgcaagctctggtcttccacctgataatgaagctagagatatatggctgaagtttctaccccctggacgtgtactgccatttggttgcaaagactt

SEQ ID NO: 200179 - DNA, 716 bp, Gossypium hirsutum
ttcatttcttcaaattctaccaccttcttatttgctctttataattaaaaattggtaagcaaatactttcccagcacttactctttatccatcaaccgaattccccacactctctctccaaataaaaaatcaagaatctaagaaattcgattcaccatattcatggcccgttccctttctcaatccgttctcaagcttccgcctaatcaccaaacctcacccttcttcctctcgtctccttgccgtccgaacccaatccaaccaacccaacccttccgactcctccgatgcttcatacgattcttcctctgatccgctcctgcggaaacttgaagacgccatccaccggatcatcgttcgccgttccgctcccgattggctccctttcatccccggatcctcttactgggtcccgccgtccacggcccaatcttacggccttgcccagctcgttgagaaattggcgaacccgttgacctcggaggaatccatgtccaccacttccgcccgaggctggccctcctctgactatttcatcaaaggtggatccccgcatccagtggaggtagacttaatatcaaatacttcgtctaaatccgaggatgaagaaggatgaagccatggcctattcctgataatagcagctgggaattccaaaattgctggtggtggattaagaagtagatttgttggcaggatattttaaatcagattgt

SEQ ID NO: 200180 - DNA, 508 bp, Gossypium hirsutum
ttcttcctaatctgcaaccaaatcatggatccaaagctactgttttccactctcactctcctaattacatgtttctgcggttgtggaatcgcccaaccttgcccccgtcctcgaccatgcccttcaatctcgcccccaccacgccctactagaaccgtctcttatgttcgaccccgtccgccactctacgatccttcccttcgtctcttacctcgccagccaaacaacaatcccggtcccttagccaatagagccaggattctcgccattacccaagaactcagacgaaacattacctgtgaccctcaaaactacacccctacttgggttggcaacaactactgcctcttcaaaggcttcatttgcgacactgtaccagacctcaacattactggacttgcaggcattgattttaacggcgcaaggtttggtggtaacttgaatttttatcgtttcattcaaaacttgcctgatattgctatcttccatgccaattcaaacaacttca

SEQ ID NO: 200181 - DNA, 659 bp, Gossypium hirsutum
  unsure (1)..(659): unsure at all n locations
ttcaaaccgacccccccccccgcccccctaggggaatgtttgtagactgctttcattaacatctcaatatattactcttcgcgggtctcctttagagatttccttttaaggtggtttttccccccttagtttaaaagatgtcatcaagtgatagagcccttctcacaagtgcacgcacggtgagctgtgcttccgtgctcatttggcagctcctgattgctcctccaacaacctcgatgcttctgccctcgagccatggtgcgtgtcggctcagaacggcggctctgttggcctttcattaaccatcatcgacgagcgaaccgggaagaagtaccaggtccctgtctccagcgaaggcactatcagagctaccgatttaaaaaagataacaacagggaaagatgataaggggcttaaagtttatgatccgggttacttgaatacagctccggttcggtcgtcgatttcttatataaacggtgatgaagggattcttaaatacagaaggtatccaattgaagaactggctgagagttccactttcttggaagtggcatacctcttaatgtatgggaatttgccttctgaaagtcagttagcaaactgggaatttgctgttagccagcattcanctgtgccgcaagggattctggacattc

SEQ ID NO: 200182 - DNA, 599 bp, Gossypium hirsutum
  unsure (1)..(599): unsure at all n locations
acagttgcacatgatccctcggccccccccccccgtggtttctcttccacatgatctgtcttgttaaataaataccgctttatctcctccccccctctcaaccctccatttctcgcttgcagtgccgcagcaacaatggctatgagaaagtcccccaaactgccacgggcggctgttctgaagcaaattctgaagagatgttcaagcttaggcaagaaacatgggtacggcgaagatggactccctcttgacgttcccaaaggtcatttcgccgtttatgttggcgaaaaccgaagcagatacattgtccctatcaccttcttgactcaccctgaattccaatgcttgcttcaacgagctgaagaagagtttggttttaaccacgatatgggccttaccatcccttgtgaagaagtcgtttttcgctctctcacttctatgcttcgataaacattgattaatgtcgtcaaacgatggggcttggcttggagaatgatggccaaaaagaagctttctagcttctctttttttaacgtccttctcttcacccctcttattaggctntactattttgaacccattaacttgggttttttttt

SEQ ID NO: 200183 - DNA, 487 bp, Gossypium hirsutum
gttacaagtcgtacgattcacgctcttccggggggtccatttaatccgatgcgggctcatccatagacctcagcacttcctcttctgggaaacctaaatcctctttctctcgagcccttgtgaaatcgaaccccttggatgtcgaccagggttgccggagcaagagcaaggccaccaccactcaccacaacttcaccagcatggttaagcgatttgtggacaatcaatccaaaaccaaggcaatgggtcatgctcagcttctcattccatctgatgtcctagccgaggacctcaagaagacggcaagaaagggagctgctttaaccgtcttgcagaggaagctgttcgggaatggctctgccggtaaggacaggggcaaaatggaggtgaaagccttgactgaggttaaagggaacactaggaccttgcctatgggtttgagaagtgagacggagctgttgagtgcaaataaagagctccagatgga

SEQ ID NO: 200184 - DNA, 629 bp, Gossypium hirsutum
atgctactgaagcaatgggtgaatcaaggtaacctgacattcttaatactatgggaacacttgcatataggaagatgtactttgtggggttttgggcggctgcatttagcacacatcagttggaagcagttgaaggttgggagcagattgcctccactgcttttgaacattttgaacaggagggcaatagagtaatctcaattgaagaattggcacgggagttgaatgttggcccttcagcgtattcattcctcaaagactggatcagggtctcggatggaaagctaagcttgcttggatataccaaatttttacatggtgtggcgcttcgcagctcaaatacaagacatcattaatctatagccgttgatatataatcttaaaattcatggcatttagaatgacttgtgataatttttttttttttcaaaaattatttttggtttagggggaaaaaatgtgcataagtgaatattgttagtgagattgtggaggaaaagttacagtgagaggattgattttgctcatgtcccattttttgcttatcgtgcatgtatgaatgtgggtgtcgggcttccagattttgagctttgaattaagattacttagactaaaagtcgacgcggccg

SEQ ID NO: 200185 - DNA, 773 bp, Gossypium hirsutum
catagagtgaggaatctgaattataatctctcttttcttcctttctccaccaaagaaaatctgatttaaattttaatccattaatggctgatgaaccttctctcactcgatggtcttttctggattttaaactattttatgatgccaagtttgggaggaagagattgcctgagccgcaaaatggtcaaactgctgatgagctcgactccaatggcactaattcgaacgtgacttcaaaagaaaaccaccctgtcaggaacacttctgatatggctatctacgagcagtaccggaaccagggtacacactcggggcgctcaaatggcgcggtgtctaatggatctgattcgagaccgcaaaggtctctgcttcctgcttttgaatctgcagaaatgcgtgcattaggagagagtttaagtagggacatcgttcgagggaatccagatgctaagtgggaaagcatcaagggattagaggatgccaaacgcttacttaaagaggcagttgttatgcctataaaatatcccaagtactttactggtcttctttcaccatggaagggtattctcctttttggccccccagggacaggaaagaccatgctggcaaaggctgtagcaacagaatgcaagaccacattcttcaatatttcagcatcatctgttgtcagcaaatggcgtgcagattctgagaagttaataaaagtactatttgacctagcaagacaccatgcaccgtctaccatttttcttgatgaaattgatgccattata

SEQ ID NO: 200186 - DNA, 952 bp, Gossypium hirsutum
cggccgcgtcgaccgacgttatagtaacgggtgctatggcacagtatattccgaccttggattattacagtggtgggttacctaaggcatgtacaatgtacgcttcatcggaatgttattttgggttaaaccttaaccccatgtgcaaaccatcggaagtttcgtatactatcatgccgaacatggcgtatttcgagttcttacctcatgatcctaactcagctgggttcactcgtgactcacctcctaaactcgttgaccttgttgacgtggaaatcgggaaagaatacgagctcgtaatcacgacctatgccggattatgcaggtaccgagtcggcgacattttacgagtcacggggttccataactcagccccacagttccatttcgtgaggaggaagaacgtgttgctcagcatcgactcggacaaaaccgacgaaaccgagttacaaaaagccgtcgagaacgcttcgcggctcctccgagaattcaacgccagcgtcgtcgagtacacgagttacgccgacaccaaaaccatccccggccactacgttatatactgggaattgttggtgaaagacgccgccaactcccccaccgacgacgttttgaaacagtgctgtttagcaatggaagaatcgatgaactccgtgtaccgacaaggccgagttgctgacaactcaatcggcccactcgaaatccgggtggtgagaaacggcacgtttgaagaactcatggattacgccatatcaagaggagcttccattaatcaatacaaggttccaaggtgtgttaacttcacacccatcatggagttactagactctagagtggtatctacacattttagcccagctttaccacattggacccctgaaaggcgaagatgatgatgatgatgattcagtgactcagttattcatttaggcacccaccaccgaccaggaattag

SEQ ID NO: 200187 - DNA, 517 bp, Gossypium hirsutum
ccttgtttcccgccatggaagtcgactcgcaagagcagctgcagagaaaacagtccacttacctctctttagatgagaatttcgagattcagaaggaagtttacagaggccagcagtacagtcaaatttactttgctcgtcttcacatgatgagaactttgctttactccctcgtgcccaactggaaatcccatctccccgtttgtacagttttagagctcgaagaaggcaaagaatgcatcattgttggtactctttacaagcatatgaaactcaaaccttgcattcttgatgaatactctaaggagagatctgttgcccctcttataaaacctcataattttatgcatcaagatgactacttggttttggaagatgaaagcggacgagtgaagcttggtggtactaagctttcaacctcagtttatgtaacaggtgttgctgctgcgttgcatgggaaggaaaccagtgcaggagccttctttggttgagatgttctcgaagctggcttaccacc

SEQ ID NO: 200188 - DNA, 685 bp, Gossypium hirsutum
  unsure (1)..(685): unsure at all n locations
cccactcgtccgcggacgcgtgggtttctttctcattaggctactctcgtcactaagaactttaggcttggaccatggaagactctgctggaggcgcatcattacggtcgggtcccgacgggaagaagcggcgtgtgacatacttctgcgagccggcgatcggcgactactattacggtcagggtcacccgatgaaaccccaccggattcgtatggcacacaatctcatcgtccattattctctccaccgtcggatggagattaaccgtcctttccccgccggtcccgacgacatccgtcgctttcacaccgaagagtatgtggacttcctcaacgccgtcacccccgattccatctccgaccccgcttattctcgccatttgaagcgtttcaatgtcggagaggattgccccgtgttcgatgggctttttggtttctgccangcctccgctggtggctccattggtgccgccgttaagttgaataaaggggatgccgacatcgccatcaattgggctggtggattgcatcatgctaagaaaagcgaggcttctgggttttgctatgttaatgatatcgtgcttgggattcttgagctcctgaaatatcacaggcgtgtgctgtatgtagatattgatgttcatcacggtgatggtgtanaagatgcattttacaccactgacag

SEQ ID NO: 200189 - DNA, 683 bp, Gossypium hirsutum
tccacgcgtccgccaaaccctaaataaacccgacccatatactgcagcctttaccacctctctataatttctatttctctctttcgtttctccatacccccctcttaaaaaaccaaagccaaagccaaagcaaaatccaactcgaaacgctatcttctttttgctctgtaaaaagatatctatggctgttgaagctaggcatcttaatcttttcccccctcagtttacaggaaacagggagacgatgaatccaattcaaggaaacgggaatatgtatcaaaccgagattggatatggggttccgttatcgggaaccacgacggtggcggaagggttgcttccgttgtataagtataactctacggctacggcggcgatgaaatcggagagtagcttgacgtacaacaacaatgttcttcctttaccgaggaagcgttcgagggattcgattaatccgatcctttcgtttccttcaccggttcaacaacaaagcaataataacaacggcaataataagacttgttttcttggtcatgatatttcttttcatatggagcaacaacagttggatattgatcgcatcatctcccaacatatggagaaaatgagggtggaaatggaggaaaaaaggaagagacaagccaggaagataatggaagcaatcgaaggtggagtgatgaaac

SEQ ID NO: 200190 - DNA, 643 bp, Gossypium hirsutum
ctcacgcgtccgcggacgcgtgggccggaacaggaattcttagcgcaggtctccatggtttcgagattaaaagacgaaaatgttgttcagcttcttggttattgtgttgatggatccctccgtttcctggcgtatgagtatgcctctaatggatcactccatgatagacttcatgggaagaaaggtgtgaaaggagctcagccaggtccagttctatcatggacacagagagttaaaattgcttatggagccgcaaaaggcctcgaatatttgcacgaaaaggcacatcctcatataatccaccgtgatattaagtccagcaatttgcttctttttgatgatgatgttgctaagattgctgattttgatttgtcaaatcaagcccccgacgcgaccgctcgcctccattctacaagggttcttggaactttcggttatcatgctccagaatatgcaatgacaggaacacttagttctaagagcgatgtttacagcttcggtgtcatccttctagagctcttaactggtcgcaaaccggtagatcatacgttgccacgtggacagcagagtctagtgacatgggcaaccccaaaactaagtgaagacaaggtgaagcagtgtgttgatggtagactaaatggag

SEQ ID NO: 200191 - DNA, 881 bp, Gossypium hirsutum
  unsure (1)..(881): unsure at all n locations
cttcaatttcatatttaagcactgtcaattcaaaatggataacctttcaattgcttcagtttcgtttctacttattgttttaagctggaaaagttgattttctttgctgtcaaacgaagtttttttttttccttagagaatatatataagcaaaagaggagaaaaatgatatcaggagggctaaatttggtgatgactgttataggtttcacagtgagtattatgttcatagtgtttatttgtacacgtttgatttgtgctcgtgttcagctacatgcttctcggagacccttcgcaatctcttcaagatctgatcttaatatgctcgaacggggtttacacggtattgagcctgttgttgttgcaaatttcccaacaaagactttctgtgatgagtgcttctcanctaacaaagatgctcagtgcacggtttgcctttccgaataccgctgcgaagatgtgttgcgaatcctcccttattgtgggcactccttccatgtaacatgcatagacctatggctgcaacagcattccacctgccctgtttgccgaatatcgctgcgtgaattgcccgagaaaaaacggttgatgcaaccgttgttcagttcagccggtcgttctcattttggcacagaatcttttaatatgcatacgtacaactgtttgttgagagggcacggatttccctcaagaacccgtgagaaccccgtgatggacccaaaccaagagaattcatttgcaactggaaatctgggatcgggggaaaacatgtcccgtacaatcgaagatgatgaagacaacattaaagaaccaagaaagaagcttgtggaaagcccatcaaacccttgaattatgtttgtttgtgagttgatgcaaagatc

SEQ ID NO: 200192 - DNA, 488 bp, Gossypium hirsutum
tctcacgcgtccgcccacgcgtccgcaaaagcaaaaggctaaagagtaaggcccccttccctttgttgacatcctcaccaaatctcttgcttttcttctctcttgctactctcctctaatttttcaccttctgatttgtttaaagaggcaaacaacacaactcgtttttatccttatatatcagtttgggaaaaaaggtagaagaaatgaacggtgatgatgctcagagtatgatggaatcccagtacatacagagacatcacaggcacaacatcagagacgaccagtgcacctctgctctttgttaaacacatcaaagctcctgttcatctcgtatggtcattggtaaggagatttgaccagccgcaaaagtacaagcccttcgtcagcaggtgtataatgaaaggggacctcgggatcggcagtgttagagaggtcaacgtcaagtccggacttccggcaaccaccagcaccgaacggttggaact

SEQ ID NO: 200193 - DNA, 499 bp, Gossypium hirsutum
ttcacgcgtccgcggacgcgtgggcaaaatcccattgtgcattagccgctgcagagacccttcacccatgaaacaaatagcttctgacttttcaatctccaatccctattattttttgcgagttaatcggaccgatccgtcgttaccaagtccagactcatcaatatcaattatcttccatcaccgtcgcgatttctgtcgcgatttacaagttcttccactgcgcgtggtacctcttccatctagtatcgtggtccatcatacttccgtccttccaacaccaatccatgccccgttttattggcttcccttggtacatgtttgaactgcaaacttctaaacttggaggttctccccttgatttcttggatcaaacttcaatgcatgatctatcttcaactgcagcgattagtttcccaataacagtcaacgtatctctctcaacacatatgtcttggaaacccatttcttccgccatagtaacagcctataagcacgc

SEQ ID NO: 200194 - DNA, 667 bp, Gossypium hirsutum
ctatatatcagattgagatgattaagttcattaaaaagacatatcctcaattggatgtgattggtgggaatgtggtgactatggcacaagcacagaatttgattcaagctggtgtagatggattaagagttgggatggggtctgggtccatttgcaccacacaagaggtttgtgctgttggacgaggacaggcaacagccgtttacaaggtgtcatctattgcggcacagcatggtgtgcctgttattgctgatggtggcatttcaaactctggacatattgtcaaggctttggttttgggggcatctactgtgatgatgggaagctttttagctggaagcaccgaggctcctggagcttatgagtataagaatggtcaacgtgtcaaaaaatatcgtggcatgggctccctagaagcaatgactaagggaagtgatcaaagatatttgggtgataccgcgaagttgaagatcgcacaaggggttgttggagcggtcacggataaaggctctgtactaaaatttataccttacacaatgcaagcagtcaagcaaggattccaagatctcggggcttcctctctaccgtctgcacatgaactcttgagatcaggcacactgaggcttgaggttcgaaccggtgcagcacaacccgaaagtggagtgcc

SEQ ID NO: 200195 - DNA, 636 bp, Gossypium hirsutum
  unsure (1)..(636): unsure at all n locations
attattttttggaattgttcatcaaattaatttgatgatgatgggattagaatcaaagtgatacatttataatttgtgaagatttattcagtagatagagacatttatgcgggtgggttgtattaataaataaaaataattatggaaatatgtagcgaaggtactcaagttatgcatctgtttttagtattattatattttgaggaactaaagtttggattgatcaaagtaaattagtcccagcaaacgctgtttcttaaggaaactgggaagacnaaagaaaaaaaaaaaagggaaaaaaagagagaaagaagcaaggtctccaattccaaccatgcgtttgcccatgatcatattgctggtgttaacgatctggaaagcaggaaatggttcgagagcgaatgagttaaaggcggatgggaaagtgttggagttggatgaatccaactttgactccgctattttatcattcgattacatcctcgtcgacttctacgctccctggtgcggtcactgcaaacgtctttccccccagttagatgaggcagctcctgttcttgctggattgaatgagccaatagttttagctaaagttaatgctgacaagtttacccgtcttgctagtaaacatgatat

SEQ ID NO: 200196 - DNA, 837 bp, Gossypium hirsutum
tttcacgcgtccgcccacgcgtccgtagaaagcctaaaattttaaagtttcagtatatatattttttctttgcgtctcaatttcaatctccaaaatggcaccccaagctgaattgcaacaagaagaaatcatttatcgttcaaagcttcctgatatttatatccccaaccacctccctttacattcgtattgtttccagaacatagcgaacgtcgcctccaggccctgtttgattaatgggacgacaggtaaagtttatacttacgctgaagttgagctcaccgctcgaagaattgcctctgggctcaacaagctcggcatccaacaacgccaagtgatcatgctcttgttacccaacaccccggagttcgtcttgtcgttcctcggcgcttccttccgtggcgccattgccacggctgccaaccctttttttcactcgggcggaagtttcaaagcatgcgaaaggctccaacgcgaggctcattatcacgcaagccagttacgttgacaaagtaaaagaattcgcccaagacaatgatgccatggtcatgtgcattgactcagccccagagggctgtttacatttctccgagttgactcaagccgacgacaacgatctccccgaagttgatatagcctctgaagatgtcgtagcactgccctattcgtcgggaacgacggggcttcccaaaggggtgatgttaacgcacaaaggtttggtcaccagcgtggcgcaacaggtcgacggagaaaacccgaacttgtatttccacagcgaagatgtgatcttatgtattcttcccatgttccatatttacgccctgaattccatcatgc

SEQ ID NO: 200197 - DNA, 494 bp, Gossypium hirsutum
ttgaacatctcatgcaatgccattgtgaagttgcaaagggcctcaggaattggctggaacatatcagtatattggacgcctctgaagcgagggctgctcggccgtctgttgcctgggccgaaagccctagcacatttccaaccccagaagaagggttccggtgaaatcccagcagatctggctgaggctgccggtgctcattggcaggtaattatcggttccaagctcactgagaaactgcagcaagacataccaggaaagggagtgaaaacacagttggagaacctctgcaacgtatatgcattgtctcttttacacaaacatcttggtcatttcgtctccactggctgcattaccccaaaacaaggtgcactagcgaacgaacagctcagatcactttactcccaggtccgcccgaatgcgattgcccttgttgatgcattcaatcacactgaccactaccttggctcggctctcggctgctatgatggaaa

SEQ ID NO: 200198 - DNA, 630 bp, Gossypium hirsutum
  unsure (1)..(630): unsure at all n locations
cttcttcaatgtacagctagcatatgaatatttgtctgttgcttttgggatttgttccttcacctttagcttttctttcgtttaactcactgagcaaaagagggaaagctttgctcttttggtgccgggcagagacaaggagaaaatggagaaagcattaactaaagtcgggagcttgaaagttggtgggttatggatctcaaagaaagctaaggaagagttctctaacatcactgcagatctgactactttctcaaacaccgttgaagagaaggcaaaatgggttttcaacaaactgaaaggaaagccaacgaaaagcttgccagatctccttcaagagtacaacttaccgccgggcctctttccccagaatgttatctgttacgaattcgatgaaaccaaggcgaagctgattgtttacatgtcctctccgtgtgaggtcagcttcaaggattcctcggtcataaaatacgcaacacgtgtgaaggggactctccttcggggaaagctgacaggcatcganggaatgaaaacaaaggtcctantttgggttaaagtgacaattgtggcggttgaaggctataaatcaaacaaggtgtggtttactgctggagttaanaaatcaaggcc

SEQ ID NO: 200199 - DNA, 255 bp, Gossypium hirsutum
tttcttatcaaaaaaaaacttctgactccagagtttcaaccttctatagagcagttgatacgatttcttccagcaaatcgtcaaatggtgatgttttcagccacattccctgttactgtcaaggacttcaaagacaaatacctaaaaaaaccttatattattaatctaatggatgagcttactctgaagggtattacacaatattatgcttttgtggaagaaagacagaaagtccattgcctgaatacccttttc

SEQ ID NO: 200200 - DNA, 471 bp, Gossypium hirsutum
tgaatctatcaatggaaggactcactttggtagtacagaaccattatggtattctcatcgttgcagtgctttcaatagcaataacatctcttctattgaaagcgtggggaagcactgtcgactccaccgatgaagatggcattcctggccgattgggattacctttcttcggcgaaaccttctccttcttttcggcttcttacagcacaaaaggatgctatgattttgttaaacagcggagaaaacagtatgggaagtggttcaaaacaagaatactcggaaagactcacgtgttcgttccgagtgttgagggggcaaaaacgattctagccaatgattttgttcatttcaacaagtcatatgtgaagtcaatgacagatgcaactggcgcaatgagtgtgttctccgtaccgcacaagatccacacaagaatcagacgtcttctctccgatcctttttccatgagttctt

SEQ ID NO: 200201 - DNA, 723 bp, Gossypium hirsutum
  unsure (1)..(723): unsure at all n locations
tttacgcgtacgattatctttaacaacagtgggtccaaagaaaaaaatggggcttaaacctggtttatcagctttaatcaccggcggagcttccggcatcggtaaagcgttgagcttagctttggcggggaaaggattatttgtgacggtcgtagatttcgctgaagagaaagggaaggaagttgcttgtttagttgagaaagagaattctagatttcatgaaaagctggagtttccttctgctatttttgttaaatgcgatgttacgaatccaagagatattagcttagcgtttgagaagcatgtggcgacatatggaggattggatatttgtattaacagcgccggcatcaataatccagtaccatttcagaacgatcaaagtgatggggctaagacatggaggcacaccattaatgtcacctggttgcagtaatgnattgtcctcgccttgcatttaaacctatccaagctctgcaaaccaanggggtgatattcaatcaggactttggcctgggtctttccaatntttcttggaacccatttactctgcttaagnagaggtgtggncctggtaactagatccttcnctcgtcaaacgtgaggatacgtgtcatggtcttgcctgaggttgtccacaaaatggagaaaactgacccaattgtatcttatggagcttgtgcatggatgtggaaaggtgcttcagctatctgtgaagcnacg

SEQ ID NO: 200202 - DNA, 486 bp, Gossypium hirsutum
tttgaatttgcagctagagaatcttcaaaggggcaataaggaacaggagagcagactagcaaaaactgagcgagctctaaatattgcagaggaagaactggtaaaggcaaagtttgatgccacttcaaaggcaaatgagttgatggaggttcacagcgcatggcttccaccttggcttgctacacagataattcgtggtcaggccttcattcagacacattggaatcagcatggaaaaccaaacatggatatggtgatccagaaggctctagagagaaaggccttagctaaaaagtgggctgaaccccacatggaagcaattaaaaccaaatgggttccagctgctaaggatcagtgggtggcggtaactacatatgctgaaccacatgtgcaatcgctcactgcaaaaactgttgaaatttatgaggtatcgaaggctacaataactcctcatattatcaaagttcaagaaacagttgatcctta

SEQ ID NO: 200203 - DNA, 577 bp, Gossypium hirsutum
tcggtgacgcgtgggtttcaaagctcttgaaaggatcccatccacttgaaagctgtcaatgtcattcaaaaataccagcttaggtgacaagagccagaagtattcaaaattttctggaacaaagcaagaaaatggttaccttaataactcatctgggcataggagtgcaaatgagcagctcccaggaaatgtgagctttgtgaggctggcggacatgaatgaggaggaatggaatcttttcctagagaagttccaggagttgctctacccgggatttgaaaaacgaaaatcggttactttaggtcagaagcagatacagaggctcggtacttcgtgccagttttgatatcgagatatctgtatatcgataccagatagtcgaaatgagttttaggattgtttgcacttggttctgaaggactgttaggagagatttgagtaatatgggtttggccccgggaattgttgtagtttgggagcagcattacgaggaatagatgtaaatattctttggcttcatttcagctaagtagaattggttttatttcttcttttaaggtctttgattttgtttttt

SEQ ID NO: 200204 - DNA, 679 bp, Gossypium hirsutum
ttgtattccataaggtcaatcataagatcattgtatctgatgcagttttgcaaaaccggtggagcagtgtaagttcatccgacctgatgttcttgagctcagagatgcttaacgacttgtcgagcaacagatttgtgtccctggacataaacaaggagcagtgtacgaaaacaaggacaattgaaaacgaaggaattacaaagatcaaaagggaattggagataaagagactgttaaacaagccagtttcaactcctgatgtggctttcacatcggattcagcagctagtacgagtcatgctgcatcaaggattactaaccaagttgagaaaagatcaatgtcggatatcactgctttatcgaggtttcgagacgatggtaggaggaacagaacaagtgagtgttcattgcctgaaaggtacacagaggaggaaaggagaaggctgctttggttgccaatagctagaagaacagtgcaatggtttgccaatagagaaaggtgtgaacaacaaattcagggtccaacacaccatttagatgtttgattaatggactaatagttgcattttgtacataaattcactaggcaggcacagctacacatttccaaaaaaacattttccttcttaattcagtattttactaagattgttgtttgcttgttggcttttacttctag

SEQ ID NO: 200205 - DNA, 654 bp, Gossypium hirsutum
ctgatctacctattcgttaaatgcctgaggttcatgatatccccgctatctggtttaccagttcgccatgctaattccaacctactttgcattccaagtgagagagaagctcttttgaaattcaagaatcatcttattgatccttcaaacaggttatcttcttgggttgaaggaggggattgctgtaaatggattggtgtcgtctgccataacttaacaggccacgtccaccaactgcacttggctgctcctctttcaccttacgagcagtcagccctaggaggcaaaataaatccttcactgctggagttgaaccatctcagtaccctggacttgagcaataacaattttagcagcatacatatcccgaaatttttcggtttgctggagagtttaacatatcttaacctctctcgagcacaatttcagggagcaattcctcataacctggggaatctttcaaagttgcagtatcttgatcttcgaggtaatgatctcaaatcaaaaagtcttcactgggtttctggactttcttccttgcagtaccttgatttgagctacgcgaatctttctaaagcaactgattggctacaggaaatataccagacaacattggcaacatggagttaatggaatctcttgatttgtcaatga

SEQ ID NO: 200206 - DNA, 889 bp, Gossypium hirsutum
  unsure (1)..(889): unsure at all n locations
gactgcaaaaacgccaccgcaacactaaaaacccgccgtctcaaatcaaacgaagaaaccaaaagcttcgatggccatcgccgccgccatttccctctccctcccgccacaaactcgccgttcccccgcctccatcgccgccccttttcgatcaacttcttctcttcatttcgattctcttcgttccaacttttcttctcttaaaaaccctaaccttcgagtctctgcatcttccatgagcatcggaactccagagaaaatctccacgacgtcgttccttgaccgaagggaaagtggatttcttcacttcgttaagtaccacggccttgggaacgatttcattttggttgataacagggactcgacggaaccgaggattacgccggagcaagcggtgaagttgtgcgataggaacttcggtatcggagctgatggagtgatttttgcgatgccgggagtcaacggtaccgattatactatgcgaatcttcaactccgatggcagcgagcccgagatgtgtgggaatggggtaaggtgctttgcgagattcattgccgaacttgagaatttacacgggaagcaaagttttactgtgcatactggtgcgggattaattgttcccgaaattcaagaagacggaaaggttaaagttgatatgggttgaacaattcttaaagcatcagatgtgccctacaagttaccagcaaataaagatcaacctgctgtgaaagcagatatcaatgtagatggagtaacttggaatgtgacttgtgttancatgggaaatccgcattgtgtgacttttggcaacagacaaagccagaatttgaccgttgatgaactaaatttagctgcaattggtcctaaatttgagcatcatgaaatgttc

SEQ ID NO: 200207 - DNA, 635 bp, Gossypium hirsutum
ccaaggcctaaacccttctcccacagaaaacgaccgccaaaagagagataaaaaaaggaaaaagcttttgttctctattaaaatctcttcatagctcacagtcttccattcccagattttagtggaagctgagagctgagatttttatgtgtgaaaaaactctaggcatggagagagtgtggtgtaaagtgggaaagtaaagtataaagggagaatctttactgtcttatggcatgccagagttacaaggagcattgcattgaacgaatttcttcaatttgcgatttcctttttgcctttcccttctgaggatcgagtcttaaagttggatcatttgattcttcttggaaagaaataataatagggccatgaaaagtttcggggtgcatctattcttcctgctctttcttgctgcgatcgcatctgtgaccgtgcaagcattcacgggaacgtatggcattaattatggaaggattgcaaataacatactttcacctgatgacgttgtgacacttcttagggcagcgaaaataaagaatgttcgaatttatgattctgatcagagtgtccttaaagcatttagtgggacagggctggaacttgcggttggactcccaaacgaaaatctgagagat

SEQ ID NO: 200208 - DNA, 602 bp, Gossypium hirsutum
cgatctactcacggctcaggcatggctctcggaaaataaacagctcgagcaaaaggttgcacaattgagcaaagtgacttgcaatatctccgagtatacccgaatggtcctgctcgagaaaaataaaatagacaaggccatagaatcttccggagctcaaaaggtaaagaaaactgatccccacaaaatcgaagatcctttagcgcctcgaaagacactgcttcaaagcctttcagttggcttcggtgacctaactgcaaccgctgaaaacatccgtccaggattcgaagaaccgaaattacctgacgcagccgagattttcttgaaggcaacatcgaattgttgtggtcggatgtgtaatcgatgctgttgcatgtgctgcatacaatgttgttcaaagatgaatgatcaatgtgccattgtattaacacagattttcactgcattggcattcattggttgcattgaatgttgcacattgtgttgtggacaaaatgggcaataaaatgcaagtccctgccgtgttataaatttgttgttgttgtatattggtgtttatagtgtatacaaatatatttatatttattttgttgtacctatac

SEQ ID NO: 200209 - DNA, 583 bp, Gossypium hirsutum
  unsure (1)..(583): unsure at all n locations
gctttattgtgtaagaaattgggtgatccagcatcagcctcagtcggaaatgaatcggaatcgtcttcgtcgcccattgaggtcatcagaaactatcccatcccgcaattaaactctccaactgccgatgagtgtcaaagatgaaagccaccagcttgaactatgccaattaccttcagattttgggcaagtaccaagagaagcctcccctccctttcattcctggctccgattatgctggcactgttgacgccgtcggccccgccgtcaccaagttcaaggtgggcgaccacgtctgctccttcgccgccctaggctccttcgcctccttcatcgtccaagaccaatccctcctgtttgggttgcccaaagggtgtgatctggtggcagctgctgcactccctgtcgcctttgggacctcgcacgtagctcttgttcacagggctagcttgtcctcttcccaggtattgctagttcttggggccgctggaggcgttggtttttctgctgttcaaattggcaaggtttgcggtgcanttgtcattgctgctgccangggagctgaaaaggtgcaatttttgat

SEQ ID NO: 200210 - DNA, 624 bp, Gossypium hirsutum
  unsure (1)..(624): unsure at all n locations
tccatagtactaacaagggcagggaaactttttgcgttgcatactggagatggacgcattgtctggtctcacttgctacggtctctacacaaatcagaggcgtgtcaatctccaataggattaaacttgtatcagtggcaggttcctcatcatcatgctatggatgaaaatccatctgtgcttgtagttagcaggtgtggtccaagttcagatacaccaggtgtactttcttttgttgacacttacacgggaaaggagcttagttctttaagtctcgatcatgctgttgtacaagttattccacttccatatacagattcaacagaacagcgactgcatctgctgatcaatgctgataaacatgcacatctataccctaaaacttctgaggctcttancatcttcaaacgtgaatttttgaacatatactggtattcagtggaggatcaaaatggcatcatcaaggggcatgctttgaagtgcaagtgcactggcgaagtggctgatgaattctgctttgacacaagggatttatggtcagttgtattcccctcggaatcagaaaagattgttgcaactgtcactagaaaattgaatgaggtggtacatactcaagcgaaggtt

SEQ ID NO: 200211 - DNA, 677 bp, Gossypium hirsutum
  unsure (1)..(677): unsure at all n locations
cctcgtgccggcacgaggtggcagtccactggttaccccttggtcctccattgtcaacgtggggataggctttgtcatgttcgtctacatcattatccctctttgttattggaagtttaacaccttcgatgctcgaaaattcccgatattctctaatcagctctttactcacagtggccataaatatgatacaactaagatcttgacaccgcagtacgatctgaatatttctgcatataacagttatagcaaactctaccttagcccactttttgccttatctattggatcaggattcgctaggttcacagcaaccctcactcatgtggcattgtttaatggcagtgatattctgaagcagagcagatcagcaatgaagaatgtgaagttggacatccatgcaaagctgatgaaaaaatacaaacaagttcctgaatggtggttttacattttattaatcggaaatatcgtnctgtcacttatgatgtcctttgtatataaaaaagaagtacanctgccatggtggggtatgctctttgcctttgctttggcctggattgtcacccttcctattggagtcattcaggcaactacgaaccagcaacctgaatatgacattataacccacttcataattggttatatcttgcccggagagcccatttgcaaactgcttt

SEQ ID NO: 200212 - DNA, 434 bp, Gossypium hirsutum
ggttgctataacttgtttggataatgtatccgatacagatggatcccttcgagccatgagatcaaagattgcaaccttccttgcaaataatatgcgtcagaattggcctcgtgatttatacgagaaggtcgccaaaagcttgtgaagcaaatatccaacgatggtgtgaaatgcccggaaaatttgacggaatccgaggcatggtggtgggaaaagaagaggttactgatgagaactcatctccctttgtagccataaccttatataatttgaccagtttttgttagcagagttttaaaaatgtaatagttaatcggttatactcaatggtggtaatttttttttttttttgatttcttgagaatattgtttttaagaatattttaacaaatttatcggtagatttaatattataaaaaaaaaaaaaaaaaatc

SEQ ID NO: 200213 - DNA, 594 bp, Gossypium hirsutum
aaccctaagtacagttgagttgaaaagcttctctcttttaatactaattttagtttttgtttttatttatggctgactcatcatcatcatcttcttcttcttcttcatatattcacatggtgcaccgtcttatagaagagtgtttggtatttaagatgagcaaagaagagtgcatggaagctttgtcaaagcatgcaaatataaaaccagttattacttcaacagtaatataattaataggatgcgtatatgtattggttaaagtttggaatgagttggagaaagagaacaaggagttctttgaggcatacacaaggggaagccatgagagagccactgaaatagagaaaagacaaaggattcagaggagtctccatgcttacataagggacaacaatggcaacgatcaactccaccactaaatatcatcatattgttccaaactatttgttcttccttgctggtgttgaaagtgtattgtaaaagtaggcatgaaagttgaggcaatatcccttgcatgataccatggttgagtgtaaggttaccttgctatattcctaagcaataaactcactaaacaattttaattgcttc

SEQ ID NO: 200214 - DNA, 819 bp, Gossypium hirsutum
  unsure (1)..(819): unsure at all n locations
atgaagcagctcaatccggagatgctcaaaaagttctggaactcctggagcagggtttagatccctgtattaaagaccaaagagggcgaaccccatatatgctggctaatgagaaggaagtcaggaatacttttagacggttcatggcttcaaaccttgagaagtgggattggaatgctgctaaagttcctagcgccttaactaaagaaatggaggaatctcaagcagccaagcaggcagagaaagagtctaagaggaaagcgagagcaaaggaactaaagaaattgcgtaaagccagggaaaagaaagctgaggctgaggctgcccantcccaaaaaaccgtagcagtttcacaaaatcaggccactgtagcctcggtttcaaagggatggcaatcccaatcagttggtatatcacgaatctctaaagaggaagaactgaagagagctcaggctcttgagagggaaaagagagccgccgctgctgagaggaggattgctgaagcagcagctgctgccacccacagccgtgatgctcaaggcagtagcacgacagtaggatcaactactaatttacaatcgaaaagtggattatcaggtccaggtgatattagctgctcgtgttgtaatacatcattggctggaaaagtgccctttcacaggtataattacaagtattgcggcacctcttgcatgcatgttcacagagagattcttgaagatacataaccagttatatgcatatatatatatatatatcaactaggcatagcgcgattactctagttatatatgcctcatgtttttttccatagttatt

SEQ ID NO: 200215 - DNA, 708 bp, Gossypium hirsutum
  unsure (1)..(708): unsure at all n locations
aaaccctagatcacaaccgtaacacatgatcaaatccgcccaattcgattgaaagccccgaaaccctaacattttttgcaatgattagaagaatactcccttcaatatcctcagtttcttctcatttcctcaagaccaaacccatctgcagcccatcaccactccaccatttccattccctgcaatctctccaatgttccaaccccattagcaaaaatgggtcattatggtttcagggtattaggtcttatagtcttttgagcttgaatgatctgagagacaatgttcccagaaaacagaagacgaggaaagggagagggattgggtctggtaaaggaaaaacggctgggagaggacataaaggacagaaagctagaggtaatggcaagttgggatttgaaggagggcagacccctatgcggcggcgtttgcctaaacgcggctttaagaaccctttcagcctcacttttcagccggtaggattgggaaaaattgccaagcttataaatgctgggaagatagattctcatgaattgatcacgatgaagacactcaaggatgctggggccatcgggaaacaaataaaagatggagtaaggttgatgggtcntggtgctgaacaaatcanatggccaattcatctcaaagtgtcaaaggtgactgttaaaacaaaagaaacattcaaanctgcgggtggatctgtgagga

SEQ ID NO: 200216 - DNA, 629 bp, Gossypium hirsutum
ttttcataattaacatattgttatttttatcattccaaatttaattattattagagctaaacaaagttggtaattgctgctaacatacaagcactctaaagttttacaatttacaaacaaaagctgatgacatgagagcttcatcaactgtatgtaacctaggaaacaatcgtcttatccaaacggagtaggtggatgccacagacatggaggtggtggtgaccgtggcggcggaggaggtcgaggtgatggaggagggcttttgaagtgaacaggagcattgattctgggtgatggtggagttattcgccgactcctcctagacaaagctttcaactctttcgagaaatcatccgatggtgatagaggaacagactcagccgcctcaactgccaggttaagctgcgaaaacgcaagggcatttatcaacagcaaagcaagcacgtaagactccacttccatttccgaagctccctttttttgtaaactaacaagggggcctggtcttttatgaagtcttgattgaagttttcaagggtggggaaaagatatttttatttaaatgtaatgaaattattggttacactgttgttaaaatatttaaaaaaataaaaatatattaatttttt

SEQ ID NO: 200217 - DNA, 932 bp, Gossypium hirsutum
ggaattaccgtcgaaatgccgtctctgtgtgtctcttaagcttcagagacttcagcatcgacactccggccaagctcttcaggacatgctttgaattgaatacacgaaacaatgtggagtgtaaaatgctgtttaaatcctagtttcataatcatagttgttgcagctgttctttcacaagcacttaccgttacatcagttgttgtccctaaatccccttgctacgcgtttgataattctagccatcttcttgatttcagtgattggatcggtagtccttttgtgtacgaggggaaggatactgacgtggttttccgcttttgcaaagatgtggagagtagatcacaagcgggatatgtagattttggtcgatatgataagtttaactactttgttgctggttcaggccatgttgaccttgttcaagagttttacaatggcgacctgctgaattgtgagcacacctttgacaaaatgggacgcaccgcacaggtaaatattatatgcggaaagtgtttaaatgggcaatgttaaggccgacatggatgcatatgcaatgtctcttatgaatccacttgcagaaccattgttgaactggccattccatgtgagaatcctggcccacgggtattcgaaggcgtcactgttggatttcatccgccatcatgggaaattgttcacaatggtctgactcacttgggttttgaaaaatctcaccccgattttagtttcccccctgaacaccctcctgttaccccttatttgactgctattgcatccccatcccccctccttaaaaaacctcctgtccaagtccttcccgaaaaacgactgggagtcgtcttttcccggactgctgcccctgggagacccccctccaactttttccccctccaacttgctttttgatatggaaaattttgtatgggcct

SEQ ID NO: 200218 - DNA, 746 bp, Gossypium hirsutum
ctttactaagcattactcttgcatttgcttggcaaaaggctttgcgggaatggcctcaaatcatggtttacttcatcctgtggtgcaccttcttcatgtctttatcagctggcatccttctgatttgcttccaaaagcccgccacagatggtgttggggtttgctttattgcctttgcaattggtaatggtttgtatgcttgttgggtctcccagcgagtcggtttttgttgcaaagtgttgctgaaatcactggaaccggtcgacaaattccgtgatttgaaccaaccagcgtattggatgcttggggctggattcttgtggatgtccctatggatcttggctgtagttggggccttgaatttctactacccagcattggttataattgcattactcttaagcttgtgttggacaactgaagtgatgaggaatgtagttaatttaactgttagcagagtgattgctttgtattatctaagaggaatgcagtctaacactcagttttgcttccaaagagccttgacccggaatctcggaagtgcttgtcttggttccttattcgtgccagcaatcgaagccatgagaattattgccagaggcttgaatttgcttgaaggagaagatgaattcatgttctcttgtgctcattgctgtctcaacgttatgcaatccatcttcagatatggaaatggatgggcatatgtacagatagctgcctatggaaaaggtttcgttagggcatca

SEQ ID NO: 200219 - DNA, 350 bp, Gossypium hirsutum
catatgtctacggaataaatggcgttttcaccgatgatttcccagcaaagccggcaataccattcaattataccggcactccaccgcctggtctacaaacgatgaacggtaccaaggtatacagattggcctataattcaacagttcaacttgtgatccaagggaacactataatagcacccgagagccatccaacccatcttcacggatccaacttcttcgtagttggcagaggggctggaaacttcgatccggaaaaggatccattgaaattcaatcttgttgatccgggtgaacggaacacggataagcgtaccaactgcagggtggactgcaataagattcagagc

SEQ ID NO: 200220 - DNA, 618 bp, Gossypium hirsutum
  unsure (1)..(618): unsure at all n locations
gccaaccaagccatgtttctgcaaatcctcctctttgtagctctttattccatcactgtccacttataccacaagttccaaaaccatcctcccaccccttttccctctttaccattcattggccacttctatttacttctcaagaagcctctccaccgttccctcgccaagatctccgccaagcatggccgtgtccttctcctccattttgggtcacgccccgttgcggttatctcatcggcatcggctgctgaggaatgctttaccaaaaacgacatcatctttgccaatcgccctttacttttatacgggaagcatctaggttataattacactagccttatctgggattcctacggcgataactggcggaactggaggcgtttatccgtcgattcaacttctttcggggcactggcttgcaattgctttacgccacacgccttgatgacagtccgtttgctcttccggaagctgttcaagggatcatgatcgaactgtggacttgaaatccagacttttcgagctgatgctgaactgatgatgcngatgatagccggaaaagatatacngcnacngtgtgctgtcgtcnaagaaagcacccgtttcgtgaaatat

SEQ ID NO: 200221 - DNA, 433 bp, Gossypium hirsutum
ccctctcttccgttccaagattgcagtgtggactacggtagtcaacccatttaccaagtatgcattaacaatgtcaccagtggcaatgagtcttgaagagttgattccatcaacccatcttaagtctcatatctatgcaatcataattagaacatcgcttgtgatctcgaccttgattgttggtctcaccatccccttctttggattggtaatgtcattgatcggatctttgctcacaatgcttgtgaccttaatacttccgcctgcttgttatttaagcatcttgaggggtaaagtaactcgtattcagagaacactttgtattatggttattacagtgggagtagtttcatcagcttttggaacatactcagcactctccaagattgttgagaatttgagaagctaaaagttctttcccattttaattttt

SEQ ID NO: 200222 - DNA, 318 bp, Gossypium hirsutum
tggtcaatccatatctagtttgactcctgttatggagccatattgtattccacatgcagtcaaaatgtttgatagcatgtcggatgaagttccagaagctagtctgctatactttttcgcacttagattattgctcaataaggacaagcgaattatgtttttatcaattaatcccaagattagagctttgtggcttaagacggaaatggaggatagttgaaaattttctgatcttttagggttcaaagatatctattatgtgactaaacaacaatgctaaactagttttatcaatagttatttatgtttgatttttgg

SEQ ID NO: 200223 - DNA, 390 bp, Gossypium hirsutum
tcgttcacgcgtccgcccacgcgtccgttttgcctcgctgtagcaccggtctatggccaatactactccaaaactatcaaggcaggtcctcgggtggaaaagatgacccgacttcgcttcttctaccacgatattcccgatggaaaagatcctactacattcctgatagctcaggccaacatcacccggaaattctttgccccatccccatacggaagcttgtattcaatggatgatcccctcactctagggcctaaccgaacatccaagatggttggaaatgcccaagggctctacttagcattaagtcgagaccctaccaagttctttgcggttttttacgctgattttgcgtttaccactggcaagttcaaggggagctcctttagg

SEQ ID NO: 200224 - DNA, 434 bp, Gossypium hirsutum
tttatgcgtccgtgaagccacatggtactgggagtaatgtgcggattggggtgctggctgccactgaaactatagctgctgcttcttaccaggatcaactagggaatcaggggtttgaggtagttttgccagacaaagcaaccatggaacacattctaattccagcgatcgagtcattgaacatacgagacaccgtaggggctcggaatctattaagaatagcaatccaggtgcttttgatcggggccgtcaatgttgtcatccttgcttctgatgagcttcagaatatattacctagagaagatcctcttctgaagaaatgtatggatccgatggatgccttagcccgatcaaccataaaatgggctaaaactggaaaacaaggtatgcagaagaatacttgctagtattacacacccaaaacttgtgaaaac

SEQ ID NO: 200225 - DNA, 450 bp, Gossypium hirsutum
atcactgcgtccggaattttttccccaagttgagcggctctcatttgtctcgcctttttgctacgctctccaaactcccaaacaacttcaccaaaattccttccaagtatcgaccccaagccattcgagatgcccaacaagctctcacggattacctccactgttcccgttacatccctttcgtctacgccgagcacattgctaaaaactccttcttttccctctcttctcatcatctccggcattaatttctccaccacgagcttcaatcgaaacgtcctcagattcctcaggtaccatcccattaacgagtatgagtttttcttcgaaagtataggcattgattatgaggaagttggtggcctattgccgtccaagaagttcttcttttctgaagatgagacggttctggaggctgcttgtgcgctctctggatttgggtttccttgg

SEQ ID NO: 200226 - DNA, 635 bp, Gossypium hirsutum
aaacagaacagggaagaaagagaagggtaaaaagaatagtgatgatgccatgaaaattgatgttaacgaaactaaaagcaagaacaaagaagttagtgtaagcgatacaacactgcatggggaggagaagcaacttgtagaagatgagggcagtagtggtgaaaaggatgataaattgggaaatggtgataaggtttcaaagcaacctgttgatagaaaagggaatacaaagaaagaaacaaataccaaatcaaataaatcatttaaaggaaagaaagcaaaggcaacggcaaagcattccagcaatgtatgtgagacatgtggagaggaattccaatcgaagaataaattacataagcatctgggagacagtggtcatgctacgttgaaattccgatgataacaatgaggtatcctatatcactatttgatttattatcaaatgcagctaattcaaaagtagcatttccgattttggattttattttttattttttcattaaaaacatgaacattgaccaggtcttgaatggaaagatctattcgtgtaaaatgttacccttattttgagttcaatagattgaatgtggctttaaacagccataaaattcgttaaaaaatataaaaaaaaaatt

SEQ ID NO: 200227 - DNA, 428 bp, Gossypium hirsutum
gcgctttctcgtgcggaaacgttgaccccgttttatcaaggacataagaacactagttacttaaaccctgttttcgtagggcagcaatttgttagacttggtgctgatgagacatcggagtttaatgaagacagggttaatggggtttatgatatcgatgtgaagttgtatttgaggattaggtttaagcttgggagggtcaaaactggtaggtttaagcctagaatttcatgtgatttgaaggttcctttgaacactgggaatggtagcttcggtggtacgtttaaaaccactagatgtgatttggatttctagtatgaatctgattcatgctttggtccagtctgtgattctatcttcattcagggatgtatacattttgttcttgtttttgctataggtatgtgaatatatgttgatttttggcg

SEQ ID NO: 200228 - DNA, 624 bp, Gossypium hirsutum
attaaatctctcgccactcttgttgatgagcaaagtttccccgagacaaagattggacttgcttctggggtttatgcgtttctttggttgtacacctctatattagggtttaagccggctacagtcaccgtttcttctgagcttcctgtgggtgccggtctgggttcatcggctgcatattgtgtttcactctcagcagctctattagctctttcagattccgtgaaattggacgtaagccaaaaaggatggtctacgtttaaggagtccgaggctgaattggtgaataagtgggctttcgaaggggagaagataattcacggaagaccctctggagttgacaactcagttagcacatttggaaatgtgatcaaattcaaatccggtgttatgacccgcgtcgattccaatatgccgctgagaatgctcattaccaacacaaaagtcgggagggatacaaaggctttggttgctaatgtttcggcaaggaaatcaaggcatcctgatgccatgtgttccgtgttaaatgccattgaaacctcagtgatgaatggtctaccatcttccaatcgcatgctgtggatgatcctatattatctggcaatgaagagaagcctcgagaag

SEQ ID NO: 200229 - DNA, 520 bp, Gossypium hirsutum
tattcttcttcatttctctttctatttttctctagttaacatggcagagttagaataccaagctaataccaaaaccaacagcgccactactgcacgtctaaagctcttcggcttcaacgtctcggaagatgatgatgttttggaatccagaaccaccaaagatccatcatcagggtcttcagagccaggtggcttccctgctcctggtgaccgcaaatacgagtgtcagtattgttgccgtgagtttgccaactctcaagctttaggaggtcaccagaacgctcataagaaggaaaggcaacagctcaagcgtgctcaacttcaagccactcgaagcgccgcggtttcgtttgctaggaaccctatcatctctgcttttgctcctccaccgcatctcttagcgtcggctacacccgtcgtggtgccagctgcggcgggaccgtcttgggtttacttgccacgaggagggccacctcctttccacgtctcacatggctgcgtgattccgagcgctggtggt

SEQ ID NO: 200230 - DNA, 320 bp, Gossypium hirsutum
taattgccattgtttctggagtagggcagagaaaggaagaagaagaagagagatggggcagttgtgcatagagctcaacgtggatatgatgggacttgtgcttgcgctagttatcgccatcgctctcttgctttcctgcgtcaaccaacctccccggccccgccgaccaatggttgttactcatcgtttaggttggtaaacccttcgttttgcgtctttactccccaagttactcgagtaacttaagtctcataaggtcattgaaaattgaatccatgtataaactcctttatttttttgtgaattaagtaattgtataa

SEQ ID NO: 200231 - DNA, 302 bp, Gossypium hirsutum
ccttcgcgtccgcccacgcgtccgctcagtgcaccagggacctttccagctctgagtgttagaagtgtcttgacggcctaatcgtggagcttccgacctgctgtgatggaaaagaaggtggaagagtcgtctggtggcagttgtaactttagatatgaaatccacccttttgttaatgcataattaaacctttgggatcgttcaaaagctaaagactatttctgccctgcaattaattacgttaatctaatcatatatattagtctgggaatgtatttatagtaaataaaagaaagtatgat

SEQ ID NO: 200232 - DNA, 621 bp, Gossypium hirsutum
  unsure (1)..(621): unsure at all n locations
tcggacgcgtgggttcgaaagtagttcgtttaaaggtcgatttttactgccctgactgctaactgttgtttctcagatttctctccgtttgttctaatccgcgacttgatctccttctccaaatcttcaaaggtattgaaatggcagaatcaaagacattgagaaagcctattttcaccaaggtggaccaacttcgcccggggactagtggtcatactcttacgatcaaggttgtcaatacaaagatggtatttcagaagggtcgtcctgatggtcctcaagttcgtcaaattcggattgctgaaagcttggtcggagacgagacaggaatgattatctttacagcaagaaatgaacaagttgacttcatgaaagaaggtgctaccctaactcttcgaaatgcaaaaattgacatgtttaaggggtcgatgaagcttgcantggacaattggggtcgtgttgaagtcgctgaacccgatagtttcaaggtgaangaagataacaatctgtctttgattgaatatgagctgattaatattgttgaagaatgacctttgaccaccaacccactccggatggtgttcgcattgcttttgaagaagaanatctgctctggtaaac

SEQ ID NO: 200233 - DNA, 491 bp, Gossypium hirsutum
  unsure (1)..(491): unsure at all n locations
cttttctctctctatttctcaccacttcatctgcatattgaacagtatgggagaaagcttgatgctctctggttctagacagtgaactattgaaaggagagtttagctctgtctgattttacaatgccagttccccttgcgccatatcccacacctccagcaccctacactcctcctgctgccaatggtgctcaaagccaacttgtgtgttccggttgtcgaaatttattgctctatccagttggagcaacctctgtgtgttgtgctgtttgcaatgcagtaacagcagtgccgcctcccggcacagaaatggcacagttggtttgcggaggctgtcataccttattaatgtacatccgcggagcaacaagcgttcaatgttcgtgttgtcacactgtcaatctggccttggaagcaaatcaggtggcacatgtaaattgtgggaactgcangatgttactaatgtaccagtattgagcgagatccgtaaa

SEQ ID NO: 200234 - DNA, 594 bp, Gossypium hirsutum
gaagcgaagtaggttcccccgaccaccacgcagtccagatgacagaatcgtctccatcctcccgcggtgtcaaccttgacaagttcttcgacgatgtggagtccatcaaagacgagctgaaagagctggagaggctgaacgacgacctttcctcgtctcatgagcagagcaagacattgcacaacgcgaaagccgtgagagatttaatgagccaagatggatggggacgtggccatggcgttgaaaaaggccaagcttatcaaagttaggctggaagcgcttgaccggtccaacgccgctaacaggagcttgcctgggtgtggaccgggctcttcatcggaccggacgaggacgtcggtcgtgaacgggttgagaaagaagttgaaggattctatggaaagctttaacgagttgagagagaggatctcgtccgagtatacaggaactgttcacacaagatattttacggttacgggggaaaaccctgatgacaagactcttgatcttttgttttctttgtgttattttgttattgtgaatttgaagtagtcctaatcacccttccttgccagaaaaaaaaaaaaaaaaaaaatc

SEQ ID NO: 200235 - DNA, 435 bp, Gossypium hirsutum
ctcacgcgtccggaccgggtgggctatgatcagcctagtcaagcagtagagtggctgattaaagcagctgctgatgcaattgcggagcttccttcacttaacactgcatttcctgataccccaaggcaattgagtgatgatggaactgaacaagggtttgactcggctgaagtagagttagatggcgatccgaataattaccaacaaaaccaaagtcagcagcacctttccttgtccaaatcagcttgcagtagcacgtccgagattagcaagaactcgggtttatccctttccaggtctgagaaccgtgtaaaggcccgggaacgggcaaggggaagagtagcaaaagaaaaggggaaagagcaaaagactgacattgcacatcaacaaaatgtgaaccccatttctcaaaactcttccttcactgagttacta

SEQ ID NO: 200236 - DNA, 1389 bp, Gossypium hirsutum
gtggatcattatggaaagaaattagaagacatagaggagaatatgagattagagcgatctgaagtttcattggcaacacaagaagttcgagcagcttttgtctctttcaagtctcggtatggtgcagcagttgctttccacatgaaacaatcaattaacccaacagagtgggtcacagaactagctcccgagccgaatgatgtctactggccctttttttcatcatcattcatgagaagatggctttctaagattgttgttattgttgcatgcatactactgacaattctattccttattccggttctggttgtgcaaggcctcactaacctaaatcagttggaaatttggtttccgtccttgaaaagcattctaaccataacatttgtcagtcaggtaattacagggtaccttcccagccttattcttcagttgtttctcaagattgtgcctccaataatggagttcctttcctccattcaaggatacatttgccacagtgatattgagaagagtgcatgtaacaaagtgctatggttcactatatggaacatattttttgcaactgtattttctggatcagttttgtatcaggtttctatcttccttgatcccaagcatatccctgcaaagctcgcctcagcggttcctgcacaggcttctttcttcattgcttatgtggtgacatccggatggacgagtacttcatcagaactttttcgcataatccctctcatttggagtctgatacgaaaacccttcacttgttgctcagacgaagagtttgaagttccatcgattccttaccacagagacattccaaggattcttttcttcggacttcttggaattacatatttcttccttgcaccattaattttgcccttcctcttggtgtacctctgtcttgcttatatcatctatcgaaaccagttcttaaatgtatatgcaccgaagtacgagaccgcagggaagttttggccaattgtgcacaattcgatgatattctccctcgtactcatgcaagctattgcaattggactctttacactgaagaagctcccattagcatcaacgttaattttccctcttcctgtcctcacacttctcttccatgagttctgccggaaacgtttcttgccaaatttcttcgcttaccctgccgaggttctgataaagagagacagggaagaccggtatgtatccgaaaatggccgatttctacgataacttagtggctgcatatcaggatcctgccttgctaccaattcagttttctgcaaattctgatagtcttaatagccctcttatatctgctgctcaagttcgacattagccatcggatgtatttgagaaaatctatacttaatacatgcttggaacttattt

SEQ ID NO: 200237 - DNA, 387 bp, Gossypium hirsutum
tcgttcacgcgtccgtttcaatcacgccgttgcactccctctgccgttccagtctcttcccttttccgaccagataacggcgaaaggaggacacccaaatactctttcaacggtatgaaggtcatagaggacgtgcgcggagtgctgaacgtggggcatggaagcggttgctgcggcgctgaggcacaaaagctgcctagggtttctgctgttgaaaattgttagggctaggtattgggccagtgttggattattgtatttgggccaatgggtttgtaatttattgtatttttatttccaggtttatgcatttgggcccgggctaaaatggcctattacaatgtgatttaccattttattaattttagttttttattttgatacccc

SEQ ID NO: 200238 - DNA, 567 bp, Gossypium hirsutum
cttcaagcagtggtcagggttctcaaagggcagcagctgtagctgctctttcgtcggttcttactgctgaaaagaagaagcaaccgcacgatggatctcctacaaaatccactagcagcactcctgctgtatccagcccactttctgaagcacagagtgaggcagacccttctgaagctgaggattctcaattggttgctgaagccaaggaggctggtgtagcatcccaaaccaatggggatgattcagaaccaaagcaaaagataccgcaggacgagaatgggagtggaagcactcaaagtgcatatagttatgagcaactgaaagccataactggtaatgctgcaaccggaattgatctcaaacggagagaggcttatttggcggataatgagttccagacagtattcggtatggaaaaggaagcattctataaattcccaaagtggaagcaagacctgaagaagaagaaagttggtctattctaagtgttaggggatttaaacaagttattatgtgcttcatctccattcaactagcaatccgtcattcattttgatctttgac

SEQ ID NO: 200239 - DNA, 600 bp, Gossypium hirsutum
  unsure (1)..(600): unsure at all n locations
tgtcttgacaacaatcacctccaaccccaccaagaaaattttcgaaattactgcttcctctatcaactggttctgaaatccaaaccctaattttcctaatccgaaaccctaatcgaactaattttcaaatcagttaagaatttccggccgaatcaggaaccctagattccatggcgtcgaggaaaaaggaatccgaagggattgccttgctatccatgtacaacgatgaagatgacgaagaaatgggagacatcgaagaaggtgaccaccggcaaaaccaacaaactggggaagaagaagaacaacaacaagaagggcagccgctagaagaagaaaacgattacagagaatctaataacaatatggaagaagattcgagaaccaacgataatacgcctccttttcctcaccaaaacaccattctttcacaacaacagcaggagccttctgtttcttcgccgcagcaacctcaaactttggtttcgtcgaatagaaatggaggaggaaggctgaccattgttgattatggccaccatgaatctgccatgtcaccggagcctgaggaaagggaactangaaacagtgatgacctcatgatta

SEQ ID NO: 200240 - DNA, 472 bp, Gossypium hirsutum
tcgtttagatcgcaaatcggctcgcctttctgtttaaatgcttacccttttctagcctacatgtctaataaagaccaaattgatattaattatgctctcttcctaccaacgaaaggagcagatgatccaaaaactaagttgcattatgataacttgcttgatgctcagattgatgcagcctatgctgcattagaagatgccggatatggaaagatggaagtcattgtcacagagaccgggtgggcttcacatggtgatgagaatgaagctgcggcaaccgcaaacaatgcaaggacttataattacaatttgcggaaaaggcttgcaaagatgaaaggaactccactcaggccaaaaagtgtgcttaaggtttatgtttttgcaatctttaatgaaaatttgaagcctgggccaacgtctgagaggaattttggattgtttaaacctgatggaagcatctcatatgacatcg

SEQ ID NO: 200241 - DNA, 420 bp, Gossypium hirsutum
ttggtttgacgcttgcagattcgattcttgcgggctgttaattaataaaaccaaagaagcatcaaatgtcaccaatgtaaagagccaaccagaagtatgatctgatcagcggtgtatgatgtagcagctgcgtatgcaccatccgcccaccctatgttattcggattaggatgtaagtttcaaatataaatgttcgaagttatttcatgtatctggaagtttttaccttggtattcatatcaatatttgtggtgtgtaagaccaatcaagctctattttcttttgttttgctcttgcaagttgtaatcaacttaagtgcttatgatgatgcatagcttccgtatgaaataattgtgtatatagctcttaataggcttttcccccgcctcatgagagtgattattaaggggcttttattta

SEQ ID NO: 200242 - DNA, 557 bp, Gossypium hirsutum
ccttcgcgtccgcccacgcgtccgaagagccacccttcttgtttcttcttcttcttcgtcgcctaacaaccccggtctctctctgctttgatttggtatgtggctcacctttaaacgctgttgatcatcaagctctaatcagcaatcatggacgctggtgatcctagtttcaacaaagctagtaacccttatgttactgagcaagagttagaagataacgacaacgtttcatcagaaaccggcgctgagtctcctccttctaccacgtttcaacagcatcaaactctctcctaaaagagggagatccatacagaaaagagttgtgtcagtgcctatcaaggatgtcgaagggtcccgctttaaaggtgagagtgctccaccatccgattcttgggcttggcgaaagtacggccaaaaacccatcaaaggctctccttatcccagaggttattatcggtgtagtagctcgaagggatgcccggcaaggaaacaagtcgagaggagtcatgtggaccctaaaatgtagtgatcacgtactcctgcgaacacaatcaccc

SEQ ID NO: 200243 - DNA, 412 bp, Gossypium hirsutum
gcctaccacgcgtccgcccacgcgtccgcccacgcgtccgcccacgcgtccgaagaaatcacattattctcccaaaaccatggcaagaggttcctctcactcgcaaaacaccgcttcctccaccaccacccgtcccggcgtcatggctcctcgaggttccgctgcagcgacggccggaatgcgtcgtcgcagggttaccggaggcgctgctgccacctccgcattgaccaccgtcggctccggaacgagcaacatgctccggttctacacagactatgctccgggcttgaagatctcccctaccgttgttcttgtcatgagtttttgcttcattgccttcgtcgttgctctccacgcttttggcaagatctatcgcgccaaagctggagccggagctggaccgtgaatcatg

SEQ ID NO: 200244 - DNA, 520 bp, Gossypium hirsutum
tgcccacgcgtccggcaagatgctggtgacatctatcatcatacacactattttagaggtcatagtcatactgatacacaaagcagccagatagagaatgatgaggtcattgctcgtacccttcaggaagaattctcgcatcttgctgtggcagaagcttccgaattttctcatgctggggaagagcagtcgcaagcatcctgtgaacctcatgattggcttactccttcaacaacagactactgttattcaggctatgaatatggccgggatgaatccgatgatttggtgccacatagttcatgctctagttctagccccagtgattcagaggatttttctggctctttggagctgactgagggttatttacttgatgatgaagtaggcaagaggttgaatcaaatggttcctattcctcatgtccctcgaatcaatggcgaaataccatcaattgatgaagcaatgtctgatcatgagaggttgttaagcagattgcaggtatatggtttcatggagc

SEQ ID NO: 200245 - DNA, 498 bp, Gossypium hirsutum
tggaatatttacaaggctttggcaatgcctcaggaggctattgtctgttatcagcgagctgttcagactcggcctaactatccagtagctttggggaatctggctagtacatactatgagcgaggacagctggatttggcaatccaccattataagcaagctattgcctatgatcaaagatttgtggaagcttacaacaatttgggaaatgcattgaaagatgtgggtcgtgttgatgaggcaattcaatgctataatcaatgtctcacattgcaacccaaccatccgcaagcacttaccaacttagggaacatatatatggaatggaacatggttggtgctgctgcttcttactataaggctacattgactgtgacgacggggttgtctgctccattcaataaccttgctgtaatctataaacaacagggaaatcacatggaagctataacttgttacaatgaggttttacggattgatccattggcagctgatgga

SEQ ID NO: 200246 - DNA, 504 bp, Gossypium hirsutum
cataactggcacatcaactggcttgtccccatgtgtggcggtgttgtgccgcattgtctgaaggtcggctcacctccgaatggagctcccgcggccataaaatccgctttgatgacctctgcttatacagtcgacaaccgtggcgaaaccatgctcgatgaatccaatgggaatacttccaccgtgttagattttggatccggtcacgttcacccctctaaagctatggatccaggactggtttacgatatcaccacaatggattacatagatttcttatgcaattccaattacacgatcaacaacatccgagtactcaccaggaagaatgccgattgcagcggcgcaaaacgagccggccatgttgggaacctgaattacccatcactcttccgccgttttccaacagtatggcaggcgtaacatgtctacacatttcatcagacgagtcactaatgtcggtgaaccgaattcgatctataagttacaattcgaccaccgagc

SEQ ID NO: 200247 - DNA, 463 bp, Gossypium hirsutum
tttttatgttgaggccaattatatacttaataccacacacaaatggcatacattttactaactaatgcattacatattataactcaatacgcatccatcatttactccataaccgaacaccatcatatgaaaatatatacctggagatattatatatgtcatgccaatacatcatgcgcaaacatatatatatgtgtgtaagagccgaatcacaaggttgattataaccaaacataaacataaatccaaaacacaaatcttacctaccatgcaataagcataaatcatacttatggatataccatggccgaatacatcacaacaccttaccatttcaattttgatcatggttaaacaaagaacttaatgtctcactcaaaaatgctaaaaagaaaaatccaagagttaatcaatccaccatcacatgtatcattaacaagcttcacatttagcatgcaatgac

SEQ ID NO: 200248 - DNA, 676 bp, Gossypium hirsutum
  unsure (1)..(676): unsure at all n locations
catctgctgggccagactacatacctggcctaggcacttggcatgttatcagaaagcttccaagcacattgcactatgaacatcgtgagagacactgtcctgatgaagctcctacatgtcttgtccctctgcctgaaggatacaagcgctcggtaaagtggcctaagagtagagataaaatatggtactacaatgtcccccacaccaagcttgcagaggttaaggggcatcaaaattgggttaaggttactggtgaataccttacctttcctggtggtggaactcagtttgtgaatggtgctcttcattatatcgattttattcaagagtctgttcctgaaattgcttggggaaaaagaacccgtgtgaactttgatgtggtgtgnnnggtggctagctttggtggctatctctttgaagaagatgttcttgcaatggtcatttgctccaaaggacgagcatgaagcccaagtgcagttngcacttgacgngggaatcctgcatataaatgtgatgggcccaaaggctaccttctantctgcntgatgntggcactggcacgttgcaggttcctgcacgtgaagtggcaactttgtatagtaccgagtctcgactgtggactcattgtcggtctcattacaaacttctgaagtggcttgcaaagctgctacaaatg

SEQ ID NO: 200249 - DNA, 401 bp, Gossypium hirsutum
cctatcgcgtccgaagcaacagacaatggaaacggggggaagggaacttgaactgtggcagcgacaaaaagccacatctgaacaagttgccataaatgcaaagcagcggcagggctccggtggcgtatggggttggcttgcaggaagaactccacaaaatgctgatgatgcttgaaaacctaattaaatagtgcttgcagggaagtcatacccggtgcaatgttctattcactggatcaagagctcaaaccatggatacagcctcttcttgcaaagccggggggaggttgcggacattaggaccttctgcaaatccttgttttagtaggaacctaacgcattgggcactctctttttgtcaaaattttgggtaaaatatacatatatgtcctgttctactt

SEQ ID NO: 200250 - DNA, 226 bp, Gossypium hirsutum
ggtatctcaaaataacagcaaatgtgacttgtaggctgtaccagctttatggatagctgattagcagcaatagcagatattttcatttatctgtgttcaattaaaggagttccataaaggctggaacgattgtttgaagcattagcagattttaactccttggatgcatgttcatcctgtaattttaacagatagctgattacgagcaagtaccagattttttttc

SEQ ID NO: 200251 - DNA, 427 bp, Gossypium hirsutum
  unsure (1)..(427): unsure at all n locations
cgacccacgcgttcgcttacgcgtccgcccacgcgtccgcccacgcgggcggcccaacaactaaataaataagaccaaatacctaaacccaaagcctaaaacaacaacctacaggcccaaactaaaacaccagcctagcccagaaatttaacactttctgaggaaccctagggttccccctttgcaccgcttcgctcacccacgtgacgtctgacaactttcaaccaccctgtggccccttcccatcacttccaaagacctgcaaatagaagaaaaggaaacagagcagagcaaggcagctggcaacagtagtgaaaacaatagtaaaatagggacttgtaaatcggctataaaaccgaaagaaaancaatgtaaaagggggatttttctttttgaaataaaaaacagaggaaatcggttcaagttt

SEQ ID NO: 200252 - DNA, 226 bp, Gossypium hirsutum
tttattttcaacttcctaagaattttcttcccctttttttatgttatgtttttttttctcttagggacataatctttgttagatttaggtttttagaacccagtgatcagtatatatcataggatttgtgtagctgtatattgtagtataatcatgaaacagtattatgagtggtttgtactataatcatgacatatcgctctcttttactagtacccttttgctg

SEQ ID NO: 200253 - DNA, 442 bp, Gossypium hirsutum
ctggttaaaggcagaggtgggtctctgttaagagagaaaatggtggaaggagcttgcaagaaatttgtatgtatcgttgatgaatccaagttggtcaagtatttgggaggcagcggtttggctatgcccgtcgaagttgttcctttttgttggaaattcactgccaaaaaactccaaaacttgcttcgagattctggctgcgttgccaagctgaggaatgatcgtaaagggcagcctttcgtaaccgataatgggaattacattgtggatttgtatttgaagaaagatattggggatttgcaggtggcaagcgatgctattttgaggattgctggtcgtggttgagcatggcatgtttcttgctatggccactactgttatagttgcaggggagcttggaatcaccatcaagaataagtagtacaaactcaaactaacttta

SEQ ID NO: 200254 - DNA, 380 bp, Gossypium hirsutum
gtgcgttgatagtaaggggcaagtaagcaaacttagaaataagtcttctttttcttcaatttagaggaatttgtgggggtagaataaattaactgcggaggttcatgaaaacgatttggatgaaccttgggttaaattgaattgggtttttagttaatatatcgaaatcgatggactcaacttttttaatgggtttagaccttgaactcatatttatttgttgctgtttttgtggttggtattggtttcatcctttaaatgcttggtttagggaagaactgatcaaccacacgttagtgatatgagcaagataatttagaataggttaaaacattagtgcgacatttcttaatgctatgagccagataggtttagaatgc

SEQ ID NO: 200255 - DNA, 345 bp, Gossypium hirsutum
caacattacacatcaacacctgaagaagctgctgcagatgccatcaaagcaggtctggatttggattgtgggccttttttggcgcaatacactgaaaatgcagtaacaagaggattgttaaaggaggctgatgttaacagtgccttggcaaacacgctcacagtccaaatgagactcggcatgtttgacggtgaaccgtctgcacaaccattcgggaacttggggccaaaagatgtgtgcacacctgctcaccaagagctcgccctcgaagctgcgagacaaggcattgttctgcttaacaatcgtggtccttcattgcctttatctcatttacgtcaccgcacg

SEQ ID NO: 200256 - DNA, 492 bp, Gossypium hirsutum
  unsure (1)..(492): unsure at all n locations
gctatggtatgccgtcacaaattacaggacctggatctttgttcttctctatggctactccatgggagtggaattgtcaactgataatgtcattgctgaatacttgtacgacaggtttaatctcaaactacacacagcagggataattgccgccacctttggcatggcaaaccttgttgctcgtccctttggtggttacgcttcagacaaagcagcccaattatttggcatgagaggcaggctttgggtcctatggagcttacaaactttaggaggtgtcttctgtatctggctaggccgtgccaattctcttcccattgctgtcctggcaatgatcctcttctccatcggagctcaagccgcatgcggcgccacgttcggcatcatccccttcatttcacgacgatccttgngaatcatttcgggtctaaccggtgccggtgggaacttcgggttcggattgacacaattaattttcttctcaacatcgag

SEQ ID NO: 200257 - DNA, 459 bp, Gossypium hirsutum
acgcgcgtcctctcgtccgaaacgccccatctccgatgatgaggttgcatggcttgcaaagttgcttatttggttatccagttggttgaatgaaagccttggcctaaaccgcccagaagataatgatgtgggttctaagtggttctatgtgaacatcccaggtgatgcagtaaacctgaacggatcaggtgagatcgtgaaaactctggtttgcttaattggttcttggcttttaatgatgggaacaacaacaacgagattaatgagaaaacacggtttaaggataaatcttagggtgttggcttccaagaaggtggtgatggtgctgctcatatttgttgtatttagtgtattgaagaaagcttgtggattgttccattgatagtgtaaataaatcaaacatacgaatagggaggaaatggttctcagtttttttggatttgatctcctaaagcaaca

SEQ ID NO: 200258 - DNA, 383 bp, Gossypium hirsutum
ctctcgcgtccgatgacctcgtagagttgaatcacctctcaaaactactgtataatcaatatgctgaactgattttgctgcagaacaaagattgttgcatatatctttgatcagcacagtagcctgcaaaatgttaaatctttagtcggtcaagagaaaagtaaagagaaatttgatttggttgaaataaattttcactaaaaatatttccatggtaatgcaaaatgagatctagggataaaataacttgacatttgacgaaaaattctttaccttctcagagcttagtgctctagagttagtcaaaatatagaagcatataggttctttcctaaactgttcaacaagtgattctatactcctgcagatggcaaacataagtg

SEQ ID NO: 200259 - DNA, 207 bp, Gossypium hirsutum
gtcatatttaggaagtacaagcaaggttatacgtgaggtgtaggtggtttgactgcagtttctggttctgtgactttgtataactaagcagatgttttacttgtttgcatgtggttgaaaatttgtgttggtactgaatgttttcattacagggtgtagacatttgtgtaagagcagtgatgagatgtgtccaatattttactgttt

SEQ ID NO: 200260 - DNA, 420 bp, Gossypium hirsutum
ttctgtctctactcgaatgctttatgctcttgcaaagcatccttttacccccaaaagatatttctctatagatcgtgtgttcagaaatgaatctgtggaccgaactcatcttgcagagttccatcagattgaaggcttggtatgtgacaaggggcttactcttggtgatttgattggtgtcctgaatgacttcttctcacgactaggaatgtccaagttgcgtttcaagcctgcttacaacccatatactgaacctagcatggagatattcagttaccatgaaggcttgaagaaatgggtggaaatcggaaattctggcatgttcagacctgaaatgttgcttccgatgggattccctgaggatgttcgtgttattgcttggggactttctctcgaaagaccaactatgatactctacgg

SEQ ID NO: 200261 - DNA, 460 bp, Gossypium hirsutum
cccacgcgtccggttttattttcattaaacttgcttaaggagagaagggtgacataaatcaatcagtttcttatttgctgctggggggactgacaggtttcagtaactacaagcgatggcagtggcaaatttccctgcacttcagtttaaaacttgcgatatttttcgttccactccaaaatgtttcaaattgctccccttacaaaagacaaatctttttgttaagacattagtagttgaagcaaaggcaaataccagaacagaaagcgctaaaattaggaacagaagaatgctaaagaagtttaatggcaccccaagaagaccaagactgtcggtattctgttcagagaagcagttgtatgctatgttggtcgatgacaaaaacaagaagtgtttattttatggaagcactttgcagaaatctattcgtgacgatcccacttgcaccaccattgatgct

SEQ ID NO: 200262 - DNA, 483 bp, Gossypium hirsutum
tcctcgcgtccggaagatttttggatctgttgaccaacatcatttccctactggatttgggtctggcataaatgcaactttccatcgaattcttgaacttcaggtcccaagtgaattcatgttaacatctgaatctagcgttgagataaattcaatcaggaccgtcaatgaagcacacagcttagattgcaatctaaatcagttccgctgcagagttgttgctgttcatgtcctggttctagagaagagcaaccggaaatgtgataacataaaatcaaatacttacaccagacctcatagtgttgacattccacttgcttgctttatattggatgatgggtcatcttcttggtgttgctgggctaatgctgaaagagcggcaacattgctgaggctgcagaacactgccaggacctctaccatgtatcatcttcaaagaattgtagaggagcatgacaggattactgtgaaaagcgctagatc

SEQ ID NO: 200263 - DNA, 701 bp, Gossypium hirsutum
cctgggcggtttcggcaaataattatcaatcttgttggaaattcaattaagttcacgcaggataagggacatatttttgtctcagtgcatctggtagatgaagtgaaaggtgcattacggtgatgtgggagacatagtgttacaacaaggcttgaacttggttcaagatatgtcaagcaagacatacaacacgtttagtggctttccggtggtagacagatggaggagctgggagaattttaaaacattaaatagcacagatgcagtggaggaccctgaaaagattaaattactggtgacagtcgaggatacacgtgtgggaattcatttgggtgctcaagatcggattttcactccctttgtggcaactctcacagttcaacttcacgattttgggggggaattgatatggaagggccttttgcaaccattggggggaacttacctgggagaaaatgggtttccaggaaaccctgtttgggaagactttcaaattaacggattttttgcaagggaaaaggggtttttggtatccaggaggaacattttgacccgggtttcaaatttaagggttgaaacccttggttgtaattaaggaaccttcaactggggccataaaccctttacggatttggaatattggggataaccttggtttggatcaaatccccttttgtgacaacttgggggaaaaggatttt

SEQ ID NO: 200264 - DNA, 641 bp, Gossypium hirsutum
  unsure (1)..(641): unsure at all n locations
atttatggctcgaggcagaagctgctttatgttccaccaattacatggctcgtttcaataagattaagattgaaatagaagaatccaaattggacaaaggaaaagaagatgcatcagatgaggataaaaaatctagttctaagttttctgctcaagtaaacaccaataagaaattaacacaatcagctgagagtgaatcacctactgctgtttctaaccagaattcttccatcaaaagctcttgctaccatgctgatgatgtgacagccagatttcaagaactaaaacagcggcttaacaattctagttctgttcatactagagagcttgatgaactttcgagctccaagctttgtccggatttgggatgggtgttgacctattggcacttgaagtaaaggacaactctactctaggcctgtcatctcagactccattgtcaaggaatagcctgccaacagannatggtgaacctctgtaatggctagtttcaattctgaanaacgcgacttgacantttgatcccaatgagtggaaggaactacttcaaaggtgttgatcttcattgcaggatgacaagcaataccattgtaagactatcgagatgtacatcgtgtnacctaaaccgttacagatctgtn

SEQ ID NO: 200265 - DNA, 730 bp, Gossypium hirsutum
  unsure (1)..(730): unsure at all n locations
ggaaaacagacttggaggacgaattacatagaatacgtgtgtcagagatggacgctgtttcaaaagttgcattattagagggtagagtcgaagagagggagaaagagatcgagtcnctgttaaaaacaaacaatgagcagagggccagtacagttaaagtacttcaagaccttctggactctgaacgtgcagcacatgcagacgctaataacagagctgaagccctttctcttcagctacaagctgcacaggcgaaacttgatcaattgcagcaagagttgacttctgttcgtctaaacgaaactgcattggatagtaagctaaaagctgcttctcacggaaagcgattgaggacagatgatgaagtgggagtcggatctgtgcaagatatagacacgagtgaccgatttttaagagcaaataagaagtccaagagcacaactagccccctcaggtattcaccgtcagaagatggcgggtcagtattcaaagctgatgatgacaaccagaaccaacaaaacaatcaagaggattatacgaagttcactgtacaaaaacttaaacaggaactcacgaaacacaattttggcgcagagctgcttgcgctgaggaatccgaacaagaaagaaatccttgctctgtatgaaaaatgtgtactgcagaaatcatgatagttttgttttcagttgataatatgactttgtatatggaggtacacttgtaatctacc

SEQ ID NO: 200266 - DNA, 659 bp, Gossypium hirsutum
gcttctcaactcattacactaatggaaaccctcagcaacttttgtaccacgagttgtcgtgggttgcatcaactaataggctggatgcctaatgaagaaggtcagagcgttttgatgatgaagttgaagttaccacacctaatgaagagctttggtgtcattgtctccagctttatacaaaaaaggttcctttggatcctagtgttgactagcaagttgtagctgcattttccaatggatatgctggagctgatgtggaagctcctaatatgccagcataattaagagataaataattgttaaagaaaagatttaattttatcgaacaacataattaagttcagtacttaaatgtattaatatactacacacactttctaatattaattcaggtcctttcaatttatcaaaccagcaccttgcctcctattagacctatgtgagtacagaaagccttatggtagcaataaacagcttcgttgtcagacatggggaaaatctcagagatagcggatgcttccacaaagaacttgacggtatagggtgctggtctattcataattcctgaatcagtggtgcagagctatactgtatagaaagaccgttagcagtcacagcatcattatgaagttccatgttgtcttgaacaaagcctaatc

SEQ ID NO: 200267 - DNA, 732 bp, Gossypium hirsutum
  unsure (1)..(732): unsure at all n locations
cttctttttctctgttttctcaaccaaaccaacctttctgcacttctttctttcagtctccataccactctgctccgcaatttagtttgggggtttttttggaggctctgcttctaggccttgcctgcccaaaaacataataaaggaatccatttcaatcgcaaccgagacggggatgttgcagctgttcttcacaattgctttctctgcggcgccgttgactctatatgtcccgcctgtgaggagcttgaatctcttcgtagagaccatggaggatctggcaagggagtcgcgggtgtatacccacaggctttacccacgtgcacgcttcgtctggtctaggctcttggattgcatgctttgcaacttgagtttagattagagttggctgcgttgtgctgtgccatctcctaaccctactttaatcattagatctctttcaatgtacatatggaattttggtttcttttgcctctctggccatgtgacaaaggctcttcgtattgccaggaataaaagtcaaagcattctttgtggttccatatagttcttgtgttgatatatatcttccgggatcatanatgatgccaactgaaggatcataccgtaattctcaacttattactcaacttgtatgatgtccctccaagcttgaaggatgtgtaccaaatgatttgtgantcnggtggaacccgcagaaaaatgataattggaaatgcgctttacaattac

SEQ ID NO: 200268 - DNA, 809 bp, Gossypium hirsutum
  unsure (1)..(809): unsure at all n locations
ctctttatatggtcccagctgctcctccagagtcacttagaggtttgccatttgttgcctcaatgtccccaatgtttttcccatcccctgagcctcatgacaatcagttgcatgctagtatagtgaatcagatagattattatttcagtaatgaaaatctaattaaggatacctacttgaggcagaacatggatgaccagggctgggttcctattaaattaatagccggcttcaaaaaggtttcacttttgactgataatattcagctgataacggatgctctgcaaagttcaacagttgtggaagtgcagggtgacaaagtaaggaagcggattgattggatgcgatggataatgccgccttctgttcatttccctaccatgtctggtcaggatacactancagctcgtgttcagaatatttcattggatcagagaactgcaaaccagagtggtgcaagtaaccctgaagatgctgatgctggtagaccatcatatggggacttcagtaatcaggctcagctattcaacaatgagggatcaaccgccggtgctcatggtgggccagcaagtaattgaaacgaagcaaaatctgttgacgtacgttttccttgctaaaaattcctggaagataaagagtagagaatgattttgacgccatgggttattatttgcctctcttgaaggtactggtttttgaactttgctacgatgaatcacgatttctcgtacagcaaatttaccgaattgttttcctttgttcttttctttttttacaaatggggatgttnggattttcttttactattt

SEQ ID NO: 200269 - DNA, 1122 bp, Gossypium hirsutum
ctttctcgtccgggaaacaaggagggttgttgggaagtttaatgcccaaggaagagtatttttctaaagctttatacacatttgacattggccaaaacgatcttggagaagggttcttttcaaacttgactgtacaagaagtcaatgcttctattcctgatataatcaacaagttctcagcaaatattaagaatatatacaatttaggagcaagattcttttgggttcacaacactggaccaatcggttgcttgccttatgttttggttgcatttgcctcagctgaaaaggaccctgctggttgtttaaagccttacaatgaagtggctcagtatttcaatctgaagctacaggaatcaatagctcaactcagaaaagggaatccccttaaactggaattacacttatggaagccatcatattctgtgaagtattctcttgttgttgaaccccaaaaacatgggtttgaacttccacttgtgacatgttgtggctatggaggtgagtacaactacagtgctgcagttctatgtggaggaacaattacggtgaatggtacagagatatttgtgggttcatgtgacaatccatctgcttgtgtggtttgtaatggaattcactttactgacgcatcttacattttcatttatgatctaattctatctggtttatataattcgtatctacatgtttatctaaatcttctttgcctcatatatctgttattaatctctactttttctgatttatcctctatctctactactatttattacttttactacatttcattttatgtatcatatatcttcttcttctgctcaatatcatctctatataaccatatttacaatatccatctatattactacttcctattattatctcatatcttatcatattacttatattctgtttttcatttcctactattattataccttcctatcttcttgtctcctctcatattataatttacatgcttctatttatatctaaccacttcacttcttcatacattatctactttcttctcaaatactctcctacttactcattgatctcttatcctcttatctcatctccgatcttattccatattcttctataatcctcacctcg

SEQ ID NO: 200270 - DNA, 765 bp, Gossypium hirsutum
  unsure (1)..(765): unsure at all n locations
gccctccagcggggctgcccggttgcgaaaagttgtgaaagagaggaagaagaaaaacaaaggaaaaaatgttgagaagaacgaaaaggctgatattacggttgcagaagagaaaaagacagaggataaggtgattgtggaggtggagaaggttaacgttgacaaagttaatgataaagaggttgtgaaaacaattgaggaagagaagaaacctcttaaggaagaaaaagtgattaccaagcctgtgaaattggtgcttggagaggatattaggtgggcacaaatgcctgtgaattgtaatattaagtttttgagggatgttgctaaagataggttccccggattgaagggtgtccttgtgaaatacagggatccagagggtgatttggttacaatcaccaccactgatgaacttaggttggccgaatcatctactggtgttgccggtggatcacttaggttctatattgctgaaattaatcctgacagggaaccggcttatgaaggaatgaataaagaggaggcgatcaagagtgaggggaaattgagtatcggtgttgatgataatggtaatgcaggctgtggtgtaggagctattaagggaacatgtgtggaggattgtgattgtccagtttgcgcggttgttcaagaactatgtcggatttgattctgattcatacttggatcttcatgaactcgggatgaaactgtatgcggaaacaatggaagagactgtgacnagtgaaaaatcccaggaacttttct

SEQ ID NO: 200271 - DNA, 767 bp, Gossypium hirsutum
cattggtctcggggaagacggaccaacccaccaaccaattgagcacttagctagcctccgtgcaatgcctaatgttttcatgcttcgtccagctgatggaaacgaaactgccggtgcatacaaagttgctatcctcaacagaaacacaccctccattatcgcactctctcgacaaaaactaccccaactacccggaacttccatcgagggggttgaaaaaggtggctacattatatcagacaattcttcaggaaacaaccccgacataattctgattggaactggttctgagctggaaattgccgctaaagccgccgatgaactaaggaagggcggaaaagctgttcgggtcgtctcccttgtttcttgggaactcttcgataatcaatcagacgcctacaaagaaagtgttttaccatctggtgtatctgctagggtaagtattgaggcaggatcaactttcgggtgggaaaagattgtgggatcgaaagggaaggcaatcggaatcgatcggttcggggcaagtgcaccggcaggtagattatacaaagaattcggtttaacaccagaggctgttgttgcagcagcaaaggaactttgctaggcattattaggtgcctttggtgactgtttttgtttttaataataaaaggaatcatccaattttcttatgttgctttgtgattctatgtgtatgaatttgtaattcctctttgaactattttcccatagtttttgcatcaaaaaaaaaaaagtcgacgcggccg

SEQ ID NO: 200272 - DNA, 401 bp, Gossypium hirsutum
tcgttcacgcgtccgattccaggtcttgcagttcaattgatgctaaaattaagatgtatggttctcttgactctattgaacctgtaaaagacattttagaaaaggaccaaaaaggctttgacacatctttagtggctgcaattgatcgaaccatgaagaaacatactgataatttgatgcacatgttagaaggtgttggtgaccgacttacacagctggagagtagaaccagtaaacttgagacttctgtggatgatttaaagatgtctgtaggaaacaatcatggaagcattgatgggaaaatgagacagctggagaacattttaaaagaggtgcaaacagaggtgcatgttgtaaaagaaaagcaggagagtgttgaagctcttttacagcatgcaaag

SEQ ID NO: 200273 - DNA, 402 bp, Gossypium hirsutum
tcgttcacgcgtccggattttattaaatctgatgggattattggaagcaagaaaattgtggctcctgtacttttccagggcattggccattcactgaatcctgtcaatagcttggtgttaaaggttctctcagcttctccatctgcctattcagcttatcccttatccaagctgtcaactccaccatcattgacgggttctgcaatctccttggtttcagttgtccaggcaaggaacaatgcacgaattctgattactggttcactaagtatgttcagcaatcgattttttagatctggtgtccagaaatctgggagctcaaccaaatatgagaaatcaagtaatgagcaatttttgaccgaacttaacaaatggattttccatgaaagaggtcatcttaag

SEQ ID NO: 200274 - DNA, 275 bp, Gossypium hirsutum
ttcattcgtccgcaatttgtcggcctcagtcctctgcgatcgggctttgatacttttggagttcatttattcattaaaaaacctatggaatgacaaatgattaggaatccaggttccatcgttgccaatgacttccttattcagttgctcagaaatttggctttgcatattgaggtctctctctctcttataagcctaaattttttatttttgaacttttttgaattatttatatatcttttactgtttttaatcaaaaaaaaaaaaacaataaa

SEQ ID NO: 200275 - DNA, 546 bp, Gossypium hirsutum
cctcgtgccgtggaagttgatgatgacaacagtccatcaacttcagctgcagttccggatggcgaaaccccggtgcctacagctaatagcacaccggttcagcctccagcggtcccacctgcagttgtaccaccaactattgctccactaccagcagttgtgccacctattgctccaatacctgcgggccgccctcccgtctttaaaccacctgtgcctcaaaatggtgaggtgaaagctgttgattcagactctgaccatgaggatgatgggcgagctacagctggcgaatatgagatctcagaagagagcagactggttcgagagcgacaagaaaaggcaatgcaagaacttttgatgaaacgccgtgctgctgcactggcagttcctactaatgacatggctgttcggactcgacttcgccgacttggtgaacccataacactttttggagaaagagagatggaaagacgggaaaggctgcgaatgattatggcaaagctggattctgaggggcaactggagaaattgatgaaagctcacgac

SEQ ID NO: 200276 - DNA, 602 bp, Gossypium hirsutum
tgtttacgcgtccgctcaacccccaactacgtggaatgtttgactcgaaccctcaattgagagaaatgatgcaaaaccctgaagtacttcgtcagatgttttcccctgagacaatgcagcaaatgctaactttacaacagtcgcttctgtctcagctcaatcggcagcagtctactcaggattcaacgcggagcagtactactacaggagcacctggtacttcctagtctggacttgttgatgaatatgttcggtggtctcagtgccggtagccttagtgttcccaaccaacccaatgttcccccagaagaactgtatgctacacaattatcacaactccgagaaatgggtttctacgacaccgaagagaacattagagcacttcgtgctacttctggaaacgtccacgccgcagttgagagacttcttggaaatcccgggcagtaatgcctcgaaatattcgtgtaaaattagttcatttggcatgtttgccatagccaaccacaaattatcgacatgcctgctgatccccttgtttgtgcgtgtttggtaagcaagtaaaacacattgatgacgatgatcctgagaactttatatcgata

SEQ ID NO: 200277 - DNA, 377 bp, Gossypium hirsutum
tgttttgagagcgtcaacagaagattgcgtcattagtggttatgagattccagaaggtaccaggctctttgtcaatgtgtgggctcttggtagggaccccaatcaatgcgagaacccccttgagttcataccagagcgatttcttagtgaagagtgcaggcaaggcaagaaccagtttttggatgtgaggggacaacacttcagcctgttgccatttgggagtggaagaagaagctgccctggagcttcgctggcactacaggttgtcccaacagtccttggcataatgatacaatgctttgattggaaggttagagatggagcacatggcactgttaatatggaggaaaaagctggaatgactcttcttagagctc

SEQ ID NO: 200278 - DNA, 555 bp, Gossypium hirsutum
ttgctacgcgtccgcccacgcgtccgggatatgtggctttatctttctgagcatgaaaagttcaatgattttggaaacgaagcttctcttgtatggcatgagactaacattccttatgtcacttggggtcctgaaagtacccgtactctttctttgaaatactatccttcccaggccttgaaaaacaatggcagtctttatgcccacgttttctttgcacgctctggttaccctccagatcctaatgaccctgaattccagcctcaagctacctttgggaggactcactctgttgtggcatacttacccaagtcaagatcagataagaggaaaagtcttcttggaaacaccaaagaaggggaagcagttgaatctgtggctatggtggctgatgatgctgaaactgactctaaagatgatggccctgacgagtggattgcttattggaaaccaaatatcaccattaacttggttgaagatttcacacgatatgggcacaatgctgtaccaccaaatattgctccttacttaaatattgagcctattacaggaaat

SEQ ID NO: 200279 - DNA, 583 bp, Gossypium hirsutum
ggaaagaagatgaaagggagtgagaattgagaaacccagttgcacaaccttcaatggttgcgaatgaagccatttttttaattacccagtttcatacatctcagctacccattcctcatcttcagttcctaatggcagatcttaagttttctttcgctgaaacttttctttgtagtgcttttgctgcttgttttgctgagttctgtaccattcctttggacactgccaaagtcagactccagctccaaaagaaagcagttggtgacgaagttaatttaccaaaatataggggcttgttgggtactatggctaccattgctaaggaagaaagattatcagcactttggaaaggaatagttgctggtttacatcgccaatgcatttatggaggtctaaggatcgggttatatgaacctgtcaaaacgctattagttggtgctgattatgttggtgatattccgttgtaccaaaaaattatagcagctctattgactggtgctctagctattacagtcgctaatccaactgatcttgtcaaagttcggctgcaagctgaaggaaaatttccaaccgggattgcccg

SEQ ID NO: 200280 - DNA, 495 bp, Gossypium hirsutum
tcgttgggaacgacttgaccgagatgttgcttcaacagggatgcctcaaatttaccagaataggagggtttggattctctgcaatgactgtggggaaaattccgaggttaatttccattttgtggcacacaagtgcccaatatgcagctcatacaataccaagctgacacgtggacgcattgctacaggttcatcagagattatgaaaacagtttgatgatggctttctcgatgtttatttcgcacttctcagtttcctgttttagttcaatcgttaactcttatggaatgggtaaatttcacttgggggcagcagagggtagctggaataacagatttctttattctttgttactgatctctgtaagctaatccgctgcaacatgccagctcggtctggagccgcggattgtattagtagaacaagtgaaacttgtaagaatgcagatgctatgtacttggatcattgctggggctaaatatattccaaatttc

SEQ ID NO: 200281 - DNA, 655 bp, Gossypium hirsutum
  unsure (1)..(655): unsure at all n locations
aaaaagaaagcttcagcggaccaaacaagtcccaagagacaggtttgatgagtgggaagaggcatatagacttgagcgcgagcaacaaaaaattgatgaaatgtttatgagagaagcattgctggaagccaagaaagctgctgattcttgggaggtgcctgttggggcagtactagtgcagcatgggaagataattgctcgtgggcgtaacttggtagaggaattacgggattcaactgcccatgcagaaatgatctgtatacgggaagcttcgagcatactacattcatggaggcttgcggatacaacactttatgtcacacttgaaccatgccctatgtgtgctggagcaatacttcaggcaagaattgacactcttgtgtggggagctcccaataagcttctaggagcagatggtagctgggtaagactgttccccgatgaaagaggaggaaatggatcagaacagacagacaagccagcagctccagtccatccattccacccaaatatgggaatcagacggggggtattggcatcnaaatgtgccgacatgatgcaacattttttccagcttaggagaaagaataagggagagaatgcagagcagctctcatcatcatcatcatcttgtcttcccataacaacaagtcag

SEQ ID NO: 200282 - DNA, 534 bp, Gossypium hirsutum
atttttcgtgaggggtgcatctggcagcaagttcctcaactacataaacaagcacattatacctgtttttgataagcttccagaggagctaaaactagatttgctcaaaggtttggcggtaaatttctccttacacaacgtccacaggtattcacgtccagattcttccctctgttgttcagcttttaaagaagtacatgcctcgaaggaagactggtgaagaaacgaactttacctatgtcgaatgcttgttgttttcattccaccatttagctcacaaggctcccaatgccacaaatagtctatgtggttacaagattgtgactggtcaaccatcagataggcttggggaggacttctcagagtatataagtagttcactgaaagatgaatagtatgaagaacctacctgggcaccatgaagaaatgaactagggattggtcttaaccaaaaagcagtggagctgctaaattgatgaaccaagagagctttaaactcatgccgaatacacactgttgcgtactgcatacatt

SEQ ID NO: 200283 - DNA, 279 bp, Gossypium hirsutum
cccttctctaggtccagagaccataaaacctttgggggcagcactcacctttcatcagttcttcgaaggcatgggacttggtggatgcatttctcaggcttcattcaagggtcgatcggctgccatcatgtcacctgtttttctcgctgacaacaccagtaggaatcgctttaggaattagcaataacaaatgcatacgatgagaacagcccaacggcactgattgtggaaggattattgaacgcggcttcatctgggatcttaatatacatggcgttg

SEQ ID NO: 200284 - DNA, 478 bp, Gossypium hirsutum
  unsure (1)..(478): unsure at all n locations
gtttcctaactttacggcaagcaagggcttcagcagcctaggttgagggcactcgttgatgaatctccaagcatgataggaggaccagccctgcactgcctcatacagcaactccagatgctgactgttgattcctctcatccgaggctccatcgaaattaatttttactgtgtgaacaggtgggcgtttccattttatttcctccgttaaacctttgaatgttctttgtccgacgccatttaactctgatatatagttgtggacaaattttgctatctcctgaccagatttatttttctttttatgaatacgagcattcttgtcccccagatggcccatagcgcacagcaaaatattctgcaaagactggaaggctgttgagcgaaaaccctggacattcgcggaagaggactaaaggtgatccattgnttctactccttcaccacaacggggacaagcggaactgttttttagtct

SEQ ID NO: 200285 - DNA, 928 bp, Gossypium hirsutum
  unsure (1)..(928): unsure at all n locations
tttttgaattaccgaccagcttcacttcaatctccatttccatggcggaaagaaatccaagcctttcaaacgccggattctgttacgaaacgagaatttacagtagcttaaggcagcccgtccctctcccgccagctgatcagcctctttccgtcgcggaatattgtctctccatcttctcttccatttccaccagcggcgccacccctttcgccgtcaatgcaaccaccggccaaacgctgagttactctcaattcgtttctcaggtccagctcagtaaaccggttattgcctttgctacttcacaaacctctcataagattccatctctcaaacacgaaactatcctcttggactcgcccgagtttctatctttcttaactcagtccaatatcgacggtaacgtcattaaacgaatcaaggtaaatcagtccgattcggcagcgattttatattcttccggaaccaccgggcgggtaaagggcgtgatgatgtctcaacgtaacttaatcgcaatgatggcggcgattcatcaccacaacactatcgaagctgacggtagcgacaatccacgcgatcggtgacattcttcaccgtgccactgttccacgtgttcggtttctntatgttgttagggcggtttttgtcggcggataccgtagttttgacgaaaaggtttgatntgcggagatgctgagagccatcgagaagtacaggggtactntcatgccggtatcgccgccgcttgtgctggcgttgtcaaatcgaatntgctaanaagttcgacttgagctcatttcaggtgccttgctgcngtggcncgccgcttggtcggaaggtagctcgggctgtcacgagaagtccccatgtgtattgctacgggatatggctgactgaactgaagaggagaactatgtgtagggctgag

SEQ ID NO: 200286 - DNA, 675 bp, Gossypium hirsutum
  unsure (1)..(675): unsure at all n locations
ggaaaattagccaacggcagcagtactgaaaaatgggtgttgattattacaggattcttcaggtcnaccggaatgggtgtgatgaagatttgaaaaaagcgtatcgtaagctggccatgaagtggcatcccgacaagaatcctaaatccaagaaagaagccgaagccaaatttaagcaaatctccgaagcttacgatgttttgagcgatccccagaagcgtgcggtttacgatcagtacggcgaagaagggttaaaaggccagatgccgcctccgggtgcgggagggtttcctggaggggcggacgggggttctggcccgacgatgttccggttcaatcctcggagccccgaagatattttctcggagtttttcgggtgttccagtccgtttggagggatgggtgatatgggcgggtcacgtgctgggatgtcggggttccccaccggcgtgtttagggaagaccttttccggtcgtttaggggtggagctcgggagggtgctacacctatgctccctgaaggacccgctattgaacgacccttgaccctgccgcttggaggatccttttcaagggacgaccaagaaaatgaagatttctagggatgttaccgatgctagcgggagacctagtacggaggaggaaattcttactattcagattaagccaggatgg

SEQ ID NO: 200287 - DNA, 811 bp, Gossypium hirsutum
tcttcgatttcgcagacaagtaccgagggtcttacagtgactctctgaattctgtggtctgcccattttactgctcttactctggataccaagatgagcttctttggggagcgtcatggatgcatcgagcgacgcaggacagttcgtacttatcatacatccaatccaatggccataccatgggatcagataatgatgatttctccttcagttgggatgataagagagctgggacaaaggtccttctttccaaggacttcttggagaaaagcacatcagagtttcaattatacaaatcacattcagacaactacatatgctccctaattccaggatcatcagggttccaagcccaatatacaccagggggccttctctacaaagccagtgaaagcaatctacaatatgtgacaaccacaactttcctcctcttgacatacgccaaatatctcagtacaaatggtggagtcgtcacatgtgggacttcaactgttacagctgagagcctcatagcacaagcaaaaaagcaggtggactacatcttaggcgataatccacccaaaatgtcatacatggttgggtttggagagagatttccacaacatgtgcaccataggggttcatcggttccatccattagggcgcaccctgatcgtataaactgcaacaatgggttccaatacctttacgctaactcacctaatcccaacgtccttgctggagccgtcataggtggacctgatagtaaagacaactttgctgatggatcgtaacaattatcaacaatctgagccagctacttatattaatg

SEQ ID NO: 200288 - DNA, 464 bp, Gossypium hirsutum
ctttttctggtttttgcgccttttgttgtcggagaaagtgggtgaaaagggattgggctatcgcaaccgtcgcaatcaccgtcatcatcgccgccgtcatcaccgtcatcctcttttacactgtcttctccgattctcgtaaccgcaaaacttcctcgcctacttttgctcctccttccgccggcgatttcgttccgttgactttgcttcaaagtgccaaagctacaggcgccttttgcttagatggaagtttacctggatatcatttccagaaaggctttggatctggttctagcaattggcttctccacattgagggtggaggttggtgtaattcaatagaatcatgtaatagtcgaaaaggaacatctttaggttcatcaaattacatggaacatcaagttcaattttctgggattttaagccaagacccttctcaaaatccagatttttataattggaac

SEQ ID NO: 200289 - DNA, 722 bp, Gossypium hirsutum
ctctctcacaacgagatccttcgtttagctaacctttttgttacttccggtgtcgataagatccgtctcactggcggtgaacccaccgtccggaaagatattcacgatatttgttccgatttatcgagcttgaaagggcttaaaacattggctatcactacaaatggaattacccttgctaaaaagcttccaatgcttaaacaatgtgggattactaatttgaatatcagtttagatacccttgttccttcgaaatttgagtttatgactaggcgtaaaggtcatcataaggttattgaatccattaatgcggccattgatgttggatacaaccctgtaaaagttaactgtgttgttatgcgtggattcaatgatgatgaaatttgtgatcttgtcaatctcactgttgataaaccaattaatgttcgattcattgagttcatgccttttgatgggaatgtatggaatgtgaagaaactcattccgtattcggagatgttggatacagtggtaaggcaaagaaatttccgaccttaaagaggttgtgtgatcatccgacagagactgcaaagaatttccagattgatggccatgtgggtactgtatctttcgttacttcgatgacaaaacatttttgtgctggttgtaatagattgagacttttggctgatggcaacttaaaagtatgtctctttggtccttctgaggttagcttaagagat

SEQ ID NO: 200290 - DNA, 828 bp, Gossypium hirsutum
ggggggactatttctcggcagaattttcatcattttcccgaagaaaagcaaaagggagtaccaatggccactaggctcgccgccctccgtctcagatcccatctcctccgcaactgctcaactctctccaccctcagatctcctccgtcgatctctcaccccgcgccccctcccatctctactactcaccattacatcatgtctccaaccctccgtttcctctacacttccacccggcggatcccgacccgacccaaaaaagtcgacatcggggcccgagctcgccagctccagaccccccgcctctggacctacccattaaccttcagttgcctcgcgggttttgtacttttagtcctcaacaattttcaagaccaattagtctcttacgttaccccaaccgacgccctcgagaaatacacgaaaaacccatcgaaaacgaacttcaggctcggtggtctggttctccaaggaagcgtggttcaacccagttcttctaaagaaatggagttcgtcattaccgatttgataactgatattctggttaggtacgaacgttcactacccgatttgtttagagaaggacattccgttgtggttgaaggattcgttaagccgttcacggaagagattaaaagggacgtctcgacaaggggcgtttcttcgaaagcaaggagcggtgattgttacttttcggcgactgaagttcttgctaagcatgatgagaagtatatgcctcaagaggttgctgctgcaattgagaagaacaagaagatgattgaggatgggctggaaggagctaaggaatctgtagtttgattggtatga

SEQ ID NO: 200291 - DNA, 871 bp, Gossypium hirsutum
tgatatgaaaaaaaatcgaatctaacaatgatgaacacccgaaaataaaacgaaaaattcacctttagtattcaaaagcctctttttttatttttcctcccccttgtacagtattcgtattggctttttatagccggaattacagaaaaaaatcaaaataaaaggcctccaaaatccaatctgttatcccccttttctcgtatttttggttgcctttttctgttgttgctgtttgtttgcagatttggaggccagcctggagcaacggacggaggtgcacacgcgcgtgaaggcgcaactcgcgcggaggaaactctggccgctgcggcgctaggggtcgtgcgctgctactagggtttctgaaggcttgttttgggtcacattgtatttgggctagggtctaatatttgggctgatgtaatttgggtcttttggacaaatgtaaatggactttggaattgttggccttcttttggtttatgcatgtgggcccgggcaaattgggcctattacaagctttatttaatatacaatagtttcatgttctgaaaaaataatgctattaaaataaacttgaggggtggccggtacccaattccctattgtaggcgaatccatttaatggccgtgtttccacttgtgactggaaaacctgcgttaccacttatcgcttggataatacccttttcactgtgtatactaaaggcccccctttcctttcaatatgctctcgattggaagtaatttacttatattttaagcaggttattgtatagtatttatcattatttacgtttcacttatatagaactcctttggtgttatttgtataaattatattatcgaatttatttatatttaatttatatat

SEQ ID NO: 200292 - DNA, 506 bp, Gossypium hirsutum
cggacgcgtggggtctcagctacacaaccgcaaccgtcaaagccaaaccaagatagttccacatcttcaaagaagaaaaaaaaaagatttatgatggaagtgaacaaatttctacttcaattactggtgctgctatatttttggtgaaaaacatatgaactattggccttgaaattaagtaggagcattgcctctgagaaagtgattcaagaaagtgctcaaaaattatattcagccttttgtgaagtacaaggaataactgaggataagggctatcgtgtgttgagcaaaatctcaaaccatccaacgcaaatgctaatttttttcagtttactttcttctgtgcaattggaattggtgaaaagatttcttattgatcattaaaaattatggctgcgttggtaatattttgataactttttgtatatgcaatatttggatggtaagatgtcattagtagaatgttataaactattataactttttgatattggaaaatttaacat

SEQ ID NO: 200293 - DNA, 731 bp, Gossypium hirsutum
attggtgcttccctgcagtctggtgacattgtcattgggaggtttgcagaatctggagctgatcatggtgtaaaactgaagcacaccgaaagaggcatggttcagaaagttgtgttatcttcaaatgatgatgggaaaaattttgctgtggtatctctgagacaggttcgttctccctgtcttggagacaagttctcaagcatgcatgggcaaaagggggtccttggttttctggagtctcatgagaactttcctttcacaactcaaggaatagttcctgatatcgtgattaacccacatgcatttccttcacgacaaacgcctggtcaactcttggaggctgccttgggaaaggggattgcctgtggtgggtcgaagaaacatgccacccctttctccactctctccatagatgccattacagaacagcttcacagggctgggttttcaagatggggaaatgagagagtttacaatggtcggactggtgagatggttcggtcactcatatttatgggtccaacattctaccagcgtcttgtccacatggctgaagacaaagtgaaatttcgtaacactggacctgtgcacccacttacaaggcagccagttgcagaccggaaacgttatggcgggatcaaatttggtgagatggagcgggactgccttattgctcatggtgcatcagccaacttgcatgagcgcctcttcactcttagcgattgctcaca

SEQ ID NO: 200294 - DNA, 429 bp, Gossypium hirsutum
tttacgttttcgcgtccgatcggctatggtttcatttgaacaaattggttttaggtgcagcttcttagctcaccaagtgttcgacgatattccccaactagcaaaagtagaagctgatcatcttttttctctggtttaaagcaaacccgtcgtcactctctttcaaatcagagccttggactgcgtacaatattccatctatttactttcagcaagtgttggaacaatatttctccataagcgaaagtagagataatcttttctcttgtttaaagtagccgtcaatctctctcaagataaatgatgcctagatggaaaggaaaaggcttacaagccaaagctaatgctgatcccatgtctaaaattgtctcacaactccaatcctctttgatccaatttgagactcggggtttgctctcgagctgcagt

SEQ ID NO: 200295 - DNA, 810 bp, Gossypium hirsutum
  unsure (1)..(810): unsure at all n locations
tcctttcgtccggcagggtacatcatggaactacactgctcggagaagaatgggatgcaaatgacgaaaaagttcgtgtactgcactgatcacaggagcccaaatccagatgcagttgttgtcatgcatactccttcaggggtttttgctgccagaaatgttcttcagaatgtaaacgattgtcctagaggttcgaggctaatttcatccaagaatgctgagctccctgaatccccagctctggataccaatgactttgatgcatgctctgctgctagatgccgcgtttttgcaaggtcaaaatttaagggagctgaaactgagccaatattccacagtccgagtgggccaagtcatcatcatatagatgcattaagagcattaagcacatataaagaagtagatgattctactgttttctcgtcattcaaggatcgactgtaccagttgcagaggactgagaaccaccgagtttgttttggcaaatctggtattcatggatggggcctttttgcacgtaaaaacattcaggaaggagaaatggttgttgagtattgtggtgagcaggttaggcgtantgttgcaaatcttagggaggcacagtaccgttctgaaggaaaagattgctatctgttcaaaatcagcgaggaagtagtgattgatgccaccaataaggggaatattgcacgcttaatcaatcattcgtgcacgcctaattgctatgcaaggatcatgagtgtttggcgatgaaaaaaccggatagttcttattgctaagaccgatgtctctgctggtgatgagctaacatct

SEQ ID NO: 200296 - DNA, 491 bp, Gossypium hirsutum
  unsure (1)..(491): unsure at all n locations
tctctttctagcgcgtggtacactgaaaccaagttatgccaagggtcaatgccaaaattctaccaaggtcaccgaaacaccacggtgctggttttgcctttgtcaggacaaatccaaaacggtacaggtttgatcatggcggtgcaagagcagcaacagcggacgggaaacatcccattgagactgcgggtgagtcagcctgtgagggttaagcttgggaagttaaagctcatgaaagtgaagttctcggttaggtgcgggttagtggtagatgctttatctgctaacaacaccgtcacaattcaaagtagtagctgcaaatttaggcttagcttgtagagttcctaatttctaacacccgccatattttttacatttatgttcgagaaataaggagggttttaatatatgcggttttgttctcctccatgctatatacttcagtttgttgtatatatttgtaatggngattttattctataatattcttt

SEQ ID NO: 200297 - DNA, 425 bp, Gossypium hirsutum
agaatgtcgaatatcttcctcagaaatggtgtatactcagtccggatactaatgacctaagcaaacttgcggacaacataaactatgcctgcaccttctccgattgcacagcacttggctacggatcttcatgtaacatcctggatgcgaatgggaacgcatcctacgcatttaacatgtactaccaggtgcaaaaccagaatgacatggcctgtaattttcaaggtcttgccaaggttacaacacagaatccttcacaagggacttgcaattttatcattcaaattgcatcttcttcttttgctattggtccctcactgataggaatgacattttttgctgtaatagcatctgtattactataaacttgattctgtagataacggggatggtactctctctctctctctctcttttttttcaat

SEQ ID NO: 200298 - DNA, 702 bp, Gossypium hirsutum
cttaaaagaacatcacctgcaaaaaaaaaaaaaaatgcttttctgatatttcaaccaagtcccatctcacaaaccctagtttatcattcatatccttgcccgaaggcaaaacagtgtaaaaggggagcacaaaagtaaaaaatcctcctcagtctgatcattagtagccgaatctgctctgaatagtttaaaatggctgggagaaaccgcgttcctcgtgaagccttcaatgaccggcgtggattcccccccgagaggccgttctttcgtggtcctcctctgccacagccacctcctcatcctgcgttgttggaggaagaacttgaaatgcagcatgctgaaattcgaaagcttttgactgataaccacaggctggtagaagatcgaatggctatacaacaagagcttgtggctgcaaaggaggaaattcatcgtttgaatcttgtcattggtgaaattcgtgcagaacaggaactgcattcaaggggacttattgaaaaaggcttgaaactggaggcagatcttcgtgcaactgagccactgaaaaaagaggctatgcaactccgctcagaagttcagaaactgaataacgttaatcaggatctaactggccaggttcagactctcaagaaggatattactcggctgcaagctgataatcagcagattcctattctcagagcagaagttgatggcttgcac

SEQ ID NO: 200299 - DNA, 379 bp, Gossypium hirsutum
tcacgcgtccgcccacgcgtccgcccacgcggacttccacgcgtacgaccactcgctcgcttttcccctttcttaccgaaccctaaatccctctgtcaagcatcaatccaccattaagaatggcgccttatgctttgggcctcgattcatcactctttggcctcaagaaccctcccttcaacttcgatttcgacgaagcaagaggggatcaacggcagatacgcgaggtacgggcgatgtgctggcgtatggaggcgcaggcgtacgggggctgctgacgtggaggcatgagcggcgttggggctgtacggtggctgaaggctacggcgcatctgctgctagggctagggtttggcaaaatttgcttagcatttgggtc

SEQ ID NO: 200300 - DNA, 625 bp, Gossypium hirsutum
  unsure (1)..(625): unsure at all n locations
tttttagtaacagattctgacgcatatgatcaaaccaaacgattgcgaactggtgggaattattcacacagtccttacacgagtccatctccatttcaccctcctcctgcccctgtttggggcccacacgggtatttgtctccaactcctccatatgatccttatggaggttatcctgttcctccagtgccaatgcctaccccggcgcctgtaccagctcctagcagttatgtgcctgttcagaacaccaaagataaccctccttgcaataccttatttattggcaatcttggagagaatattaatgaggaagaactacggggcctattcagcgctcaacctggttttaagcacatgaagatcttgagacaagagaggcatactgtttgctctatagagtttgaagatgtgagttctgcaagtaatgtgcaccacagtttgcagggtgctgtgatccctagttctggttctattggcatgcgaatacaatattccaagaatcctttcggtaaaaggaaagactccaatcatcccattgcttctcctggtgccaatggggctccactanctatgacttaccagtagatgaggggatgttctctttatatgctccaacaaatacaat

SEQ ID NO: 200301 - DNA, 749 bp, Gossypium hirsutum
  unsure (1)..(749): unsure at all n locations
cttaaaaagaaaaaaaaaaaccctcaaagttagaaggagatacgcaaatattgttctcctcagcttttgatatattcttcttcttatctagatctacaatattgcttcaagaaagaaaattctttgttgttattactagtgattttaaaaggaaaaaaagtggttgattccttttcaagtaatacgattttatagcgcttgattcttgcccagaatcgaagcgtttcatcaccaaaagtgatagatattgacgaaaattttaagtttattgaagaaattgaaacaaacaaacaaacaaacaaaaaactgaatcgtaatatgtttgtttggtgatggggtcaggcaaaggcgcgacttcttctgcccaacaaatggaatcgtctgtccaagatcttcgtgagagatataggctagaattggaaaatttaacattgactacacagccagtcaaaacatcaaggtttttccttctggctatccttcaatatatcaagcgatcagcatcatatcttttggcaaagggtggttggcttatgctttcaagcactctaatancagttcttggaattttgcttgtgactattgagggccctcatgaaaagcatgttgaggaagtttctcagtatgttcgatttggattatggtggattgcacttggtgttgcatcttcaattggtcttggatctggtctgcacacttttgtcctttatttgggtcctcatattgccttgtttacaataaaagccatt

SEQ ID NO: 200302 - DNA, 607 bp, Gossypium hirsutum
atttggttggcctccaggaaggccaactgaagacaagcctgggaaagctctgttctttcttttgctctcttacgaagagacagatggaaaacggtctctcattgcaactaaaatattggaaggcacccactatgttctgcacccaaatggttctgcaatgttcatagtgaatattgatgaaccttcacttgacccatttccttgggatagtgatgcagattcgcatcctgtcagtgtgaagcatgctttcatgggagaaggtattgcaaatggatatggttttagatatcctggctcaaagcctggctctctttttgctattcaaaatggcctgcttgccttcatatggaaggaatccagggctgtcttgaccctgcaaagactcaacttgcaagatcttttgaagataggtgaacaggtgcctgctttacctccagttgccaacttttcatatttgaccaaatcctactctaatgtgcttgcggggttctcaaacacctcaacgttttcatcttccttaaggcaaaggcatatctaggtcaccgatgggactagaatagttgccaatactcaactattgttctctgccaatacgtctgctagccgg

SEQ ID NO: 200303 - DNA, 717 bp, Gossypium hirsutum
  unsure (1)..(717): unsure at all n locations
agtcaagatggctcgatcaaaggagggcgaaataacacttctagagtacagcggggacatctcgaaactaggctctgcagaaagatttcttaagacaatacttgatatcccttttgccttcaaaagaattgaagccatgctctacagagctaactttgatacagaagtgaagtacttgaggaagtcttttcaaaccctagaggaagcaagcgaggaggtgaagaatagcaggttattcctcaaactcctagaggctgttctgaggacaggaaaccggatgaatgatggtaccaatcgtggtgatgctaaagcttttaaacttgatacccttttgaaacttgtcgatataaagggaacagatggaaaaaccacactcctacactttgtggttcaggagatcattanatctgaaggtgctggtactgactctgcaaatgggaatcttaaggaggatgattttaggaagcaaggattgcaggttgtaggtgggctgancaaaaacctcancaatgtcnaaatagcagcaggaatggactcagatgtcctaagcagttacgtgtcgaagctcgaaatgggacttgagaaagtcagattggttttgcagtatgagaagccggatatgcaagggaatttcttcaactcgatgaggatgtttctaaaagatgctgaagaggagattgctaaaatcnaggcatatganagaaaagctttgttgct

SEQ ID NO: 200304 - DNA, 396 bp, Gossypium hirsutum
cctacgcgttcggcagttcagagattggtgaagtggttccaatgttgtccggagcaacattttgtccacatattggagccattcttgaaaattatcacgaaatcatcccgaataaacacaacattagctgttaatggtttgacgcccttgctaatctcaagattggatcatcaggatgctattgctcgtcttattctacttaaattaattaaggctgtttatgagcaccacccgcgaccaaaacaattaatagtggagaacgatttaccacagaagcttcagaatctaatcgaagaacgcagagatgggcagcgttctggaggccaagtgttagtgaaacaaatggctacatcgttgctcaaagcccttcatgttaacaccgtcatgtaagttatt

SEQ ID NO: 200305 - DNA, 327 bp, Gossypium hirsutum
ttcgtttacgcgtccggccacgcgtccggattacagaaactggtacctaattcaagcaagacagacaaagcttcaatgttagatgaagtgattgaatacttaaaacaattacgagcacaagtccaaatgatgagtaggatgaacattaccatcgatgatgttgcaacaccaacttcaaatgtcgatgatggcaccgatgggaatggggatgagtgttatggacatgaatttcatgggccgaccaaacatcattgggatctcacctgttttgtctaagccttttatgacaatgaatacaccttgggatggttctaacaacaatgatcg

SEQ ID NO: 200306 - DNA, 604 bp, Gossypium hirsutum
  unsure (1)..(604): unsure at all n locations
tctcacgcgtccgcatgccagcacgggggtgcgttgaacttagccaatagtgaacccaaacccaagtcccgtaacttgaatcagaacccaaacccaaacgcgaaccctactgttttggctcccagagatgatggaggcaaagtaagctcaatggtgggccctgagaacacctatggctgaggcaaccaatgttgaagcagagaaagaatggaagtctcctgcagggtatccatctgatagaaagagagaaacgaggaaagctaaaggtaggccattgggggtacagtttgtatgttgctcatctgccaattaggattataaatgatttgggacctatgttactcatgtcttggatgagtttggagatataatattttataaggaaaaacttgaaaaagatctcactggtatcggatttctacacttgaatccgaatccaagtaacatagcttaatactaacagtctgttttgtatcatgttttttctttttgtgtattataatcatgtttatacgttaataattcatgttatatagaatttgataggtgtagtaatttatttannnnnnnnnnnnnnnnnnnnnnnnnnnnnnnnnnnnnnnnn

SEQ ID NO: 200307 - DNA, 864 bp, Gossypium hirsutum
  unsure (1)..(864): unsure at all n locations
tttttcttcttatcttccaagcgccggcgccatacccatctcccccactccccaaatcctgcagccaaccagtgccccgacgcggccgtacgtccgcagcctctcgtttggttgaggccgtgagttgacaagatccgtcgaggatctctcaggacccggcgatttctccaacattgcctgaatttattggacttgtcaaagatcggaacagtttagctgtttaggaagtcggaaatggcatcgcctccaattttatccttggctcttccatcaaataccggtaggagttctcagcattcaatctcacacagttcagggatatgtttggtaacaagtcagccagttttttcctcttcaactattaggatatgatgttggatccaatcaattcagtacaagttttcgaatcatacagggtacccaacttttaagggccaaggtctaaacgggcaacaattattggatttagtagaaggccttgaagcaaataatttattggactacacccatttactaacaggttattttggctctggttctttcctaaaatctgtactggaggttgtagaccagcttcgctctattaatccaaatcttacttatgtttgtgatccagtgatgggtgatgaaggaaagctttatgttcctgaagatctaggatcagtatatcgtgaataggttgtcccagtggcttcaatgttgactcctaaccagtttgaagcaaaactgttgactaaattgaagaatggttctgaaacagatggtcggaaagcatgcaacattcttcatgctgctgggcccttcaaggttgtgattactancatcaatataaatggtaatcttcttctcattggcagtcatcac

SEQ ID NO: 200308 - DNA, 693 bp, Gossypium hirsutum
aaaccccatctcgtgtattttcccgtgctgttttcctctaaaacgttttcgaaaacagaaaaaaaaaaaaaagcattcacagcgaagcaacagctgaaagccgtttcagattcaaagcacctccgtctcacgctaatcaaaacaaacaaaaaccagccaaatttcatcaccgttatcaaagagagaatcaacagagcaaagggattccgattttctctttcctttttcttcttttttgtgctttcacagtctctacgttgtcgttcttttttggcttagcatttggaggaggagaggagaggagaggagaatatgagaaaattggcggatccttacgtgttggcgtggatctcggttttcgtaaccacgcttcttgctttgtgcggtgtcgttttgaagagacggacagtgatcgggatctcttccgcaaggactgtgtcggtgacgagcgtatcggctgttgacggagaatgtagatccgctgatggtggtgattctgagcgtcatcattgttggagctggggttgctggatccgcactcgctcccgctctgggcagggatggacgtcgagtgcctgtgtattgagagagattagtctgagccgagggcctttgtgggggagatgcgtgtcccggggggggcatcccggttggtttgatttggggtttgaagaatgtggggaggaatcgcgg

SEQ ID NO: 200309 - DNA, 710 bp, Gossypium hirsutum
  unsure (1)..(710): unsure at all n locations
gctacaacgcagttatcacaattatctattgctcagcgtaaacaatggctgcaggtgaagaaggagaattcgtctacagaattagcactgctgaggaatgggaagcattgcaaaagaatggatccgcttttggcggtgacttagacaaatcctctggtttcattcacctcagctcccttcatcaggtgaagccgacactgcagaattttttctccaacgtcaagctggatttgtaccttcttcaaattgatgctaagaagcttggagatggattgatatatgaagttgtagatggttccaacagcttcccgcacttctacggctcatctcgaagctttgctcctcttccattagatgcagttacaaaagctgagaagctatcggtagtagatggccaattcagctgcagtttactgaattagcgctgatgcttccaacagcttcctgcacttccatcgtgtggagataatgtacgcattggatttggatgtaactatacaatgttatgccactgtaatacttcactcctaataatagcaatgatgtgtgtattanttgtggttttatccattatacttctgggactccacctctgttcacaccctgtatcaaaggttgaagaatnttgttattttgttttctcagccctgtanaatttcttgctaaagangggggggaggaggggaggggggggaggagggagagagnga

SEQ ID NO: 200310 - DNA, 566 bp, Gossypium hirsutum
aaatgaagaacactgggaagagtagcaaaggcaacggaaaatcgtcgtcctcgtcggcggatgaggaaagacaggaaatccggtaccggaatgagtggatcgcctaagaaaggaggtcacggtggcaaatacacttgggcgggagatgggcttgcgccggccgagatcgggtttggtaatgaggttattgatgttaaggatcctaactttgaagatgccgatgagatcgtgaccgtttgatggggatcatcatcgacgatcatcgttgcctttgagttttttttatgatgatgatgatcggatgtgtaaatttatagttttatccctgaaaatgataaattgttgtaaacgcgatttcgtttgtcgtgctccttgtttgtttggtgtgttgaatttaaccaaaaacttagcatcaatagaaacggtgaagaacgtcgacggtaattgcagactaataaaagggagaaccatctggtaccagctttgtatttgccagggaatccaattggaccatttccggtggaaaaaaccggcgggaaagcctccgctgtcacaggattccgttt

SEQ ID NO: 200311 - DNA, 391 bp, Gossypium hirsutum
tttccctctttctataaattttctgtgctaggggttctcaacccatcatcgtcgtcgccataatcgccgtggctccatcgtggacggtggtcggagccacacgaaggccagattttcaaccctttttaagagagtccgaaagcaaagccctccaaactcggaaaatgcgaaagaaaaggcctctccccctcccttttaagtccgattttgacgacggggaatagatccgttgatgtgacgtgggattatccagtgaggtttcttctcttattttgtttaaaataaatttgtaatagaaaataaaaaaaaataaaaaataaaaaaataaaaaaacgaaatgaaacgaaaatgaaaaatagaaacagtcaaccttttttttttttgctttttg

SEQ ID NO: 200312 - DNA, 594 bp, Gossypium hirsutum
atcactacaacccgaaaaggtagttgagctttttgaaccgtcttcccctgaattgaaagaaactatccactttgtagtccatggtctccttgccactctttctccgaggatgcattccaaggttcctctgtcagagaacacggcaaccagaactgtaaatattggaagtgaaaattgttccgaactcgttgaggatacttcgctccagctacagccgttaatttccttaacacgagactatcttgctcgtcttccccgctggtgtgtgctgctgggacactaccttagaggcctcgagtaccgtctggaactaatggaacttttatccttgactagcagtgtcaacaataacgactgtggaggtgaccagtgagcacatcggtgtgagttgctctgattcgaatgcttccatctgtccatctgtatataatcggtcgatactaacttctttttctgggaaaagaagaaggatttcaattgagcaagatttgacccttcactgtcttgcagctggagagtttcttaatgtacaacacttcaaaaaagcaagattattgcattcaattttttttgttaaaaaaaaaaaaaaaaaat

SEQ ID NO: 200313 - DNA, 674 bp, Gossypium hirsutum
tctttagattttcttccttctatacaagacttcgggtcatccttattcttcttgctttcgtcgctcttttgcctcccgtttttttccacttcaagctccgccgtttgcatcagacgaaattaaggaagtgtggttggctgaacaatcctccccttgtgtgtgctcatggtggtgactcaaccaatgctttcccaaacactatgtctgcatatagtattgctcttcattctcaagtagactgcattgagattgatgtctctcgctcatcagatggagttttgtttgcacttcatgacagggatttgcagcggatatctggtaacagcacttctcaagttgggcactttagatcaaacgagctcaaagaactagatgtctatcatcagtcgggtaattcaaagattcctacaattgaagatgctttgaagttgatatcagcatcagttcggcaggcgattctagatgccaaggtggggcctccatcatatgaaaaggggcttgcaaatgatattctttccactgttgagaagatgcaatgtaagaattgcctcatttgggctaaaagtgatagtttagtaagggacataatcaagctttcatcaaatattgcggtaggctatgttgttatggtggatccccatactggcgctcgaactaacttgttgagaatgaac

SEQ ID NO: 200314 - DNA, 414 bp, Gossypium hirsutum
acggttatgtttcatgggatgttgataatgctcgactggagcaagtgttcagtgaacatggtacggtagtccaggctcgtgtagtctatgatagggagacaggccgatcccgtggtttcggtttcgtgactatgtcttcggaaactgaattgaatgatgccattgctgctcttgacggacagagtttggatggaagagcaataagagtaaacgttgcagaggaaagaccaaggcgaggcttcttttgatgttgaaaggatttacatacatgatctactgctgtttgctttttccttttcatttttcccaaataacttgtcctatttttcccccttttttaagggtgaatttacaggttttagtatatttgtaaggaatatatattttatccattgttatgaaaccatcatttag

SEQ ID NO: 200315 - DNA, 1133 bp, Gossypium hirsutum
  unsure (1)..(1133): unsure at all n locations
gcgcttttcaaggatgggaaacgtacccgactttcttatcccttagaaaatttccactcagatgtatctggcaggagcttccacaatggacgtttcatacagaggatgcgggagaaagcagcttctcttcccaatgtacgtttagagcaaggtgtagttacttctctacttgaagaaaaagggactatcagaggagtgcagtataaaacaaaagatggccgtgaattgacagcatttgcacccctaaccattgtttgtgatggctgtttttcgaacttacgtcgctccctttgcaaccctcaggtagatgtaccctcgtgttttgtcggattagtactggagaattgccatcttccttatgcaaatcacgggcatgttatactagcagatccttcccccattttgttctatcctattagcagcacagagattcggtgtctcgttgatgtacctggtcaaaaggttccttctattgccaatggggagatggcaaattatttgaagacagttgtggctcctcaggttccaccggaaatttacgattcatttgtagcagctgttgataagggaaatattaggacaatgccaaacagaagcatgccggcttctccttatcccactcctggagccctattaatgggagatgcatttaacatgcgccatccattaactggcggaggaatgactgtggctttatctgattatgtgttcttcggatctactgaagcctctgcgtgacctcaatgatgcaccaacactctgtaaatatctagaatcattttacaccctgcgtaagcctgtggcatctacnnatcatacatttggaggtgcattgtnacgagtgtttgcgcatcacctgatcaagcaggaagaaatgcgacaggcttgttcgatatctaagccccttgagggtcctcacagtccaatatgtgcttctagttaaacctgcccttggactgtctgcattttttgcggannnatacgggtgcgtatgtgcatccttacttacaatngatgactgactttgagctagattatcctctaggccagatagcagtttcaacatcgtttcaagctcgcaatttcgatattctccaaatagnnnagaatttatggtcctttttagtgagaaa

SEQ ID NO: 200316 - DNA, 678 bp, Gossypium hirsutum
gaacgagtaaaggagaaaaatggctatagagagctacgtggtggttcacaatatagcaaagaggcacaacgtcggaaccctagctagaagcgccaccgcctttggagtcaccgaactaatcttagttggccgccgtgacttcaacgccttcggcagccacggctccacttcccatctccgtttccgccacttccattccctcaccgacgctcgcctcttccttaaagagaaagattgtgatatttgcggggttgagatcacagaggacgctgtttccataactgatcatcctttcaagaaaagcactgcttttcttcttggtaatgagggaacagggctttcagctaaggaatgtgagatatgtgatttctttgtttacattcctcaatatggaggtggcactgcctctttgaatgtcactgttgctgcttccattgttttgcatcattttggagtttgggcaggtttttcaaaaagaatccgcgatgggaacaagtttgttgtggctgagaaacctttaaaacaggtgagccgaaaatactgcacagaaacagatgatcgtatcattgaggagcgaaaatcaagaagggaaagtgcttcaatgattctttgagatgaaaaatgtgatcttcttcaacttttgatcaatgtcctgatgatgatgaagattaaattaag

SEQ ID NO: 200317 - DNA, 692 bp, Gossypium hirsutum
  unsure (1)..(692): unsure at all n locations
caaaggtttgcatcagattcctcctgatttggattctgccaagaagccttccgttagtaataactcttctgctaatggttctgcattgcatgattcggatgcacttcgatgtgagaaaatttgcaacctaggtaggctgtcatcaacacttgattacgaggagaatgaagccaaacaagcccaaaaatctgtccgtgaagatgagtctggtcgtctatccggaaagacctctgtgaatgttaccgaaccccgccggatcttaaggggttatcccttgcaagtttcaactttgaaagaaatgaacgggtgatgttaaagggccttgcaacatccaagacgggcttctgctggtcccgtgtttggctcaagaatgttatcttcggaagtgcaatagctcaaaatcagctgctgagcttccactcctagtgggagaacttagaacaagccnagggatcgtccgacatccccattctaggatatcagatacagaaaaccctggcagaatggtaatgtccagctttttggtcagatactaattctagttcccgggatgtaaggtatcccatttttcgaaacagacacagaccatcaattcgaaaccatgggtataatgtgatggaactcaagtccatgcaatatcctgtacggaatggtccgaagagtatgttctggatggaaagatcnaccggtgt

SEQ ID NO: 200318 - DNA, 787 bp, Gossypium hirsutum
  unsure (1)..(787): unsure at all n locations
cccttcatttcatcttctgcaagctagcttcacatcttctatagttcttctgctctctataacagctcccttttgtgttatttatacttgtttgtttctgggtttgttttttgtttaatatttccatggaagaagctattgttgtgaacaaaggagacgacgaactcatcgatttgcctcctgggtttcggttccatcccactgatgaggagatcataactcattatctcacagagaaggtgatgaacagcaacttcagtgcaagcgctattggtgaagttgatttgaacaagtgtgagccttgggatttacctaagaaagctaagatgggagagaagcaatggtacttcttttgtcagagagacaggaagtacccgacagggatgagaacaaaccgagcaactgaagctggttattggaaggcaactggcaaagacaaagagattttcaaagggaaaggttgccttgttgggatgaagaagacccttgttttctacaaagggagagctcccaaaggagagaaatctaattgggtcatgcatgaatacagacttgaaggcaaattctcttactataatctccccaaaggtgcaaaggataatggggtggtgtaanggttntcataagaatatacagggaccagnaaagtcaatcnctgatcatcatcactgttgaaatgaatcttatggtgatgatttatggatatgctcactgccnctctcatggaccctactatatccacaagctgcntctctgcacttatgacgcgcgatacgaatcaagcgcn

SEQ ID NO: 200319 - DNA, 1021 bp, Gossypium hirsutum
  unsure (1)..(1021): unsure at all n locations
ttaatcatcactaaagagattctcctctgttctattctaaaatgtctctcttaaaccaattgtttaatagaggcgtttttggtgcaaaatgtaaaacatgcttgagcttggcaatctcgcgcatcaagttgctccaaaataagagagatttgcagctcaagaatatgagaaaagagattgcccaattcttgcaggctggccaggaaccaattgctcgaattcgcgtggaacatgtaatcagagaacagaacatatgggctgcatatgagatactggagcttttctgtgagtttgttcttgcccgagttccaattcttgaaagccagaaagactgtcctccagaattacgagaagctgtggcaagcataatttttgctgctcctagatgttcagatgtgcctgatttattgcagatcaagaatttgtttgctacaaagtatggaaaggaatttgtcattgctgcaacggagcttcgtcctgattctggcgtgaaccgtgcaataattgaaaagctttcagttagtgctgcatcaggtgaaataaggctcaaagtattgaaggaaattgcccaacaatatagtgtagaatgggattcttctggcactgaagcagagttcaacaagaaatatgaagatttactggctggatcaaagcaagtatgtgctgaggctgcagtttctcaagctcccaataaacaagcatctggtaaatcttcgccttctaatggggcanaaactattttgcctactgatgctaggccggcatctcaacaccacncaagttcccacccantgagtaattgactanntagtgaatntgatcattcatgaaaatggtctgccggtccaatttctgacattaaaacgagaccaattacacatntgatgtatgggaaagagctcagctgctattgccttgnnaaacgtgcaanncagtgcacgtgcagctgtganctgggaatgtgagatttggttcactgaactacaggagcttatctntggtcnngttgtcacacatgtct

SEQ ID NO: 200320 - DNA, 596 bp, Gossypium hirsutum
  unsure (1)..(596): unsure at all n locations
catttgactactatatggttggtcaaaattatatctgtcctttgattgatttcagaagagtggacagctcccatactgttgtatccggtttctctgctgatatcaatttcatttgtaaaagcttcctgaaaattaagcatgtgctttgctgaaggaatttgtatttttaaaatttcataattctattttgtaaaccatggtaataaactttaaggttcatggatatagatatatataaagagagagagagaggaagtgcaatagggactgtaattctttcttaattattagctactatttgagagcatcccaggttaagcttattccatgtttcttatcttgtgcatcttttttgtgtgtttttattgagggtttattgggtcttagtaagtttttctctcttcatgttggattggttatcatcacccgattgacaaaatgcatagaaaagaacatgtattttgtatatttaacatctcacccttcttatgtgcttcatatcatctatggtattcatattaaatactgaggacatattcggctctttttaaataacaaatccttctctacatcgcgttatgtcttgaaaatctatn

SEQ ID NO: 200321 - DNA, 999 bp, Gossypium hirsutum
  unsure (1)..(999): unsure at all n locations
tccaatccactaatctcccccgctactcaccttaaggctcaccctcgcttccctatccggcaccgcttcaggtgtagcttggtggaacccttgaagttcgaaaatggaaagcctcactttcctctcctcacctctgatcctgcgtttccaaccttcttgtcccctaattcccatttccaaaacgatatcaacaaacacgatactaggctccgtatattttctggcactgctaatcctgctcttgctcaggaaatcgcatgctatatgggtctggagcttgggaaaatcaagataaagcgttttgctgatggtgagatttatgttcagttgcaagagagtgtgagagggtgcgacgtgttccttgtgcaacccacttgtccccctgccaatgagaatcttatggagcttctcattatgatcgatgcttgtcgaagggcttctgctaagaacattactgccctcattccctattttggctatgccagggctgacagaaagactcaggggcgtgaatctattgctgctaaacttgtagcaaatttgattactgaagcaggtgcaaatcgtgttcttgctggtgatcttcattcagggcaatccatgggttactttgatatccantagatcatgtttatgggcagcttaggagngactttcttggcctttgtcctgcccatcttanttcaagttccaaggannaagtctanaaaggcccattctgcacncaagttcccaaatgagaagctagaaactgtctattgctgagattnaagtgccactgaagattgnaaaggtgcctgccctggcctttaaagttctatggccattaaaaganntggggtcttaataaggggatncncttggctttttcctgtttagagggctgagcaatcttcttacaggcagntnctgtttctttgcataatgatgtattatggatatggactaatactaatcaggaatttcattgtttctatgccttaaaccttaatatatcaa

SEQ ID NO: 200322 - DNA, 661 bp, Gossypium hirsutum
  unsure (1)..(661): unsure at all n locations
tagaaatgaccgatttgctctttgatctattcataatacaaatccaatcatgaatagctatgattagttgtctctaatgcacacacgtgtccttaaacaggctgatgtagataatagcggcacaattgattatggggaattcgtagctgctacactgcacctaaacaaaatcgagagagaagatcatttatttgctgcattttcctactttgataaggagggtagtggttatatcactcccgatgaactccaacaagcatgtgaagagtttggcataggggatgttcgacttgaagaaatgatccatgaagtcgatcaagatatggtaagttcttcattttaaaacaatcattataccatatattggccaagaacaagaacaaagtcttaagttacctctctttgcataaccgaaggtgctcgaaagaattaataaactntatttagcactttgtcgcctgtatcggtttgtccacttatcgtatactgtaccaatcatatgcangatggacgcatagactacaacgagtttgtagccatgatgcatatagacatgtcccacaaatgctgccatgcggtgctggtaggaaggctacacatagttgggatggatttaagagcattaacttagctatgctctctcaagtctgtgtatgaaccn

SEQ ID NO: 200323 - DNA, 1047 bp, Gossypium hirsutum
gatcactttttcacgttcccaaagcacccctcctttgatccttggttgcgccacggattccagtgaagacaagggtattttggggatgaaccttgggcggttctctttcgcttcccagtccaaaatctccaagttttcctactgcgtgccgactcgccggacgaaacctggggtttcgccgaccgggtcgttttatctgggtcaaaacccgaattcccacgggtttcagtatattaaccttttggctttccctcaaagccggaccatgcctaatatggatcctttggcttatactctccccatgctagggataaggatgggagccaaaaaaactggcaatccccatgcacgttttccgacccgacgcaggcggatcgggtcaaaccatgattgattcgggttccgagttcacttacttggtggatgaggcctataacaaggtgagggaagaagtggtacgactggtaggtccaaggcttaaaaaaggttacgtgtatggtggagtagccgacatgtgtttcgatggcaacccagtccagatcggacggttgatcggcgatatggtattaaagttcgaaaaaggggtggaaatcacagtccccaaggacagagtgttagccgacgtcggaggtggggtccactgctttgggatccgcccctcaaccttgctgggaatcgcaggcattatattcggcaacttccatcacccaaatctatgggtggaatttgatctggcccattagaaagtgggattcggttaagccgattgttgcagagcagcagtataaagaggcctttacttattgcgggattgatcccgatcacatgagatgatatgaaaaaatatcttatccgcggtctacatgaatggagggtcttgtaatactgggtatgttttaagctatatccaacattggttaactttatacctttacattctgtactactttagtgctatcatgtgtctatctatatggaatgatggggctttatgaaatattatgtattacttatcatatttgtttaggtgatgttatatctatattt

SEQ ID NO: 200324 - DNA, 685 bp, Gossypium hirsutum
  unsure (1)..(685): unsure at all n locations
ggtcctgcaaaagctcctccaaccatgtgctctgaagaaacacctcttttattatcatatgacgccgccccacaaaatttaacaagctctctggccactccagctgtaaatactggcattccgaattgcacatccaacctagctttactgaccaattcagaaaatcctgcgactgaccatgaacccgtttcctccaaaactgacatggcaactgatcaaagtctgttggagccaagggctctggttccggttccagttccagcaacaaatgttgaggcactaactgctgtcgcagtcaaccagaatttccaaaaatctgagcttgcacagcatcgaatctggaggccattttccatatcagaagtcgaagcattggtacaggcacttgaggagattggtactggaaggtggcgcgatgttaaattgcgagcttttgagagtgctgaccatcggacttatgtgaatttgaaggataaatggaaaacactggttcacacagcgaagatttccccacaacaacggcgaggagatccagtacctcaggaactcctggaccgagttttggttgcccatgcttactgggctcagcatcaanctaaaaagcagcaaagtaagcatcaccatcatcgtcccggaactccgagcatcacagacaccactgaagctgaaaaaaaaggtgtttcct

SEQ ID NO: 200325 - DNA, 832 bp, Gossypium hirsutum
  unsure (1)..(832): unsure at all n locations
cagatgctaaacgcagcagatcagataaaaaagccaaaaagaggcatgcccgccgaaataacctacaaaaatcagatgagcccttaatattggagaaagaaattacttcacaaagagaagatgacactgctatgagtggcacagatcaagcattaagttctggttctcgttctcctgtagactcaagaagtaggaaaacacctaaagaattaacacaagggtcaacttctgaccaacttcttaagatgagcaggaacctaagtggacagtctggggatttgctgaaggagggatatgttatagctatgcatgcaagagatcgacctgcactccatctgtccagacaaagagttaagggtggtggttggttcctagatagcatgtcaaatgtaactaaaagagatcctgcagcccagttccttgttgtctgcagaagcaaggacacaattggtctgcgttcttttctgctggtgggaagttgctgcagaataatagaagaatggaatttgtatttgcgagtcacagttttgatatttgggaaagttggacattgcaagggtccgttggaggaatgtaggctggtcaattgcagaaatccttcagcatttttggatgtacgcattgagattctggcagctgtatgtgaagattatggggtaactcgtgacttgaatagttgtcaccgatatagcggttactctcgatagccactgtaatgttatttaaaatcctgccagatgatttcaaagaaatgtctaccggtggaaattnttacaatgtggcattttggtattaaaaatatattatagaatttaattgtgagttcatagat

SEQ ID NO: 200326 - DNA, 791 bp, Gossypium hirsutum
gccactgttcaggttgtcgatttgcaagtttttgctgttcctcgaattactctgaagcctttgctcagtgtctttccttgttttgccaacatatatgtctccctaatggacaagccacatgttgactttgggcttaaggtactcggggcagatggtaatggccattcctggattatccaggtttgtccaggagctcataaaagatcaagttgcaaatatgtacctatggcctaaagccttacaagtgccaataatggatcctacacaagcaatgaagaaacctgttggaatgcttgatgtgaaggttgtcaaggcaatgaagcttagaaagaaagatttcctaggcaaatccgatccttacgtaaaactaaagttaacagaggaaaaactctctgccaagaagactactgtgaaacaaagcaacttgaaccccgaatggaatgaggaatttagttttgttgttaaagatccaaacactcaagcgctggagataattctctatgactgggagcaggttggcaaacatgacaagatgggcatgaatgttgttccattgaaagatcttacacctgaagagccaaaagtttttactcttgatctgcttgaaaatatggatccaaatgatcaacaaaatgagaagtcacggaggcagcttgtcttggaaccctggtcaaacctttaaggagatgagattccaaagacttggcgactcattatggccaaaagctcaaaagaacacctgcgtggaggttactgaattttgtgatgaactgaatattaagggagtccct

SEQ ID NO: 200327 - DNA, 754 bp, Gossypium hirsutum
  unsure (1)..(754): unsure at all n locations
attaaattaaatatgtttccttttcttcttattattatcctctccttgtcatggagaattagtgcttcagctcaacctgctgaggaatttcttcgttgcctttccattcgttttcacaactcttcttcctttgccaaactcgtttacacccaacataattcatcatactcctctgttttgaagtcatctgctcaaaatttgaggttcacaacaccatctacgcctacacctttggccattgtaacaccactgcttgcatcccacatccaagccgcagtttattgttgcagaaaacatggactgcaagtcaggactcgaagtgggggtcatgactctgagggtctttcttatactaccgcttttaaagtgtcctttgtgggtgtgatcgattgggtgaatcttcgatcggttcaggttaacgttgaaaaagctaccggtatgggttggaatctggtgcaactattggagaattgtactacgaaattgctcggaaaagtagaactcttgcctttccggctggtatcggtcacaccgtgggtgttcggtggacatttgagtggaggaggctatgccgtatggtttcgaaaatatggtcttggtgcagataatgtaatcgatgctcgtttaattgatgttgaacgggagaatcttgataaaaatccatgggagaagatttgtttggccattcnaggaggtgtgggtagcttggatagccttgctgaagctaataatgcagttcaacttatgtctgttt

SEQ ID NO: 200328 - DNA, 914 bp, Gossypium hirsutum
atcgattgagatctcatgaaacctacctttttcatgaaatttagctcttgaactgaatttctttttcccaaatatatgctcttttctcgagacaaaaatggggttaaaacttgcaggcctgcatccggttttcctataagcatcttgctttagatccccaaggagtaaaacaatctcttcctcgctaacaacagcaacgtagtaatcagatccaggctcggtttcgccgttgaatttagcagatttcaagtcccagaagatatcaaagggtttaccatcatcgactgtgaagcgtttggagccttgtttcctccaaaaataccatggtttaagctcgattttgcaggtatactgagactccccctcgggaccttccactgatatggaaagaccatgaagcaacagattcttgcaccaagtgacggtgatcaaacgacagtgatccgccatttttgtacggtaaactgacatgaaaacactctgaccccacctggttaccgccggatcatggtcggttggcttctcacctgatgaaaaacaagcgggaatcccgattgggtcttgcatggttatctacaagaattaataaaagtggagttgatggatcaaagcttgaatgaaagtattaaggaataagggagatttactatataatgtgactattgaatgagttgagtgagatttaatgatggtgccaaaggtgttattggcagcattaatggatattaaaaaaaatagttccaaactgcaatgtgttgtaatgaattatgattatagatctattacattcctttcttttcttgggtttaatatatttaaaggtcaactttttcttgatggatctgatacttatttcttaagtttatatatgtgtttgaaacgggattccatgttttaatcgttaggtgtttcag

SEQ ID NO: 200329 - DNA, 656 bp, Gossypium hirsutum
  unsure (1)..(656): unsure at all n locations
ggcagacatgcatttggtgaccagtatcgtgccactgatacaataattactggaccaggaaagcttaagatggtttttgtcccagaaggtggagacaagccggtggagcttgatgtctacaattttaaaggccctggcatagcactttctatgtataatgttgatgagtcaattcgtgtatttgctgaatcctctatgtcattggctttttcaaagaagtggcctctttacctgagcacaaagaatactattctcaagaagtatgatggcaggtttaaggacatattccaggatgcgtatgagaaaaattggaaggacaagtttgaagcacattctatatggtatgaacatcgactaattgatgacatggtggcatatgccctaaaaagtgaagggggatatgtttgggcatgcaaaaattatgatggagatgtccaaagtgatctacttgctcaaggatttggctctttgggcttgatgacttcagtgttgttgtcatctgatgggaagacactanaaaccgaggcagctcatgggactgtaactcgacatttcaggctttatcaaaagggacaagaaaacagtacaaacagtattgcctctatatttgcatggaccaaatgactggagcatatggcccaactatattaaaacca

SEQ ID NO: 200330 - DNA, 390 bp, Gossypium hirsutum
cgcaattcgatccggagggtcggaaccgatgaggatgcacttaccagagtaattgttacaagagctgaaaaggacctgaaagatgtcaaagagctttattacaagagaaacagtgtgcctcttgatcaagctgttgctaaggacaccacaggggattacaaggcattgcttcttactctgttgggaaaagaagattgaacatctttatttggcccattttcaggtttaaattaagtgttgttctggtttgagattggaccttattgatatgagtcactgttatcttcatccttgcttttaagtttttatgtggtgtgacaatgtttgtttacatttggtttggttttaatggagttgttattttccaaaggcaaaaaaaaaaaaaaaaaa

SEQ ID NO: 200331 - DNA, 728 bp, Gossypium hirsutum
  unsure (1)..(728): unsure at all n locations
attcaaatttccacattgtttcattttcacccctaaattcccgttccactatatctaccccgttttcgtcccatttttttccttaaattctccccatcttcaaattctctctaattttcaactgctttttttttccttcttcaaattggtgaaatggctaaagtcggattttgtcttacctttgttttgttcattgttgctgaactcacttctgctgctgaaccgccggcgcctgcgcctgcgctgtcactcggtgcagacttaccgcaactcgctcctactccggtaactggatctcccgactccgcgccatatatctcaccggtaatggatgcttcgccaccggcaccaatggggccatctccatcagatctggcgccaggaaactcgcccgcgagttctcccgctccttcaccggtcgatgccagcgatatcaaccacagcgacatcaacgcagaaggaagcgaagagaagagcggcggcgatggaggaatgagcggcggaaaaaaggcgggaatcgtgtttggcgtantggcggcagcgtgtttggttggcttcggtggattggtttacnaaaagagacaagagaatatcnggagatctcagtacgggtacgccgccaggagcgaatttctgtgaagaagatgaacagtacaaaggtttatcattcaaatgtattactancatttgattttgatttgatatttattttttattctttataaaga

SEQ ID NO: 200332 - DNA, 669 bp, Gossypium hirsutum
  unsure (1)..(669): unsure at all n locations
ctgaatttcataaactttcttaaaagtttcaattctcagtaaaaaaagagaaaagaattgaagggtttttttttttttttgaaaagctttaacaattcatgtacagcaatctccagagcttcaaataactatcagccatgaaaatcccatcttcatttcaatcttttaacctttgaaaaaccctttgcagcattgggaatcaaagcaaaattctgttgtttttgttgacccttttttgttctagaggaagaaaaggaagagaatgaagccaattcgttgtataatcagtttctccttgttgttatgggcaacttggttggtgactgtgggttcagatctanctgctgatagggcagccatggtggcacttcgaaaagctgttggtggacgcacgcttttatggaatctttcgagcagtccatgtacttggactggtgtaaactgttctcagaacagactcgtcgagttaagactccctggaatgggactttcaggtcagcttcctagtggtattggcaacttaacgcagcttcaaactctttctcttcgtttcaatgctctttctgggtctatccctgctgattttgccaagcttacttctcttcgaaacctttacttacaagggaatcgatattctggtgagattcctctgttcttgttctctttgcc

SEQ ID NO: 200333 - DNA, 670 bp, Gossypium hirsutum
aaaagaaggtgaaaggatcaacgaggaggaatatgtaaatgatgctgatccaagtatccttcgattcttgcttgcaagcagggaagaggtttcaagcttgcagttacgagatgaccttttatcaatgttagttgcaggtcacgagactactggttcggtattgacatggacattgtatcttctaagcaaggatccctcggcattggtaaaagcacaacaagaagtcgacagagtcttagagggacggaaccctacctatgaagacataaaggatctcaagttcctaactcgatgcataactgagtcattgcgtctatatccacatcctcctgtcttgataaggagagctcaagttgacgatgttcttcccggagactataaagttaaggctggtcaagacataatgatttcagtatataatatacatcattcttcacaggtctgggaaagagctgaaaagtttgtgcccgaaaggttcgacttggaaagctcagtccctaacgaatcaaacacagattacaggttcattccgttcagcggggggcctcctaaatgtgttggtgatcaatttgctttactagaagccattgttgcacttgcaattttccttcaacgcttgaattttgagctggttccggatcaaaacattagtatgaccaccggagctacc

SEQ ID NO: 200334 - DNA, 638 bp, Gossypium hirsutum
  unsure (1)..(638): unsure at all n locations
gtttaatgagagccaccgatgttatgattgccggaaaagtcgccgttgtctgcggttacggtgatgtcggcaagggttgtgcctcagccttgaaacaagccggagctcgtgtcatcgtgaccgagattgatccaatctgtgcccttcaagctcttatggaaggactccaagtcctaactcttgaagatgttctttcaacagctgatatctttgtcaccacaacaggtaacaaggacatcatcatggttgatcacatgaagaagatgaaaaacaacgccatcgtttgcaacatcggtcatttcgataacgagatcgacatgttaggcctcgagaattatccaggtgtcaaacgaatcaccatcaagcctcaaaccgataggtgggtattccccgataccaagacaggtatcatcgtgttagccgaaggacgtctcatgaacttaggatgtgctaccggtcatcctancttcgtcatgtcttgttcgttcacgaaccaggtgattgcacagctcgagctatggaaggagaaatcaaccggaaaatacgagaagaaggtttacgttttgccgaaacatctcgatgagaaagtcgcttctcttcaccttgggaaacttggggctaanctcactaaccttaca

SEQ ID NO: 200335 - DNA, 673 bp, Gossypium hirsutum
  unsure (1)..(673): unsure at all n locations
ggtgtctcggcaaagcaagaaaaagatgctagatttcaacagataaagaaggaagtcattgagatgataaagacaagaattccttcttttgagacaaagatattagagcctccacctggagcttctgatgattttcaagaaactggttctcaagaaagagttaatagaaggaaatttggcatggatgcatcattggagaacaagatttgtgacctttatgacctctatgttgatggattggatgaagatgcaggtcctcaaattcgaaagctttatgtggagcttgctcggtctgtggccaaatggtatgatggacaaccatgagatcaaacgtgcaatttgtagggaaaaggaaagacgaaaagcaaggtacaatagatgtaaggaacaagagaaagtcnagaggaaaaaaataatggcaccacgattggaggagagtgttcgagtggagtctgcattgagtgctcagccacagcatactcgagagaggttggctactgattctgctattcaggtttttaccttcaactaataaattaacatcaagccacaacagccgctgccgtccaaattcccggtccctctacaaatggttccactttgggacagggtaaacaaggataattaaaaggcctttcaancaatgccctggaggaaaatannagtttcccat

SEQ ID NO: 200336 - DNA, 729 bp, Gossypium hirsutum
gaagaaaacatacaaaaatttcccctattttccccgaagttagtttcctcctatttaagtcgctctttgtccctaaaccagaaaggttaaggcagaagaaaaagaggaatagaaaaggagaatctaagaagcagtcgtgttggattctttcgcttttacaatcaaacccagctacagtttacagtgttatctaagtttcaatggaggacgatacttggagctttgccttctcagcttcatccaggagctatcaatccactgttaaatcccaaagtgatctttgtattgattttgaagagattgaagaagatgatgaattgatgacggaatacccctgcccgtattgttcggaggatttcgatttactgggcttgtgctgccatattgacgaggagcatcatcttgaagctggatatggggtatgtcccgtttgtgctcacagagtagggatgaacatggttgaccacataacagcacaacatgggaatattttcaggagtaaccacaaattaaattttggtaaaggcgactcttattcaactctttcttccttgaggaaggagttgcatgatgcacattatcagtctcttctttccaggtcatggtcttcactctcttcgtccaatacagcacccgatccattgctttcatttctttacagtgcgactccagctgattcatccgaaagtgtacagcccgtcactcctactgaagtgaccatggaaaaaa

SEQ ID NO: 200337 - DNA, 713 bp, Gossypium hirsutum
  unsure (1)..(713): unsure at all n locations
tttttcttataattgctgaagggagtgaaggccttgctcgatggcttgaggatccaacataccctaacaccactttatcttggaacattgttcatgggagtggtatgattcaccaggatatatatagatcttcaagttattatattgcacttggtaatatgaacacagaggacataaaggtgcaattaaacttcacattcaaggcttatatttacaatacaactgaagcttactacaggtgtaccttcgctaatggagtgtgtagcttgaatatcttgtttcctgagggaaattctgtagtcttgacatctcctggtccagaacagcgtagatctgcacacgactggtcttttagattgtcgtatggaccaagatggattacatatattgttggcattggtggaatgactggaatcatgttggttgcctttaacttcttaaacaagtgccaatatactcctgaagatgaagtacgttttcataatggggagcttgcttctgcaagagcccctctgctttcacgcaaagccgatgatttatcaagtcgaggatcatcttatgattccgtttcaagtgatgaggcagatcttgaagattttctagcaggttctcttgaaggcacatcanaaggagatggtgaaaacagtaacaatacccggagactttgtgcaatttgcttcgatgctccaagggactgcttcttccttccatgg

SEQ ID NO: 200338 - DNA, 685 bp, Gossypium hirsutum
  unsure (1)..(685): unsure at all n locations
caaagttaaagattcttcctttctattaaagtatatatattttccttcttttctaaccggaaaaaggaagaatatttttatcagatttcccagtttacccttattatttctcttaattctctcttacacccatcctccggaagcttacccctcgtttcttttttgtatagcgcgatctgggtaatttcaaaagaagggggaaaaatgctttgtaaaatggtgttgatgccccgaaaaaagaaagtcgggtctgttccggtttacttgaatgtatatgatttgactccgattaatggatacgcttattggtttggccttgggatctatcattctggtgttcaagttcatggggttgaatatggttttggagcgcatgagcattcaacgactggaatttttgaagtggaaccaaagcaatgtcctggtttcacatttaggaaatctattttgattggaaggacagatttatgtccgaaagatgtccgcgcgttcatggagaaacttgctaaagagtactcggggaattcgtaccatctcattaccaagaactgcaaccatttctgcaatgatgtgtgtattcagttggtagggaagccgattccgcgttgggttaatcgtcttgctagattgggtttcctttgcaactgtgttctcccancagggttgaacgaaacnaaagttcgcc

SEQ ID NO: 200339 - DNA, 665 bp, Gossypium hirsutum
  unsure (1)..(665): unsure at all n locations
aaagcaaaagcaaaagtaaaagcaaaagcaatcatctgtggatgctgccgcactcgaacatgccacgggaagacaaccaggttccatgactacccgaccaggatgttgcgtacgagtccggcgaaaaagttcacatcctcggaatcaatgaaccggacgaggaagggtcatcggttgtcccacctttttcctggaaaaagctatggcttttcactggacctggttttttaatgtcaatcgcgtttctggatcctgggaatttagaaggggaccttcaagccggagcaatagccggttactccttgctgtggctgttgatgtgggctacggctatggggttgctggttcaacttttgtcggctcggcttggtgtggcgacgggaagacacttggctgagctgtgtaaagaagagtatccgacttgggttagcatggttctgtgggtaatggcagagctggctctgattggagccgatatacaagaagttattggcagtgccattgctattaagattttgagtaacggtattttgcctttgtgggctggcgttgttgttacancttctgattgttttatcttgttgtttcttgaaaattatggggttaggaagctggaagcattttttgcagtccttattgcaactatggcagtctcatttgcttgc

SEQ ID NO: 200340 - DNA, 818 bp, Gossypium hirsutum
gcctagattacatgataatctcgactgggaaatggtttctcaaggctgcaatctaccatgagaatgacaccgaagttggctgccatatatgtccaggaaagaacctgaccgaattaggatttgtttatgcttacaacaaaaccctccattatgtcatggacttcattgcaaactcaaagcataaggggttgatctttttcaggacatccacgccggatcattttgagaacggggaatggcataacggagggagttgtccgaagacaaccccggctaaagaaggagaagttgaaataaaggacttgagccgaattctgcgtaacgttgaattagaagagtttgagaaggcagctgcaaaagccgctgacaatggggtgaatcttaagcttcttgacttcacaaacctcttattaatgagaccagacgggcatccgggtccataccggcagtttcagccgtttgcagagaaccaaacagccgtggttcaaaacgactgtctacattggtgtttacctggaccaatggacttttggaatgatgtgattatggagatggtggtcaggggttaaattattaaaaagggagtaagttctgagcaatttttggaggttggtttttctcggaaattttgacaatggcaagcctgaagctatttcatcagattgaaaagtagataaactatacttgtctgtaattcatttcttggattggcaattgtaacttgattctaaaactctatgattggagatttgctattagtgtatagataaataatctgcaaacttgtacctatatgcaatttattgcattttccatac

SEQ ID NO: 200341 - DNA, 638 bp, Gossypium hirsutum
gttgtatcgggtagaaaacggtatttggatgtgctttctacgttttccgaaatgaggtcattggcggtaaatttgaacgagtacactttctctactgttcttaagagcttcgccggtgcatcagcatttagacaaggtttaaaggctcatgcccttttgattaaatacggtttcattaatagttctatgcttaggactggtttgatcgacttatattttaaatgcggaaagattaagctcgctcaccgcgtgtttgaggaaatccctgagagagatattattttgtggggggcggtgattgctggttttgcacataataggatgcaaagggaagctttgaattatgctagatggatgataagtgaaggtatatatcccaattctgttatactcaccacgatacttccagtgattggggaagtttgggctcggaaagtaggccaggaagtccatgcttatgtggttaagacgaaaagttactcgaagcagttgtctattcagtctggcttaattgatatgtactgcaagtgtggtgatatggaatcgggcaggcaagttttctattgttctggagaaaggaatgcgatttcttggaccgctttgatgtccggatacatatcgaatgggaggcttgacct

SEQ ID NO: 200342 - DNA, 718 bp, Gossypium hirsutum
  unsure (1)..(718): unsure at all n locations
aaaaaggaacccaactgaaaggctgaatctttagagcttttttcttttcaagaaacaaaaaccaaaaattaaaaaaaatgcgagcttggttctcaggcggcagtagtgggaatgaggaggagcggggaaaagaagggtcatctcttttatcagattggaactcatatgctgcttcaaaagaagcagaagagggaactacaactgtgtttgggtttgatcttgagtctgctgcgaggtccgccaatgatactgtcactggtaccttcaatgttgtttcaaaaggggtgagagatctccctgggaatctccaatctgccacaagtagtgtcccttcaggaaaagcattcatctactttggtttatttctggcagctggggtctttttttgtttttattgcttttaccatgtttcttccagtcatggtgctcatgccccaaaaatttgcaatttgctttacccttggatgtggctttatcattggatcattctttgctctcagaggcccaaagaatcagttggcccacatgtcatcgaaagagaggcttccttttacattaggatttattggaagtatggtgggcaccatgtatgtttccatggtgcttcatagctacatcctntctgtgcttttttctgttgttcaggtccttgcacttgcatactatgctgtttcttacttccctgttgggtctgcttggctcaaatttctcacctctt

SEQ ID NO: 200343 - DNA, 915 bp, Gossypium hirsutum
gttttgcacttatgcttgaaaatcagggcttccatggagtccaaaatttccatctttctcccaacatataatctctgcaatcttctcgttcttgttttcttctgttttgctgcttgtccttcacttggtcgcctctctttcaacttctatgcaacatcatgtcccgctgcagagttgatggtgagcaacactgtcagggcagcttcctccaatgatccaaccatccccgggaaactactgcgcttgttgttccatgactgtttcgtggagggttgtgatgcatcagtactattacaaggaaatgggacagagcgaagtgatccagctaatacctctctcggaggattttcagttatcgattcagccaaaagggtgctcgaaatcttctgccctggaaccgtatcttgtgctgatattattgctttggctgcaagagatgcagttgcaattgcgggcggacctgcatttcaaattccaacagggagaaaagatgggaggatatccaactctgttaacgtcaggcccaatatattaaatactagctttaccatggatgaaatgataaagctcttcaattctaaaggcttgtctctagatgatcttgttacactatcaggtgctcatacaataggcctagctcattgtagtgctttcagtgatcggttccaacaggactccaagggaaagctcaggctggttgacacatccctagacattacctacgcaaaagagctcatcagaaagtgtccagcaggtggaagtagcacatccaacaccgtcagcaacgatcccgagacatcctttgcattcgacaatcagtattatgggaacctattagcccacaaagggttgtttcagtcagattctattctactaaaggatggaagaacaaggaaacaagtagaggagtttgcc

SEQ ID NO: 200344 - DNA, 752 bp, Gossypium hirsutum
  unsure (1)..(752): unsure at all n locations
atacctggattatttggttacgccattgttcaatcacaagttcgtttcttccaatcccagagcttggttcttcctatgatgtttagttctcttgcaacattgtgttcccatataattgtttgttgggttttggtattcaaatttgggtttggaagcaaaggaggggcattggctatcagtttctcgaattggtttaatgttatattgcttgggttttacatgagatactcaccttcatgtgagaaaacccgaaccctccatttgaaagatgttttcttgagtgtcaaggagttctttcattttgccataccttctgcagtaatggcttgcctcgaatggtggtcgttcgagattcttgtattaatgtctggacttctgccaaattccaagcttgaaacatcggttctttctatatgcctttcaagcgattctttgcattatactatatcgtttgggattagtgtagccgccagtacacgaatttcgaatgaattaggagctggaaatccacaagcggctcagatagcaaccctagtttcaatgcttattgcactcgtggaaacactcattgcaagtacaatccttctctgttgtcgccatgttttcgggtatgcttacagtagtgaaaacgacgtcgtaatcaaagtaacacgaatggttccattgatctgtctctcatttattaccgacggtttacatggagtancttgcgggatcgtgagaggtattgggtggcagcatgttggagcttc

SEQ ID NO: 200345 - DNA, 1400 bp, Gossypium hirsutum
ctctattttctttcaccttctctcttttcttttttattcccaatagaactgacacaatctttccttctttgtctctcctcaagtttcagaccttcttctttgcgtcttttagcaggaaaaagaaaaaaaaaacaacatggttggtatcttttcgttggtgacagggtggcctgggccaagtggctttggttcctcttctactgctgaacaggttactcaaggaatcgatggaaccaatctcactgctataataactggaggtgcaagtgggatcgggttggagacttcacgagtattggctcttcgaggtgttcatgtcattatcggtgcaaggaacgtgaaagctgcgaatgaagccaaaaagactattcttacagaaatcgaaaccgcacgtgttgatgttttggagctggatctttgctccattagatccattagagcatttgctgacaatttcattgctcttaatctcctcctcaatatcttaataaacaatgctgggatcatgttctgtcccttccagctttcacaagatggaattgaggttcagtttgcaactaatcatattgggcatttcctcttaactgagcttcttttagacaaaatgaagaacacagtgaaaactacgggtattcaaggaaggattgttaacttatcatcaatagcccacacccactgttataaaaatgggatccgatttgatcacatcaatgctaaagaaggttacaatgacaaaagagcgtatgggcagtccaaattagcaaatatattacatgccaacgaactctctcgtcgattgcaggaaggtggtgtcaacgtcacagtgaattcggttcacccaggattgattatgacgcctctatttaggcactctgccgtcctcatgaacttcttgaagttcttcagtttcttcctgtggaagaatgtcccccagggggcggcgacgacctgctacgtggccctccacccacggctgaagggagtcaccgcgaaatactttgtagactgcaatgagatgacaccaagttcatatgcaagagatgaggctttggcaaggaaactatgggatttcactcacaaattgattaactcagtttctaaaccttgaatccaatatcgcaagctctctctaccagagatgaaaagttattaccaattatatacaaagacagaagcctactgaaacagttgcattctctcccatttcccatcattattgtattagtaaaagtactaaaaaagaaggaaagattttcagcatgggcagttgaagcataactcgagaacaaaatagtagtttcatgcatgtgtcgttcttcaatgtttgtgagggaataaaatcctttgtatccattattaatatgtttttgaattatactcatttatcctttctcaaaaaa

SEQ ID NO: 200346 - DNA, 609 bp, Gossypium hirsutum
  unsure (1)..(609): unsure at all n locations
cgggatgaataggacccgaagtaggtccgaaagggtgtgtctgaatgccatcgctggagaccctctctgaagaaacaccctccgtcaaacctccagcagcctcctttcgcagccaaatactgtcaactacagtgggcctctaacccactgcccgtagagatgcatcctaccccatatcagaatcagtaacatccccagtcaattgtataggacagaaactatcaccatgccccaaacatccacacaagtagcaaaacagtgtcgatttctcataacagaagcgcacatacatagaattgccaggggaaagtaaatttttcttccttcgctttaatggagcctgtatatcaggccgaacccgcatgcgtaaataagaagagttccactacttatctgtttagcatcatactattcaaaagcaccaacaagattacctaattgctgagcaacaattttcgagaaacaacctgacggcaaaccatgaacttgtacccaaaaataggagtagatcaacgacacaagcatcgggtcttcattcggttgcaaacaatgaaacactaccaggtgattattgaaagtccacggggcactattcgccacccgatcacn

SEQ ID NO: 200347 - DNA, 658 bp, Gossypium hirsutum
ctcgaaatttgtattggtgcagccaagggtcttcattatctccatactggttcggatggaggaatcattcaccgcgatgttaagtccacaaatatcctgcttgatgagcaatatgtagcaaaagttgcagatttcggcctttcaaagtccggccttctgaatccagatgagttcagtaccggcatcaaaggcagcttcgggtatctggatcctgagtattttagatgccttcagttcaccgaaaaatctgatgtttattctttcggtgttgtactccttgaagtgctttgcgctagaccagctatcattaactcacataggaaggaggagataaacttagcagagtggggactgatttggttaaacaaaggggaactggaaaagatcattgatccttcaatggcttcccagattaatccaaattcactgagaaagttcagtgaaatagttgagaaatgcctgaagccaactggagccagcagaccaaaccatgcttgacatatgctggggacttggaatacacattgcagctacagcaaaacagcggtgcgcccagtacccgcccgaggacagtgccatagatgcttctttcaacatgtcgtcaagacctttccaacggttgccttcaaacaattgcccgattgagaaagtggacgtc

SEQ ID NO: 200348 - DNA, 567 bp, Gossypium hirsutum
  unsure (1)..(567): unsure at all n locations
caaagtttttttgagacgccaaagggaaggaggaaaaataatggctgacgaccaagaagagccacctcttgctattcgtattgaccaaacggtggaggaaccttcccaatccgatcaagagaaacatcaaaacgactacgtttcagttggggtaacagtcatcactggctacctcggtgctggcaaatccactcttgttaattatatattgaatgcccaacatgggaaaaggattgctgtgattttgaatgagtttggtgaagagattggagttgaaagggctatgataaacgaaggagaaagtggtgcccttgttgaagaatgggttgaactanctaatgggtgtgtttgttgcactgttaaacatagtttggttccagcacgggaaccacttggttccattgaagaaaaaacttgatcttattctgtgtgagaaccacagggttaccaaaccctgctcctcttggcatccgttctttggctggatgatcaactgggaatcttcagtcaagccttgattctatagttactgttgttgaatgccaaaaacctgcggtttcagctaac

SEQ ID NO: 200349 - DNA, 679 bp, Gossypium hirsutum
  unsure (1)..(679): unsure at all n locations
aatacctggtaatttcttccccacattgtcccttctctgttttctcttttccattttaaaccaaaatttctcatcaaacacggtgaatttgcagtggaacaactaacttaaaccaccacccatggatcgtctcaatggccctccccgcctcatgatagtttcagatcttgatttcacaatggtcgatcatgaagacccaaagaacctttctcttcttcgattcaacgctctttgggaagcctattatcgccacgattctttgctggtgtattccactggaaggtcgccgacgatttataaacagctgaggaatgagaagccccttttgaccccagatataaccataatgtccgtgggaaccgagattgcttatggtgaaccaatggtgcctgattatgattgggagcaacatttgaatctcaattgggacagagatattattactcaggaaactgctaagtttcctcagcttattcctcagtcaggcaccgagcaacgacctcacaaggttagctttttcttggagaagcctaattcattagaagtaatcaaggcactttcaaaaagtctagaaaaacacaagctagatgttaaaataatttatagccatgggacagcattggatgtattaccaaaaggtgctgataaaggccaancgcttgcatatttgcagagaacc

SEQ ID NO: 200350 - DNA, 595 bp, Gossypium hirsutum
attttttttttttttttttcacttaatagctcatttttatttcagaatgactaaatcactactgagcttataagaccacgcgaccaaagaagtttaaccaatttgtacctttgcatatcccaactctttttctttttctttttcttttttcaagacttgggaaagcaaacaaattgaaagcttgtctagaaagaaaagtcattgcaaaccctaaatgagaaacaaaattacagaaatgaaagatttgatgcctactacaacaaaattgcagttctagagctaggaggacacctaaacccacctgcaaatttcctcatgcatcgacaatgccatgcatcaattccggtccattttcactgttttaatccggttggctattattgcctctattcatctgttacacaccctactgaagctggttgcacattcttaatgtacttgtgtaagacacctctgttagccttgtaaggaggtggactccacttctttctccgctcgttcagttcagcatctgccagctctacatttatggccctcttttgaacatctatgctggatgatgtcccctttttgaacaagacgattggggcccctc

SEQ ID NO: 200351 - DNA, 695 bp, Gossypium hirsutum
  unsure (1)..(695): unsure at all n locations
cattttgttcgattcttcctttattaatcaatcttttagctccctaacttcaattttcttcttaggataaccccttgtttttcaggatggagcaccactcgggtggaagtgggaccaacaagaacaaacaaatggtggagcagttgcagcgatatggagtgatttcatcaaagaaggttgttgaagtaatggagactattgatagagcattatttgtacctgatgggaccccagcttatgtcgatagtccaatggcaataggttacaatgccaccatttctgcacctcatatgcatgctacctgccttcagttattggaggaaaatttgcagcccggcatgcatgctttagacattggttcaggaacggggtacttgactgcttgttttgcaacaatggttggaccacagggtcgtgctattggtgtggaacatattcctgaattggttgcttcttctataaaaaatattgaaaaaagtgctgcggcttcgccattgaaaggaggttctctttcantgcatgctggcgatggccgaaaaggttggccggaacatgcaccctatgatgctatacatgttggagcagcagcaccagaaataccttcaccccttattgatcaattgaaacccggcggtaaaatggtgaatcctgtangaaaaatattccaagatttgcaagtggtggacaagaatttg

SEQ ID NO: 200352 - DNA, 691 bp, Gossypium hirsutum
  unsure (1)..(691): unsure at all n locations
aatcatttggattctctctttcgatactctagacttgttaattttcgatttaagcggaaaaaagaagaagaaacaaaggtcaattagagtggatcgatgaaattagggtaagaaattggggatttttggggggattatgcagatggaaagggagaggcggaatancattgcgaatggagactacagttgttatacgaatgataaatacagtagattttccaatgattacagtgtttcagagaatgaaaagaatcaaagcttgccctcctcttcgttacccagtgccggttttatcgaacatccggtttcccggttcgatactcttgccggtgttgcaatcaagtatggtgttgaggtancaaacataaaaaagatgaatggtctggttactgatcttcaaatgtttgctcttaagacgcttcagatccctttaccagggcggcatccgccatcaccttgcttgtcgaacggttctgaaaccccaggacaaagcagtgccaaccagtccccaggtccaaatttgccttctgatttgcgtggctcattccagtcattgagactgaagactcctcctcgaagggtctctcccgcaatgagctcattaccaggttattatggccttaaaccctcagaaaaaaattgtggcgtcttaaggttttgaaattggctgtattcccgaaaagaaaaagtc

SEQ ID NO: 200353 - DNA, 683 bp, Gossypium hirsutum
catcctcaacactgaaaaaaaaaatcttcaatcattttcttaaccatttaatctcacattttcataacattgtggcaagagaagatcaatggaaaaagacacttcatattatgatatattgggtgtcaatgttgatgcatctatacctcaaatcaagaaggcttattacctcaaagcaaggcgagttcaccccgataaaaatccagatgatccgaaagctgctgacaaatttcacgcacttggtgaggcttatcaggttctaactgatcccgaaaagcgtgaagcatatgacaagagagggaagaccagagtgataccggacaccatgttggatcctacggctgtgtttgggatgctttttggaagtgatttctttgaagattatgttggccaactagcaatggctactttatcagccattgaagttgaaagtaattccttattagataaggaagctcataggaagaaactcgaggaaaatatgcaggcatttcagaaacaaagggaagacaagctcattgaaatactgaaaaatcgcttgcagccatttgttgaaggtcacaccaatgaattcattcaatgggcgaattcagaagcacgagatctttccaaagctgcttttggtgaggctatgttacataccattggatacatttacacaaagaaagccgcgaaggaacttt

SEQ ID NO: 200354 - DNA, 769 bp, Gossypium hirsutum
  unsure (1)..(769): unsure at all n locations
cgccggttatcgggtacggggcccccttgaagtcnanngtatnnaggtctccgactcagaattcggtttgaggttccatttcacctcaaaatataatctcatctctccccttttcaatggctacccacagaatctcgtctctccccattgcaatttctacttccctttctcttccctctaaacgccacgattatcgtctcgctcttcctttcaactctctctatggcactcgccttttacttaaaccctccaatttgagctgtttcgtcaccaaacaccattcttcaaccaccgctaccgtctcacttagcctcccaaccgcgaaaccggagagggcgacttccgagaaatccccagtatggtcggcaagatcaataaagtcctttgcaatggcggaattggaagcaaggaagcttaagtatccgaataccggaacagaagcacttcttatgggaattctggtcgagggaacaagccatgctgcaaaatttttaagggctaatggaattacacttttcaaagtgcgagaggaaacagtaaacttacttggaaagtcagatatgtactttttcagtcctgaacatcccccattaaccgaacaagctcataaggtccttgactgggctgttgatgaaaagctaaagtcaggtgaaagtggggaaataaccacatcgtacttgcttctgggtatttggtcagaaaaagaatcagcaggccacaagatcttggccacttttggttttaacgacgagaaagccananaactact

SEQ ID NO: 200355 - DNA, 684 bp, Gossypium hirsutum
  unsure (1)..(684): unsure at all n locations
ccagacaaagccaatcaatcacccccttccatcaatatagccatttttctcatcacctccacacataaacgcacacaaaatgaacacccattctctcaaacttctcctaattctactcacaatcactttcccatcaacccaatgtgatgatgatcttgtagaccaaatatgcaaaaaaacacccttctatgacctatgtatctccaccttaaaatccaattccaatggcaaagacgtgaaaggtttagccagtgtaatggccgacaccatgttgtctaacgccaccgacacattgagctacatccgagccgaaataaaccgaaccccagatcctaaaattgagagggcattagcttattgtgccgagctttatataccggtggtgaagtataatcttccacaagccattgatgctttgagtaaagggcagttcgagttcgccgccgatgggatatcggatgcggctaaagaagcagattcttgtgagaagatgatttcgtggtcgcaggaattggcggcgttgagtgatcggaataagttgattcatagcttatctgatgtggccgtcgccattgttaagattttgcttaaaggttaatggactttgaaactgtgggggattttggtgacaaattgcttgtgtgtgtactttnnnttccctggctgtgaattttttttatttat

SEQ ID NO: 200356 - DNA, 680 bp, Gossypium hirsutum
  unsure (1)..(680): unsure at all n locations
ccgttgaccgccgcccagcagcagggaggcctaattgctccaaaacctgctccttggaaatctccttactccccttgaaaacatagaccttcgatatttccgtgaaccccaattcatggacatgtgcttgagtcccgaaagatacgaaaccgacaagagcttgttccggcaacaatccaatagcctgtttcaacgccgatttagcaaacactagctcttcctcgatcatacaagtgtctaacacaaaaacaaaaaccggttgcaattgaggagcattggaagggttgttggggtcgggattcgtttgaagcgtgtattgcacggtggtatattgcgggtagagttcgcaaggcaggttcgtttcggagatcatggcataatgcggcggaaattggttgcgctggtaacaaaacggacagatccagatcttggcgaggaaatcaacgcgcgaataggcgttgagggcggcggaacatgtccggcagcggagaggagcgtaagggagagtacgaatgtccgactgaggggggatcggtgccatggaaacggccaagggaatgacgcacttgctggcttcaaccttggtgcggggccanaacttctatgtcatccgaacgccgtcaaccccttcgggatcggagttcgccattatcccacaaatttgaaaacaaattggaacg

SEQ ID NO: 200357 - DNA, 605 bp, Gossypium hirsutum
ctttgaaccaaatccagactactacagtgcacttctttggcaccggctaatgggaagaaatgttctttcgacaagcttcaccgggacagacaagatccgctcctacactcactgtgcaaaacaatcaaaaggcatcacactacttttgatcaacctcaacaatagcactaccgtccgggcaaagctcgcattcaatagtacaatgagcttgcaacacaagcaccggtctcggatttcacaccataagcacaaaattcataaaacaacaataatcaagctgcctcaaggcattgatggtaaaataagaagagaggaataccatctaacagcaaaaggtgggaatttacagagtcaaagcattctacttaatggaaacattttaagtgtaaattcatctgggatcatacctcatctggagcctttacatgtaaaatcagcaaagccaataatggttgctcctttatccattgtctttactcacatgcctgatgttactgtccctgcttgcaaggtacagccctaaagctacaaggaactaacaatggttccttttagtgattgatcaaataagaaatagaacatattacaaaaaacaaaaaaaataa

SEQ ID NO: 200358 - DNA, 683 bp, Gossypium hirsutum
agtctgaaactggagattgatcctgatgctgatacatcagaagacagtggcttacaggaagttcttccaggcatttctgatcacagtatgattaagtgggaaaataaacttcttcttcttggtgggcattctaagaaatcttccgatgcaatgatagtgcattttatcaatctggagacgcatgtctgtggtgtcatggagacctcaggaaaaattccggtagcacgtgggggtcattctgtcacactggtgggttctaaactaatagtgtttggtggagaagacaggagcaggaaattgctgaatgatgtacatgttcttgatttacagacaatgacttggagtgtagtccaggcaacgcagacacctccagctccaagatttgatcactcagctgcagtgcactcagagcgttaccttttgatttttggcggttgttcacattcagtattcttcaatgatcttcatgtgttggacttgtacactatggagtggtcccaaccaccagttcagggtgatttggtgagtcctacgggctggtcatgccggtatttccattgatgaaatgtggtattatgtcggtggtggagataacaacaatggttgcccagagaatcctgccttaaatatgtccaatttagtttggtccactcggaccactttgaagataagcttcccctgcc

SEQ ID NO: 200359 - DNA, 686 bp, Gossypium hirsutum
attcatttgatctggctagtaaaagcactatccctcctatctgtatagctcaagaaaatggctttgatgagcaggatgttgtttatgcactaaatcagagagagactatacggcagctaatcaggaatggtgagattgatgcagctatgaacaaactccgtgattggtatccccagattgttcaggacgacaaatcagctgcatgctttctgctgcactgccaaaaatttattgaattgattcgggttggagcactggaagaggctgtcaagcatggaaggattgaattatataaattttttgggtcggctgaagctgatgatccatttgacgatttagtgcagaaatgcgttgctctgctggcatatgaacgtccacaggaatcccctgttggatatcttctcgaagagtcccatcgagatgttgtggcggacacactttattgcaatgatattgtcccacaatccccaaaatgagagacgtgcacggctgcatacaatcttatcttgagagactactccggcagctaacagcatgctgtttggagaggtcagccaatggcggtcagggtgaaactttccatttgcatcggcttcttaatagcagtagagagatataagtggtagctgacatatgtgtaaatttgcatccctcgactgtgctttaaatctcttttatgtccacct

SEQ ID NO: 200360 - DNA, 612 bp, Gossypium hirsutum
cacttatgggcctccgcctagtgtcatgatctataacttgaggcccatccgcgagggaaattatgctgcgaactgaaagaaaaaaaaaactaaattggaggccccctttggtaaaaaaaaaagaggagaggagaagagaaaaatggagtcgacggagtcgtcttatgtgtcatcaccggaggctgcgaggaagagatctccgccgccgcctaaatcgccgacttctgagaatgcagagatgcctacatatgtcaggtttcttgtctccaatgctgcggctggttcagtaattggaaagggtggttcaacaattaccgaatttcagtccaaatcaggagctcgaatccagttgtcacgcagtcatgtttttttccctggaacatcagacaggatcattatggtctctggagcaattgatgatatactcaaagctgtggagcttatccttgcaaaattattggatgagcttaatatccgagataatgatgatgcggaacctacaacacaactgaggctgtttgtttccaatagctcttgtggcagccttcttgggaccggaggggcgaccttgaaatcttttattgaaggctctccaactggcattaaaatatc

SEQ ID NO: 200361 - DNA, 564 bp, Gossypium hirsutum
gttggatcttcaccaacttttagaagtgctgaacgtgctgaaaagcggagggagttttaccagaagttagaggaaaaataccgagctttggaggctgagagaagccagtgggaggcaaggaccaaggaagagcaagcagaagccctcaaggagcttagaaagagcatggttgtcaaagcaaatccagtacctagtttctactatgaaggacctctaccaaaggtcgaactcaagaagctgccactgactcggccaaagtcaccaaatcttacccggagaatgagctgcggtgacttagtcccctcaactcaagttgaaaagacaaaagcttgctcccgaactaaccgccacagcttaggtaacgaagtgcaacgacccactactgcaaatatggtcaaaagcaagatccaggtcagtggacagatcagcaacagcaatgggactcacaaggtgaaagatcaagcaaaacaggattttaactaactctccaagcagggaaatggtcttgaagtttcactagtacccatatggaagtcctgaaagaaaagtatcccgtttcattcc

SEQ ID NO: 200362 - DNA, 702 bp, Gossypium hirsutum
gttcaaccatcactctattgtcttcccttgaaaactcatgaaaattttaatttttaacaatctatcgaccaaaaagtaatagcaattaaaagtagaagaaccagaaaaataaaaaaaaaatgtctgcttttcatgtctcaaagttaatcattacttcgcaagcctcagcaactcatccaaaattcccccctttttctgttttcagaaaatctctatcattccctcactctgtttctcagtgccaaaggaaaattgcaacctttgtttcttcaaaatcatcagaagctggggagttgccgaccgctgaagatgagtggctcagcagactcccggataagaacaagccactttactctcacagcttgccttgcattgaagcatggcttaggagcttagggttttatcaaagcaaagaggaccgtgctgtttggttgattgaaaaacctgattggcatgcccagctatctcttgatgtcactgatctttatataaggtacttgaagagtggacctgggaatctcgaaagagacgtggaaaggagatttagttacgcactgagtagagaggatattgaaaatgcaatacttgggggaccataaagacctataattagttcctcgtcatgtataacttcattacagcagttgcatattgttttagatgtcaattactttatccacttgctaaactttgaggatatct

SEQ ID NO: 200363 - DNA, 640 bp, Gossypium hirsutum
  unsure (1)..(640): unsure at all n locations
atcgaagatgttactggctagtgtggaccttgggtgtagtgatgagatattgacaattattgcaatgatccaaactggtaacatcttctacaggccaagggaaaagcaagctcaagctgatcagaagagggccaagtttttccagcctgagggagaccatttgactctacttgctgtgtatgaggcttggaaagctaagaacttttctgggccttggtgttttgaaaattttgttcagtctcgatctttacggagggcacaagatgttagaaaacagcttctaagcatcatggataagtacaaactggacgtagtgagtgcaggaaagaactttatgaagatcaggaaagctatcacagcagggttcttcttccatgctgcaaggaaggacccacangaaggatataaaacagtggtggagaaccagcctgtttatattcacccaagtagcgcccttttccagagacaaccggactgggtgatctaccatgaactggtaatgactacaaaggagtacatgcgagaggtgacagtgatagatcccacatggctggttgaacttgcgcctagattcttccaacaggccgatccccgccagatgagcaagcgcaagcgtcaagaacgtattgagcctctttaa

SEQ ID NO: 200364 - DNA, 549 bp, Gossypium hirsutum
ctcagaaagcctatggtccctaatctcgaccgaggcttgtggcgatactcgcgtcatccgaactatttcggcgagcaattgtggtggtggggcctggttgtattcgcttggaacttgggacatggatggacctttgttggagctttgattaatagcatgtgcttagcttacgttaccgtgctcgtcgagcggcggatgttgaaacaagagtaccgagctgaagcatacaggttatatcaaaagacaacctcaggatgtgtaccttggttcaaatcttctgttatagcagtaaaagataaggatacttgaactaaattttttgtttccttgccatgttttttgtcatgttggtggattctatactatttatgtcctgtctttgatgtggtgagcacttgtgatgtattctgctatgtctctatttgagctcaaaatggttgttgtctttggtaatcaaagaaatatcactgtatgaaatcatgtaaattctttgtttgtttatttgcaataaaattttttttcttgattttcaaaaaaaaaaaaaaaaaa

SEQ ID NO: 200365 - DNA, 632 bp, Gossypium hirsutum
ttttttttatactcaaacgtggttcttgtgtagatttaatgttgccaaaaactgcacaaattaaaaatttattacaccctacacatagatctcttgaaagtagtgtcaagaaatacagaaattacaaaatacacacctacacttctattgatatttaccaagggacattacagcaccagatctttcctcatctgatggtcgggaatgtgacattagaatatatatgacccaaacgtgaaggcaaatgaggtataccaaagaccaaacttttgctgttgcatttcttcttaagaatattgcacctgccaaaaatatagcatccaactgcttaatcgttgatccaagttgccgttttccggaacgaattttgtctttgagaacaggattcaactttgaacttgagagaccccatgttcctaattccaaatcacttgatgtggcattattcatattcgtggacttgccctcttccagtatccttgaaactgcctcaattctaaatgacaatgtcgccttttccgaggatagtgcctcaacctgagcttgtttctgaattaaatgatcagtcagcagtccaagccttcgtttcagctcaacttctacttctgttgggtcctccacagctttccttg

SEQ ID NO: 200366 - DNA, 898 bp, Gossypium hirsutum
agaggaaatcagaaaggaaaaaaaagaaccagctttcattgcacttccgtagttctattacaataactttcaacaattaaataatctgtgtctgtctcttatcaatagccagtaaccagttcttatcccaccattaatgctcccgcagctttttgttggtcctaagattggtgaaggtgctcatgctaaagtatatgagggaaaatacaaggatgagactgtcgctattaaagttgttcgaagaggggaaacccctgaagagattgcaaggagagaaggaaggtttgcaagggaagttgcaatgttatccaaagttcaacatacaaatctagtgaagtttattggagcttgcaaggagcctataatggtcatagtaactgagctcttacaaggtgggacattgcgtaagtaccttctgaatttgcggccgaagtgcttggacttgcgtgtatcgattgggtttgcacttgatatcgctcgtgcaatggaatgcttacactcccatggaatcattcatcgggacctgaaacctgagaacttgatcttgaccgaagaaccatagaaagttaagctagcacattttggtttaaccacgggaaaaatccttaaaccgaaatgatgactgctgagaaccgggaactatccttgggaaggctccctgacctttaaaaccacgggcccactaatggccgggaaaaaaaaaaaccttaccactccttacggtggaagcccacaccctttgcttatggttttgttgggaactccacccaaaacaatttgccctttgaaagggattttaaatttacaaaccgggtttatgccgctgccttttaaaaatttttaggcctaatggcaaaggaactcccggaataattggccgccatttggtaattcctta

SEQ ID NO: 200367 - DNA, 721 bp, Gossypium hirsutum
  unsure (1)..(721): unsure at all n locations
gagaagattgctgaacttgttgagaataagactctagagggtatcaatgatattcgtgatgagagtgatcgctctggaatgcgtgtggtcattgagcttaaacggggagctgacccatctattgtgctgaataacctttaccgtctcactgctcttcagtctagttttaactgcaatatggtgggtattcttgatggacagccaaagcagatgggcctgaaagagttgcttcaggcatttttagaatttagatgctctgttgttgagagacgtgcaaggtacaagctttcacaagcacaagatagaaggcatattgtaaagggtattgtggtagggcttgataatttggatagagtaattgatataatcaaagaggctaagggcaatgcagctgcatcagctggcctgaaggaggaattcaatctttctgacaaacaagctgaggccgtattggatataaacttaagacgacttaaccttcttgagcggaaaaagtttgttgatgaaagtgcatcattgatggaacaaatttcaaagctaacagaactgttgtcaagccgaaaaaatatattgcagctaatagaacaagaagcacttgagctaaagaacaagtgttcgagtccaagacgttcaatactggatgattcagatggtggccaacttgaaaacatagatgttattccanatgaagagatgctgctggctttcaccgaannaagtg

SEQ ID NO: 200368 - DNA, 1859 bp, Gossypium hirsutum
cggccgcgtcgacccggaaaatcgtttccggttccgactagccgccggaggaaataacggcaacttaaaagaaaaccttttctttcctcattgttttactactaaaatcccataatgccggtcgtggattttgtctgtgtttttttagtttcagttgtgatgtttaatttgagagtaagcacagaaccagttgaagacaagcaagctctacttgctttcatttcgggaattagacatgccgaccgggttaaatggaattcatcgacctcagcctgtgattggttcggtgttcaatgcgacgccaaccggtctttcgtctacactttacggctccccggtgcggcccttatcggttcgattccgcccaatacaatcggtcggttgaaccgacttcgagttttaagtctacgagcaaaccgtttgtccggtgagatccctgccgatttctacaatttgactcagctgcgtagcctttatttgcaaggtaacgagttcaccggtccgttcccacctagtgtgactcgtttaactcgtttgactcgccttgatctttcttctaataatttcaccggtccaattcctttgggtgtcaacaatttgactcagttgaccagactcttcttgcaaaataacaagttttccggttctctcccgagcatcgactcggacggtttaaacgatttcaatgtgtctaacaacaaccttaaaggttcaatccccgactcgttatctaaattccccgaatcttcattcgccggaaacattgggctttgcggcggtccacttcggccatgtaacccatttcctccatctccatctccgactgagcccattccgcccaaaacttccggtcaaagctcgaaaagccttcccaccggcgccatcattgccattgccgtggggtcagcaattgttgcgttactgttattactattcctcattatctgcttccgtaaatggaaacggaagtcaccgaggcggcagaaagcgataccatcgacgacacatgcagttccggtggaggaggcggggacttcctcgtcgaaagatgatataaccggaggctcaacggaaatcgaaaggatgatgaataataagctcatgttcttcaaaggtggcgtttacagtttcgatttggaggatttgatgagggcgtcggctgaaatgttgggaaaaggcagcaccggaacgtcgtacagggtggttttagcggtggggacgacggtggcagttaaacggttgaaagacgtggcggttagtaaacgagagttcgtaatgaagatgggaatgttgggtaaaatcatgcatgaaaacgtggttccgttgagagcgttttattattccgacgaggagaaattgctggtttatgattacatgcatggtggtagcttgtttgcgctgcttcaaggtagcagaaactcggttcgtacaccgttagaatgggaccaccggataaaaatagccctaagcgtggctagaggcctcgcgcacctccacagttcacaaaacatgatccacggcaacattaaatcttccaacatccttctccgaccagaccacgaagcctgcatctcagagtttggtcttaactctcttttcaacaccaacactccacctagtcgcatcgggggttaccaagcacctgaagtaattcaaacccataaagttacggtgaaatcagacgtttatagtttcggggtgttattattggaattattaaccggtagggcaccaatccaaccatcaataactgaagaaaggtttgatcttccgcgttgggtccaatccgtggttcgggaggaatgggccgccgaagtgtttgacgcaaagttaatggcataccacaacatcgaggatga

SEQ ID NO: 200369 - DNA, 258 bp, Gossypium hirsutum
  unsure (1)..(258): unsure at all n locations
gcccgggcattgagaaggaaggacgctttcagaggcgaaaggccatggggagataccgtctgtgatccatggatctccgatcgggaaaccgtatccaagctccgtggctagtctgcgctctttggacttttaaaacttagcgaactgaaacatctgaatagctaaaggaagggaaatcaaccgagaccccgttagtagcggcgagcgagagcggattgggggtttgaagaaaaacaaaaaaaaaaaaaaaaaannnnn

SEQ ID NO: 200370 - DNA, 656 bp, Gossypium hirsutum
tttttttttttttttcgtaattaacttttttatattatttgtatgaaaaaccccaaatagactcttgttcaaacgcacatgtccaacgcatatccgaacataaatacaaaatacattgaaataaaacacaacacacatgcacgaattataccggtgttattttccgtataagtgcatcaatcacgggcgacgacgactaactgtttcccgacattgcgaccgatgaagaggccaatgagagctgttggagcactctcaataccttcggctacgtcttcaatgtacgttatcttcccttctttgatgctaggtataaccatttctagatacttgggatacaagtgatagaaatcactgacgataaacccttgcatccggacccgtttcggaatgatgtacatcaagttgtgcgttgcttcgggtttgtcattgttgtactgtgagatcattccgcatacagcgatacgaccatggactctcatgttgagcagcactgcatcgagcatctttcccccgacgttttcaaagtaaatatcgatgccttctgggaggtacctttttaaagcagcatccaagtccggctcttccttgtagttgaaagcctcaccgaaccccaacttattcttcagcagatcaattttctctttgcttccggg

SEQ ID NO: 200371 - DNA, 639 bp, Gossypium hirsutum
  unsure (1)..(639): unsure at all n locations
gacactctcaactttcttttgttcttcattttcctttcaatcatgtcttgcttcattagcaaatacgccgatgagctagctaggggcgctgcctgagatcggcacacctgggaagggaatccttgcggctgatgaatccaccggcacaataggcaagcgtcttgcaagcattaatgtagaaaacgttgaagaaaacaggcgagctcttcgtgagctcctcttcactgctcccggtgctctccagttcatcagtggtgttatattcttcgaggaaacactctaccaaaaaactgcttctggcaagctttttgttgatgtgttgaaagaatctggtgtcctccctggcatcaaggttgacaccggcaccgttgtgcttaatggaaccaatgacgagactttcacccacggtcttgatggccttgcccancgttgccaaaagtactacgaagctggtgctcggtttgccaaatggcgtgctgtacttaagatcggcactattgagccagccgagcttgcaatccaagataacgccaatggcttagccatgtattccgccatctgccgaagatgtgggttactccccagtgtgcagacccaaatccttgtttgagggaccgaccgacattaacaggtgtgctt

SEQ ID NO: 200372 - DNA, 646 bp, Gossypium hirsutum
  unsure (1)..(646): unsure at all n locations
ctcaaaactcattatccagttattttgtcccttcaaaaaaacacaacaatggagttttccaagtcatgttcttctcaccatgttccagttatggtcgtcttagctttgatgtcattgatgatgttgttgttgcctgttaatggacagaccatcaacaatccatgcactccggctatgcttaccactttcactccttgcttcaatttcctcaccaatagcagtgccaacgccacgtcgcccagcgccgcttgttgtaacgctcttaaaaacctcacgagcagtagcatgggttgcacgtgcctcatcgtcacaggaagtgtacctttccggcttccgattaaccggacccttgccgtctcccttcctcgagcttgtaacatgcctagtgttcccctccaatgcaatgcgccccgtggtgcacctattcctgctccaggtccagtctctctagcacccaaactctcccctggagcttcaccatctttaagcccccaaagtcccattgtgccggaaccgacaccatctgccgaggtgcctgtttccggcaccacaccggctctaactccaccatcgtccacagcaggttcgggggccccgacggccgcaacggggagccgccctgttctcnacccatcanctgccaact

SEQ ID NO: 200373 - DNA, 603 bp, Gossypium hirsutum
aatgtagtgaatgtgagagtaagagatgtctcagatgtgtgattgcgcttacccctggtgctcgaacatctttgagacatgagcaccccctctttttctacaaagattaccatgggcgctgtgatgcttgtggtaatcttacattgggagcattttgttgtaaggattgcaattttgtgctacattttggatgtttttcacttccaattacagctcatcacaaatgtgatgagcatcttctttcactcactgctcataatgataacaaatatttagaaagtcattattgcgatatttgtgaagaaagtcgagatacaaatcgttggttttatcattgtgcaatatgcgatacttctgttcatgttaattgtgttcttggaaaatatccattcctcaaacttgggagcatatttgaagaaacagatcatccacacccactcactatcgtgaagaagaagtattactaccttgattgtaataaatgcggtaagccttgtgaagatttatctcttgagtgctcaaagttggagtgtaaatatattgtccacttggattgtgtagtacactacactctacggtgttttttgtggtggcgcatgtaat

SEQ ID NO: 200374 - DNA, 990 bp, Gossypium hirsutum
  unsure (1)..(990): unsure at all n locations
tttcgaaaattcacattggagcaactcaagaatgcaacatctggatttgcagttgagaatattgtttctgagcatggagagaaagctcccaatgttgtttatagagggaagttagagaatcacaggaggatcgccgttaaacgtttcaatcgaatggcttggcctgattcacgacaatttttggaggaagcaagatcagttggtcagctacgcaacaatagattggcaaatttacttggatgttgttgtgaaggtgatgaaaggttgcttgtggcagattacatgcccaacgagacactcgcaaaacatctttttcattgggaaacacaaccaatgaaatgggccatgcgattaagggttgtactctatctcgcacaagctttagaatactgcacaaacaaagggcgtgcattataccacgatctcaatgcttacagggttttatttgatgaggatggagatccgagactttcaacctttggcttgatgaaaaacagtagagatggaaaaagttacggtaccaatttggcatttactcctcctgaatatttgagaactggaagagtaaccccggagagtgttatattcagctttggcactcttctgcttgatcttctcgctggaaaacatatcccccctagccatgcacttgacttaatacgagacagaaaccttcagatgttgactgattcctgcttggaagggcagttttctgataatgatggaactgagctagttcgcttggcttctagatgtttgcaatatgaacctcgagagcgaccaaatcctaaatctttagttgctgctttgacaccccttcagaaggaaactgaggttccttcacatgtattaatgggtatcccacacagtgcttccttcactcctctatccccagttgggcaagcttgctcaagaagggacttgactgctatacatgagatattaaagaatcttggctacnaagatgacgaaagagtggtaaatgagctc

SEQ ID NO: 200375 - DNA, 703 bp, Gossypium hirsutum
ggttatacaagatcaaattccttatgttgaatctggtacttatgttgcctacaacaacgagaatagtggggttgttgagtgtttaaagaaagatggtatcgttgatctggactctgaattccaatctgccccggattgggtatcgatacaagctatgattaactcttggttagctgatgcattgacgtacgaactatgggtgggtaccgatggaagatcagcctacaagatttattattctgacctttcatggccaataggaaaagttcttttcctaaagcaagtgtatagtgttaaacaacgtcttggaattactaaagacaatgccgaacacagagaagatgagatttacaggagagcacaaattgcttatggtgctctatctactaagttaggagaacagaacttcctctttgatgataggccatcaagcttggatgcaacttttctcggacatgttcttgtcacccttcatgcactacctgacacgtcagtgctccgaagcaaactcttggagcatgacaatattgtcagatatgccgaaaaacttaaaacggagttgatagagtctggttcatcatcttctggtccacaatttcgctcagtcccttcatcgtcaactccgagaaaaggtccctcaaattggagttcaaagccgaagagcaagccaaaaagggagaaaacagaggaggagaaaactttt

SEQ ID NO: 200376 - DNA, 613 bp, Gossypium hirsutum
agcatttgaaccgacttatctctatactatggaaaagggttacttcttgctgcctgacgcggctaagtcacggcacaacgtacgtactgttaatattagcatatcagcccgacatccttgttttgggaacaggtggcagcaacttctaatcaatagatttgttgggtatgacactattttgatgaatagtttattgcatcagcctggtaaaggttatctttataattttcagacaaaggagttctataatctcacttatgcacgagaattaccagatggttctgctagagttggagagtatcttgtcaccaaatgtggtgtgctcatgatgtctttgttcgtatttttcacaaccaccatgtcagtatcatttacattgagggaaactcagactcgcatgttgaagttcacagtgcagcttcaacaccatgctcgacataggcttccaacatttcagttgatattcgtgcatgtgattgaatcacttgtatttgtaccgattatgattggcatcctattttttctgttcgagttctatgatgatcagctattggctttcatgggtcctaattccgggtctggttaatgtgaaattattaaactaatcaatgtg

SEQ ID NO: 200377 - DNA, 611 bp, Gossypium hirsutum
  unsure (1)..(611): unsure at all n locations
ggcattaaaaaggttggtggcaaggtctccttcacttaagaagcttaggctaaatcgatatgtttcaattgggcagttataccgtcttatggttcaagctccgcagctcacacatcttgggacagggtcctttagcccatcagaggttgcagggcaaggtgatcaaaaaccagattatgtaaccgcatttgctgcctgcaaatccttagtttgtctctctgggttcagggaaataattccggattatctgcctgcaatttaccctatttgtgcgaatctaacgtctttgaatttcagctacgccaacattactgccgaacagcttaagccaattataagcaactgccacaagcttcaggttttctgggtccttgattcaatatgcgatgaaggacttcaagcagtggctgcaacatgtaaggaattgcgtgagcttcgggttttccctgttgatgctcgtgaggatagtgatggtcctgtttctgaagtaggcttccaagctatttctgagggttgtcggaaattgcaatctattctttatttctgccagaggatgactaatgcagctgtaatagcaatgtccaaaaactgtccaaatntagttgttttcc

SEQ ID NO: 200378 - DNA, 801 bp, Gossypium hirsutum
  unsure (1)..(801): unsure at all n locations
aattttttttttttttttttgataaacagttcaaaatagagaactaaaactaaatcgacaaataagaagcataataagttcacaataaacattaaaaagcatcagtccgaacaactaccatggtgtaatataacactgaatagcaatagactggaaaatcaagtcaaaacaaaactcaatataagaggataagaaaccaagaaaagcgaagctaaaaagatatggtagagggaaaagatgaaacataaccaaaaaaaaaattgtacagaaaacaatgaaaatctacaaccttaaaacatgtttgatgggatcagaccaacaacaaatgtgctctggatcaagtcaacgagcttcactccacccacactttttactgctgtggttgttggtaagcccccggctgttggtaattcccatatccaggatagcccccataatacatgctagggtcttggggaggaggtgcatatccatatgcttcatatccttgagcatatccataatatccaccattccactgggcctgatcgggttgagcctgtttgcttgaaggactacgtccccatgaaagtcgaacatttcttcctcctaaaatggtaccatttaaaactgataacgcttgctctgcactagttctattagcatattgaacaaaaccacaattcttgttagcaggaatttttacatgaactacctcaccaagctgactgaatatttgttttaactggtcttcaaaaacactaggatccanaccgccaacaaatattgtgggtatatttggatcgttctcgccaggattta

SEQ ID NO: 200379 - DNA, 610 bp, Gossypium hirsutum
agagaaatggcgaggaggcgggagcgccggggggtaccgagtcaggaccggcgcaaagagcgaattggaccagaaactcgagaagaaaaactcaacgactcagatgcttcggagcgtaagcttatcggtatattcatactcttcttcatcataattccggcagtgtctgttctcgtatacgtatacaaatacgggtcaggaacgaaacgtttggaaccggtcataacggagcgaggacccatcaaaactgatattaatttccaggagatcctcactgagaatacgaacgtagctggaaatgaatcgcaaagaaattatgattatccagtattggcttacattactccatggaattcgaagggatatgaaatggcaaagaggtttaattctaagtttactcacttatcacctgtttggtatgatttgaaaagccatggaaacagcttgattctggaagggagacataatgctgataaaggatggatatcagagcttaaaatgaggggaaatgctttgatattacctaaaatagttttggaagcatttcctacagagctgcttaaaaagaagaaacaaatggataaagctattgatctcatggtaactgagt

SEQ ID NO: 200380 - DNA, 623 bp, Gossypium hirsutum
  unsure (1)..(623): unsure at all n locations
ctttctatcgctagggtttccgctgcttgggagattctcgatttaatgtttttcttttctcgacaagaaaagggttgaagctcagtgatgcatagctgcttgatacccttttagcaaattaaaaggaaaatgaaaaatggtctcgatttcttgaatttactcaattgtgatgtatcactaaagattcttacgaatttggaggatccatctgatcttgttcgtttcagtgctgtctcacgctcctggcgacaatttgtgattgaaaatggtctactcaagcatctgtgccggagaatgtttcctcaattatctagagttgatcatgtcaacgagctatgtggcactgcaaaagggcatgctgaagctggatctancaattttatggaatgggaagctttgaagagggagcataaagtttatgccttttttgctcgaggttgtttgtcatttgctcccacggagtgcatctatgaagcaatcatcgcttctagcactgataatgatccagaggaaggcatacataatactttggaaccaagagaatagggtggcacggagagcttcatactggtcgagtanaggacaaagtaaccctgcagtgcctgagacgttgacatatagag

SEQ ID NO: 200381 - DNA, 647 bp, Gossypium hirsutum
  unsure (1)..(647): unsure at all n locations
gaaaaattgtctcacttagatattgaaagggaatttttttttaatataaactgaaaaaaaaaagaaaaaaaaggaaaagaaaaaagaagaggaggggaaatataaactgaaaaaagaaaagccccaaaatatggaggatgaaaaagaaagcaaccgtcaagactcgccggcggctggtggtagtggttctggtancggtggtgatgagttggagcttattgtggctgagtcggagcttggtggcggtgggggcagtgatgttggtggtggtggtgggagtactantaataataataatacaagagtgaaagggccgtggtcaccggacgaagacgcggtgtcgagtcggttggtggcgaacttcggggcgaggaattggagtgtgatcgcccgacgaattccgggtcggtctgggaaatcgtgtcggcttcgtgggtgtaaccagcttgacccttgccttgagcgcaagccttttactggtgtagagatccccgagttggtggacgccgtcactcctcaatacaggccgagtttgggatgcatggcttgtccaattgagacaggacgacgagagatcctggaccgactctgagcgaagggagaacgaattgcggaggttcgcgaccttggccggagatcggcggggc

SEQ ID NO: 200382 - DNA, 634 bp, Gossypium hirsutum
ctacttgagacctgatatcaaaagaggaaagttcagtttacaagaagaacagaccattattcaactccatgcccttcttggaaacaggtggtctgccatagctactcatttgccgaaaagaacagacaatgagatcaagaactactggaacacacatctaaagaaaaggctaaccaaaatggggatcgatcctgtcacccacaagcctaaaaccgatgcactcggttccaccactggtaaccctaaagatgctgctaaccttagtcacatggctcaatgggagagtgctcgtttagaagctgaagctagactggttcgtgagtccaagctagttccctcaaaccctcctcaaagcaaccacttcactgccgttgcgccttcgccgactccggcaactagaccgcaatgcctcgacgtactcaaagcatggcaaggtgtcgtctgcgggttattcactttcaacatggacaataacaacttacagtcccctacgtcaacgttgaacttcatggagaacaccacaacattgcctatgtcatcatcatcgtctgttaatggaatgtttaatgaaaactttggttggaactcatcgattaatccatgtgaaagtggggatattttgaaagttgaatat

SEQ ID NO: 200383 - DNA, 642 bp, Gossypium hirsutum
caagtttatcggctttcagaactgaaagatgctactcatggatttaaagaattcagtgagctcggacgagggagcttcggtttcgtatacaaagctgttcttcctgatggaaggcaagtagcagtcaagcgagctaatgctgctacgataattcataccaacagccgggattttgaagcagagttagaaatactatgcaatgtaaagcataccaatattgtgaacttattaggctattgtgctgaaatgggggaaaggttactcgtatatgaatatatgcctcacggtacacttcatgaccaccttcacggcgacctctcgccgttaggttgggacctccggttgaagattgcatttcaggcttcgagaggacttgagtatcttcataatgaagtcagtcctcccatcattcatagagatgtgaagacttcaaatatacttttggactccgaatggggtgcaaggatagccgatttccgcatagtaagtgccactacagacaatgatttaagtgggaacatggaggatgatgtttacaatttcggaatcgttctactggagatattaagtggaagaaaagcttatgatagagactgcacacctccagggattgttgagtgggcattacctctaataaggcgc

SEQ ID NO: 200384 - DNA, 659 bp, Gossypium hirsutum
  unsure (1)..(659): unsure at all n locations
ctaccacctttttttttgttctctctttcgcctatttttacggtggaacagtgaaaaaaacaataccgagaacgttagatcacgtggttatcgacataccaagatgcagtcaaccaacggtactgatttgagctcaaaacaagaacaaaaacaacagccgccgccgcaacaacccccgcagtgggtggcgaaccagtggatgggagccatgcagtacccgacgacggcggctatggtaatgatgcagcagcaacagatgatgatgtaccctcatcattatatggcttataataatcatttccagtaccaacaatatcaacaacagcaaggtaaacagcaataccagcagcagcagcaaagctattcaacgaaacaacaacaacatggatctaactcggatgaggttaaaacgatctgggttggtgacctanttcattggatggatgagagttatcttcatagttgcttttctcacactggagaggtttcttctgtaaagatcatacgcaataagcaaactggtcagtctgaaggatatggattcctggaattttactcacgggaagcagctgaaaaggttttgcaaagctataatggctctttaatgccaaatactgaacagccttttcgtttgaattgggcttcattcagtgtgaatt

SEQ ID NO: 200385 - DNA, 629 bp, Gossypium hirsutum
  unsure (1)..(629): unsure at all n locations
gagcaggtgaccgagataccaacctcggacttgaaaaggtgcttgcagtctcttgcctgtgttaagggaaaaaatgtgcttcgcagggaacctatgagcaaggacatancagacactgatacctttcttttcaatgacaagtatacaagcaagttcttcaaggtcaagataggcactgtggctgcgcaaagggagtcggaacctgaaaatcaagaaactaggcagagagtggaggaagatcgaaaaccgcaaattgaggcagcaatcgtgaggatcatgaaagctaggcgtgtgctggatcataacaacattgttgctgaggtcacaaaacagctacagtcacggtttctgcccaaccctgttgtaattaagaaacggatcgagtcccttatcgagcgggagttcctggagagggataaaggtgacaggaagttgtatcgctaccttgcttgaaaagaacgtcgtcttcacttgccagggttttgatgacgccttttattgcttttgattttgaatatcaggtctgtggaatctcacttacattgtataagttgagagattgtttcatgaattatagatagttgaagtgaattcttgatgtatgtattgattgcattttgttgctttag

SEQ ID NO: 200386 - DNA, 651 bp, Gossypium hirsutum
  unsure (1)..(651): unsure at all n locations
gctttctttgcttcaagttttgtacttacactttttggttatcttttttagctacttgggtttgttttttcatcgattttggcttttcctgcagatcccattttcttgtatatattgtattggttttgtctctgacaaatgagaaagtttgtgcaatatttacctcttctaaactcctaaagtttgtgcaatatttacctcttctaaactcctataaaatgttactctgatttgggtatagtttggaggaccgatcctccctatttatagctgctatatcagtttgaactttggactcaaatttgcttgtaggaggatccgtagtgggaactgtantacgagcaatgaaagggcaaacaacagaaactgggtttttcaggggagctggaattggtgctgttgcaggtgcgatcacagccgttcaattgctggaatcattggctgatggggagtcattgtctaaggtcaccattcgcattaatttcatcctcactaatagttaaacattcaagtggaaaagtttctattttaattaaccctttgttgtaatataaaaataaaaaaataataaagtataaatttccttatttaatttgctgtcttatacgtggccttattggttagcttactanatgggatagttttcattgc

SEQ ID NO: 200387 - DNA, 672 bp, Gossypium hirsutum
  unsure (1)..(672): unsure at all n locations
aacaaatggatacttgccttgcccccaaatgtccactccttccccttcttcccctacctatctcaccaacttaggcctcggctattccattgccatcgccgtcggtttcctcgtcctcctctccaccatcctcctcgcttcttacatctgtttccgctcttccacttctcctcgcgctttctcttccaatccctctgctatccccgcctccaactccgatggcatcctcctccctactattatcttcgttgccgaagatgaagccactgacaacgtcgtcctcggactcgaccaggccgttatcaattcttaccccaagttccagttctgtaaagactcgggtgctagtaacttgaacaccacatgttccatttgtctgtgtgagtacaaggatttggagatgttaaggatgatgcctgagtgtaagcattatttccatgttttttgcatcgatgcttggttaaaactcaatggatcttgtcccgtttgtcggaactcgccgcttccgaccccactttccacgcccttgtcggaagtcgtgccgttatctcagttcgctgcggatcgaaggaagattangtgacttttgggtgtcatcgtgttttttcccctgcccaacaaaaaagaaaaaattttttggggttaggtaattaacaaacacgacaattgggt

SEQ ID NO: 200388 - DNA, 674 bp, Gossypium hirsutum
  unsure (1)..(674): unsure at all n locations
aagtaattcaattagagttccaaggaattccgaatctcatttctcaaaagggaaaaagaagagagaaaaatgagcacatcggagctgccaaggaaagaagccaatgtcctaaaaggccacgaaggtgcggttttagcagccagattcaacagcgatggcaattattgcctcagctgcggcaaagaccgcaccatccgtctttggaacccccaccgtggcatccacatcaaaacctacaaatctcacggccgcgaagtacgcgacgtccatgtcaccctggataactctaagctgtgttcttgtggtggagaccgacagattttctattgggatgtttccaccggtcgtgttattcgcaagtttcgtggccatgacggcgaggtaaacgcggtgaagtttaatgagtatgcatctgtggtagtatctaccggttatgatagatcgttgcgtgcttgggactgtaggtctcacancactgaacccatacagataattgactcattttcggacactgttatgtctgtttgtttaaccaaaaccganattattggtgggagtgttgatggaactgttcgaacatttgatattcgtatcggtcgagaaatatcagatgacttagggcaacctgtccactgtatctcattgtcaaatgacaataactgcatattaactac

SEQ ID NO: 200389 - DNA, 1002 bp, Gossypium hirsutum
gcttagctttctttctttatctctttaattttttcaattttcctaatcttcgtatgtactccacttaagacgttgaacattttatttctggaaaaatatagttttaaacccaagtttaatcgattgacaaatttaaagacaacaccacttcttgcattccaattgtaaaagatacccattggcttgttagatccaatttagttcaaaaatgatgggtttttggatcgtggatttgggtgtacatcttgggtggattttggtgtgagatggatattggtttgaaattttgggtacccatttcaagaaataattactgtgctttaaatttgcgcctgtttgatgggatttgattagtattgcaattgccttaaagttcagttgggtcattttttggactagatttttcttgttttttgtgtgcgagaagaaaagagaaaacaagaaggaaacatgttttggagggaacgtgagatggagaacaaagagcttaatggaggacctccttgtgggcagattaaagttcttgtcgttggtgattccggtgtggggaaaacttctcttgttcatctgattgttaaaggttcatccactgctcgccctcatcaaactattggatgtacagttggtgtgaagcatacaacatatggttgtcctggtagctcttcaagtagcttaaaaggggatgctgagagagatttcttcattgaactctgggatgtgtcaggacatgagagatacaaaggttgcagatctctattttattcacaacttaatggtgtaatatttgttcatgatctttctcaaaggagaacaaaaacaagccttcaaaaagtgggcagctgaaatttgcggcttctggcacattttcagtacctctaggttctggaggttccaagggacttcctgttccctatattgttattgggtaacaaagctgaatattgcttctaaagagggtacaaaaagtatcagtggcaatcttgttgatgcaactcgtcattc

SEQ ID NO: 200390 - DNA, 702 bp, Gossypium hirsutum
catagaagtagatgaggctcttgctaaggaaattcgagagttccgaagcccaacggatggtgaaactcgaatgttttatgagattgttgtggctcctaagtatacagagaagggacttgagatcctccgtggaaaatcgaaaacattgaggatccttgaagcaaagaagaatgagaaagggaagctctcactacgacaggttggtggtggttggttagcccaggattcagatgatttgacccccgaggatatccagttcaatgtggtatccgagaagaagccacaagataatgagctttgtgatgcagaatttgcatggctgtgtgttaagcatgtcaagagcaatgctattgtaatagcaaaggacaaccgtatgttgggaatgggaagcgggcagccaaaccgtctggagagcttgagaatagctttgaggaaagcaggagatgcggtcaagggagctgctttggctattgatgcatttttcccatttgcttggaaagatgcagtggaagaagcttgtgaaagtggtattggagtgattgccagaccctggaggaaccattaaaaatggggatgctgtggactgttgtaacaattatggagtttcattgcttttaacaaatgtgaggcacttcaagcattgatgcactttcatttttgccttaatgggttcaacttgctctctaaaggggagagtatgtt

SEQ ID NO: 200391 - DNA, 657 bp, Gossypium hirsutum
gaaagtcagatcaccctccagccgtcggagaaactggagcagcagctcctcatcagaagatgaaaggagtagaaaacattctaggcgacatcgttatagaagcagtgattcaaataatgactcatccagcgatgatcgtgaacgctaccatcccaggtcaaaaggaaaacggaaaagatcctccagggaaaagagtagtagcagcagaaaacactcaaaacatcataagcacagaagcagggactctcccagcaggtcccatcatggttcggagagagaacattcagaatccaggaaagagaaaagaaaacgaaggaattgaaaataagctctatttgtttcccaatcccatctccatacaaagtttcctgttgtatagctcactggatccaacaccaaaatttgagggataatcagtttgtttgatgttctgggggaagggtctctccatgaaatgttgatggagatcctacactgagatggtgcttccggcgaggctttccttttgggtccagatgttgttgtgactaaggtacgatccatggagtatgtacgtttatgaagtgaacttttggaaatgatgatatgctttaatgaggcaacttctgggttctacttttgaaattaactttttcctccttaataatacatctatcc

SEQ ID NO: 200392 - DNA, 980 bp, Gossypium hirsutum
ttttttttttttttttaacatagatccatctattaacaaactttgttggaattatagagtcaggttgatggtcttaaaaactttgctctcttctgagcagtacaaaatagactaaaagttctttattcttctcaaatgacaaatgcatcactattaaaaccacacactaacagtaaacaaaacactagaaatcaggcatccttttccatacgagtggtggaatgatcacaagcaggtattcccaagttcctactgatcatatctttcattttaatcaaagcccacccgatggtcccaataacttcttgattccagatttctgctctgcagttaaccttgttgggaacttaatgttgaacttgattctgaggttccctcttttcgatgggtctttgggaattggcataccttccttcgggactacctcctcatagtttggatggatcacactgttgatggggatgttcaagctccttccatccaatgttgtaagatgaacggtgtagcctgttaatgcttcggccagcgatatcttttgcgtgacaaccaggtcattgccatcgcgtgtgaatgtgctgtgaggtttttcatctattatgaaaacaagatctgcagggattgtgttcggttgttcgtttcctttctcagggaaggtaatctttgttccctttttccaaccaggtttgatatcaatggtcaggatttcctgcactggcaatgtcttcctgcaacacagacaaatttttaagacaaccttgttagcaagggaaccatcagcagccatgaaaatagttggcattatcaggcatgttacgatcttatctcggataggtatgttatttagaaacatgtacgaaatatgatcaagacaaactcttcagctctcttttactgcttacttatagactaaaacagatcaattaggaagttaacaaatacgcttcaatatatcattgaaaaccaataattgaatgattaat

SEQ ID NO: 200393 - DNA, 703 bp, Gossypium hirsutum
atttattttatcatcctttcaaaaaaaaaaaaaaacaaagaaaaaagaaaattggaaaagcctgataaaaaaagaaaagctctaacatcggagatcgatctggcattgtcgccggtatgggagtgccgagcgacgacgccgttttgatccagaaaggaaacaagcaaggagagcctcatgtaatcaccgttaattgtcctgataagcacggcctaggatgcgatatttgccatataattctcgatttcggtctttacatcgccaaaggagatgtttcaacggatggaatttggtgctatatggtgttttgggtggttcctcattcgagctcacctgttgtgaggtggccaagcttgaagaaccgccttcaatccttatgtccttcttgttcggtgacattttacttgaatgatcaaccttccaactccccggcttctccggtttacttgttgaagttcttttgccttgacccgaaaggattgctacatgatgttacacaggttctctgtgagcttgagctcacaattcaaaaggttaaagttacaacaaccccagatggcagagtcctcgacctcttctttataactgataacatggagcttttacacaccgaagaacggcaacatcacttatgtaaacaattagatgccgtgttgggtgattcatgcatcagttgtaaactaaggttgggctggtcaaagtc

SEQ ID NO: 200394 - DNA, 703 bp, Gossypium hirsutum
acttgttttagattggcctcaaagaaaaagaataaccctaggtgcagcatgtgggctggagtaccttcatgaacattgcaatcctaagatcattcatcgagatgtgaaggctgcaaatgtattattggatgaagattttgaagcagttgtcggtgactttggccttgcgaagttggtggatgtgaggcggacagatgtgacaactcaagttcgcgggacaatgggacacatagcacccgagtacttgtccactgggaagtcatcagaaagaacggatgtctttggttatgggattatgcttctagagcttgtgacaggtcaacgtgcaattgatttctcacgcttggaagatgaagatgatgttctgcttcttgactatgtcaagaagctggaaagggagaaaaacctggatgctatcgtagatcataatcttaataaaaattaccacatggaggacgttgaggcaatgatccaagttgcattgctttgcaccccagcctccccagaggaccctccggcaatgttcggaggtggtgaggatcccggaggaaacaggcctcccccaaaggtgggaagcaatggtgccccttccaattgtccctttcggcgtgagttgtcacttgactgcgcctggatatttccccggggggatagactgcctccttcaccgtggttcgccttcgattggctccgctcgcagtat

SEQ ID NO: 200395 - DNA, 577 bp, Gossypium hirsutum
cttcttcagatataacgctgaaataaaacaaacccagcttttgaaacaaagaattgtttttttttttcatttggtttcaagcttagtaggtgggtgaggctgaaagaggggggaaaaaggggttaaaatattgaaaaggaaatggcaagtacaaaagagtcaagttcagagggaagtaacatcaagggcgtgcacactcatggaggtcaatatgttcagtacaatgtatacggtaacttatttgaggtttccagtaagtacgttcctcctcttcgtccaatcggtagaggtgcttatggcattgtttgtgctgctgttaattcacagacccgcgaggaggttgctattaagaagattggcaatgcattcgataataggatagatgccaaaaggacgttgagagaaattaagcttctttgtcacatggaccacgaaaatgttattgccatcaaggacatcattcgaccaccaaaaaaggatgccttcaatgatgtttacattgtttatgaattgatggacactgatcttcaccagataattcgctctgatcaaccattgacagacgatcattgtcatt

SEQ ID NO: 200396 - DNA, 899 bp, Gossypium hirsutum
  unsure (1)..(899): unsure at all n locations
gaaataagatcactaaacggattaggtttttaggagtgtatttcagttcatataatttacgtattgacttttatcggtcagttttcctagtgcagcctggttcagcaccaaagcatgcacctaagaaggttaaatcaacagtcaaacttgacaagctggatgatatgagcaaggagtgggttgactctgatttcttgatatttaattcaggtcattggtggacgccaactaagctttttgatatgggttgctattttcaggcaggtagatcactaaagcttggaatggggatcgcatctgcctttaaaactgcattggagacatgggtatcttgggttgagtcttcagtcaacagaaacagaactagggtgttcttccggacttttgaatcttcgcattggataggtcgaaaccgtaattcatgcaaagtgactcgacgcccttggctgaaaactaaagggagagaccatagccgaatttctgacattataattgatgttgtaaagaaaatgacaactcctgtgacagtgttacatgtaacccccatgggagctttccgtagtgatgctcatgttggcacttggagcgataagcagtcggtagctgattgcagccactggtgtcttcctggagtgcctgatacatggaatgaaattctcccatcaatgatgctcctcccaggatggagtaaccgtttagttgaacaaagaacttgcaatcccttttattttctccttcccacccccctcctccgttctctgcattaagaaacatgttgctgttgaaattcccctcttgagaacaaggataaattangggttgttcgtacccttaatgaaatttatacaattattctgttgtgttgccaaaaanannnggnctcgcccagccgacgggaa

SEQ ID NO: 200397 - DNA, 735 bp, Gossypium hirsutum
aaacgaggaaaataacagtatcagtctctctctctctcgctattcagtttggctttgactgtatctctctcttccttcagttttcttctgcctctctctttcattcgagagcctaaaaccctctctctccttcctcagtcctctgtaaggtatctgtcaggataggggaaaatgggcgggactggtgatgataaaattccaatacatactgaaactgaaggttccgagactacaatagaaataaaaataaaaacattggccgagacttatactatgagagtggataaacagatgccagtgcctgcactaaaagaacagattgcttctgtaactggggtgttatcagagcaacagcgattaatctgtcggggaaaagttctaaaagatgaccaactactttctgcgtaccatgtcgaggatggtcacacattgcacatggtggtcaggcagccagttccaccatctgacggcgcacctaatcattcagatgatctgggatcaggtacaagccgcagtcatggtaatcatgtcccaagttttgtgatagaaacttctaatatgcctgaacaaggagatggagttcctcctgaaattggtcggattgtctctgctgttctgggcatgttcggatttgcaaatatggcaagtgatgtccgggaacagggttcacaaaggcatgaaagaacatctggtattggcataccaaaatcgtcgcagggttcaactgaacaaacc

SEQ ID NO: 200398 - DNA, 631 bp, Gossypium hirsutum
  unsure (1)..(631): unsure at all n locations
gtggcatcctcccttgccctggaagttgattctgtccgaaatattaatctccacaagtttgaaacgcttaaattatttttcaagaccggtgctggtgaaccattggaatatactttaccttctatatgggataagttagccatttcttcaaacttttaccataggactgaaatgttaaaagagtttaataggtgtaataaatggcggaaaaggggaatttctcgaatacctattgtgcacccagtaatcttaagagcaaccccagggaaagtaagcattctacgtgatggatctattgttgttgaagttggaggaattgagctcggtcagggtctttggacaaaggtaaaacagatgactgcatatgctctcagcttgatccaatgtgctggaaatgaagaacttttagagaaggtgagggtcatacaagctgataccttgagtttaattcaaggcggttttacttctggcagcacgacatctgaatcaagctgtgaagctgttggactttgctgcaatatcttggttgagagacttactgctcanaaggaaaaattggaggagcaaatgggacctgtaaaatgggagacactgattcttcaggcatatatgatttccgtgaacttgtctt

SEQ ID NO: 200399 - DNA, 733 bp, Gossypium hirsutum
  unsure (1)..(733): unsure at all n locations
atttttccccctcaaaaggagagttaaccatagatagattcaaatgtgaaacagcaagatctttgaacaggaaaagaagtttcattcattagttcctacattttgattttttttttttaaaaaaatttctctctatcgtccttctgtcgtagcggagacacgatgaatcttctgtgtctattatttcccatgtgggcatgttccttctctttgttttcactcttaattcatgcccgaccacagtcaactgttcccttcacatccgcttctgttcttccttctgaacaagaacccatttctcagttttcttcacagatggaagctgtttctccaggggtggctgttgttcgagtantgcaccaccaggatctaaacaagagaattcttatagctctaattgttgcctccactctccttgctggaatattgctctttttgttatgtttctggatatgtaaacagaaaatcttgaacaactccaatgggaaaagcaaacaaaaaaacctagaacctacaaaagcactttcattgagtccaattgtggatcgttttaattccttatggatggctgggaaaaaggggtcagtanctgtcatcgagtatcggttattggaagctgcaacaaactgtttcggggaaagtaatgttttgggtganggcggtcntggacttgtctataaagctcgcttcgatgaacaatttcttgctgctgttgaaaaattagataatggat

SEQ ID NO: 200400 - DNA, 1073 bp, Gossypium hirsutum
  unsure (1)..(1073): unsure at all n locations
caatatgccaccgtattacagttcagctgtggcatcaggccatgctcctcccccctatatgtggggtccaacacagcctatgatgccatcctatggagcaccttatgcagcaatctactctcatgggggagtttatgcacatcccgcagttcctctggcatcacacagtcttggtgttccatcatcaccggcagctgcaggtcctgtggagacacctacgaagtcccctggaaatactgaacaaggtttaatgaaaaagctgaaaggatttgatggtcttgcaatatcaataggcaatggtactgctgagaatgctgaaggaagagctaaacctagaccatcccacagtgtggagactgcaggttcagctgatggtagtgatggaaatacaactgggacggatctaagtatacggaaaagaaacagggaggggacaccaactattggcgaagatgagaaaattgaggcgaagtctaaccaagtctctgcgggggaggtgactgcaaccatttctcctaaaccaattggaactgtagtttctcctggcatgaccacaggaacaatattggagcttaggaacacccccaccatgaatgctatgtccagtgctatgggtgtacattgtggagtaatgcccactgaagtctggttgcagaatgagcgggagctgaaacgggagaggcgaaaacaatctaatagagaatccgctaaaaggtcaaggctgaggaancaggctgagactgaaaagcttgcccgtaaagttgaatccttaacttcagagaatgcagcactcagatctgaaataaaccaattaactgaaatgtcttaaaaagtaaggctcgaaaatgcgatattattggaggaactgaaaaacgctcaactcggacacggacaggagaatgttttgaacnanaaggaagacaaggaggatgaaatgtgtgataaaaagtcagactccggtgccaagctgcatcaactcttggatccgagtcctagaaacaatgtantggctgctggctgaatgaagagaaaattgtggcctactgattttggtattaaattggaggaaatcg

SEQ ID NO: 200401 - DNA, 1075 bp, Gossypium hirsutum
  unsure (1)..(1075): unsure at all n locations
gtgacatcacaactgctcttgctttgttctctttttttccctttattttctctttgggaggggggctgtantttgtagctgaatcttgggcttgttcctttgagttgtgatcctttgcttagatttgaaaaatatatattttttgtttaattttggaagagtaagactcggaagaggaaatggagatttggggatgggtttttattggaattctttttcttgccgattttgttgtcaaaattgagcctttcaagctgggtcgtagtcaacctactgagagaatttcaggcagtgctggtgatgtcttggaagataatccagttggaaggttgaaagtctttgtttatgaacttcctagcaaatacaacaagaagatattgcagaaggacccaagatgcctcaaccacatgtttgctgctgagatctacatgcataggtttcttttatcaagtcctgtccgaaccctcaaccctgaggaggctgattggttttacactcctgtatacactacatgtgaccttacaccaaatggccttcctttgccatttaagtcgccacgaatgatgagaagtgcaattcagcttatttcttcgaattggccttattggaacaggacagaaggagctgatcacttctttctagtgccacatgactttggagcatgcttccattatcaagaggagaaagctattgaaagggggattcttcccttactccaacgagccacattggtccaaacttttggacaacggaatcatgtttgcctgaaagagggctcaattacaattccaccatatgctcctccccagaaaatgcaaacacacctgattcctgacaaaactcctaggtccatttttgtttacttccgtggactgttttatgatgttggaaatgaccctgaaaggggttactatgcaaggggggctaaaacancantatgggagaacttcaaggacaacccactttttgacatttcaaccgagcacccaactacctactatgaagacatgcaacgagctgtatnttgtttgtgttcacttggatgggcaccttggagccctaaattggttgaacc

SEQ ID NO: 200402 - DNA, 619 bp, Gossypium hirsutum
ctggttctattgttgcagaaatatcagagtcaatggaaggaagaactagcaaaagaacagcatccacattcattgccaaggaccagtgtttcctgtcagataaaggcaaacacaccaccatctttcacaccattgccatcttctgatattccaaattccttgtggcctcgtcaagatgatcctagtaccagcactaatcttggtgattttggggcttcaccaatcattgctgatgcagctggttttcgcctggctcccttgctaatgcaacaggatgctggtcctccagacaatctggaagttttaccccggcttaagtcaatgacatggaccatggagaatctcaactcagcgccagccaataaagcagctattatccatcttaagcttcaagattatatcaagtctccttcaggagagagagaagtgaaatttcagctgactaaagacacaattgaagctctgttgagatcattgacttacatcagcgaacaactttcaaacatgactgggacttcctcagagccggcacagaaaaagcaaaagcagtaggaccatacggccatagttcatttcttgtctctttgttttctgtactgacattatatatagattcatg

SEQ ID NO: 200403 - DNA, 636 bp, Gossypium hirsutum
  unsure (1)..(636): unsure at all n locations
agagcaaccaccttccggacatcaacacgattcccaaaataacttctcttgctctgaaagaatacgacccacaggcatgaacatcaaacaccccctctctcccctcttcctaaccttcctcttcttctatctccaccctatcccaaccctgtgttccgccgactacgacgccaacaccaccaccccatcaaacgccactgatttcatccgtataagctgctccgtcaccttataccccgacctttgctttgcttccctttatggctacgccaacgccattcaacaagacccagctcgtctagctcgtactgccattggtgtcagcctctctagggcccgtcacatggcagcttttgtctctaacctctcccgtgaagcagactacggtgccgacccacgagccagctccgccttacacgactgtttctccaacatggatgatgccgtggatgaaatccggggctccttgaatgaaatgcggcggcttgtgaatccgggttctgagtcttttaggttccaaatggggaatatccacacatggatgagcgctgctttaacggacgaagagacttttangatgggttcgaagatgtgggtgacngacccatgaaaacggcggtgtgcgaaaaaacggcc

SEQ ID NO: 200404 - DNA, 753 bp, Gossypium hirsutum
  unsure (1)..(753): unsure at all n locations
gtgaaaaaaaaacccagtacaaatgactaagaaactctactcggcagcatcctgctacctaatcatgttgttgctgttgcaggaaactagttgttccaccggcatcaggcaagacaagttatttgaacttggatcaaagttacaagagctggcatcgccaccttctgttcctctccatctcgactccttagactcagtcaccaaaaataatggaagagcgttctacccaattgcgtacggggcagaccctactggggtgcaagagagcagtgacgccatttcgcaagcgctgaatgacgctttccaggtccaaaccactctccaaatgctgcctggcttgaaggacttgggtggtgtcgtcattgatttgctcggcggaagctacaaaatcagcaatcctataaggtttcctgcttctgggggagccaatattgtggtgaaaggagggtcgttgcgggcgtcagacacattccctggtgaccggcatctcatagaagtatggtctccgaattctcaaccatcatcccctaccggtttcaacgatatgaaagatgagaatgtaggaatctactacgaggacgtcacattccgggacattcttttcgattcgagcttccgaggcggagggatctctgtaattgattccgccaaaatccgcataaataattgcttcttccttcacttctcaacccaaggaattctattccaaaaaggtcacgagactttcatatccagctgtttcctanggcaggt

SEQ ID NO: 200405 - DNA, 908 bp, Gossypium hirsutum
  unsure (1)..(908): unsure at all n locations
gtaggaatggagattcaagtaatcttagttgtgaacattcatctgatttgggggaagttgaaagggaaagggtaaggcaaatttttcgggagtggatgaacagtggtggcagggatcgtacatctaatgtttcttgtaaaaacaacagttcaagagcccagtggcttggtgaaactgagcaagaaagggtcagaattataagggagtggatgcaaatgaatggccagcagagaggtgcttgtgttgacagtagagaagaccaagctgctgatgttggtgctcaaattgatcgagttcttgatggattggtgattaatcagaatgaaggccgaactgagcttgtccgtaggggcattcgtaaattatgtggccggcaggctttgcttgatatgcttaaaaaggctgagagagaaaggcaaactgagctccaggcgttgttggagcatcgggctgtatcaaattttgcccatcgcaaccgtattcagtcattgctgagaggtacattcctgagaaatgacagaatgggtgagggtaacagatctacctctgttgcggccagcgaattaggcttattaagacaaaagcaaactgtatctggtctaagggaagggtttttctccagactggataattctggttctggtcctgctancagtaatcattccgatacatcatctaatgctgatactaatgctaacagaaatgagcaaaaccaagtaaataactctgaacatgagaatgagcaaacagataaccaaatgtttttgcatggtataactgatttgggggatgatgtcgaagatgtacgttggcaggaaacctctgctcgggtataaaaatggcgggaacgaatttgtgggagtgttgctagagagtggcagtggtctttcagtgatgagtctaatgat

SEQ ID NO: 200406 - DNA, 632 bp, Gossypium hirsutum
gtgatttcaaagcttctaatattctactagatgcggaattcaatgcaaaactttctgatttcggattggccaaggcagggcctactggcgatagaactcatgtatcgactcaggttatgggaactcaaggctatgcagcacctgaatatgtcgccacaggtcgattgacggctaagagcgatgtttacagctttggagttgttttgctcgaactactgtctggacagcgtgctgttgataaaacaaaagttggcgtggagcggagtctagtaaactgggcaaaaccatatttgggtgacaaaagaaaattattccgaatcatggacacgaagttgggtggccagtacccccagaaaggtgcttttacggcagctacccttgctttacagtgcctaaatagtgaagctaaactcaggcctcgaatgtcagaagttttggcagcactggagcagctagaagcccccaaaactgcatcaaaacacagtcaagcagaacagcatgctgttccacttcctgttcggagatccccaatgcgacaccatcgatcacctatgcatctaacacccagtgcatctccattgccatctcacagacaatccccgcgggtacattgagattccatctgtaaattc

SEQ ID NO: 200407 - DNA, 576 bp, Gossypium hirsutum
  unsure (1)..(576): unsure at all n locations
acataaccagcctcagccaaccacagaagtcatcggtttagaggctataaggcgtgaaatgccttgtgaacttctacgagctagtcttcctcacactaatgaatcccagaggaagcttttgatggacttttctcagcgttcggtgtccatgaacggatccagttcgcctgctggaagtactagccgaatcaactctgaatcggtaagggtctaataaagaagggaagggtagcatgcaaattttgtgaacaatgcagttgataggatgtagaatgagagaacagaggggaagaggtatgcattattgtcctccttcctctcttcttcccttttcctaagatcatgaaagttgatcgaatttattctagcaacacaaatgaatgtgtggtgtgatgggggagagttggtgattggaaattgttattgtancctgtggggagctttattttggtgctctgctttgagacgctccgttggccagggggagtcgtattattagtgggttggagtgaagatgaatgttccgttggtcccttactgaaccttggaaacactccttttctatactgttccaac

SEQ ID NO: 200408 - DNA, 571 bp, Gossypium hirsutum
ggaatctagaaggcagagagctggtgggaaagtacatgcagttgatcctgttagaaagttttccagagaacctatagctgttcctgccccagatttcaatgttgagttacaggcatccatacagaaacggcgaggacagtttgatgctaaaagtatcagtgaagtatgctaccctgaagaagacagaggtgctggcgtctctattgagccttcaaaaagaacagaaagagttgtatacaactctcattctggccggtcaatgcaccctggtaagtttgaatcttcacggaataagaagactgagattgagtctatgaagacttctgctcgaccatttggttttccaaggaagcctgaagagttgaaaactcagacaacatgtgttcatcgtggagctgtggaattgtcccgattttctaattcaattgcagttagaggcagttcacggttcgatatgaccaaagagaataatataaatcctcaatggcctgaggagcattttaattccggatataaccatctggataatgctgagtcctctgaaaagcatgatttgtcccatggtttactt

SEQ ID NO: 200409 - DNA, 660 bp, Gossypium hirsutum
ctttctcgtagtcgtagactcgaactgactgacactctcactagtcactgcaatctaccgaaaattccatttttgtattgctcaacctgttttctttcaccttctaatactataatttcaccttattttcacaaattttaaaacataaaatatcgtctctttcccccttcccatcattaaccctaatttgtttgtgaaaatgcctgaataagaacctgctttcatttgagaattaagatcctaaagctgtaactttttgtctcagtcttgattattggcgtcatgtttcttcgtcgacttgctgtgatagttcctcgctctacaaggttcttcagcagtaaaggtagccttgaccttggaagcaccatagctgaactcaataaggaaatggaatctgtctttggtgaacctcctccaaaaggactagccaattctggaaataaaagctgcatggctcaagatgcccaccataactctcatgttattttgggttctactaatgataagtttgcagctcaagaactgagctctatatctcatcatttaggtgaaaataagcctggtctgtcccatgttggcagcacagggaaagcccaaatggtagatgtctcacccaaagaaaatagtagcagaactgctattgcttgttgttaagtattg

SEQ ID NO: 200410 - DNA, 1178 bp, Gossypium hirsutum
  unsure (1)..(1178): unsure at all n locations
gcttggatgagcttgaattgtatgaaaaccccatagcaatagccacatttgctgctatagagaagaacattttcgtttctacatctgcaggaaatgaaggcccagatttagagaccctacataatggaaccccttgggttttaactgtggctgccggtacaatggatcgatccttcggcgcaagtttaagccttggaaccgatggttatgtcagaggagctgctctttatcctgggaatttttcttcaatccaatacccaattgttttcatggacaaatgtgatgagaccaaagagttgaagaaacttgtgggaatgattattgtttgccaagatccaggcaaggaagattccctcaatgaccaatttagcagcattcaagtggcggggaatgtacctggtgttttcataacaaatagtaccctcttggatatattcactcaaagccctttaccagccattttcctggaacaaaaaggtggcgatattgtcgtcgattacattaagaccaataaaaacccaaaagccagcattgagtttaaaacaacatttctgggttccaaaccctcacccactgtaactagttatacatctagaggaccatcctatagtgctccatcggtcctcaagcctgatattatggcccctggtgactcaatcctagctgcttggccgctaaatatcggagtggctcgtttgaatgacgatatgttgtttagtagcttcaatttactttcgggaacatccatggcatgcccccatgtagcaggaattgcagcactcctgaaaggggcacatccggattggagccccacagcgatccgatcagccttgatgactacgtcggatcccatcgataacgccggcaatcctatcgaggatatcggtactaatctccaaccggccactccactancaatgggagctggccatatcaatcccaacaaagcgcttgaccccgggatcgtatacgatgctacagtccaagattacatcgactttctttgcggtctaaactttacaccacaacaaataaaaaccatcacaggatcatcttcaaacaagtgttccaacccttctttagatctcaattacccttcttttatagcgtatttcaatgacaggaatgtgaaaccggattccaacactgtgaaggaatttcaaagaacggtgactatt

SEQ ID NO: 200411 - DNA, 649 bp, Gossypium hirsutum
  unsure (1)..(649): unsure at all n locations
ggcacgccttctcccacaggttttgttatgaatttgcagccgtctgaagcagaagctggttttgatattcgaataccaccaacagttaatgcagaattcttggagaaacggatagctgaggaatgggcacctgcttctcgaaacatgtcatttgagtttaagcaaaagggttctacgcaagattaccggggaaggccactcataactgctactgacaggtcgaatccatggtgggctttgttggtacaagctatcaagaaagctaatggaaagattgggaagccagagatttttcccgctgctacagattctctttattttcggcaacagggcctgcgagctattggtttttcacctatggctaacactcctgttttgcttcatgaccataatgagtttctaaaccaagctgagtacttgaaaggaatcgacgtatacgactccattattaaagcatatacatcatatatcccacctgcaaagagatagcctttcgagagacgagttgtacaacggttagcacggttgggtaccttcttcatcgattgataactcttattttttcttgctgcctcgaagtataccataaagggagtggaagtaatgttatcctaaaaatgtatcaatancagtggaagcagttcatcac

SEQ ID NO: 200412 - DNA, 746 bp, Gossypium hirsutum
  unsure (1)..(746): unsure at all n locations
gtcgaggaaggcactcggtttcgtgaaataatgagggaatcctttcttttggctggtgcaacgaacatgggtgattttctaccgatggtgaagtggttcgagaaaactgagaaaaggatgatcaatttgttcaaaagaagagaagcatttacacaagaattgattgatgaatgtcgacataatatgaaaattaggaaaaaagtagtttatccacagacgaaaaaaagaacatgattgaagtcatgttgtctttgcaagaacaagagcctgaaaattacaaggatgaaactattagaagtctcatgatggttttacttttggctggaactgatacgtcatcagggacagtaaagtgggcaatgtctttccttttgaaccatccccaagtctttaacaaagcccgaattgaaatcgatacagtggtcggacaaaatcggttaatcgaagaatcagattttcccaatcttccttatcttcattgcataattaacgagactttccgaatcaagcccaccgctccattgttagtacctcacgagtcatcaaaagaatgtttagtgggaaggtaccgtataccgcatggaaccatgttgttggtgaatgcatgggctatacaaaacgatcccaacaattgggaggaacctgatgtgttctagccacagagattcganggtgtggatccgtcgaacatcgcgtttaatttaatgccgttcgggaacaggaggcggcggtgttccngagaaagg

SEQ ID NO: 200413 - DNA, 756 bp, Gossypium hirsutum
  unsure (1)..(756): unsure at all n locations
cgtggatggattatcctaataacatagcttttaagctccatgaaacggtgagtcacaaagagtgcgaggatattgtatccgattttgaacgttgtgcgacagtgcttttaaattgcaaaattctgaccttgagaacttgctatgaattcgaacctgaggcactacgtgtgcttagtaagattcaccagaaaccaataattgttccacttggcttgttgccgccaccactaacgagcgtagatgataaaggagacgaaaattgggaagcgttgaagaaatggcttgatagtaagcaagagaagtcagttttttacgttgcactcggtagtgaggtgagtctaagtcaagagtccatgcacgagttggcatttgggatagagaagtctgggttaccatttatttgggttgtgaggaaaccccctttagttgaagaacagtttgcagaggacatgatccctcccgagtttgaagaacgagtttcanaacagggtatggttttacgaggctgggcacctcaacttaggatcttggctcactcatcagttggtggtttcttgactcactgcgggtggagttccgtaattgagtctcttggattaggtaaacctctgatattgtttccccgtggaagtgccaatcttgggttgattgctaggttgatgctttggaaaaaggtggattccaaatanaaaaaaacgatgtggatggatcctttaagagcgacttggtgggcccgtgttttaagcgagttctggt

SEQ ID NO: 200414 - DNA, 785 bp, Gossypium hirsutum
ctagcttggaacaaggaatacaggaatatcctcgctagtgcaagtgctgacaaacaagttaagatttgggatgttgctgctggaaaatgcaacataacaatggaacatcatgaaggcaaggttcaagcagttgcatggaatcatcatgtgccacaagttcttcttagtggatcgtttgattgttcagttgtgatgaaagatggaagagtgcccactcattccggttttaagtggtcggtgactgctgaggttgaatgtttggcatgggatccgcacactgagtactcgtttgtggtgagtcttgaagatggtacaatcagaggatatgatattcgagctgccaagtctgatccttcttccgagtcaaaaccaagtttcacactccacgctcacgacaaagctgcttgcaccctttcatataatccggcagcaccaaatcttcttgcaactggttccatggataaaatggtaaaactttgggatttgtcaaacaatcaaccttcatgtgtggcgtccaagaatcctaaagctggagctgtcttctccatttccttctcacaagataatcccttttgtctggctattggaggctcaaagggaaaactaggagtttgggatacattaaccgagataaccgtgtccggaaagttcgggaactacagccaacagccgaacagaccgaaagcttaactcgaaaggtgaaagtttgtattgtttctttgagagttggtatttataacgaagatgagtttgattttcctagttttgagatcatgtgtatattt

SEQ ID NO: 200415 - DNA, 749 bp, Gossypium hirsutum
  unsure (1)..(749): unsure at all n locations
cgatgtcattggattcttgtcctcctcttcactggcttgtccttggttgtaaagtgcacatacttttctgctgtactcttcaaggttgatcaaggtgggtgggttcctcttgttattgctgcagcctttttgctcataatgtatgtttggcattatggtacactgaagcggtatgagtttgagatgcatagtaaggtttcaatggcatggattcttgggctcggccctagtttagggctcgttcgagttcctggaattggattagtatacactgaattagcaagtggtgtgcctcacattttctcccacttcataactaacctacctgcgatccattctgttgttgttttcgtctgtgtgaaataccttcctgtctacactgttccagaagaagaaagattccttgtaaaacggattggaccgaagaatttccacatgtttcgctgtgttgctaggtatggctacaaagaccttcacaagaaagatgatgagtctgagaaaaagctatttgatagcctcttcttatttgtgcggctcgagtcaatgatggaaaggtgttcggattcggatgaatatancttgtatgggcagcaaacggagcggtcaaaaaaaggtctgttgaacaacaatggcaatggcaacacaattacttcctatgcagaataccacaatttcatcagttggattcaattgtgcccccgaaaatctccaatgcatgggagcatgactgttatattctcggagcactt

SEQ ID NO: 200416 - DNA, 623 bp, Gossypium hirsutum
gcattagagcacaggtatttttcatctgcacctccacctacagatccagctaagctccctaggcccgctcctaaaacgcaagcatcagattttaatccccaggaaggtcccactgtcctttctcccccatggaagtcaaggagagtaatgcctgatcctgagaggtttgaaggtaattccaaccaaaaggagaagatcgatgagcgtgttggtgaagttcgacaggcagttggtgaaattgcaggaaaggttgaacagtgctgatagatctcatctgaagaggaaacttgatcttgatttccagcacaatgaataagaaaaataaaagtctacaaaattgtatctttgccggtatcgtgtttatgcagcgtggatatttatgaactatatggtggctccttggagttttttgttaaccaaccaagaggatttttcttcactctgaaggaagaagcgacagggtatgagagtcatcactcatcagtcaatgctttagttttaagttgtgttccgtcgttcctgcatgttttcgactttttgcaagtggttagagctttccctttggcctctagatgatacaggttcaaaccgcgtcatcttttttccgtcttaatattggggac

SEQ ID NO: 200417 - DNA, 1033 bp, Gossypium hirsutum
atggcataccttgaaaattgaaagcctaaagaaccctttttcttctccaacagtcaaccgccatggcaccctcctttctcagctttgtctccttatacggcatctacctccgccgttgctttgccacctccggcctcacttcacaattcatcgacatcgacgaacacaccaccatccacttttgggctccaaatcccgaccaccaaactccacagcaacaaaaacccgccttgcttttgctccacgggttcggtcccagcgctatgtggcaatggcgtcgacaggcccagttcttctcccctcacttccacgtctacgttcccgacctggttttcttcggcgattccaccacaaagtccaaggaaaggtcggaggtattccaagcagtttcgatggggaagctgatggagaagcttcaagtgaagaagtaccacgttatggggaccagctatggagggttcgtggcgtaccacatggccaaactgtggccggagaaagtggagaaagtggtgattgcgagttctggagtaaacatgcggaaagcagataacatggagttgttgcaaagagctaatgtggagaacgttgaagatattatgcttcccgagacggcgactcagttaaggacattgactcgtttggccatatcaaggcgtgtcaccatggttcctgattttttctggaaggacgtggttaaccaattatactcacaaaacagaaacgagaaactgcaacttttaaagggaattaccctactggctggtgatgattcatgcaagctacctccacttccacaggatgtgctgaatatttggggagataaagacaaaatatccctttgaaaattgctcatgaactcgaagagctaattgggaagaaaacaggctggaattaattcaaaacttctcctgtgcccccaatgagaactcaacccgttccacaaccttgtcgaaaactcccaagtgggtcctcctaattccccaatataatatgtaatgtgatggaatataattccggaaaattttcctctcca

SEQ ID NO: 200418 - DNA, 614 bp, Gossypium hirsutum
  unsure (1)..(614): unsure at all n locations
ctcaagtatatgatgatatagctcgtgggactcgccaaaaatttgagtcaaatagaccgagagccgtgctctttgaaggacctcccggtacagggaagacatcttgtgctcgtgttattgctaatcaggcgggtgtcccattgctctatgtaccacttgagattgttgtgtcaaagtactacggtgaaagtgaaaggttactggggcaagttttctctcttgccaatcagcttcccgatggtgctatcatatttttggatgaggttgattcttttgccactgctcgtggtggtgaaattcatgaagctacacgtcgaattttgtcagtgctattgcgacagattgatggatttgaacaggacaaaaaagtagttgtcattgctgctacaaatagaaaacaagatcttgatcctgcattgattagtcgttttgattcaatgattgtctttggtctacccgatgagcacaaccgtcggcaaatagcagctcagtatgcaaagcatcttacagaatccgagttggctgaacttgctcgaatcaccgatgaaatgtctggtanggacatccgggatgcatgccaacaagcagagcggtcatgggcgtcaaagcttatt

SEQ ID NO: 200419 - DNA, 630 bp, Gossypium hirsutum
ggccgttgaagctggaatcatgaaaccgctagtggaattaatggcagatttcggttccaacatggttgacaaatcggctttcgttttgagcgtgctggtatcagtaccggaagccaaaacggcattagttgatgaaggagggattcccgttttggttgaaatcattgaagttggatcacaaagacaaaaggaaatcgccgccgcaatcttgttgcagatttgtgaagatagtgtggtgtaccgtactaaggtggcccgcgaaggagcgattcctcccttagtcgctttgtctcagtcaggcaccaatcgcgccaagcaaaaggcagagaaattgatagagctgctccggcaaccaaggtccgccaacgccgcagccagtccctcagatctgtaagcataaaaatctttccttacatcacataaatgattgtaattatttaaaaaaaaactgaaatagagattttacgagataaaaaaatgtgaataaaaaatgtaaatatctttatataaaatctatcttgctatgaaaatgatgtgagacttatgaggagcagattgatttctggattttggtttgtcctttttcgaatactttatgaagtatatattaatcgtttgggttaaaaaaac

SEQ ID NO: 200420 - DNA, 660 bp, Gossypium hirsutum
gtgaaatctggtgctgaaacagtgaagaagactgaatctgaacgccgagaagatgtaccaagtgcaattgcaattagcagaatcgccgtaccacttgttactaggagtacactcgaagttgtcatacctgactacgctgttcccaagctcatagcaaaatcgaaaaccaaactggcccagatcagtgagttgtctggtgccaatgtgactctggtcgaagacagaccaaacgagacacaaaagatcattcaaatatcaggtactctggaacagtctgagagagcccaaagcctgcttcaaggcttcattttaagcacacaagaagatggaccgtaaagataaatgctggaactcggagctgtcttgtctgtatgggggatggcatgttaaaaattttttctcgtacattatccgattatctccagatgtatggttctggagttataatgaggatttgttcagtgtcacgtagggcataaaaaacaaacgaatatgtcttgtctttaaaatcggtgttttagattaagaactgtgagaagggtgagagtgctccattgtaaattaaaacatgaggggttctctctgtcttggttttttccctgcaatgcttcaattttttcctgaatgaaaaaaaaaaactgcagttattttcgttgctct

SEQ ID NO: 200421 - DNA, 673 bp, Gossypium hirsutum
  unsure (1)..(673): unsure at all n locations
gaatctgttccctttctttttctccttcttatggcttacaagttatagtttccagaaacaaggggaaataaaaaaaaatccattttgttttaggattttggtcttcttttatcttttgggtcatggagctaggtgattgttgtttaacatcaagtccagcaagcggagagaagcgaaagctgcataggacacagcaaaaggagaaaccattcagagggataaggatgaggaagtggggaaagtgggtcgctgaaatcagagaacccaacaagcggtccaggatttggcttggttcttacaccacccctgtagccgccgctcgtgcttatgacacagccgttttctacttgcggggtccttccgccaggctcaacttccctgacctcatattccaagaagacgagcttagggatatctcagccgcttccatacgcaagaaagcaaccgaggtgggggctaaagtcgacgctttacagacctcactccatcatgcttctgcttcatcatcggaatcatcgaaccctacttcgggttttccgtaaacctgatttgaccaagtaccctgacagttctgatgaagattgagaaanacaatatgatagtgtaccataacccccaaacctacaactgtgcatactcgccacttttcttttcttttttccccacttatgtt

SEQ ID NO: 200422 - DNA, 628 bp, Gossypium hirsutum
aataaagctttaaaacaaatatcaaatatccccacctcacaaattccgattaaaaggcaaacacattcgcccaacacacgcacacgttcaagctccaccttcgaatctaccagagagaaaaaaaaggaaagaacttgattaaagttcataaagaaaaggctgtttttttcatctctaattcgtccaaatcaattgatttggagatgcaatccgttgttattaccccaacatactgttgcagcacccattatcaaaccctagaacgcttctcttctcgtcctaatccttccaagccatcatcaagcttatttggagctcgcgtctcggtcgcgaaagggcgtaatccgtcgcggcgttgctcatggcgttgtcttagggttcgattacctgctcttacgcgcaagctgattgtaaaggctgtggccactccaaattcagccgtggagttgccactgacagcgaagaacattgagagcgtcttggatgaagttcgaccatacctcattgcagatgggggaaatgtagcattacacgagattgatggtaatgttgtgcggttgaagctacaaggggcatgcggctcatgtccgagttcggttatgactatgaagatgggtattgagaaact

SEQ ID NO: 200423 - DNA, 756 bp, Gossypium hirsutum
cgcaacagggagttggttgaaaatctgagcaagccaagtagtaattcaaaagaattgaactttccatccaagtattcccagtcattttttgaacagtttttaacttgtctttggaagcaaaatctatcttattggcgaaacccccaatacacagcagttaaattcttctacaccgttgtcatttcgttgatgcttggaacaatatgctggaaattcggttcacaaagggagagccagcaagatttgttcaatgcaatggggtcgatgtatgcggcagtcctcttcattggtattacaaatgcaactgctgttcaacctgttgtgtccattgagagattcgtttcatacagagaaagagccgcgggaatgtattcaggcctagcctttgcatttgcccaggttgctatcgagttcccttatgtatttgcacagtcggtaatttattgttcgatattctactctatggcctcatttgagtggactgctttgaaattcatttggtacatattctttatgtactcaactctgttatacttcaccttctatggaatgatgactactgctgtcacaccaaatcacaatgtggctgctatcatcgcggctccgttttatatgctttggaacctttttagcggctttatgattccccacaagagaattcccatttggtggagatggtattactgggcaaatcccataacgtggagtttgtacggcctcgtggtttcacaatacgctgatgatgaaagggcggtg

SEQ ID NO: 200424 - DNA, 625 bp, Gossypium hirsutum
  unsure (1)..(625): unsure at all n locations
atccaaccccagcatatgtcatgagcagtccctcaactgaaaccactgtctatactcaaaatcagccacagatggtagttgatgaattcccagtacggcccggccaacccgggtgcagttacttcctgaaaactggggactgtaagttcaaatcaaattgcaaatatcatcatccaaaaaatcgacttgcaaagccggccccatgtgctctcagcgacaagggcttgccactgagacctgatcaaagcatctgctcacactacagtcgctacggcatttgcaagttcgggccagcctgtaaatttgaccattcaatgcaggcagctccttcgacagctgtatctgaactagagcagcctccaccattcagccattctgcaccattagagcaaaccggaattgccgggagtaatggtaccgatactgcagttcagcagcccgtgtaaaattatttttcaggaaaaaaggccaccctanctcttaaatctctcacatcagtaaggattctaaaatttccttctttaaacttgaagactagtcaacttttcttcacttgttccattgccacaagagtttttaggggatggtattatatataaatatcacatatatgatatgggttgtc

SEQ ID NO: 200425 - DNA, 562 bp, Gossypium hirsutum
ttaatatacctcacattttaggggtttctcttgaaaaatgactgaaaatcttgactgttcagcctcaaatcttctctgttctgagaacgcaagctcttgctttgatggtgatcttgattttaatgccttgaacgagtttggggcttcccctgcttgtcaccacctccttaaaaaccaaatctttaatccacatgaccctttcctcataaacaacagatcaacttctttgatgggttgtcctggttttgcattacaaagtgatgatcgaatcaaggcgatggttgaaaaggaggtggagcatttgcctggagatgattatctcaagagactgagaagtggggatttggacttgagcgccacgagagaggctcttgattggatttggaaggcttctgcttatttcggttttggacctgtgagtctttgcctatccattaactacttggatcggttcctttcagtgtatgacttacctagaggtaaaacatggaccgtccaactgctggccgttgcttgtttatctattgcagccaaaatggaggaaacaaaggtgccttcatcc

SEQ ID NO: 200426 - DNA, 579 bp, Gossypium hirsutum
catgcttaagctcttaatcatctgattcttcatcatcaacaactaaaagacagtttaagacaatgtaccctggaggttacacggctgaaattacgagcttatctccaagagctaccgagaaggatctttgtgactttttcgcatactgtggtgcaattgtgcatattgaaattatcagatgtggcgaatatgcatgtacggcttatgtgacatttaaagatgcctattcgctcgaaactgctgtcttactcagtggagctacaattggtgatcagtccgtatgcatatcaaagtggggttcgtatggtgatgattcatatccttgggatagttctacatggaagactgaagaggatactagctcatcggttactcatatgcacccatttgtttctagtcctggagaagcggtgactgttgtcaaaacaatgctagccaagggatatgttttaggcaaagatgctcttatcaaggccaaagacttaaacgagtcctatcgggtctcggctactgcagcagccaaagttgctgagcttagcaatagaatccgcctcactgataagattaacactagcatgt

SEQ ID NO: 200427 - DNA, 627 bp, Gossypium hirsutum
  unsure (1)..(627): unsure at all n locations
gtcgaactcaaagaattacccgacccggatgaccgttccaagatccgaaccttccctctcctccgaccctcgggtcgtccccagggcaagattcgggtgaaactcgggattcgcgaacgtccccttcctccaccgcctgattaccattttgcccctcctaactattattacacaaatgtccctccccatccgccaagatactccggtttgccctacgtttctcaccctccgccgcctcaatcgcctacgtactccgtccccgattcgtattctccccatttctccaatcactactatcctactcctccgccgcccatgcctcctcgtcctttcttggagcggccttacagctacactggtccatcagcaccgttagattactctccctacgatcagagacctagaggaggccctaaatttgggaccggattaactgttggagcggctgcgggggctttaggtggattatcattanaagaaggattgagatacgaataaaaaaggaatcgtggaatagtggaggacgacctcgcatccagggacagggatgattatagtgattaccgtcctccggattattgattggttttagctacaacgatgaatgtggggtatatttttataaac

SEQ ID NO: 200428 - DNA, 592 bp, Gossypium hirsutum
  unsure (1)..(592): unsure at all n locations
ggtaatccgatcggagtccgatacggagagcgatacagacgccgagaccatgaagtgcatatcgtgcaaggaagagtacggatcacgcgatgccggcacttgcaaggagtgctacgaggaagcaagcgagaccgaggaagagttgaagcgagagatcgaagatctcaaagccaaagtcgccttcttacgcttttggtctccgcttgatcacgcccaccgtggctccaccaccactcccggtcccttcttctccgatgtcgttttgatcgcttccgatgatgggtctcctgggtttccccctgtgcccgtacccgccaataaagccgttttggtgaatcgatcacccgtattcaaagcaatgctggagaatgaaatggaagaaagcagaagtggaacaatcaaagtaagtgatgtatcatacgatgctcttcgtgcctttgtaaactatttgtacactgcagaggcatgcttggatgaacaattggcttgtgatcttctggtcttagctgaaaaataccaagtgaagcatctcaaagggtattgtgagaagttcttggtatcganattgaactgggataattcacttatgagg

SEQ ID NO: 200429 - DNA, 672 bp, Gossypium hirsutum
cctatgcttgcgataatgcttccagtttttgtcattcttgtatactatttcatcagaaaggatgtttatgatctacaccacgccatactgggccttctgttttctgtgcttatcaccggtgttataactgatgctattaaagatgctgttggtcggcctcgtccaaacttcttttggcgttgtttccctgatggaaaaagggtttttgaccctgtgacaaaggacgttatgtgtactggaataaagagtgtcatcaaggaaggacacaaaagttttcccagtggtcatacttcatggtcatttgcaggtcttggatttcttgcgctatacttgtctggaaaaatccgggtatttgatcgccagggccatgtggcaaagctatgcatcgtcttcttaccattactcattgctgctttagtgggaatttctcgagttgatgaactattggcatccctgggcaagatgtttttgctgggggttctcctagggctaccagtttcctcattttgttaacttccaattctttcccggccccatattaaattgaatggttgggggctccatccatatttccaaaatttaaccagactctcgaaatgttaattccatccaccgctccaaatgttcaacaaccagaactccagagtgttattgttgaattcaccccatgca

SEQ ID NO: 200430 - DNA, 628 bp, Gossypium hirsutum
  unsure (1)..(628): unsure at all n locations
ggccattgttcatgtaacattctgtgttctcacagtttcttttggagggctaaagatacgtgaatggaagaggtgggaagattcaattgcagagaagaattatgattcagagcaagtgctgaagaaaaaagtcactcatgtgcagcagcatgcttttatccaagagcattttcagggtcttggtaaaaattcaattctgctaggatgggtgcattctttttttaagcaattctatgcatcagtgaccaaatcagattatgtgacactaaggctaggtttcatcatgacacattgcagggggaatcccaagtttaattttcacagatacatgatccgtgccttggaagatgattttaagcaagttgttggaataagttggtatctctgggtttttgtggtcatcttcttgttgctgaatgttaatggctggcatacttatttctggattgctttcattcctttcattcttctacttgctgtgggcaccaagctcgagcatgtgattactcaattggctcatgaggttgctgagaaacatgtanccattgagggggaattagtggttcaaccatcggatgatcacttttggttcaacaggcctcgtattgtcctcttcttgatccatttg

SEQ ID NO: 200431 - DNA, 646 bp, Gossypium hirsutum
  unsure (1)..(646): unsure at all n locations
ctttaaagcctcactctctccggaaatggggaaggccaagtcggagtttgagaatttatggaagaagagaaacttggaagagcctttagatggtgacggagaaactctcataaagcgattgaaaaccgaaagaacaaaaccagggtttgatatggagcttcacctcgacactccattgcctatagagtggcaaagatgtcttgatcttcagtcagggacgatacacttttacaattcaaggactgatacgagaacttgtaaggatccaaggacaagccctgagtgtccaagcactgggcacatgagtttagaccttgagctaaacttaccatgcgtttctaatgcaacaaatccggaagccgtgagcaagcaaaactgtgtcggctcagttgagaagaagctcaacagttggggaggattaatgcagaagcgtccgtggttaacgatggaagaggcgaaggaggaaaaagagganatggtancaacagtgtgcaggcagtgccatatgttggtgatgctaatcaaatcatcacctgcttgccctaattgcaaattcaggcacccaccaccagacccaggccctccaaaactattcaaccaaaggcttagcctcctgtgctattaaggcgtgatggatcatcaagct

SEQ ID NO: 200432 - DNA, 624 bp, Gossypium hirsutum
gtgttgagctggaacgagttaacaggggagttacccagaacagtgtcggcgcagttattacacttggatttgaagaagaacaagatcagcggaccgttgccaaggttaccgtcaactgtccgttacttgtcagtgtcggagaactggatgtggggcccactcaaggccctggaatcgctatccgagttagcgtacctggacgttagcatgaaccaattcagtgggcccatcccggcttcactcttcttaaacccctccctcacttcactgtttttgcaacggaacaatttatcgggtggcctcccatcatcaatcaagatggaccccaccttccaatcctacggcggccagggatccatcgtggacttgagccataacttcatcacgggggatataacccccttcttggctggggtggagactctcttcttgaacaataaccatctcactgggtctgtacctgaggagtacgtgaaaagcgtgtacgacggcaccaccaaaactttgtatttgcagcataactatctatccggattcccattacctcaaggttccactctgcctgataccgtctccttgtgcttgtcctacaattgcatggtgccgcccgttgagatatcagcc

SEQ ID NO: 200433 - DNA, 612 bp, Gossypium hirsutum
agagttttaagtaagtaagatgataatggaggagcactggaaactggtttatgtgattgggattttggctttaggatttgcagtgaaaagcaatgctgatggttcaatctcatgtgggtttccagccatatataactttggggattcaaattcagacactggtggaatctcagcgaccttaaatgaaattctaccaccaaatggtgaaaccttctttggacatcccgccggcagagcctccgatggccgactcattatagatttcatagctgagggtattaagttaccatatcttagtgcatatatggactcaattgggacaaatttcaggcatggtgctaattttgcaaccggtggttcatcagttagaccacctggttttagtccattcaatcttgggattcagatttcacaattcattcaattcaaagctcgtaccactactctctataatcagctcagcctcaatagaagaatccctttatccattagcaatctaccaaggcctgcagaattctcacaagctttatacacatttgatattggacaaaatgatcttggtcatggtttccaaaccatgtcggagaaacaagttcgagattcaattcccgg

SEQ ID NO: 200434 - DNA, 742 bp, Gossypium hirsutum
  unsure (1)..(742): unsure at all n locations
gatcgcaacaactgccgtagacatcatagacaatgctagaatatttcaagtgcttgtacactcccaactgaatctgtaggttccaatgataggactcgttatgggagagaggggtttgatgtcnaggatccttgctgctaaatttgggggatttctcacttttggttcactcgaggcaggactagtatcggcccctgggcaaccaactgtgaaggaattattaaatttatacaatatgaggcttataggacctgataccaaagtctatggtgttatcggaaatcctatcggtcacagcaaaagtcctcacatctacaatgcatcatttaaatcctccagttttaatggaatatatctacctttattggttgacgatgtctcaacttttattaccacttattcagcccccgattttgctggatacagttataccattcctcacaaggaggctggacttaaatgctgtgatgaggttgatcccattgccaacgcaataggagcgattacttgtatgatcaaaacatcaactgaaggaaaactgattggttataatatcgactaccttggtggcattgcacctattgaagaagatctaagagtatccaatggtgccccccttgcatccggttcaccattggctggtaaaacatttgtcctaattggagccggtggtgctggaaaagcactggcttatggagcatatgaaaaaggagctcgaatcgttgttgccattcgcacatac

SEQ ID NO: 200435 - DNA, 1146 bp, Gossypium hirsutum
  unsure (1)..(1146): unsure at all n locations
caaaaaggcaaacataaagaagaaacatttttgcagcacccagttttgttcatcgttgtgttggttttcggtttcgttttgatggatccttttgaaatcggtccggtcggtgggatcgagtttaggcctgtgaaacatgacattgcaccatacaaggaagtcatggcaagttggcctaaagacaataaaagccggttgggaaatgggaaactcgagtttgtcggcgaagttttcggtcccgaatcgttggagtttgatggattcggtcgtggaccttacactggattagccgatgggcgtattgttcgatggatgggtgaggatttcgggtgggagacatttgccattgttacatcaaactggtcagagaagctatgtgctagatgtgtggactcaacaacatcaaagcaatggaaacatgagaaatggtgtggtagaccattaggcctaaggttcaacaaagacagtggagatttgtacattgctgatgcctattacggattgctcgtggttggaccgggagggggactcgccacaccattagcgactcatgtcnaagggaagccaatactgtttgctaatgatctggatatccataaaaatggttcaatcttttttactgacactagtagaaagtacaatagagtgtatcatttcttcatattgttggaaggcgaaacgaccggaaggattctcagatatgatcctccaacaaagacaactcatgtatttttggatggtttagcttttccaaatggaattcagttatctaagggccagagtttccttttattcactgagactagcaattgcaggctaatgaaatactgggttgaaggtccaaaaacanggacaacggaactggttgcacatttgcctggttttccagacaacgtaagaataaacgacaaaggtcaattctgggtagccataaattgttgtaaaacacaagcacaagagatcctggttcataacccatggatgaggagtttatacttcagattacccattagaatgaagattttagcaaggaattatggggatgaagatgtacactgtaatctcgcttttcgacgaanattggaaaaacctccaaagtcctttaaatattgaaaaagttttgttaataaggttggtgaattaaat

SEQ ID NO: 200436 - DNA, 759 bp, Gossypium hirsutum
agctctcctgtggttcttgcgctttcggagccaaaggcatgaacgctgtgctcgacaattgtctagcactcgaggaactctccgtgaaacgacttcgtggcatcacagacggcgctgcagctgagccgattgggcctggggtggctgcggcggcgttgaaaacaatttgcttaaaggagctttataatgggcaatgttttggtccgcttattattggttcaaagaatctgaaatctttgaaactttttagatgctctggcgattgggataagcttttcccactcatagtggaacgggtcgcgggtatggtaaaaatccatatggagcggatccaagtcagcgatgtcggtcttgcggctatctccaactgttcaaacctagaaattcttcacctcgttaagactcccgagtgtacaaacgccggactcggagctgttgcagagaaatgcaacttgttaaggaagcttcacattgatggatggaaagcaaatcgaataggtgaccaagggttaattgctgttgcgaaatcttgccccaatgtacaagaattagttcttattggtgttaatcccaccaaactgagtttggaaatgttagcttctaattgtccaaatttagaacggttagccttatgcggtagcgatacagtgggtgatgcaaagatatcttttattgctgtgaaatgtattgctttagagaagctttgtatcaagaattgccctgttttcggatcatgggattggaagcgcttgctaatgg

SEQ ID NO: 200437 - DNA, 624 bp, Gossypium hirsutum
  unsure (1)..(624): unsure at all n locations
ataaaccctaaatatagttttaacaaagaaaaaagactaaacattgtaagactcaaaccagaggagggcagggcagaaaagggggtcctcgatcaccatggctactggtttgagtactaggaatggcaatattggcatgaccctccccaccgccgccgccagcaaactcaacaatccattactatccaaagaatgcagcaactgcagtggccattctcccttctttatccaccaagttcgccacttaggcatcctacgccgcctttgcactgcctgtgtcctccgcctccacccttcctcgttctgccctgcttgctttaccttctacggcggctccccaccccatccttccaaacgtgtcaactgctccaattgctgctccctcacccattctcactgcgcaggcgacaccgttctcacctcttacctctgcccaccttgtaaggactcttctttctctttctttcctctcaaggacaacaagatcgacaagaagctcgctcacgctttgctctgcgctgccaagattgcctccttttccatggggaaggccgttaccgtaccatgggccgaggctgacangaaggtaagggaagcggcgcttgcaaaataacgggcaaggga

SEQ ID NO: 200438 - DNA, 817 bp, Gossypium hirsutum
gttttttttttcttccccattatggtaccttcatacaagattatgtttcttttcttctttttttagtatttcaatcaaattgatgtttgcttaatctcttgtctaatttcaaaattttcctgctttttattttttggtttctcatactttgcctgattttccattatttccgtctttttttttctcttttatcatccagagctgagagctcgaaaaacttactttctgctttcccccccttttcttttgggtttggaatttggagttaagttgtgatggaaaatttggagaaaaataaaagtaaagcgttgtaaaaattctgataaattaaagaattttaaactaacccgttgagaaaagagaaaaaagagaagaagaaagaaatggatccgtcgaagaaagtggcggataggtatttgaagcgcgagattcttggtgaaggtacttacggtgttgtctacaaagccattgatactaagacgggacagactgttgcaattaagaaaattcggctggggaagcaaaaggaaagggtgaattttactgcactcagagaaattaaactgcttaaggagcttaaagatccaaatataattgctttaatagatgcattcccacacaagggtaatttgcatcttgtgttcgagttcatggagactgaccttgaagctgttattcgagatcgtaatatattcctctcaccagctgatatcaaatcctacattcagatgactttgaaagggcttgctttttgccacaagaaatgggttttacacagggatatgaagccgaataatttgctaataggatccaatgg

SEQ ID NO: 200439 - DNA, 777 bp, Gossypium hirsutum
tggatacggtaataggtgccgttataatcatcctcgtaaccgtgccgcggttgaggctgctgtaagagctacaggggagtaccctgaacgacctggggaacctgcatgtcagttttatttaaaaactggaacctgtaaatttggtgcctcctgtaaattccaccatccaaaacaccgaggtggatcctttggccatgttccgctgaatatatatggatacccattacgaccgggtgaggaagaatgctcctactatttgaaaacggggcagtgcaaatttggcgttacttgtaaattccatcatcctcaacctgctggcacatcaatgccagcatctgcacctcaattttatcagccggtgcagtctccttcagtccctctgcctgaacagtatgggggggcacccaccagtgtgagagtggcgaagcctccactattacctggttcatatgttcaaggggcttatggtcctgtactcttttcccctggagtggttcctattccgggctggagtcactactccgcacctgtgagcccggccctctctcctggtgcgcaacccgctgttggagcaacttctctctatggactaacgcagctatcttcttcagcaccttcccttgcagggaccttatccttccttgccctcttccactggcccttcaagcagtaaccagaaggatcaaacatttccaaaaagacccggtgaacctgaatgccaatactatttgagaaccggtgactgtaaatttggatcaacttgtaggtatcatcatc

SEQ ID NO: 200440 - DNA, 746 bp, Gossypium hirsutum
  unsure (1)..(746): unsure at all n locations
ttttttttttttttgtggaaaaccaaacggcttgatatatatatattttttaatattatgaaatacttttgatattctcattgtaaaacaccacaacatgatagcttttgtggagttacatttttggttttgttcatactacatgattggagacctggcttttgattgttgctgtaagcgtcgcaacagcttcccctactgtcaagaacaagcaatctggtctcatgaaatcccctgcttcatctgatttttgcaatttttccatcacctctcccaaaggattcaccaacacaagctcagctcctttcttttccactgttttcttcagttctttaaagattgatacgccactcgtgtctatggcactcaccgctgacatcactaaaaccacaaattgaaggcttgactgcttcttatgatcttcggcttcatattcttcaatccatctcaagatcctctcattcagatatgtggagttagcgaagttgatatgagcttcaatgcttaggataatgaaacccgggatctccatcgattctttgtactggtgaagatcccggataatatctgtcccgggaatgttccccaacatcactgtcttttgccgcctaattaatcttgcaggaagatcttganaataaacatcccaactgccatggcaagaccatcttggaacgagataaaaataaccccgaagatagcacacnacatcacnatgaaatcaaatttttttttttttttttttg

SEQ ID NO: 200441 - DNA, 650 bp, Gossypium hirsutum
  unsure (1)..(650): unsure at all n locations
ccttctggttgtttgattcaagacatgcctaatggctactcaagggtgacgtgggtagaacatgcagagatagaagagaaaccaatccatcaaatattcagccacttcgtacacagtgggatggcatttggagcaaatcgttggttagctgttttagagagacaatgcgaaagggttgctagtctcatggccactaatatccccgacattggagtgataccatcaccagaggcaaggaagaatctaatgagactgtcccaaaggatgataagaacattctgtgtgaacatcagcagttgcagtggtcaggtttggacagctgttcctgattcctccgatgatactgttagaatcaccacaaggaaagtgagtgaagcaggtcaacccaatggtctcattctttgtgctgtgtccaccacttggctgccttatcctcaccaccatgtcttcgatcttttgagggatgaacgccgccgtgctcagctggaggtgctatcaaatgggaatgccttacatgaagtggctcatattgctaatggttcccatcctggaaattgcatttcactccttagaatcaacgttgccagcaactcatcacaacacgtaaaactaatgctacnagagaacttgcacaacaaatcccgcaagcg

SEQ ID NO: 200442 - DNA, 620 bp, Gossypium hirsutum
aggcatgtgaatgtatattgaccaaaatacccttctctcgcccttcagtctttcacgtttccctttctacttgccttgcttcccttctctctatcttctcttgcaatgcaagtgccatatcagagttcctcaagaaacttctaatactttcttttcattttatttatatttccaaaaatcattctttttaaactcttgaatgccccccatcccccccccccaaaaaaaaaactttatcaccgctttctttgttaggtccttttgtttttttggggtatttttgtttgtaaagcttgtatcttttaaagaaaagtgaaaataggtatgggaacaagcaattttgtgatcagatggatcaacttccttactatgcttttagctattgctgttgcaatttttggggtatggatgagcactcaccatgatggatgtcgaaaatcccttactcttccagttctaggcgttggtggtttcatttttttagtatccatgatcgggtttctgggggcgctgaaaaaaaacgccatactattgtggatttatttgatattgttatgcatgattctggtggcgatcctggtattcacggtgttggcgttcattataacaaataatggatt

SEQ ID NO: 200443 - DNA, 670 bp, Gossypium hirsutum
  unsure (1)..(670): unsure at all n locations
agaatccccaatcgacaatatcatcttcccaagtattttttatccatgtttgctgcggactanccttggtcgctgggttttgggtggcccaccatgtctattccctcaatctcgtctttgatcctacaaaaactctttgtttgatctgggctattgaattcccagttgttatccttcttttcagttgctgtagacagaaaccggagaaatgctcgtatttcacagctattgcccgaggtctgctgggacttcctattggggctctattaaatgcgcttggagcattagctttgggtgcacccgtcggcttgcaatacttaaaaaagacagttaactggtctcttctgatgtcttcattcacttttgtgcccacagcttgtgtttatggttcaagttggacagattggtgtcgcatatttgcatgtacaaagccaaatggacctttggaatttatgctttgtctaccagcacatggagctgtaattggagcttggtttggtgcttggcctatgccacttgattgggaacgcccttggcaggattggccaatctgtgtgagttatggagcaatggctggttacgtggttgggatggtgggatcctttggtcttgcactaataatgcatactggacgaaagcaactcanagcaaagtaaatggtactcttttt

SEQ ID NO: 200444 - DNA, 621 bp, Gossypium hirsutum
  unsure (1)..(621): unsure at all n locations
aatggtttgaaggtgaatcttataattacggattactccatgcccggaatgactggatatgaactcctcaagaaaatcaagcgatcatcaacctttagagaaattcctgtggtgatcatgtcctccgagaacatcctcacccgtattgatagctgtttggaggaaggggcggaggagtttctagttaagcccgtgaaactggcggatgtgaaacgggtgatgaatgattgcataatgagaggagaaacagagggaaacaaaaggagaagagttgacaaaagaaagtttgaagacgataaccatgcttcatcatcgtcgtcatcatcatcatcatcaataccatcatctccgtcatcaccattaccatcctcaccatcgactgcagcaacctcatcacctctgcattcattgaagagggcaaaattgcgcgaccataactagttcccctcatccgttttttcgatggtaaatttttttttgtcaatatcctcgcaatttccctcatatggataacttgtgttaatggcacttatccaggcctctttanaagctgataaccattaattaagggcctgaaacagaaaaatggagatacagttggtgttattttttgttccgttt

SEQ ID NO: 200445 - DNA, 753 bp, Gossypium hirsutum
  unsure (1)..(753): unsure at all n locations
tttctcctgatatatctccggcaataaaactccaccattttattccatcttcgtttgttgagtttttgctcagatcgactaccggctgacaaagaattagagatatcggctcaaaagggaaaggagaagattactgaggagtaaattaagaatttcggaagctttgggagaggagaagaattgagaaacatggcaacaacatcgaagaacatgaatgttttctacaggcagaagaagaacagctctgcctccaccggaaaaaaatcaactaaaagcccatctcccaaacacgccgctactttcggttccgatatcacccaaccccccgctcttgtttctcatggcggttcactcgatctcaaagatgattttgatgaacaagagcaagtgttaaggcaatttgatatgaacatggcatacgggccgtgtgtggggataacgcgactggatcggtgggaaagagctcaaagaatggggctaaaccctcctaaagagattgaaagccttttgagaggtgggaaagtgaagttagaaagtctatttgatggtcgtgtttagttaattagcaggtagcataatagtagtattatgtatgtttagctganatcagacagcttctggctgtgcttctggttgggtgtttttaaatgttgtgatgaatctggaaagttgttttggtcttaatccatgggggattttatganatttgcactaccaaattgattgttgtantatgatcgatttgggccnntt

SEQ ID NO: 200446 - DNA, 760 bp, Gossypium hirsutum
  unsure (1)..(760): unsure at all n locations
cgcctacaatcccaaaacctggtgtgttttttagggtcttatttccgatcgagtccactgccgctttcccttcaaagccgactcctcactctcgctctcgttctcagcttcatacgcaaccaaaagtcctaaaagagaagatcttttgaacatggtggggtggcagagacatttacaatgtgcacttcgtcaagttgggagaagattagaacataattatactcattctaccaactattcttctgtttctcgcttaaactcccctgttttacctcgtgaactgcctagttatcagaaattgtggaaatctcctgctagtatgtcaccggttttatatcgatatttccagcagttgggaatttccacttcaaggaagttactancaggttcatctgaagagacaccaattgcatcaccattaacccctgttttggcaatagatagtggaaagactgaagagaagaaagttgttcccaatcgcacaaaagttcaagcagtgttaaagaaaataaaacagagtcctaagaaggtcaacttggttgctgcattagttcgtggtatgcgtgttgaggatgctttattacagttgcaagtgacggtaaagcgtgctgctaaaactgtctatcaggttattcattcggctcgagcaaatgctacccataatcatggattggaaccaaaccgtctgctttttgctgaggcatttgtcgggaagggattatttttgaacaaaagtttcatatcatgggtaagggcgatt

SEQ ID NO: 200447 - DNA, 577 bp, Gossypium hirsutum
cgagatttggacaatgcaagaaggtatattgtttgacaatattttgatagccaaagaagagaatgttgctaagtcgggccgggacaccacatggaaaccgaagtttgtggttgagaaggaaaaacagaaggcggaggaagaagctgcaggttcggatgatctcggtggcttccagaaggtggtcttcgatgtcctatacaagtttgctgatattcctttcttaagcaaatataagctccaaattcttgacttcattgagaagggtgagaaacaacccaacctcaccattggtgtcctggtctccattgtggtggttatcttgacagctatcttcatgctcatttttagtgggaagaaccaacctccagtagagaacactaccgaggtggctgctgatacatctattgatcaccggaagcagtggagataagccccctgatcaggataacgagaatgatactggtggtgctgctcccccgccaaaggaggcctgacacttgaaaccttggcttggctggtgattatcagtttcacttttgcgcagttttttttgttgttatttttgcggtttaggtgg

SEQ ID NO: 200448 - DNA, 706 bp, Gossypium hirsutum
  unsure (1)..(706): unsure at all n locations
ggactactcttttttgagggaatggcgacagtagagaacaggcaagtggtgcttgaaaggtacataaaaggagtacccaaggtaacagatatggcaatgaagattgggaaaaaagagttgaaggctcccaaaggctcgggggcttttctagtcaagaatctctatctctcttgtgatccttacatgagaggtcgcatgcgtgattttcatggttcttatatcccaacttttgttccttctcagcctattgaaggatttggagtgggaaaagtgttggattctgataaccctgatttcaaaccaggagacttcatttccggaatcactggatgggaagagtacagcttgattcacaacacttcacagttgagaaagattcaaccagatgatgctatccctctctcttaccacttgggacttcttggtatgccagggtttactgcttatgtaggattttatgaaatctgtagcccaaagaaaggagaatatgtttttgtatctgcagcttcaggagctgttggtcagcttgttggacaacttgccaagttacatggctgctatgtanttggaagtgctggaagtaggcaaaaggttgatcttcttaagaacaagcttgggtttgatgaagcctttaactacaaagatgaggcagacctagacgctgctttgaaaaggtacttcccanaaggcatcgatctttnnnnng

SEQ ID NO: 200449 - DNA, 495 bp, Gossypium hirsutum
  unsure (1)..(495): unsure at all n locations
gcgacgaaaattcatccgtgcatatatagcatcttccggtaatgaacccagtgatgctgaagtggagcagctacttgttgatgcagagaaatacactcttgctaatcatctgttttggggcttatggggaataatctcgggtcatgtaaacaagatagagtttgactatctggagtatgcaaggcagaggtttcagcagtactggtttaagaaaacccttgcgcttgagtccctcactctttaaggcagcctaagcatggatcgccgcagggttaacaaggaacagctataggtttacatantattacttaaaataaacctancctgttgataggggttggtgaaaaagaatttgtaaataactgttgtaaggttacttctgccatgggtgtataatcacttttgaagtaatgtccatttaatgattcaaattnnnnnnnnnnnnnnnnnnnnnnnnnnnnnnnnnnnnnnnnnnnnnnnnnnnnnnnnnnnnnn

SEQ ID NO: 200450 - DNA, 581 bp, Gossypium hirsutum
cttttggttatggatcaccgggcccgatcgcggcagcttttggagaaaatgagtttttttgtgccattgatgctggtggggaacaacaggtcatttgttgggataaaaccaacaagacatcttcggttcccactttcgatttggttccttccatggcttctctctctggtggtgaaggatttctctgcggcattactgcgaacaattcgcaggcgttttgttgggatttattaaattttggtataaatcttgttcctaaagcttttagatataattcttactcccaaattgctgctgggaaatctcatgtttgtgctatcaaagggtcttatttttcaagttctaatgatttcagtaacgtggattgctgggaacttgatcgatcacttggtaaaagtaattttactacgagttcttttagtaaccattatgttaacaatgttattgttaagaacattgtctctggggatggttttagttgtgggattgctaaggaaactactttgatcttttgttggggcctgtgtcattggctttaatatcaaggcgaaataaaatgttggcttttccgttctgaccta

SEQ ID NO: 200451 - DNA, 459 bp, Gossypium hirsutum
accgtccggatacactagcgacccacgcggctgcagggttttcccatatccttactcgtgaccgaatttctcgactcaacgggggcacaacctttaaaactggtgccttctaaggcccatttcattaattccagaacttgtttcaagatttaaaagccgaccgtttccggacttaaattggggaattcaattttaaagggtttcgaatttgaatggcctggcctttaatttggcctactggaaatgtcaattttgcccaaaggggattcagttcattttcgagaagtttggaccgattatctataagaagactttgctttgatccgtgaaattgctgatacctatgattacgtagctatggatactgagttcccgggtgtagttctacgtactgttgggtctttcaagaatatcagtgattataactaccaaactttgaaagataacgtggatatgttg

SEQ ID NO: 200452 - DNA, 369 bp, Gossypium hirsutum
  unsure (1)..(369): unsure at all n locations
caaggaaccttttacaagtggtgaacctggaatttaaccttggggatttattggaggcaccaaaggattcaagtttaccattttggatggccaagttggatggtttactgggactggaattaaaggaaattcaagttggaaatgctgggcctgtatggtacaacatggtcaatcaaggtctggttaaggaaccagttttttcttttgggctaaaccgcaatcctgaggatgatngttgcggaaaagtggtttttggcgggatggatccaaaacattacaagggggaacacacttatgtntctgtaacacagaaaggatactggcagttcgatatgggtgatgttctgattggtgaccaaacaactggac

SEQ ID NO: 200453 - DNA, 399 bp, Gossypium hirsutum
  unsure (1)..(399): unsure at all n locations
gagaaaaattcttctgatttttctgagtctttttcttatgttctgtttggctcctgagaaagtgttttaagaagaacaatgaatgcattagtggcaaccaacagaaacttcaagctagcagccaggcttcttggtttggattctaagcttgaaaagagtctcctcattcccttcagggaaatcaaggttgaatgcaccatacccaaagatgatggcacattggcaacttttgttggctttaggattcaacatgacaatgctagaggtcctatgaaaggaggaatcagatatcaccctgaggttgaccctgatgaagtgaatgcattggcgcaactaatgacatggaagacagcagttgcaaacatcccatatggtggngctaaaggtggtataggatgt

SEQ ID NO: 200454 - DNA, 394 bp, Gossypium hirsutum
ctaagatctgaccccatttctctttgcttcgccaaagaccctttttcctctaaaaagggtctccttatcctcccttattaatctccctaaagggtttttcattttctagtggtcgatgggtgttgaagttgtgggatcagaaatggctaaagtatcttgtgacaaagcaacttgagttgagaaatcacttgttcatgatagggaaaatgggaaacttgacaaggatccggttcatagcgagcccattaaattcggttccaatattgaggaatcaaataagggagaagagaaaaatgcatctgatgccaactttccgagcgatgcaattgttgagtggcctgcgcctaagcagatccactctttttattttgttaggtatcgcccttatgatgat

SEQ ID NO: 200455 - DNA, 385 bp, Gossypium hirsutum
ggaagtgaagaattggcacttgttcttctgtgttgctatcggattgtgggctggactcattatcggttatactacagaatattatactagcaatgcttacagtccggtgcacgatgtagcagatgcttgcaggacaagagctgcaacaaatgtgatttttgggttggctctgggatacaaatcggtcattatccccatatttgccattgccatcgctatttacgtgagctttaacttggctgcaatgtatggaatcgccgtggccgctttggggatgctcagcactatagccaccggtcttgcaatcgatgcatatggtcccataagtgacaatgctggcggtattgcagaaatggccggaatgagtcacaagattcgcgaaaga

SEQ ID NO: 200456 - DNA, 401 bp, Gossypium hirsutum
accaggaatggattgggccggtattcccttagaaccgtccaaggattttaaggtggaaaagggggaatcccttggaaatggtggggtaaataccggatttaaattcccaatggcctgtcctggaatggaatgcctgcttggaattgtggtgtgaaaactgggtggttgggaaaggggctccaaccattcttttggttccaatagcaccaccaaaattagtggctgaagttttggaaaagaataacttacctggtgcaattttcacatcattttgtggcggtgctgaaattggggaagcaattgcaaaagatcgacgcattaatctagtttcatttacagggagttcgaaggtgggtgtaaaagtacaacaaacagtaaatgagaggtttggtaaatgcttg

SEQ ID NO: 200457 - DNA, 412 bp, Gossypium hirsutum
  unsure (1)..(412): unsure at all n locations
ctttgattggcaccatggggaacccaacttaacaaagcgaactttaattccattttctagacccaaaaaaaccctatttttcaagattagagatcatttatggaacttaattaattttgggggtaggttttcctattaacttaaccaggcttaatctctattcacggtcaatcatttccatgcttttcctcggtcatctcggcgacatagaactcgccgccggttcattagccatagcatttgccaacattactggttattcagttctatcaagtctcgcgttagggatggaaccactttgttcacaagctttcggtgctcaaaaacccaaacttttatcattaacccttcatcgntacattggttttttattatttatatcgattttaatatcatttctttgggtgaacat

SEQ ID NO: 200458 - DNA, 414 bp, Gossypium hirsutum
cccccggcttgaaggattccggcccaaggttggttcaggaaaggttaaaaggaggattaaccgaccttggtctaactcttgaagggttcctttttcttaatgctctttttatagaaaaagggcgtcttgagacaacttgggctgtcttgaggaagtttggatataatgacgagttaaagctcagggatgatattcttccagttccaaccaagcatgcccctgatcagactgtggagctgacaaatgaagctatcgactttttgcgtgggatcttccgattgtatgacagtgataatgatggatctttgcaaccttctgagtttgatgatatctttgtaactgcaccagaaagtgggccttgatgacaactcttgatcctttcatattgttggctaacttgatttgcattggata

SEQ ID NO: 200459 - DNA, 342 bp, Gossypium hirsutum
gaaaagtagaagaagaagcacaaaaagcagaagaaagaggaagaaaatggggattctattgaaactgcaaatggcaaagaagactcggttcaatttgatgacaaggagaaggtggtagtgagtggaaaaaacgctgaagaagcgaaatatgcgccgttgaaatcattttctaattctaagttaccaaaaaatgttttggattgctgcaagggtttttctagcccatctcctattcaagctcacgcctggccctttttattggatggtcgtgattttattggaattgcaaaaactggatcaggcaaaactttggcatttggcgtacctgcaatgatgcatgta

SEQ ID NO: 200460 - DNA, 393 bp, Gossypium hirsutum
ggcagcttcagaagctggtttgactgttgctgaaagtactgggagcaatgttgtctcggttgcttaagattagctaatgagaattcttattcttggtcggaattttgtacctgggtattatcaaattattaccggaaattggaatgtcgcaagcattggttatagagcttattatcttgaaaggaaaaccggttgaacctatagtgcttgccctatcggccaagctttaactcaaccgttggaggccttcaactggtatcctcctatatcatgatcgagtcaagatggatccagatttggagaaacagaccggagctaatttcgaggaggatcttgatgcaatgcttccaaaatgtgacattattgtcataaatatgcctctaactgagaaga

SEQ ID NO: 200461 - DNA, 394 bp, Gossypium hirsutum
  unsure (1)..(394): unsure at all n locations
caaatctttgtaagttctcccccttcttgaatggcagcttatcgacgattggtttcagttctctgttgcctctccttgctgggttcatttgcttcagcttccacaattagccttccatctgattctcgtaaagtctccttgactttgtattacgaatccctttgcccatacagtgccaatttcattgtcaattacctgcccaagctcttcaatgaggatctcatctccatcgtcgatctccgcctcgttccttggggaaacgctaagctcaaaggcaacggcacctttgattgccagcatggccctactggatgctngttgaacactgtggaagcttgtgcaattgatgcctggcctaaactgaatgaccatttcccatttatctattgcgttg

SEQ ID NO: 200462 - DNA, 332 bp, Gossypium hirsutum
gttcatggttcatctgcggcccatataaccggcccggcttcttctgacactaatgctgctgcagtaggcacttcctggtctaggagtccaactcctgatccccaactggttgcaaggcctcctagtccttgtttgaccccaattggaggaggcagagtcggtaactcagacaaaagaaacttaaatagtccaagcacgtttggtggtgtctcatctggtgtcagtgagtctgcagatctggtttgtgctttgtcaggcatgaccctgtcatcaaatggtgcaccagatgaagataataggttaccatcccagactgaacaagatgctgaaaa

SEQ ID NO: 200463 - DNA, 400 bp, Gossypium hirsutum
tggagaattccggaccagcctaaccttttatttaattacctggggtattggataggtgcaaaacttgggtttaccggaaagcttgttggattggatttgaagttcaatggtttaataaggcctttttccggggaaattggctaaggaactggaaaatcaagccttggtcttctcgaactctctcacaaccggttttctggtaaaatcccattgaagatcaccgagctgaaaagcttgcaagcattgtttctttctcataatcttcttacaggggaaatcccagcaaggattggaaatttaacttatctccaagtggtcgatctgtcgcataactccttatcaggttcaattccattagaaattggtggggtgttttcagttacttgcattgatactcaac

SEQ ID NO: 200464 - DNA, 306 bp, Gossypium hirsutum
  unsure (1)..(306): unsure at all n locations
atttttcccaaacgaaaaagacccaagttttttcttaatcatggccttccatgtctttctcaatcccttccatcaaatcctcgcttgggtcttcaaaatcagcctttttccaaaatgggttctcgttgctatcgcttactgcttctgggtttgtctttaactctagatcttcaggcatttatgcaagagcagctacggataaaaccctatacgactacacagtaaaggatattgatgggaaaggatacccctcttagcanatttaagggaaaagttcttttgattgttaatgttgcttcaagatgt

SEQ ID NO: 200465 - DNA, 399 bp, Gossypium hirsutum
  unsure (1)..(399): unsure at all n locations
gaaaactttagaatcatgggagtgccggaaactgatgcattggctgaattgagcttgccgccggggtttcggttttatccaactgatgaagagcttttagtgcaatatttatgcaggaaagttgcagggcatcatttttctctgcaaatcattggcgaaatcgatttatacaaatttaatccatgggatttaccgagtaaagctttgtttggtgaaaaagagttgtattttttcagtcctagagacagaaaatatccgaacgggtcacgacctaatagagttgcagggtccgggtactggaaagctaccggaactgataaaattattacaacggaaggccgtaaagtgggtataaaaaaagctctggttnnttacgttggaaaagcttcccaaggaact

SEQ ID NO: 200466 - DNA, 393 bp, Gossypium hirsutum
gagattttaacatacaaaaaaaaaaccaaaaaaaaaactaaggctctaatttccaaactccattacagattagatataacggagagcagtttttgataagaaaagagacggtaaaaggaaattaaagatgtcaacagcttcttcattgtgttcatcaactcaagttaatggctttggagggggacttaggcttctaagaacccatctttctcaacccaattccttttcttttactaagaagaagactgctacagtagtgaaagcaactgctcgagtcgataaattttcgaaaagcgatatcattgtttccccatctatactctctgctaatttcgctaagttggaggagcaagtgaaagccgtagaagtggcaggctgtgattggatccatgt

SEQ ID NO: 200467 - DNA, 319 bp, Gossypium hirsutum
aaaagatcgtcttccatatcatcacagataagaagacatatgctggtatgcacgcctggttcgcactaaaccctgtatcccctgcaatagttgaagtgaaaggggttcaccagtttgattggttaacaagagagaatgttcccgtgcttgaagctgtagagaaccatcatggcattcgaaattattatcatggcaatcatcttgccggggcaaatctctccaatactactcctcgaacattcgcttcgaaattgcaggctagaagtccaaagtacatatctttactcaaccatcttcggatatatttaccaaagctttt

SEQ ID NO: 200468 - DNA, 383 bp, Gossypium hirsutum
ccacattggctcagcgccaccagttaattctgcattctgggacaagcggcatccttatatcggggagtctcctgaaacttcaggttttccccttggatctcttggaagcgtgggctttcctagtagctcgctatcacatccggtggaatatgcttcccacaacattttttctcatgttggtggaaattgcatggatttgacaaaaactggtggggtacgctctcctcagcagatgcgccaccttttccctcgcaggaaccctattatgcccgcatctcttgattctcctaatgatcgtgtcagaaacttttcataccgcagaaatgaatcaaattctagtaatgctgataaaaaacaatatgaacttgatattgaccgaatca

SEQ ID NO: 200469 - DNA, 291 bp, Gossypium hirsutum
gagcccatggagtggccatctttgccttaacttctgggggttttttcaaggcaaaccttaattgcagcattgaagataggcttgctcggtttagagatgttggttctgctgcttgagagatctcactttcagttcgagggtaccggcattcccatgcttgaaaatggtatgaattttggcccaatcgataatcttgctggccactttcatgacacttatgggccagctctggctaatatcttaacctcacttcaaatggggatcagtaacgtggattcatcagtttcgggt

SEQ ID NO: 200470 - DNA, 316 bp, Gossypium hirsutum
cgggatttctcgggattgtgatggggtactacggcgggccattcggccttggaaatctatacgtgaatctatattagggcgtcacattgaacgccttatccgagttgcctgcgttactcattacattcattcttataggagaaatgataaggaatgactcattgcagggcctcacaatattaagcggagtgtgcagcgtgaactgtgtggttgagcggatagtgtcaccaagcatacatatagccttgaagctgatatacttcttcaatgcctgctcggcctgcaacatgagattgatatgcacgtcacagctgat

SEQ ID NO: 200471 - DNA, 378 bp, Gossypium hirsutum
aaaacacatcagtggtctgtcaaacttgaggagtctgacttttcggagaaacagtgcaatcactgcacaaggaatggcctagtaaacctgatgaagctggacctggaaaaatgtcctgggattcatggggggcttattcacatcaaaggtttgacaatgttagagtctcttagtattaaatggtgtaattgcataacagatgctgatatgaagcctctttcagggcttacaaacttgaaaagcttacagatttcctgtagtaaggttacagattttggcatcacttatttaaaaggtctgcaaaatctttctgttttgaacttggagggctgcccagttacagcttcgtgctttgatactctttcagtgcttgtatct

SEQ ID NO: 200472 - DNA, 321 bp, Gossypium hirsutum
ctgattgcagtctttggatcatcgtcttccaattcattggactctgtaagttccactcccgtacctgagatctttacaaactatagaaggctaaaggagcaagcagcagttgattattttgagttgagaactatcttgtcaggatctagtcggcaaagggagcttggcctttgtggcaaagaaagagaaaattatgtaccttgttacaatgtaactgcaaatttgatatcaaggtttaaagatggacaggagtttgatcgacgttgtgaagtgccaaggcaaggaagctggtgtttagttcgccctccaaaagattataag

SEQ ID NO: 200473 - DNA, 321 bp, Gossypium hirsutum
ctcaatttcacaaagtgtttcttcgtcgggagtcggagagggagtccctagggaacaattaaagaagaacccgaaaaaaaaacacagattaagacagaagcatgggcaggcaggtcgtaagaacaaagagagcttgggtcgggggtggcaacggattcggtggctcaatgctggtcaagttggtgctcgagaaagggtacgccgttaacactacagtcagggaccctgacaaacagaagaagaactctcaccttgtaacactacaagagttgggagacttgaagatctttcaggcggatttaactgatgaagggagctttg

SEQ ID NO: 200474 - DNA, 402 bp, Gossypium hirsutum
accaagggtgttggaaaatcatttttacttttgaggtttgcgggggattaagatctggttagctccataagtgccattggggttgactttaaaatccgaactgtggaacaggttggaaaaaccatcaaactccaaatttgggacactgttggccaaaaccgctttaggacaatcactagtagctattatcgtggggctcacggattcatagttgtttatgacgtgacagaccacgagagtttcaacaatgtcaagcattggctaaacgaaattgaccgctatgccagtgacaatgtgaacaaacttttggttgggaacaagtgtgatctaacagaaaacacagttgtgtcatatgagacagctaaagcttttgctgatgacattgggattcctttcttggaa

SEQ ID NO: 200475 - DNA, 243 bp, Gossypium hirsutum
ctccaatgcttaagccaatccattaatccttcccaagatgtttccaccattctcttctgcaacaccaacccttcttacgcatcagttttgcaagcgtacattcgtaacgctcggttcaacacctcttcgacgcctaaaccggtcatcatcatcactccattggaagaatcccatgtttccgcagccgtaatctgttctcaaaaagtccgttttcaactcaaaattcgtaacggcggtcatgat

SEQ ID NO: 200476 - DNA, 398 bp, Gossypium hirsutum
cagcaatgttccacgctgtgatatatgtgaaaatgcacctgctttctttgactgtgaagtggatggtagttccctttgcctgcaatgtgatatgattgtacatgttggaggtaaaaggacccatgggaggtatctcttggtgaagcagaaagttgagtttccaggggataagcctggtcgtttggaggaaccaggtttacaaccgctcagtccggatgaagtaaggaaggatctgaatcagcagtcaaagcttgcagtgagagagaaccggcaaaaccgtggagtctctcatgttccattgcttgatgataatgctaagggtgatggagaggtaggaaatgagttgattgatctaaatgccaggccacaacaggtgcaggggcaagcttctatcaatc

SEQ ID NO: 200477 - DNA, 191 bp, Gossypium hirsutum
gaccaggcttaatttttttttaaccaggtaatggctgcctttgtccttctggtggctgttaacttttagtgccaaagctgttggtcctccatctgaaacttttaggtttgtcaacgacggagaatttgggccgtttgttgttgaatatgatgcaaattaccgggtcataagcatagctaatgccccctttc

SEQ ID NO: 200478 - DNA, 293 bp, Gossypium hirsutum
cttaaaccattaaagcttggaacaagcttaaggaagtgcagaaatggccccaaagagaggtgtaaaggttgctgccccggccaagaagaaacaagagaaggttgtgaatccactgttcgagaagcgtccaaagcagtttggtattggcggggcactacctccaaagaaggatctacatcgatttgtaaagtggcctaaggttgtccgcattcaaaggaaaaagaggatccttaagcagaggttgaaggtcccaccagcattgaaccagtttaccaagactcttgataagaacc

SEQ ID NO: 200479 - DNA, 127 bp, Gossypium hirsutum
ctccttcaatgcacaggttggggtgtacctccaaacaccctggctgaatatgcacttaaccaatttggaaacatggatttctacgacatttccttagttgatgggtttaacatccccatggtgtttg

SEQ ID NO: 200480 - DNA, 293 bp, Gossypium hirsutum
cttcctttcttgttctttcagtttcctttggtgtttgaagatatgggaactcaagctcctccagaaaatggttatggcagaagcaacagcttggaagagaaatcagcaaaggagaaagcaatcgatgagtggctgccaatcacctcatcaagaaatgcaaaatggtggtattcagctttccacaatgtcaccgctatggtgggagctggtgtcctcagtctcccttacgccatggcagaactcggatggggtcctggtgtgactgttctaatcctatcatggattattaccct

SEQ ID NO: 200481 - DNA, 388 bp, Gossypium hirsutum
  unsure (1)..(388): unsure at all n locations
cggaaaaggaaatgttccatttcattcaagcattgcggaaaataatggattattaaagtataaagacaagacaccaatgtgatgtatgaaaaactatgttaaagaagctcctncaactcgattggaatcattactttgtaccttgtatggtgttgggtttaatctcctgatgtgatcaggcctcatttgctcaagctgtttgatgcaatggtccctaatgtccttcagagctggtaactcttcccttactttacctgattttccaggccagtaacacttaagaagctcctccacacgctttggtaccacatatgctctttgggattcactaaaagggtgacggcataggattcgttctccaacctttggacatggttcattttcccct

SEQ ID NO: 200482 - DNA, 347 bp, Gossypium hirsutum
gaacaactttcagctgaaacagccggtttcttcaacatgggttgagggttgaagaaacacttgaagaggcttaatggccccaagcattggatgcttgacaaggttggtggtgcattcgcgccaaaagcattgtctggaccccacaagtcgagggaatggttggcacttaatctcaatctgggaaacaaactgaagtatgctttgacctacagagaagtgattgctattcttatgcaaaggcatgttatgggtagatgggaaggttaggactgataagaccctaccctgtgggtttatggatgttgtgtcaatttccaagacaaatgaggactttcgtcttctttatg

SEQ ID NO: 200483 - DNA, 392 bp, Gossypium hirsutum
gctcgagattaaatgcccccctcctcagactacagcacgtttgttggataaacttgttgggcattttctagaagagacgtgtgtgaatcctactttcatcatcaaccatcctgaaataatgagtcctttggcaaaatggcataggtcaaaaccagggctgactgaacgtttcgagctgtttatcaacaaacatgaactttgcaatgcatacactgagttgaatgatcctgttgtacaacgtcaacgatttgctgaacaactgaaggatcgacaatctggtgatgatgaagctatggctctagatgaaacattctgtactgcacttgagtatggattgccgccaactggtggttggggattgggtatcgatcggctagctatgctattaacag

SEQ ID NO: 200484 - DNA, 342 bp, Gossypium hirsutum
gagcaggtagggagaatctgagagctgctaaaaaggagttcaacaaaacagaaaatgatttgaagtctcttcaaagtgtgggcagatcaattgtgaaagttctcaagccctcttgataatgaacgcttgattgttaaagcaagcagtggccctcgttatgttgttggttgccgcagtaaagttgataaggagaaactgacttcaggaactagagtggttcttgacatgacaacacttactatcatgcgggcacttcctcgtgaagttgatccagttgtttacaacatgttgcacgaggatcctggtaatgttagctacttcgcttgtggtgggttaactgat

SEQ ID NO: 200485 - DNA, 405 bp, Gossypium hirsutum
gcggattttgtgaagcagtggattcaaaggggcctagaaattgggaccagataaaagtgccgggacttcacccttctatgtccatgagtgatcttatgaaccacattggacaccgtctttcagaacacatgacctgcgaaaatccatcctctgaaaatagaccagactgccaggaaatgctggaggatattgcacaataccttctgagtgacactcaatttacaacagcctctgatgagaaatccctcatgtcaagggtgaattctctgtgttgtcttttgcaaaaggacaatacaacaggcacaagctcacaggcaaatggagaaaattacgatggaggtgatgatggaaaagatgttcagctaaacagaagtcatgggtttgagtttaatattacgggcaagg

SEQ ID NO: 200486 - DNA, 390 bp, Gossypium hirsutum
aaaaaatcttctgatttttctgagtctttttcttatgttctgtttggctcctgagaaagtgttttaagaagaacaatgaatgcattagtggcaaccaacagaaacttcaagctagcagccaggcttcttggtttggattctaagcttgaaaagagtctcctcattcccttcagggaaatcaagggtgaatgcaccatacccaaagatgatggcacattggcaacctttggtggctttaaggatcaacattgccattgctgaaggtcctatgaaaggaggaatcaaatttcaccttgaggttgaccctgatgaagtgaatcctttggcgcaactaatgacatggaagacagcagttgcaaacatcccatatggtggggctaaaggtggtat

SEQ ID NO: 200487 - DNA, 395 bp, Gossypium hirsutum
ggaaggttgtaggaaagatttcttttattgatcttggtggcagcgaaagaggtgctgataccactgacaatgaccggcaaactaggattgaaggtgctgaaataaataaaagccttttggctcttaaggagtgcattcgtgcgctagacaatgaccagatccatatacctttccgtgggagcaaactcactgaagtacttcgtgactcctttgttggcaattcaaggacagttatgatctcctgtatttctccaaatgcaggatcatgtgaacatactctcaatactctgagatatgctgatagggttaagagtctttccaaaagtggtaatccaaaaaaagagcaggcggtaaattcttttcaaccaagtaataaggatgcttcttcagcatcg

SEQ ID NO: 200488 - DNA, 296 bp, Gossypium hirsutum
gagcatgtttggagaatctgagagctgctaaaaagggggtcaacaaaacaaaagatgatttgaagtctcttcaaaaggttgggcaaatcattggtgaagttctcaagcctcttgataatgaacgcttgattgttaaagcaagcagtggccctcgttatgttgttggttgccgcaataaagttgataaggggaaactgactttaggaactagagtgggtcttgacatgacaacacttactatcatgccggcactttctcgggaaagtgatccagttgtttacaacatgtttcacgag

SEQ ID NO: 200489 - DNA, 390 bp, Gossypium hirsutum
gctatttccctatgtcttccaatttgcagaaggaaggcacttgggccgatgagaaatcgactttgacaacggagagcaaaagttctaacccagaaacatccaccgccgagaacaaaacttcttccactgggccgtctcaaccagcacaggctggagcttcccctaccactatgcctgggtttgtgccacccaatccttttgatttctcagccatgagtggcctccttaatgatccaagcatcaaggaactagctgagcagatagctaaagatcctacattcacccaaatggcagaactgctcactaagacatttcaaggggcagcaactgaagatagtatgccgcaaattgatccacagcaattcctttcaactatacccccaggttttt

SEQ ID NO: 200490 - DNA, 359 bp, Gossypium hirsutum
tgagtgaaaattaagtaagatgatgataatggaatgggatcaacagcaagataaccaaagccaaaaccagagagaagatagtgtgaatctcaatgtgaacaatggagtaatgtatgtgaaggtgatgacagatgagcagttggagactctccggaagcaaattgctgtttatgcctctatctgtgagcaacttgttgagatgcacaagaatctcactgcccagcaagatcttacaggtgggagactgggaaatctgtattgtgacccattaatgacatcgggcgggcacaaaataagtgcgagacaacggtggacaccaaccgctgtgcaacttcaaatactggaacgtatatttgatg

SEQ ID NO: 200491 - DNA, 362 bp, Gossypium hirsutum
caacattcccatttccaatctccagctcccaaggtagatatgccgatcagaaacatagcagttggccggcccgaagaggcgactcaccccgatgctctcaaggcagctttggctgagttcatctcaaccttgatcttcgttttcgctggatcgggctcaggaatggcttttaacaagttgaccgacaacggagcaacaaccccggccggtctcgtagccgccgctctagctcatggcttcggtcttttcgtcgctgtctccgttggcgccaacatctcaggtggccacgtcaaccccgccgtcaccttcggtgctttcgttggcgggaacatcactctcttgcgcggcattctttactggat

SEQ ID NO: 200492 - DNA, 384 bp, Gossypium hirsutum
  unsure (1)..(384): unsure at all n locations
gctattaagagcccccattggtggcttagctttaatcgttttgggtaattacccattaactccttaccagctttcatttcttgtcaaaagggtaaatcttcccaagttggaactaacttatgcttcaaaaggttgtccccaaatggcttgaaagaagaatcattctaaaacaaacaaaggtcattcaaagcttcttacaaacaaaacattggaaaccaccagctgttttcttggngttcgaaatctcttccatgactgcatggttaagtcatgcgatgcatcgttattgttagagacggtgaatggaattgaatcggaacaaaaatcagataggagttttgggatgagaaatttcaagtacgttaagacaattaaagatgctct

SEQ ID NO: 200493 - DNA, 320 bp, Gossypium hirsutum
  unsure (1)..(320): unsure at all n locations
ggatcctaaaactcacgagggaatggacttgacaagggtgtcaactagggcactaattgcgaaatatgggcttgatgataacactgtggatttcattggtcatgcattggcacttcacagagatgaccgctacctggatgaacctgcattggatcctgtaaaaaggatgaagctttatgcggagtctcttgcccgttttcaaagtggatctncgtacatatatccactgtatggattaggcgagctgcctcaggcttttgcacggcttagtgcttgttatggtggaacatatatgttgaataaacccgaatgcaaggtgg

SEQ ID NO: 200494 - DNA, 297 bp, Gossypium hirsutum
ggacattttcagggcaaagattgtggatatgtcagagcattcactaactattgaggtaacaggagatccacggaagaaggttgctgtgcaaagaaatttaagcaagtttgggatcaaagaaattgctagaacaggaaagattgctcttagaagggaaaaaatgggtgcatctgctccattctggcgattttcagcagcttcatatcctgatcttgaagaaacagtacctgataacgctcttgcaggggctagaaagcaatcagtatttaacgaggccgatgtttctggatggggaga

SEQ ID NO: 200495 - DNA, 363 bp, Gossypium hirsutum
gagacctttgtcttcaagaaggagaaagtctccctcgctggtcaagacgagtacattgtgagaagaagaagagatttggttaagttgctggctgacgctttcaaagggattaagcagattggtggtattggttggggttcgcaaggacccggtcaagctcaaaatttaagggattctcttgctgatgcaaaaatctgatatcattgtcaaggttggactcaggaagggttctcgttcttttgatgaagctcgtgctgctgggttctctgaagagaatggcactttgggtgatatatgggaaactatttctggaagtgatcttgtgttactgttaatttctgatgctgcacaagcagacaatta

SEQ ID NO: 200496 - DNA, 375 bp, Gossypium hirsutum
gcaaattcccttcttttcccctccacccaagcctaggaaatcatggcgacagctcaaatcagcaaaaaacgaaagttcgtcgctgatggagttttcttcgcggaactcaacgaggtattgaccagggaactggctgaggatggatactctggagtcgaagtcagagttactcctatgcgtaccgagatcatcatcagagccacccgcacccaaaacgttctcggtgaaaaaggtaggaggattagggagcttacctcagtggttcagaagcgattcaagttcccagaaaacagcgtcgagctttacgctgagaaggtcaacaacagaggcctttgcgctattgcccaggccgagtctcttcgctacaagctactc

SEQ ID NO: 200497 - DNA, 340 bp, Gossypium hirsutum
cgaggggaaatgtatacaaagcgatatttttacgggtggaggctacgattgggcgatttacttctaccccgacggtaaaaatccggaggatagtgcgatgtatgtttcgggtttcattgccttggctagcgaaggtacggatgttcgagcgcttttcgagctcacccttggtgaccaaagcgggaaagggaagcataaggttcatagtcactttgacagagcgttggagagtgggccttatacgttgaagtacagaggaagcatgtggggctacaaacgattctttagaagaacaactttagaaagttctgactacattaaggatgattgcctaatcatg

SEQ ID NO: 200498 - DNA, 365 bp, Gossypium hirsutum
gacattaattccgtgccaaaggatgtcaagactcagccacttggtgagaagaaagctacaagtaaaaaaccaaccggtcttggtgctcctccccctggccctccatcaactgttgatgcttacgagaagctgctttcatcaattcccgagttcgcaagctttggcaagctcttcaagtcctctgcacctgtggagttgacagaagcagaaacggaatatgcaggtaatgttgtcaaacatatttttgacggtcatgttgtgtttcagtacaactgcagtaataccattccagagcaattattggagaacgtcactgttattgtggatgcttcagaggctgaggaatttgctgaagtagattcaaa

SEQ ID NO: 200499 - DNA, 364 bp, Gossypium hirsutum
atgaatattttctaaattcctcgaagaagaacacgaggactatgtgcatagtagcccaacgagactatcgatgtgatagctcaaagcatatgcctaaacaatttgtcaaatgattctggtttttctcttgctcccgatgtcaagtattgcatgctccagatcatgcaggatgcgattaaatgtatgcaccgatcaaagatgactatattgacaccagatgattgtgaaagtgcacttagcttaagaaatggtgagcctagatatggctttacatctggaggtactatgcaattcaaaagggctattgagcatatggattagatctacgctgatgaaagggatgtgaattagatagatgttattg

SEQ ID NO: 200500 - DNA, 362 bp, Gossypium hirsutum
aggagatcgagatcaatagcaggaaagtgggggcgagttcgagagggaataggaattatgcggtgatttttgatgcggggagttccgggagtcgagttcatgtttattgttttgatcagaatttggatcttgttccaattggctctgaattagagctttttgaacagcttaaaccgggtttgagctcctatgcaaaagatccacaggctgcagcgaagtctttactttctcttctagacaaggcagaaagtgttgtgccactagatttgcgatcaaaaactcctgttagagttggggcaactgcaggtctgagggcactagaaggagatgcagctgacagaattttgcaagcggttagagaa

SEQ ID NO: 200501 - DNA, 368 bp, Gossypium hirsutum
  unsure (1)..(368): unsure at all n locations
ctcttacattacctacaaaatctttgctttcccttgtttttttttttgccaatggcttcttcaccaaaattcatctcttacttcttccttttagccctcttctccgttgaaatacatggtagggatttttttagcaaaatcccaagtgttaacacaaatgagaaagaggtgaccaacaaagaagaacaaaccactttggggaagaaggagcaagagccaaggtttgtccccgagacccaaaatggctatgggctttacggtcacgagtctggtcagctccctcctagcaccgncagtaccaaagaaacctatgaaccctatgtcacacctgttaaataccaccctgatgaaccctacaatagcatccc

SEQ ID NO: 200502 - DNA, 391 bp, Gossypium hirsutum
ggatattcaacccctcgtctgtgataatggaactgggatggtgaaggccggttttgctggtgatgatgctccaagggcagtttttcccagtatcgttggtcgtccccgacacactggtgttatggttgggatgggtcagaaggatgcctatgtaggagatgaagcacaatctaaaagaggtatccttactttgaaatatcctattgagcatggtattgtgagcaactgggatgatatggaaaagatctggcatcatacattctacaatgaactccgtgttgctcctgaggagcaccctgtgcttctcacggaagcacctctcaaccccaaggccaatagagaaaagatgactcagatcatgtttgagaccttcaacgtacctgctatgtat

SEQ ID NO: 200503 - DNA, 343 bp, Gossypium hirsutum
ggaacataaagttgcccttttttttctttttggtgtgaaacaagttccaatggcggagtaattgaagacattaaccaacagatagtcagataaaaacctccaataaaccaactagctagctgtgttctttcttctgctctcttctcatggtggagtccctccaaaggtatgctgttgtcaccggggcgaacaaggggattggactggccatatgtaagttgttggcctctaaaggggtcatggtggtcttaactgctagagacgagaaaaggggtctcgtcgctcttgaaaagctgaaaggaatccggtatctctggtcatctagtttttcaccggctcgatg

SEQ ID NO: 200504 - DNA, 368 bp, Gossypium hirsutum
aagaaaccatccaagccccaacaaacaaaacagctcgtcgttggctccaatttcaaaatcaaaatcaaaatcaaaatcaaaatccaaagatctaaatctaaatccgtctcctctcctttctctttctttaaccttacaattaaggaaagaagatgaagagagtcttcggcgttaagaaagacaaggaacccccgccttctatccaagatgctaccgatcggatcagtaaaagaggggatacggttgatgagaagttgaagaagctagatgctgagttgagtaggtataaagagcagataaaaaagacaaggcctggccctgctcaagaggctcttaaatctcgagctatgagggttctcaagcaaaaa

SEQ ID NO: 200505 - DNA, 377 bp, Gossypium hirsutum
gtttgagggacacccattcattgtggaagctggtgttagtgtgggtggaaaagatgttaaacagggtttgaatattttccgatttgcaaatcgaattccgcttctttttgagcaaggtggtgatgttgtcacgaggactgcgctaaagagaatcagttggaataattacaagatcaaccaaacacaagataaaatcggtgtctttgtgagtattgtaagcacgaaaattccatttaaagggactggaaaggagtacatcggggatgatatcagcgaaatagctagtgctgtcaaatctgcaattcagcaatgctgcatccaactgaagtcgaaaatagtaaagaaaatgcaggcgcgagaacagcaagagagaaaac

SEQ ID NO: 200506 - DNA, 373 bp, Gossypium hirsutum
tttttaagtccactttcagtcgttcctttggtatctgtagtgggttctgggctttacgaatttggctttcctggggttgccaaatgtgtggagattggactgcctcagctaattcttatagtatttgtctcacagtacgtgcctaatgtgataaagtctggaagaaatgtctttgatcgattcgctgtcttgttttcagcggtgattgcttggatttatgctcatttactcactgtgggtcgagcttataatggtacagcaccaaaaacacaatctagctgtagaactgatcggtctggtctaatagatgctgctccatggataagagttccttatccctttcaatggggagcgccatcatttgatgctggtg

SEQ ID NO: 200507 - DNA, 373 bp, Gossypium hirsutum
agaaggctggcagatggaagcagtccattgcattgtgaaagaaagacaaccattacaaagatgcaatggaaacagcgtcacagtctggtgaacgtgaacttgccgaggagttacttgtttactttattgaacagggcaagaaggaatgctttgcatcatgcctctttgtttgttatgacttacttcgagcagatgttgttctcgagctagcctggattcacaatatgatcgacttcgcattcccatatctgttgcagtttatccgcgaatataccggcaaagtcgatgaacttatcaaggataaaatcgaggctcaaaaggaagtaaaagccaaagagcaagaagagaaggaagtgattgcacaacagaacat

SEQ ID NO: 200508 - DNA, 370 bp, Gossypium hirsutum
gggatttactctggttctacttgcaaacagggagagatcgaagctgtggttattgccaccggtgtccatactttcttcgggaaggcggctcaccttgttgataccactaaccaagttggtcatttccagaaggtcttgacagcaatagggaacttctgcatatgttctattgcagttgggatggtaatagagataattgtgatgtatccaattcaagaccgggattaccgtcctggaattgacaatcttcttgtccttctcattggtgggatcccgattgccatgcctacagttttgtcagttacaatggctatcggttctcataggctatcccagcagggggcaatcacaaagagaatgactgcaattg

SEQ ID NO: 200509 - DNA, 377 bp, Gossypium hirsutum
aaaaaatcttctgatttttctgagtctttttcttatgttctgtttggctcctgagaaagtgttttaagaagaacaatgaatgcattagtggcaaccaacagaaacttcaagctagcagccaggcttcttggtttggattctaagcttgaaaagagtctcctcattcccttcagggaaatcaaggttgaatgcaccatacccaaagatgatggcacattggcaacttttgttggctttaggattcaacatgacaatgctagaggtcctatgaaaggaggaatcagatatcaccctgaggttgaccctgatgaagtgaatgcattggcgcaactaatgacatggaagacagcagttgcaaacattccatatggtggggc

SEQ ID NO: 200510 - DNA, 238 bp, Gossypium hirsutum
caatttgaagattgatggctatgttcaatacgagcatgggacctgctggcaagacatttgctatgctataagtcaagctcgtcgatcgatatacattgcaaggtggtccgagtatcataatgttcgacttggtcgggaaactggttaggcatctaaaaccacattgggagatcttattaaaattaaatcccacgaaggtgtacgggtgatgctccttggatggggtgaatctacttcc

SEQ ID NO: 200511 - DNA, 364 bp, Gossypium hirsutum
gttgcttccgccatcgccgcctacgctgttccttggctcgtcatggcacgtggccaccgcattgaggctgtaccggagatgccgctggtcatttctgatgctgttgagagcgttgagaaaacctcgggtgcaatcaaggttttgaaacagatcggagcatatcctgatgttgaaaaggctaaggacagccaaggaatccgacccggaaaaggaaaaatgaggaatcggaggtacatttcccgtaaaggtcctttgattgtttacggaactgagggagctaagcttattaaagccttccgtaacattcctggagtggaggttgccaacgtggagaggcttaatctgttgaaactggcacctggtg

SEQ ID NO: 200512 - DNA, 341 bp, Gossypium hirsutum
gtttatacgatcatggtacctgctgggaatacgtttgttatgctatatgtcaggctcgtcgtttgatatacattgcagggtggtctgtgtatcataatgttagacttgttcgtgaaactgataaggcatcaaaaaccacattgggagatcttctcaaaattaaatcccaggaaggtgtgcgggtgttgctccttgtatgggatgatcctacttccatgagcattttaagatataaaacggattttcataaaggaatcatgaatacaaatgatgaagatactcccacagttattcaagcactcataaatgcaagtgttactctgacctcgaactgctataaa

SEQ ID NO: 200513 - DNA, 360 bp, Gossypium hirsutum
ggttgctttctgcttttcctcctcggctgttccttccgtcatcggagcactttaccgccgcattgccgctgtaccggagatgcctctggtcatttctgatgctgttgacagcgttgagaaaacctctgatgcaatcaaggttttgaaacatatcggatcatatcctgatgttgaaaatgctaaggacagccaatgaatcctacccggaaaatgaaaaatgatgaatcggatgtacatttcccgtaaaggtcctttgattgtttacggaactgatgtagctaagcttattaaagccttccgtaacattcctggagtggatgttgccaactttgagaagcttaatctgttgaaactggcacc

SEQ ID NO: 200514 - DNA, 386 bp, Gossypium hirsutum
ggaatgtcctggagttgtttcttgtgctgatatccgtgttctgtctgctagagaaggcatcgtttcgttgggaggcccttacattcctctcaaaactggaagaagagacggtagaaggagcagagcagatgttgtggaggagtatcttccggaccacaatgagaccatctctggcgttctcgacaggtttgccgccatgggtattgacacccctggagtcgttgccctcctaggagctcacagtgtcggcagaactcactgtgtgaagctggtgcatcggttgtacccagaggttgaccctgccctcagccccgaccatgttccacacatgctccataaatgccctgatcaaatcccagaccccaaggccgtccagtatgtgagaa

SEQ ID NO: 200515 - DNA, 384 bp, Gossypium hirsutum
gaaaccttctgtagaggaatgggactctgatcttgagcccaactcttcactgaagcaaactaacctgggaagtgatcatgctgctactccaacttctggaactggccaaatggcacattcttctcccacagatcctgcagaaaatgcatctggttgggattcaattgttcctgaacctaacgagtattcttttggtgatgagtcagtttctgatctcttggctgaagttgaagcgatggagtctcttaatggattggcgtcacctacatcaagtttacgctatgacagagagttggttcacggtgctgaacctggttgtttttgtcctgtaggaagatttagccctgcacctgatccaggaaaaaatgatggcttgagctcaac

SEQ ID NO: 200516 - DNA, 358 bp, Gossypium hirsutum
ggtgtttcggagaaaaagagaaaaaatcaaattacggaatgggtatcttcaggtttgcaggtgatatgactcatttgatcagcatcttagtgctgctcctcaaaatctacgctaccaaatcttgctcaggtatttcgctgaagacgcaggagctatatgcgctagtatttttgacccgctacttggatctattcactgattttatatctgtgtacaacaccatcatgaagctggtctttattgccagctctctcgccattgattggtgtatgagaatgcaccgagtcttgaggcgttcctatgactaggacctcgatacatttcgtccttattacctcattttggctagcctcatttt

SEQ ID NO: 200517 - DNA, 399 bp, Gossypium hirsutum
ggactcggttgttgatgtaggaaacaacaataaccggtacactatcataaaagcagacttccctccttatgggagggattttttgaatcacaaaccaaccggaagattctgtaatggaaaattagcctcggacttcactggttcttaatcccataaaaccctttttaacaccatcttgaatttgcttgctcatttttatattgtttcatcttacaaattggttttgttttgttagctgagaacattggcttcactgattacccaccagcttatctcagcaaaaaggccaaaggaaataacctgttaattggagccaattttgcatcagcttcttctggttattatgagactacagcaaagttatatcatacactttcattgagtaagcaattggagaac

SEQ ID NO: 200518 - DNA, 380 bp, Gossypium hirsutum
gggatttactctggttctacttgcaaacaaggagagatcgaagctgtggttattgccaccggtgtccatactttcttcgggaaggcggctcaccttgttgataccactaaccaagttggtcatttccagaaggtcttgacagcaatagggaacttctgcatatgttctattgcagttgggatggtaatagagataattgtgatgtatccaattcaagaccgggattaccgtcctggaattgacaatcttcttgtccttctcattggtgggatcccgattgccatgcctacagttttgtcagttacaatggctatcggttctcataggctatcccagcagggggcaatcacaaagagaatgactgcaattgaggaaatggc

SEQ ID NO: 200519 - DNA, 372 bp, Gossypium hirsutum
caagaggctgtttcagcagtgagaaaaaacagaggaggaaagaaaagaaaaagaaatagagaaaaggagaacagaagggtcaaagtaactcagatatcaaccgttatttctcatattcatttctgattcctaccaaactgtttctggaggcttaacatctcatttgcaaattggatgtgactgcttcactgtagattgtcaggattaattgtcgatgtctttggagatttagcagtggtagcatcatctgctgcttgggttgagaaatacaaatcaaaagttaaagcatgcatcagtagcattgatgagattaatcatatacactggagaccttctgttgaaattttaaaagaagaaggaatggatgcagca

SEQ ID NO: 200520 - DNA, 347 bp, Gossypium hirsutum
gaagcatggccgtcgggaagaacaagaggatttccgggggagagaacggaggaaagaagaaggcagcggatccttttgctaagaaggattggtacgatatcaaggctccttcagttttcactaccagaaatgtgggaaaaactctcgtcacccgtactcagggtaccaagattgcttctgaaggactcatacaccgtgtgcttgaggtttccctggctgatcttcaaggtggtgatgaggatcatgcttacagaaagattcgtttgagagctgaagaggttcaacgaaaaaatgttttgaccaacttctggggaatgaattctacaactgacatactgacgtctttg

SEQ ID NO: 200521 - DNA, 377 bp, Gossypium hirsutum
tgggaggttttgggattgggatggtgtactacggcgtgccattaggccttggaaatctatccgtgaatctctatttgggcgtcacattaaacgccttatccgagttgccagcgtcactcattacattcttccttatagggaaaatgaaaaggaaagactcattgttgggtttcacaatattaagcggggtgtgcagcgtgttgtgtgtggttgtggggaaggtgtcgccaagtttacagatagcaatggagctgatatccttcttcagtgcctgctcggccttcaacatgtcactgatatacacattagagctgttccccacatgcgtgaggaactcggcaatatcaatggtgaggcaagcactggtgtttgggggg

SEQ ID NO: 200522 - DNA, 385 bp, Gossypium hirsutum
ctacgatctagtgagtatcatgatcgcaatgctcagtactataggattcaagaggatatgggaatgcggaaggtacacatatacgagtttagtcgattgaatatggtctacacacttctcagtaagcgtaagcttctctggtttgtgcaaaacggtaaagtagatggatgggatgatccccgtttcccaactgttcaaggaattgttcgtcgaggtctgaaaatagaagccttgatacaatttattttggaacagggggcatcaaaaaatctcaacctgatggaatgggacaaactctggacaattaataagaagatcatcgatcctgtttgtcctaggcatacagcagtaattgaagaacgaaaggtactattgaccttaactg

SEQ ID NO: 200523 - DNA, 386 bp, Gossypium hirsutum
gaattacctcattgatgaagcaagaaaaccataatgagatgagattcgacatcatctagtaagcttgaaagtgttatttggcctggaggaactatgaacattccgagaggttggtctctacatggcaagaggctgaggattggtgttccagcaaataatggattcagagaaataattagcgtgactcgtgatccccgaacaaatgaaactactgtaactggatattgtgttgatgtgtttaaggaagccgttcaaagtttaggttatgaagtacattatgattttatcccgtttgaagatgccagcggaaaaattgcaggaacttacgatgatcttatccttcaggtttattataagaattacgatgctgttgtgggggatacgac

SEQ ID NO: 200524 - DNA, 344 bp, Gossypium hirsutum
gcaaggtgagagttgtttatagtcggtagttgaagcgtttagctactatgcaccttaagggtgtgcttgatagaatagaaaatgagaaaaaaaagagtgaaaaattagaatgaaaattagttttcatgttgtaaactatttattagtgatttcttcccctcctgttttgcagaatctccaagctggaattgtgtgggtcaattgttcacagccatgcttctgtcaagctccatggggaggcaataaacgcagtggctttgggcgtgaacttggggaatggggtctcgacaattacttgagtgtgaagcaggtcacgcaatatgtctccgatgaaccatgggggt

SEQ ID NO: 200525 - DNA, 362 bp, Gossypium hirsutum
  unsure (1)..(362): unsure at all n locations
gcgaatcacaaaccgttccctaatttcttaactctgagtctgctctctctcgtggccatcgcctctgctgaagttttcttcgaagaacgcttcgaagatggatgggaaagtcgttgggtaaaatctgactggaagaaagatgagaacatggctggggaatggaattacacttctggaaaatggaatggagatcctaatgacaaaggtattcaaactagtgaagactacaggttntatgctatttcagctgagttcccagaagttaacaacaagggcaagactctagtcttccaattttctgtgaagcacgagcagaagcttgactgtggtggtggctacatgaagttgctcagtgataacat

SEQ ID NO: 200526 - DNA, 370 bp, Gossypium hirsutum
caaaactcctcctcttagaaacaatgactaattcagactttggcttgcttttcattgacgggattttagcaactcaggcaatgtctcgcactgtgtatgaatcagccattgcagaacatgagcaatggatggttaagcatggtcgacattacaagaacaaagctgagaacgataaacgctttaagatattcaaggagaacttggaatatattcagaactttaataatgcaggaaacagaacatacaagttgagtattaacaagtactcggacttgacacatgacgaattcgtcgcagctcgtaccggatacattaatccaggcaacacaatgacatctatggaaacatcgtttcgctacgccgagtttac

SEQ ID NO: 200527 - DNA, 377 bp, Gossypium hirsutum
aacaatgtctcttcactcttgtctcaccatgtcattgctgtgggtctccttcttgtggctgtttacttttagtgccaaagctgttgttccttcatctgaaacttttaagtttgtcaacgacggagaatttgggccgtttggtgttgaatatgatgcacattaccgtgtcataagcatagctaatgcccccttccagcttgcgttttataacaccacccctaatgccttcacccttgcgttacgcatggctacaacgcgttccgagtcgctcttgcgatgggtttgggaggccaacagggggaaccctgttcgcgagaacgccacgttctctctcgggactgacgggaaccttgtcttggctgatgccgatggtcgga

SEQ ID NO: 200528 - DNA, 378 bp, Gossypium hirsutum
ggactcggttgttgatgtaggaaacaacgggaaccggtacactatcataaaagcagacttccctccttatgggagggattttttgaatcacaaaccaaccggaagattctgtaatggaaaattagcctcggacttcactggttcttaatcccataaaaccctttttaacaccatcttgaatttgcttgctcatttttatattgtttcatcttacaaattggttctgttttgttagctgagaacattggcttcactgattacccaccagcttatctcagcagaaaggccaaaggaaataacctgttaattggagccaatcttgcatcagcttctactggttattatgagactacagcaaagttatatcatacactttca

SEQ ID NO: 200529 - DNA, 377 bp, Gossypium hirsutum
aaaaaatcttctgatttttctgagtctttgtcttatcttctgtttggctcctgagaaagtgttttaagaagaacaatgaatgcattagtggcaaccaacagaaacttcaagctagcagccaggcttcttggtttggattctaagcttgaaaagagtctcctcattcccttcagggaaatcaaggttgaatgcaccatacccaaagatgatggcacattggcaacttttgttggctttaggattcaacatgacaatgctagaggtcctatgaaaggaggaatcagatatcaccctgaggttgaccctgatgaagtgaatgcattggcgcaactaatgacatggaagacagcagttgcaaacatcccatatggtggggc

SEQ ID NO: 200530 - DNA, 390 bp, Gossypium hirsutum
ctaatcatgaactgcactgttggagtagtcagaacgcgccttgagggaccaaaactgtcttctattcctgtaccgccatcagacatgggtcagaatcttagagctttgttagaatccgaagttgggtgtgatataatgtttcaagttggtgatgagacatttaaagcacataagttgatccttgctgcacgttcacctgtttttaaagcacagtttttcgggctcgttggagaccctaacttggataaaatagtagtaaaagattttgagccttctatcttcaaggcaatgctcttgtttatttataccgacaagcttcctgatgtacaagaaattgtagactccacatctatgtgtacatctgccaacatggttcagcatcttttggct

SEQ ID NO: 200531 - DNA, 366 bp, Gossypium hirsutum
gaagagttcaaagaagcaccaaatttacagcaaggaattccaggctatgttagatggtttagatgaagaagacagcttagaagaaggtggtcaagcaacagagaagaaaaggcgtttatctatgcatcaagttaaggctttggagaagaatttcgatgtgggaaacaagttagaaccagagagaaaagtgaagttagctgaagaattggggttacagccaaggcaagtggctatttggttccaaaaccgacgtgctcgttggaagaccaaggtgttggagaaagattatgcaatgcttaaagctaattatgatgctcttaagcttgatcatgacaatcttgaaaaagaaaaactgggtctaattgc

SEQ ID NO: 200532 - DNA, 391 bp, Gossypium hirsutum
tcggaccgaggcccaacccttttcaagggaccccacttttcaattgtggttccgagccaacgatgtctggaactccttcttcaccgttttctctactccccttcttcttctgctctccaatggctatccccgccgcaaacgtttaacaaaaaacacctttttgtttatacccaatgccagtatatccacgcacgttatgtctttttaatttgtaaccaagactatcaaggtccctgaaggcttcgattatgagctttacaataggaacgacatcaacaggattttgggtcctaaggattcttctatctctttcaaggattctgcttgtaggtgcttttggtacatggtttccaagaagaaatacatctataccattgatgatgactgcttt

SEQ ID NO: 200533 - DNA, 410 bp, Gossypium hirsutum
  unsure (1)..(410): unsure at all n locations
aaaaaatcttctgatttttctgagtctttttcttatggtctggttggcttctgagaaaggggtttaagaagaacaatggatggcttaatggcaaccaacagaaacttcaagctagccgccaagcttcttgggttggattctaagcttgaaacgagtcttctgattcccttcagggaaatcaaggttgaatgcaccatacccaaagatgatggcacattggcaacttttgttggctctacgattcaacatgacaatgctagaggtcctatgaaaggaggaatcagatatcaccctgaggttgaccctgatgaagtgaatgcattggcgcaactaatgacatggaagacagcagttgctaacatcccatatggtggggctaaagggtgtatangatgtaaccctggagagtt

SEQ ID NO: 200534 - DNA, 417 bp, Gossypium hirsutum
aaataaaaaatgagctttcttcggctcttgtcagttgtccttgggttcttatcctatgtagtcataggatcagctgagcagtgtggaaggcaagcaggcggtgctctttgccccggtggtctatgttgtagccaaattggttggtgtggcagtactgctaactactgcacagttcccggttgccaaagtcagtgcagcggtagtggccctgcccctgggcctggtgggctaaccaatcttatatcaagagagacgtttgatcggatgctattgcatagggacgatgggggttgtcctgcccgtggcttctatacctatgatgctttcattgctgctgcacgttcttttcctgccttcgctacaactggttaccaagctactcggaagagggaaatagctgccttcttagcccaaact

SEQ ID NO: 200535 - DNA, 379 bp, Gossypium hirsutum
aaaaaatcttctgatttttctgagtctttttcttatgttctggttggctcctgagaaaggggtttaagaagaaccatgaatgccttaatggcaaccaacagaaactttaagcttgcaaccaagctttttgggttggaatctaagcttggaaagaggcttctcaattccttcaagggaatcaagggttgatggcccattccccaagattattgccccatggccacttttggtggctttaagattcaacatgaccatgctagaagtcctatgaaaggaggaaatcagatatcacccctgaggttgacccctgatgaagtgaatgcattggcgcaactaatgacatggaagacagcagttgcaaacatcccatatggtgggg

SEQ ID NO: 200536 - DNA, 356 bp, Gossypium hirsutum
atcatggaatccatgagacaggatgagcctgattgtgaccgggttattgagcttgtgagggaagtgagggatgaaatatgtgacctggctcctcgaagttggaaagaagaattacctgttcctttggattggaaattcttggccaagtgcttaaatcaagcaacctggacattcattatcttggacggattctggaattcgctttgatcactttgcagaagctatccgctccagccaatgatgatgaaatgaaggccgctaaccaaaggttattgaaagagttggctgagatatgtggagccagagagaactcggataattctcctgccctcgcaatgatcaaaggtctacgtttt

SEQ ID NO: 200537 - DNA, 368 bp, Gossypium hirsutum
gaaagctgctggtttttcatactttgacgggtgcactagatttgaagccaaactatgtgcgtgcttgggcaaacatgggtatcagttacgccaaccaggtttgagtttttgttggatgcatggtccaggattagctgaattcatgcatagtgacgacttgtttgagctaattgctgatcttaaagtgtacattctatcattattttgttctatttgtattttgttagatttctggtgtagtatgataagtccggtattttgtttgattgttattgataaactttttatttggtgggatatatatttatatcatagatgttattcttcttttcaatattatgataatgaatcttaattgtttttataaa

SEQ ID NO: 200538 - DNA, 378 bp, Gossypium hirsutum
gtagaaggggagcagggagctgctatccatattgttctagtggactccaacactgcgcgtgttgtaacaaccggacctgaagcctctatgaagctagatgttgtggtgcttgaaggtgattttagcaatgaggatgatgaagattggacacaggaggaatttgatagccatttggtaaaagagcgtccaggaaaaagaccactgctgacgggtgacttgcaagtgaccctgaaagagggggttggaacactaggagacctcacttttactgacaattcaagttggataagaagcatgaaattcaggcttggcttgaaggttgcttctggatactgtgagggtatacgtgttcgggaagctaagacagaggcttttact

SEQ ID NO: 200539 - DNA, 347 bp, Gossypium hirsutum
  unsure (1)..(347): unsure at all n locations
caaaactcctnctcttagaaacaatgactaattcagactttgtcttgcttttcattgtcgggattttaacaactcaggcaatgtctcgcactgtgtatgaatcaaccattgcagaacatgagcaatggatggttaaacatggtcgaaattacaagaacaaagctgagaaagataaacgctttaagatattcaaggagaacttggaatatattcagaactttaataatgcaggaaacagaacatacaagttgagtattaacaagtactcggacttgacacatgacgaattcgtcgcaactcgtaccggatacattaatccaagcaacacaatgacatctatggaaaca

SEQ ID NO: 200540 - DNA, 371 bp, Gossypium hirsutum
cagttgtaaaagctgcagttgatgaaagattaagggggcttgaaatttggagggaatcacagggccgggcatctaagctatatggttttaagcatgattctatgtcatcgcttaggaaaacaagtaagacaggagaattggttgattcaaaaactaatggagatctttcacgttccaagtccgaatcaatgaatgaggatgaaaatcttctttgtctgacaggagatgctaagtcggattctgttccagatcttcaacagcaggttgtagggttaaaggtcgagttgtgcaggttgctggaagagaaaagatcagctgttctcagatctgatgaactggagacagcattgatggagatggttaagcaggac

SEQ ID NO: 200541 - DNA, 390 bp, Gossypium hirsutum
cgcggtggtggacgatctaaactacggatgcctgcaagcgtcgagagagaataacagagggaaagcttaagcaatggcggccgaggaggacagcggaaagttttacctccgctactacgtgggccacaaagggaaattcgggcacgagtttttggagttcgagttcaggccagatgggaagctccgatacgctaacaactccaactacaaaaacgacaccatgatccgcaaagaggtcttcctcactccttccgttcttaaggaatgccgccgcatcatcgccgacagcgagataatgaaggaagatgataacaattggccagaaccagaccgtgttgggcggcaagagcttgagatagtgatggggaatgagcacatctctttcacaac

SEQ ID NO: 200542 - DNA, 191 bp, Gossypium hirsutum
accattttccgggaaaaaaagggatgcaactgtagttgcaaagctaaagaaagggaagaagcatgaatatccatggcctggagatccagatccaaatgtgaaaagcggggtcctaactcatcttttccatttcaaggctttgaaagaaaagccaaagcccggtactttggaatttgagaaaccccttggtg

SEQ ID NO: 200543 - DNA, 361 bp, Gossypium hirsutum
ctagggagaaaaatgcgatgtccgtaagctgtctatgcagtgttgcttcgtgcagcgatataccttgaaacaactgttgcttgtcgacttgatttggagagaaggatggccttgcaattaggacaggctgttttggatgatctcttgattcctgcatattctgttaccggcgatacattatttgatgtggacaccatgcagcggatcctgacgaactacgttgaatatgaaactgaaggccaccattttggatacaaagaagatgatgagtacatttctcccccaccaagtgacatggaaagggtgggaaagctaatggagagctacctagctgaaatagcatctgaccgtaatctaccta

SEQ ID NO: 200544 - DNA, 392 bp, Gossypium hirsutum
cagttgtaaaagctgcagttgatgaaagattaagggggcttcaaatttggagggaatcacagggccgggcatctaagctatatggttttaagcatgattctatgtcatcgcttaggaaaacaagtaagacaggagaattggttgattcaaaaactaatggagatctttcacgttccaagtccgaatcaatgaatgaggatgaaaatcttctttgtctgacaggagatgctaagtcggattctgttccagatcttcaacagcaagttgtagggttaaaggtcgagttgtgcaggttgcttgaaaaagaaaggatcagctgttctcagatctgatgaactggagacagcattgatggagatggttaagcaggacaatcgacgccaattatgtgc

SEQ ID NO: 200545 - DNA, 370 bp, Gossypium hirsutum
gcaaattccctttttttcccctccacccaagcctaagaaatgatggcgacagctcaaatcagcaaaaaacgaaagttcgtcgctgatggaagtttcttcgcggaactcaacgaggtattgaccagggaactggctgaggatggatactctggagtcgaagtcagagttactcctatgcgtaccgagatcatcatcagagccacccgcacccaaaacgttctcggtgaaaaaggtaggaggattagggagcttacctcagtggttcagaagcgattcaagttcccagaaaacagcgtcgagctttacgctgagaaggtcaacaacagaggcctttgcgctattgcccaggccgagtctcttcgctacaagc

SEQ ID NO: 200546 - DNA, 383 bp, Gossypium hirsutum
atgtcaacactcgcatgatagatttaagtatagaatattccaataatacttgtacaagctaattaaaaaacattaagacataagaatcgtgtaaactctgcttatttacaccaatatctaatattcagcatgattggtattacagtcccagtgtgcaacaccatagtgttattaggcgactaaaaatatgcagcaaccccagttgtttgttcaattttattgctgagattaatgtttgatcttcggcttcttcacaatcatcacagagcaatgagcatggtgagaacaataatcactcacactgccaagaacagccctctttatagctccataaccatggctaccaacagcgagaacggaggcatggtgtttttctacagcgt

SEQ ID NO: 200547 - DNA, 380 bp, Gossypium hirsutum
tgggaggttttgggattgggatggtgtactacggcgtgccattgggccttggaaatctatccgtgaatctctatttgggcgtcacattaaacgccttatccgagttgccagcgtcactcattacattcttccttatagggaaaatgaaaaggaaagactcattgttgggtttcacaatattaagcggggtgtgcagcgtgttgtgtgtggttgtggggaaggtgtcgccaagtttacagatagcaatggagctgatatccttcttcagtgcctgctcggccttcaacatgtcactgatatacacattagagctgttccccacatgcgtgaggaactcggcaatatcaatggtgaggcaagcactggtgtttggcggggtg

SEQ ID NO: 200548 - DNA, 358 bp, Gossypium hirsutum
tgaaggtgatcatcatcaacagcagctgaggagaggaccttggactatagaggaagattcagtccttgttcattacattgctcgacatggtgaaggtcgatggaattttcttgcaaaacatgcaggtttaaggagaacaggcaagagttgcaggttgagatggttgaattatttgaaaccagatgttaagcgtgggaaccttactgctgaagaacagtttttgatccttgaactccattctaaattgggtaacaggtggtccaagattgcacagcatctgcctggaagaaccgataatgagattaagaattactggagaacccgtgtgcaaaaacaggctcggcagcttaacatcgat

SEQ ID NO: 200549 - DNA, 421 bp, Gossypium hirsutum
gcgagcaagaggcaaacaataggcttaccaggtatggtggagatggtggcaactatatgttcaacattggttctcaaataaatgatatgagccggttgattgaaggacaagcacgatattttattgatgcatccaaatacggaaatgtttcccggttcatcaatcatagctgctcgccaaatcttgtgaatcatcaagttcttgtggaccgcatggattgtcaccgagctcacattggtctctatgccagtcaagatatatctgtaggtgaagagctgacttttgactatcgatatgaactcctgcctggtcaaggatatccatgtcaatgtggagcttctacatgtcggggccgcctttactaaaccctcagtgagcactacgggatctctatggcatctaaggttttgctttttgagtt

SEQ ID NO: 200550 - DNA, 419 bp, Gossypium hirsutum
gcagctgccagaggtggtgtgaccaatacgaacagtggacatactggggaagatcactcccctgaacatagtcgggctgattagaatgaacgggttgccggggatgatgacgacgaccatgttcagtggcaaactgatacttctattgcggctgcccaacaacgcatccaagagcagttgagtgctagaactgctgatatggtgatgctctctacggatgaagacaagaaaaagtcggttaaaaagtctcccgagcctgagaccaaggttcatgagaatggtggtggtgctcatgatgaactagctgatgagataaaggaatacttgaagaatggatcgtctccaaatcagcttagatcctatctaggatcacttactggaacctgcaaagaagtcatggatgctctatttatagcact

SEQ ID NO: 200551 - DNA, 409 bp, Gossypium hirsutum
ggaacataaagttgcccttttttttctttttggtgtgaaacaagttccaatggcggagtaattgaagacattaaccaacagatagtcagataaaaacctccaataaaccaactagctagctgtgttctttcttctgctctcttctcatggtggagtccctccaaaggtatgctgttgtcaccggggcgaacaaggggattggactggccatatgtaagttgttggcctctaaaggggtcatggtggtcttaactgctagagacgagaaaaggggtctcgtcgctcttgaaaagctgaaagaatccggtatctctggtcatctagtttttcaccggctcgatgtcgccgaccctgctaccatcacttgtctagcagactttgtcaaaaacaaatttgggaagcttgatat

SEQ ID NO: 200552 - DNA, 405 bp, Gossypium hirsutum
ggaaaatctactctgctcgactctcttgcaggtagacttgccagaaatgtggtgatgactggaaatatccttttaaatggaaagaagaagagactagagtatggtgctgttgcttatgtaactcaggaggatgtgatgttgggaactctgacagtaagagaaactttgacatactcagctcatttaaggcttccgaccacgttgagcaaagaagaagtgaaagacattgtggagggaacaatcatggaaatgggtcttcaagattgtggtgacacagtgattgggaattggcatcgaagaggaataagtggtggggagaagaagagacttagcattgcacttgagatcctcacgatgcccaaaatgttgttcctggatgaacctactagcggccttgacagtgcc

SEQ ID NO: 200553 - DNA, 372 bp, Gossypium hirsutum
gcaccgtggatatggatcaggagcaaatagctggctgattcaattggagggaggaggatggtgcaataacattagaacttgtgtgtaccgcaaaaagaccagacgcggatcttctacttacatggaaaagcagataccatttactggaatattaagtgaaaaagccgaagaaaatccagactttttcaattggaaccgagtaaagcttcgttattgtgacggtgcctcttttactggggacagcgaaaataagggtgcacaattgcaatttagaggccaacgtatatggttagctggaatggaagatttaatgtcaaaaggaatgcgctacgcaaatcaggctcttctttcggggtgttctgctgggggtct

SEQ ID NO: 200554 - DNA, 414 bp, Gossypium hirsutum
gcgacttccaccatgaaaacaagcttcatagccattagcctagcggggatggttgctggaatggtgaaagctcaatgcggcaacacttgctcggcgaccgagtgttgcagtcggttcgggttttgcgggacgggagacgatttctgcggagtgaattgccgagggggtccttgtgttaacaatggggtctccatagctgccattgttacgcaggaattcttcgatgggatattgaaccatgcggcttccacttgtgtaggaaggagcttttactccagaggggtgttccttgatgctctcaattctttcactcagttcgcaaggattgggtcggttgaggattctaggcgtgagatcgctgctttctttgctcatgctacccatgaaactggaagtaagcatccttttttgctc

SEQ ID NO: 200555 - DNA, 364 bp, Gossypium hirsutum
ggactcggttgttgatgtaggaaacaacaataaccggtacactatcataaaagcagacttccctccttatgggagggattttttgaatcacaaaccaaccggaagattctgtaatggaaaattagcctcggacttcactggttcttaatcccataaaaccctttttaacaccatcttgaatttgcttgctcatttttatattgtttcatcttacaaattggttttgttttgttagctgagaacattggcttcactgattacccaccagcttatctcagcaaaaaggccaaaggaaataacctgttaattggagccaattttgcatcagcttcttctggttattatgagactacagcaaaggtat

SEQ ID NO: 200556 - DNA, 370 bp, Gossypium hirsutum
gacaaatctaatgcttagcggcctataaaacgtgagcgagaagggagtttgggtcatggggaatgctcacggcttacaaaagttggtctctttgacgatcacatcctgccggggggaaacagatgtgagtcttgaagccatgggaaagggatgtgcaaacctgatgcagatgagccttcgctggtgttgctttattactgatgacggattgacggcttttgccaaatctgcatgtgctcttgagtccttacagttagagtagtgcaacataattacccaatcctggactataggtgtcctctcaaactgtgcgttaaaatcccttaccgtagtaaagcgcatgggaattaaggttatatcctcggaagtt

SEQ ID NO: 200557 - DNA, 423 bp, Gossypium hirsutum
gcagggtgttcagatgttgcttgcggcacaaacaatgtgtttggagcggcggaggttgcagcccacgaggcagatgcaaccgtactcgtaatggggcttgaccaatctatagaagcagaattcagggacagggtagggctgctcttgcctggacgccagcaagagcttgtttcccgagtggctcgagcttctagaggtccaaccgtgctggtcttgatgtcaggtggtcctatcgatgtctcattcgctaagaatgatcctcgagttagtgccattatatgggctggttatccaggccaagctggaggaactgcaattgcggatgttttattcggaacaaccaatccaggagggaagctgccaatgacatggtatcctcaagattatgtagctaaagtcccaatgacaaacatgggaatgagg

SEQ ID NO: 200558 - DNA, 411 bp, Gossypium hirsutum
ccggaaactgatcctaccgttttattgattcactctgttctgcattattctcccgatgaccatgttcgttccagaggctgagcttcctgcatgggttgtttgttacatccctgctacaatgtcgttccttaacatccttccggcaccaaaatccttcccgttcattgttccttaccttcttttcgagaataccatgtcggtgaccaagttcaatgctatgatatctggtcttttccaactcggcagtgcatacgagtgggtcgttacgaaaaaatccggacgatcttcggagggtgatcttgtttcattggttgagaaaaagccaaaacaccatcgggttggatcagaacccaatcttgaggaaatgaaagctgatctccagcatgaacaggaacaaaaggctcgtaaaaa

SEQ ID NO: 200559 - DNA, 409 bp, Gossypium hirsutum
ctcactcaacattcccatttccaatcggcagctcccggggtaaatatgccgatcagaaacatagcggttggccggcccgaagaggctactcaccccgatgctctcaaggctgctttggctgagttcatctcaaccttgatcttcgttttcgctggatcgggctcaggaatggcctttaacaagttgactgacaacggagcaaccaccccggctggtctcgtagccgccgctctagctcatggcttcggtcttttcgtcgctgtctccgttggcgccaacatctcaggtggccacgtcaaccctgccgtcaccttcggtgcttttgttggcgggaacatcactctcttgcgcggcattctttactggatcgcccaactcctaggctcaaccgtcgcttgcctgttgctta

SEQ ID NO: 200560 - DNA, 415 bp, Gossypium hirsutum
gccattggtgattgaattgagtttgcgacattcggatggggatcaactaggtgctgttagcaaggtttacacacctacagaacatggagttgaaggttcaatatggcagttggctaaagcttatgttgctgtaaatgactctggtgttcatcaactcataagccattggctgaacactcatgcaacaatggagccattcgtgattgcaacgaaccgacaacttagtgtagttcatccaatttataagcttctctatcctcacttccgggacacgatgaacatcaatgcttttgctaggcagattctgattaatggaggtggtgtcctggaattaacagtttttcctggaaagtatgcaatggaaatgtcatctataatttacaagagttggaatttgtttgaccaggcacttttt

SEQ ID NO: 200561 - DNA, 369 bp, Gossypium hirsutum
gtgtaacatgttcgactcaaggagactatagagttgttactgaactggaagtctatgcagtatccatcattggtccttttcctattgctgtaactaatttattggatttaacaagattggatctccataacaacaagctgactggcccaattcctccacaaattggccggctaagacgacttagaatgttaaatttgaggtggaataagctccaagatgtccttcctccggagattggggagcttaaaaaactagcccatctgtcattgagctttaataattttaagggcgagatcccgaaagagccttgcaaatctacccgagcttcggtatctctaatctcaaagaaaaccgtttcactgggcgaat

SEQ ID NO: 200562 - DNA, 383 bp, Gossypium hirsutum
gcttcccgaatacccagaccaaaacgacctagtatgcgtcctcgagacgctctctactttccctccggtcgtcttcgccggggaggctaggagcctggaagagaagctgggacaggctgctctcggcaacgctttcttgctgcaaggtggtgactgtgccgagagcttcaaggagttcgatgctaacaacattcgtgacactttcagggtcctcctacagatgggtgtagtcctcatgtttggtggccaaatgcctattatcaaggtaggaagaatggcaggtcagtttgcaaagccgagatcagatccgtttgaggagaaggatggggtgaagctcccaagttatagaggtgacaatataaatggtgattctttcgatgaga

SEQ ID NO: 200563 - DNA, 415 bp, Gossypium hirsutum
gttttcctcatttccctttactcgttgaccgaaatttctcgactcaccgggttcacggcctctagatctgttacttcctaggcccgatttcataatttcaagatctgcttccagcatctaaacgcgaccgtttccggaactcaactcggagattcaatttttaagggtttcgaatttggatgtgcttgtcttttatttggtctactggaaatgtcgattttgcccaaaggtgattcagttcatattcgagaagtttggaacgataatctagaagaagagtttgctttgatccgtgaaattgttgatacctataattacgtaacctatggatactgatttcccgggtgtagttctacgtcctgttggttctttcaagaatatcagtgattataactaccaaactttgaaagataac

SEQ ID NO: 200564 - DNA, 422 bp, Gossypium hirsutum
gcggaattctacaggaagaagcttgctaggcgacttggttttgaccgcagtgctaatgacgatcataaaaggagtattctgactaagctaaagcagcaatgtggtggacagttcacctcaaagatggagggcatggttacagatctgacattggcaagggaaaaccaggccaactatgaggactaccttaggagtaactcagctgctcatcctgggattgatttaacagttactgttcttaccacaggattctggccaagttataaatcatttgatcttaatcttcctgctgagatggttaagtgtgtggaggttttcaaaggattttatgaaacaaaaacaaaacacagaaagcttacctggatttactctttgggaacttgccacattaatggcaagtttgagcagaagataattgaact

SEQ ID NO: 200565 - DNA, 411 bp, Gossypium hirsutum
gaaaatggtttctattgagttatcaccggagttgattcccggtttacctgaggaaattggactcgattgtttgattcggtttcattattctacttacagagtcgcagctcgagtctgccgacgatggcaacagcatctccaaagcagggagttgcactatctcagaaagcaagccggatatacccgtaaagcggcttgcttagttcaattactcaataacacctccgattctgctgggtcaaagccggttggtccgcccacatacggccttacagtttttgatcctgtgagtggaatctgggatagaattgacccggttcccaagtacccttatggtcttcctttgttttgccagatagcaagctctgaaggaaagctagtggtgatgggtggatgggacccctcaagtta

SEQ ID NO: 200566 - DNA, 417 bp, Gossypium hirsutum
gtgcatggagaggaagagtagctcgtagagaactgcggaagcttaagatggctgctagggagacgggagctctgcaagctgcaaagaacaaactggaaaagcaagttgaggaactgacatggagattacaactggagaaacgaatgagggttgacctggaagaagctaaaacacaagaaaatgcaaaactgcagtctgctttgcaagacatacaacttcagtttaaagaaactaaagaattgcttgccaaggaacgtgatgctgccaaaaaggcagctgaggtagtccctataattcaggaagtttcggtggtggaccctctgatgttggagaagcttacaaatgagaatgaaaaactgaaagcattagtgagttcgttggaaaagaaaattgatgaaacagagaaaaagtttgaag

SEQ ID NO: 200567 - DNA, 410 bp, Gossypium hirsutum
taatagcaaaggcagtggtggggtgtgcaagaaagctagggttcagacgtcttcaagccaaccacctttgaaagtgagaaaggagaagcttggagatagaataacagcacttcaccagttagtttccccatttggaaagactgacacagcatctgtgttgttagaagctattggttatatcagattccttcaaagtcaaattgaggctcttagctccccttacttgggtactgcatcaccaaacatgagaaaccaacaatctgttcaaggagaaaggaattgtgcatttcctgaagatgaaggacaggaaaagcaagagcctaagccaaaggacttaaggagtagagggctgtgcttggttcctgtatcatgcacccaacaagtcggaagtgaaaatggtgccgactact

SEQ ID NO: 200568 - DNA, 409 bp, Gossypium hirsutum
gacaaatctaatgcttagcggcctagagaacgtgagcgagaagggattttgggtcatggggaatgctcaaggcttacaaaagttggtctctttgacgatcacatcctgccggggggtaacagatgtgagtcttgaagccatgggaaagggatgtgcaaacctgaggcagatgtgccttcgctggtgttgctttatttcggatgacggattggtggcttttgccaaatctgcaggttctcttgagtccttacagttagaggagtgcaacagaatcacccaatccgggactattggtgtcctctcaaactgttcgttaaaatcccttaccgtagtaaagtgcatgggaattaaggatatatcctcggaagttcctttgtcgtgctgcaattcccttaaatcattgtcagta

SEQ ID NO: 200569 - DNA, 352 bp, Gossypium hirsutum
caagcttactattgcgctgtagatctcaaaattcaggaggctcggtatatcatctcatggctgctactatagacttcgtcaaagctaggccgatcttacaccgccgtcgaaattctacccctgaggttgatgtgaaaatatcgaacggtattaaggctaaggccgcaactcctaacgttgcatacactggaatttacgaagctcttgagaatacaaatggacgttccgattacctcggataaggtgtatcgaacgctgtggctaatgctaacacaatcattggccctgcattgattggaaaggacctaaccgaacagactgcaattgacaatttcatgggccaacatctgga

SEQ ID NO: 200570 - DNA, 345 bp, Gossypium hirsutum
caaacttacaagaagaagcacaaacagcacaagaaggacgacggggatcccaattctactgtaactgcaaatggcaaacaagactcgactcaattcgatgacaaggagaaggtgctagtgaatggcaaaaacgctacagaagcgaaatatgcgccggttaaatcattagctaattctgagttaccacataatgtttaggattgctgccaaggtttttctagcccatctcctatgcaagctcacacctggacctttctattgcatgcacatgattttatcggaattgccaaaactgcatcaggcgagactctggcatttgactgtacctgcaatgatgcatgtatt

SEQ ID NO: 200571 - DNA, 363 bp, Gossypium hirsutum
tctcgctagccttccaaatgtgactgagaagggcttctgggttatgggtaatggtcatgggctacagaaattgaagtctttcactgttaaagcctgccgtggagtgacagatttgggacttgaagctattggcaagggttgcccgaatttgaagcagttctgcctcggcaagtgtgccttcttatctgataatgggttggtgtcttttgccaaagcagcaggttcactagagagcttggaactggaggagtgccacagggtcacccaatttgggttttttggttctcttattaactgtggtgcaaagttcaaagctatctctcttatgaactgcttggggatcaaggacctaaatgtaggatt

SEQ ID NO: 200572 - DNA, 419 bp, Gossypium hirsutum
gaaacaccatacagacaaataaaatatgaagagttcattgctagtagctgttgtaatcagcttggtaatagttgcttcagccgccaactttaaccaagacatcgacgttacttggggagatgggaggggcaagattctcgaaaacggaaaccttctcactctcaccctcgacaaattctccgggtctggttttcaatccaagaaccaatatctgtttgggaagatcgatatgaacattaagctggttccaggcaactctgctggcactgttaccacttactatgtaagttttatcatcatacttgtctcttattaacattagaactctgtgttgatatgtggggtgacaattgcagcttcgttcggaagggtcgacatgggatgaaattgacttcgaattcttggcgaacctaagcgga

SEQ ID NO: 200573 - DNA, 359 bp, Gossypium hirsutum
cttcggttcatgggcgggcacatccactgcttcctctaccagagcaggtttggcctcagcctttttcttcttctttgggaccgtgtcttgctcctcgagagcagtggagtttgttatttgcccaataagtgaatctgctgcagggttgtaggtcttagcaggagttatcaacccagcccccttcttccggtccttgtcatagacttctatcttcggcttgcctttagctgaaccagcagaacgtcccaattctttgccttcaagtgcccttaatcttgcttcaagcttggctcggttctcaagtcccatggaattatcttggtcatctccaagagcatcacatcgaattgccagtgcag

SEQ ID NO: 200574 - DNA, 404 bp, Gossypium hirsutum
ctcttacattacctacaaaatctttgggttcccttgtgtgtttttttgccaatggcttcttcaccaaaattcatctcttacttcttccttttagccctcttctccgttgaaatacatggtagggatttttttagcaaaatcccaagtgttaacacaaatgagaaagaggtgaccaacaaagaagaacaaaccactttggggaagaaggagcaagagccaaggtttgtccccgagacccaaaatggctatgggctttacggtcacgagtctggtcagctcccttctagcaccgccagtaccaaagaaacctatgaaccctatgtcacacctgttaaataccaccctgatgaaccctacaatagcattccagcgtccaaaaccaacatcaaagactcttactttta

SEQ ID NO: 200575 - DNA, 363 bp, Gossypium hirsutum
cttctcaaatcttttttcaatcaactctctccaaagatgcagagcttcgtcaaaacccttaccggcaagaccatcaccctcgaggttgagagttctgacaccatcgacaatgtgaagtctaaaattcaagacaaggaaggcatcccaccagaccagcagcgtctcatcttcgccggaaaacagctcgaggacggccgtaccttggccgattacaacatccagaaggaatctaccctccaccttgtcctacgtcttcgtgggggtatgcagatcttcgtcaaaaccttaaccggcaagaccatcaccctcgaagtcgagagctccgacaccatcgataatgtgaagtctaaaattcaagacaag

SEQ ID NO: 200576 - DNA, 389 bp, Gossypium hirsutum
gtcaattccaggaaagtttcagcttttttatgaatagattagagctgggtctttgcttaaagattgaaaaaaaagctatgaattcttcttcttcttcatgggttgattcactggatcttaatgcttcttcaacaaagtcccttcaacttgaaactcctgtaagtcatcctaataccagcaacagcttaattgtatttggaaggaaactttcagtcaaagaagagagtggtgctttagtggaagaactgaaccgcgtaaatgcagaaaataagaagctaactgagatgttaaaagcaatgtgtgagagctataatgcattgcaaagccagttagtggacttgatgaacaagaatactgagaaagaacttagtcctacaaagaaaagaaaa

SEQ ID NO: 200577 - DNA, 358 bp, Gossypium hirsutum
taatagcaaaggcagtggtggggtgtacaagaaagctagggttcagacgtcttcaagccaaccacctttgaaagtgagaaaggagaagcttggagatagaataacagcacttcaccagttagtttccccatttggaaagactgacacagcatctgtgttgttagaagctattggttatatcagattccttcaaagtcaaattgaggctcttaactccccttacttgggtactgcatcaccaaacatgagaaaccaacaatctgttcaaggagaaaggaattgtgcatttcctgaagatgaaggacaggaaaagcaagagcctaagccaaaggacttaaggagtagagggctgtgcttg

SEQ ID NO: 200578 - DNA, 416 bp, Gossypium hirsutum
agatcgaagacccggagattgtacacgggctagcaaggcacagcaagaaaggtgaagatcttacgttgcttaaaacagaatgccaaagagcgcttggagatggtttcaccacattctcggtttttgggctctttgacggacacaatggatctgcagctgctatttacacgaaagagaatcttcttaacaatgttctaagtgccattccggcagatcttaatagagacgaatgggttgctgccctttcgagagctttggttgcaggtttcgctaaaacagataaagattttcaacagagagcaaaaacgtcaggaactactgtaacctatgtgatattagaaggatgggttgtaacagttgcatatgttggtgattcctgctgtatatttgaatcagctgaaggtggaatatatcac

SEQ ID NO: 200579 - DNA, 419 bp, Gossypium hirsutum
cttagttcaaagagggtccaatcgtttcgaactataggagaagaaggggttgcagcaatgttgaatcatattgatatagcttcctcgtcatcagcccctgtaaatcttaaaaaactatcacttttgttagcgaaccacgttgtatgtcgcgttacatttggtaaaaaatacggtggcggaggtgacggtggtacgaacagattctacagggtgttgcatgaagttcagcatctggtgggagaatttgttgtgtcggattactttccgtggatgtggtgggtgaataagttgaatggtatggaaacaagagttgaaaagaacttcgaagaacttgacaagttgtacgatgaagtaattgccgatcatgttgctccgacaagaactaaagctaaccatgaagacattgttgatgttcttct

SEQ ID NO: 200580 - DNA, 412 bp, Gossypium hirsutum
tatgtctattcttttatacactttggggccttgccatgttggtttaatgtgatattttggaagggtttttggtttctgttactttccatattgaaacttgtcttcaagtcatagctaacatctctaccagcaatttattgctgtacttgtgggatgtaacacataatgtatattgtgaaggatttttgactctaccaatgctgacttggagaattcaagagttccaagctcttctgagttaaaaactaagcctgatggttgggaaacaacatcaaaagctcctgatggaaacgtgtgggagatgtcacagagggaagaagatattctcctcccaagaatttgatcgccgaattgcttactgtaaattccagatagctagttttattaagactcacatatttagccggaggag

SEQ ID NO: 200581 - DNA, 379 bp, Gossypium hirsutum
gccattcctccctttcttcttgttcggttgactcagtttgtatgattgcttttacagcacaaccaaaaacaagctctttttccaattccaaccggcaaaagcctctctttcccacaaaaaaacactccccttttgctgttctaaaaattgggactttaaactgcgcgagagtagctggggagatggaaatcggaaagggtattgctgcagcaggaaaacccattgttgatcttcatggtattgatgacggcttgattcaaaagattgtatatgatgctcttgtttggagttctcttcatggccttgttgttggtgacagaaatgatcagagatctgggaaactacctggtgttggcatggtgcacgctccaattgcttt

SEQ ID NO: 200582 - DNA, 365 bp, Gossypium hirsutum
caacattgtctctttactcttctctcaccatgtcatgtctatcgatctctttcttgatgctgcatacttttagtgccaaagctgttgttcctccatctgaaacttttaggtttgtcaacgactgaaaatttgggccgtttgttgttgaatatgatgcaaattaccgtgtcataaacatatctaatgcccccttccaacttgcgttttataacaccacccctaatgccttcacccttgcgttacgcatggctacaacgcgttccgaatcgctcttacgatgggtttgggaggccaacagggtgaaccctgttcgcgagaacgccacgttctctctcgggactgaccggaaccttgtcttggctgat

SEQ ID NO: 200583 - DNA, 421 bp, Gossypium hirsutum
ggaatctatgaccactaatccaatggcatgggaaggggcagttaacccaagggtgaagcaaatggagcaagctcagaattgtctccttcctatgggtattacgtcagagaacgttgctcatcgctttggtgtgacaaggcaggagcaggatcaggctgcggttgaatctcacaggaaagcagctgctgctacagcttctggtaaattcaaagatgaaatagtccctgtggccaccaagattgttgatccaaagactggtgatgagaaacctgtcacaatctctgttgatgatgggatccgagctaacacatcagtgtcagatctgggaaaattgaaacctgtattcaagaaaaatgggaccactactgctggaaattctagtcaagtgagtgatggtgctggagctgttctgcttatgaaa

SEQ ID NO: 200584 - DNA, 424 bp, Gossypium hirsutum; identical to SEQ ID NO: 190494

SEQ ID NO: 200585 - DNA, 418 bp, Gossypium hirsutum
agatcgtagacccggagtattgtacacgggctagcaagtcacagcaagaaaggtgaagattttacgtagcttaactcagaatgccaaagaacgctaggagatggttttaccacattctcagtttttgggcatctttgacggacacaatggatctgcatctgctatttacacgaaagagaatcttcttaacaatgttctaagtgccattactgctgatcttaatagagatgaatgggttgctgcccttccgagagctttggctgcaggtttcattaacacagatatagattttcaacagagagcgaaaacgtcaggaactactgtaacctctgtgatattacaatgatgggttgtaacagtggcatctgttggtgattcctgctgtatatttgaatcagctgaaggtggaatatatcac

SEQ ID NO: 200586 - DNA, 407 bp, Gossypium hirsutum
gaaaagaagaagaagaagcacaaaaagcagaagaaagaggaagaaaatggggattctattgaaactgcaaatggcaaagaagactcggttcaatttgatgacaaggagaaggtggtagtgagtggaaaaaacgctgaagaagcgaaatatgcgccgttgaaatcattttctaattctaagttaccaaaaaatgttttggattgctgcaagggtttttctagcccatctcctattcaagctcacgcctggccctttttattggatggtcgtgattttattggaattgcaaaaactggatcaggcaagactttggcatttggcgtacctgcaatgatgcatgtattgaaccagcgaaatggtaaatcctcaagagggaagaatccgctttgcctcgtactttctcctac

SEQ ID NO: 200587 - DNA, 400 bp, Gossypium hirsutum
tagtcatttgcctattgagtacatacaatgcgatgtggtagatgaagaagaaacatgtgataaattatcaaagcttaacgatgtgactcatgtgttttatgttgcatgggataagagatcaactgaagatgaaaactgcgttatcaatggtactatgttacggaacgtgttgaaagcggtaatcccgaattcacccaagttgaaacatatatgcttgcaaaccggtcgtcggcattacaccggtccgattgatttgtacggaaaatatcatgctcagccccatgatcctccttttcgcgaggatcttccgaggcttaagtcgtcaaacttgtgttatacgctcgaggatgttttgttggaagaagtgaagcagaaggagaacttgacatggtctgttcat

SEQ ID NO: 200588 - DNA, 411 bp, Gossypium hirsutum
aaaaaatcttctgatttttctgagtcggtttcttatgttctgtttggctcctgagaaagtgttttaagaagaacaatgaatgcattagtggcaaccaacagaaacttcaagctagcagccaggcttcttggtttggattctaagcttgaaaagagtctcctcattcccttcagggaaatcaaggttgaatgcaccatacccaaagatgatggcacattggcaacttttgttggctttaggattcaacatgacaatgctagaggtcctatgaaaggaggaatcagatatcaccctgaggttgaccctgatgaagtgaatgcattggcgcaactaatgacatggaagacagcagttgcaaacatcccatatggtggggctaaaggtggtataggatgtaaccctggagagttg

SEQ ID NO: 200589 - DNA, 374 bp, Gossypium hirsutum
ccatttcccaaatctcctccctcctcttctttagcgtcctttggatttccgctcatgcagcgcgctttgaaatccgcaatgagtgctcctacaccgtctgggcagcagcctctcctggtggtggccgtcgcctagaccctcggcaaagttggaccatcgatgtgcctgctggcactgctatggctcgtatttggggtcagaaccaattgcaatttcgatgccagtggtaggggtcattgccaaaccggtgatacgtggtggactccttcaatgcaaaggttggggtgtacctccaaacaccctggctgaatatgcacttaaccaatttggaaacatggatttctacgacatttccttagttgatgggtttaaca

SEQ ID NO: 200590 - DNA, 294 bp, Gossypium hirsutum
ccaccctccaatcctccggatcttaacacacagttgataattgtgtgtgtgggaaaacgaaataggggattcatggaagagaggcatattctgtttgggaaatatgagatggggagattgcttgtgaaaggcactttcgccaaagtctactacgcgaaggaattaaaatcgggtgaaagcgtcgcgataaaggtcatcaacaaagctgaggttaagaaagaaggcatgatggagcagatcaagagggaaatctctgtgacgcgtcttgttcggcatccaaacgtagtggaactc

SEQ ID NO: 200591 - DNA, 425 bp, Gossypium hirsutum
cttgccaaagatggagagagaaaggtcacattggtgagcccttggctatccttaaaagatcaaaaactagtatacccaaacaacaccacctttggttcaccctcagagcaagaatcgtttattcgtcaatggctagaggagaggactgcatttatatctggtttcgtcatacggttttatcctggaaagtttgctgtagataaaagaagcattcttcctgtaggagacatctcagaaatcatccctgatgaagaggcagatattgctgtccttgaggaacctgagcaccttacatggtttcatcatgggaagagatggaaaactaaattccgccttgtcataggaataatacataccaattatttggagtatgtgaagagagaaaaaaatggacaattccaagcatttcttctgaaatatgtaaa

SEQ ID NO: 200592 - DNA, 416 bp, Gossypium hirsutum
ggcatgttcgatggtgaaccatcagctgaaccgtatgggcatctcggtccgagacatgtgtgtaccccggatcataaacaactagccttggaagctgctaggcaaggcatagttttgttgaagaactctgggtctttaccgttgtctacttcacgtcatcgtaccgtcgcggttattgggccgaattcagatgtcacagaaacaatgataggaaactatgcaggggtggcatgtgattacacgagtcccttgaaaggcatttcaagatacgtgaggactgttcatcaagcaggctgttcaaacgttgcttgcaaagcaaacaatctgtttggattcgccgaagtcgctgcccgccatgctgatgcaacagttctcataatggggctcgaccaatcgatagaagcagaattcaaggg

SEQ ID NO: 200593 - DNA, 412 bp, Gossypium hirsutum
gcgccgtcctatttgccacaaaaccctagcgtacatactccacagacattgtcgtttactctcggcatccatggatattgaggctgagatccgtgcactgcagcttgactctgctgaagataataatgccacgctcattcctgaagatgcaaaaccagaagaagttgaaatgacagataaggtggaggaggaaggtatgacggatgaggttgatactaaatctcagccagtccaggctgagccaaaagtgaaagacaaggaagtagctgatatggattgtgcagaagtaccagatgaaatggaatcacaaaagaagcgccacttgaatgtggtctttattggtcatgttgatgctggcaagtcaacaactggaggccagatactcttcctcagtggtcaggttgatgaccgt

SEQ ID NO: 200594 - DNA, 360 bp, Gossypium hirsutum
aagcagcttagtgcagaaggaaattacagtgaggaagagcttgaggagtacatgcaatctcacaagaaactgatgattgattcattatggaagcttaatgtagctgacatagaagctactctttctcgtgtttgtcaaatggttctccatgatcaaaaatgcaaaaaggaagagcttcgagcacgagcaaaagggttgaaaactcttggtaaaatcttccagagtgtcaagtcaacaaatggaaatgagagtgatcctgtgctaggcaataatgcaagacataaattagatggagttgagccaagttataacagtggttctccaaatgtatcaacaaagtccttatcccgggaagaacta

SEQ ID NO: 200595 - DNA, 412 bp, Gossypium hirsutum
atttcggggatcaaatactctttcacaaaaaggagagaatataagtaattaattaacacaactttttttcgttgttgttgaaaaagctcatcttttttttgatagttagagtgagcaatggctaagaatgtgggaattcttgctatggaaatctacttccctcctacctgtgttcaacaggaagcattggaggctcatgatggtgctagtaaggggaaatacaccattggacttggacaagattgcatggccttttgtacagaagtggaagatgttatctctatgagtttaacagctgttactttactccttgcaaaatataagattgaccccaaacaaatcggccgtcttgaagttggtagtgagactgtgatcgacaagagcaagtccattaagacctttttgatgcaaa

SEQ ID NO: 200596 - DNA, 373 bp, Gossypium hirsutum
gaagcttccttttccgttatagatctcaaaattcagaaggctggctttttcatctcatggctgctactattgtctccgtcaaagctaggcagatcttcgacagccgtggaaatcctacggttgaggttgatgtggaaatatcgaacggtataaaggctagggccgcagttcctagcggtgcatccactggaatttacgaggctcttgagttgagagatggaggttccgattacctcggtaaaggtgtatcgaaggctgatgctaatgttaacacaatcatcggccctgcattgattggaaaggacccaaccgagcagactgcaattgacaatttcatggttcaacaactggatggaacccaaaatgagtgggg

SEQ ID NO: 200597 - DNA, 379 bp, Gossypium hirsutum
ggaatctatgaccactaatccaatggcatgggaaggttcagttgacccaaaggtgaagcaaatggagcaagctcagaattgtctccttcctatgggtattacgtcagagaacgttgctcatcgctttggtgtgacaaggcaggagcaggatcaggctgcggttgaatctcacaggaaagcagctgctgctacagcttctggtaaattcaaagatgaaatagtccctgtggccaccaagattgttgatccaaagactggtgatgagaaacctgtcacaatctctgttgatgatgggatccgagctaacacatcagtgtcagatctgggaaaattgaaacctgtattcaagaaaaatgggaccactactgctggaaattct

SEQ ID NO: 200598 - DNA, 392 bp, Gossypium hirsutum
atatccttgagctttacactttaggccgtaaattaggacagggacagtttggggttacttacttatgtaccgagatttcgactgggattgaatatgcttgtaagtccatatcgaaaaggaagttgatttgcaaggaggatgtggaggatgttaggagggagatccaaattatgcaccatttggctggtcataagaatatcgtgacgatcaaaggcgcgtactaggatcctttatttgtgcatatcgtgatggagcttctcttcggaggcgaactgtttgatagaattatccatagggggcattacaccgagaggaacgcatctgattatactaagatcattgttagtgttgttgaggcttgccattcactatgagctatgcatatagatttg

SEQ ID NO: 200599 - DNA, 421 bp, Gossypium hirsutum
caacaatgtctcttcactcttctctcaccatgtcatggctgtctttctccttcttgttgctgtttacttttagtgccaaagctgttgttcctccatctgaaacttttaggtttgtcaacgacggagaatttgggccgtttgttgttgaatatgatgcaaattaccgtgtcataagcatagctaatgcccccttccagcttgcgttttataacaccacccctaatgccttcacccttgcgttacgcatggctacaacgcgttccgagtcgctcttccgatgggtttgggaggccaacagggggaaccctgttcgcgagaacgccacgttctctctcgggactgacgggaaccttgtcttggctgatgccgatggtcggattgcttggcaaagtaacactgccaacaaaggtgtggtatggtt

SEQ ID NO: 200600 - DNA, 401 bp, Gossypium hirsutum
tatcttcatttcatcgcactctccgacgaaagaaacgagagaaaaatgaccaagtgttacccaaccgttagcgaggagtaccaaaacgccgttcaaaaggctaagaggaagctaagaggtctcatcgctgagaagaactgtgctccactcatgctccgtctagcgtggcactcagctggaacttttgatgtcaagaccaagaccggaggtccattcggaaccatgaagcaacctgctgagctcgctcatgctgctaacaacggtctcgatattgcagtcaggcttctcgagccgatcaaggagcagttccctatcctttcatacgctgacttctatcagcttgctggtgttgttgctgttgagatcaccggtgggcctgaagttccattccatcctggaag

SEQ ID NO: 200601 - DNA, 329 bp, Gossypium hirsutum
gttggcaatattcagcaaagggttagtgaatccaccgcaagaggtgcagagtccagcttcactcacttcatcaatgaagcctaagcttccctttgaaatccttaatggttttgtctcttcaaatcccaccaacgctttttcaatgcggtttggatcttcggcttctttggcttatgttccaccccacaatccttcctccacttataaaaggttgtttagtggagtggatgaaatgcattgcatattcatgggtaatttgaacaatctatgtagcctcttaaggcaatatggtctatcaaggggcaccaatgaagcaatgttcatcattg

SEQ ID NO: 200602 - DNA, 392 bp, Gossypium hirsutum
  unsure (1)..(392): unsure at all n locations
tataaaaaatggctgctcctataacaatgctgattggttgtacatcttttttatcccttagtttactttctactgctttcacttctcgagattacgctgatgctcttgaaaagtctattcttttctttgagggacaacggtcgggtccgttgccgtctaatcaacgcctcaaatggaggggtaactctggtttgtccgacggtgcttcttatcacgtggaccttgtgggtggctattatgatgctggagataatgtcaagtttggccttccaatggccttcaccacaacaatgttggcatggagtgttattgaatctggcggttcaatgcatagtcagattgggaatgcanagactgcccttcgatgggccacggattatcttctaaaagct

SEQ ID NO: 200603 - DNA, 358 bp, Gossypium hirsutum
cgctttcaaagtgtgctcctatgtcagtgcggatagtttgaacatcttcgttatccataagctgactgtctactgctttcacttgtcaagaattcgctgaagctcatgaaaagtctacccttcacttggagggacaccgaccgggtccactgcctcttaatccacacctcacatggaagtgtaactatcggttagcctacggtgcttactatccctctgacctatctgacagctatactgatgcttgcactgatgtcttgattgctctcaccatggcctgaaccacaacagtgttagcatagattgagattgattactgcgtctcaacgcataatcagattgcaactgcaaagactgc

SEQ ID NO: 200604 - DNA, 403 bp, Gossypium hirsutum
  unsure (1)..(403): unsure at all n locations
ctaccacacacttgctaatattgctacttggagtgggggctctcgccactccctcttttggtacctatgagtctcccaactatgggaagccccctactcctgtttataaacctcctaaggtgaaacccccaccttatgaacatcctgtttataaacctcctaaggtgaaacccccaccttatgaacataagccccctgtctatgaaccaccaaagaaggaaaagcctgagcctaagccaccagtttatacacctncaaagaaagagaagcctgaacccaaaccaccagtatatgaacctncaaaagaagaaaagcctgagcctaagccaccagtttatacaccaccaaagaaagagaagcctgagcccaaaccaccagtatatgaaccccccaaagaaggaaa

SEQ ID NO: 200605 - DNA, 383 bp, Gossypium hirsutum
  unsure (1)..(383): unsure at all n locations
gatttaatttaagaaaaaatttccttagagcgtaagagaaaagttacgaacatgccgggtgtcaatcctgaaattgaattcccagccattgagttccgtccatcggatttgaatcgaggaaccgaaggatggaaccggttgtgcaagagggttcaagaggcttgtgagactttcggttgtttcgaggtggtatatgaaagggtatcgacgaaactccgagaggatgcgtttgggttgatgaaagaaatggttgagctcccagtggagacgaaacagaagaataatagtcccatgccttaccatgggtgggttggaccatgcaagcaggtttctgtgttgtatgaaagctttggagttggagatgcctncaactatgactctgg

SEQ ID NO: 200606 - DNA, 384 bp, Gossypium hirsutum
gtttcatctgaatattttgacttcgatttcccccgaggaacattttctcctgttgaggatgactattatttactcttggatcggtctcctcgaaaacaagttccacttgggccaaatcatcaagccaatgttccatcatggggtaggcacataaagaatattaagtttgcacagaatgaagcatctaaagctgcagatattgacaatgaagataataagatggggacatgtatcattccattgccagatttagatttgtctgctaacagcagtgataaagttggtgctggaagattcgactgtagttgcctggataggggctctttaagatgtgtgcaacagcatgttacggaggcacgaaaactactacgaaaatcccttggg

SEQ ID NO: 200607 - DNA, 245 bp, Gossypium hirsutum
gcagcttgaagatggtcgcaccttaactgatgacagtatccaataagagtccagcctgcacctagtacttcgccttcgaagtggcatgcaaatctatgtcaaaactttgactggaaagacatttaccttagatgaggacagttcggataccattgataatgtgaaatccaaaattcatgacaaagaaggaatcccaccataccaacagagattgatcttagctggaaaacaactagaagatggaa

SEQ ID NO: 200608 - DNA, 389 bp, Gossypium hirsutum
ggaacaagcagttcactatatcaagaaaatattgcgttcactctcttgatgatcttaacatacagcgagcttattcacagaggaaaatgatgatgcgattttcacttcaaaaagtgaagaatttgccggctttaaagcctcaggttttggcttctgcgagtcctcgtttctctactgctactgaatcttcttttaatcaccgtaatccttcgagggttcctaatcttataggaggtgcttttgttgattcgaaatcaacatcaaccattgatgttataaaccctgcgacacaagaagttgtttcacaaattcctttaactacaaatgaagagttcagagctgcagtggctgcagcaaagcaagctttcccgtcatggcgaaatacccca

SEQ ID NO: 200609 - DNA, 333 bp, Gossypium hirsutum
  unsure (1)..(333): unsure at all n locations
cttacgcgcaaccctaataagtttcccaacacttcggccacacctgatccggacccaactgtcccggttctctccaaagatgtcactatcaaccaaacgacacacacatgggctcgtgtgttcctccccaggcagaagccgcttgatacgaacaagttccctctcatagtttattaccatgcaagaggcttcatccactgcagtgcggcatccacgatcttccatgttttttgctcaaacatggcgttggaactccaagccatcgtcgtgtccgtcgactatcgncttgctcctgagcataagcttcctgctgcttacgacgacgcttttgaa

SEQ ID NO: 200610 - DNA, 391 bp, Gossypium hirsutum
catggcatccaatccaagattcgtgttgtccccaatgtcccaaaaccaggtattatgtttcaagacataactactcttttactggatcctaaagcattcaaggatacaatggatttgttcgttgagagatacaaagggaagaacatttcagttgttacaggtatagaagctcggggttttatcttcggtactcccattgcattggaaattggagcaaagtttgttcccttaagaaaaccgaacaagttgcctggtaaagttatttcagaagagtatgaactggaatatggaagggattgtctggagatgcatcttggagctgttgaacccggtgagcgggctttggttgttgatgacttgatagcaactggaggcactctttgtgctgcta

SEQ ID NO: 200611 - DNA, 384 bp, Gossypium hirsutum
  unsure (1)..(384): unsure at all n locations
attcgccgcacggcatcagtctcatcaagcggggaagaatgtctcacaggaagtttgaacacccaaggcatggctcccttggatttcttccgaggaagcgagcttctcgtcacagagggaaagtgaaggcatttcctaaggatgacccaagctaaccttgcaaggctacttgcttttttggcttacaaggcagcatgacacacattgtccgagaggtcgaaaaacctggatctaagcttcacacgagagagacatgtgaagctgttacgatcgttgaaacccctnctatggtgattgctggagttgatggttatgtcatgacaccacgtggtcttcgcagcttgaacaccgattgggctcaacatctgagcgaggaagtcaaac

SEQ ID NO: 200612 - DNA, 377 bp, Gossypium hirsutum
tctaaatcttgatcgatccaaaaccaaagggggaagggtagggcttttttcttacaaaagtactgggttcgaagagcataaaacgataatatgccttcgttacctctcagatcgattttgctcccattaatcccttgcttaaccccttttcatgctggtttaaattcccatcgtttgaaacatcttgaaaagagtgatcggcgtggtaatcttaattaacgttttcccctcaaaatcattagctctcttttgactcctttactttctctcctttgttcctctctgttatctgtcttcccctagatgtcgccgtttattttgaggctattaccgtgcgacacgaaggaatctagtctgctcaaaaagataaaagaaaa

SEQ ID NO: 200613 - DNA, 376 bp, Gossypium hirsutum
gtttgagggacacccattcattgtggaagctggtggtagtgtgggtggaaaagatgttaaacagggtttgaatattttccgatttgcaaatcgaattccgcttctttttgagcaaggtggtgatgttgtcacgaggactgcgctaaagagaatcagttggaataattacaagatcaaccaaacacaagataaaatcggtgtctttgtgagtattgtaagcacgaaaattccatttaaagggactggaaaggagtacatcggggatgatatcagcgaaatagctagtgctgtcaaatctgcaattcagcaatgctgcatccaactgaagtcgaaaatagtaaagaaaatgcaggcgcgagaacagcaagagaggaaa

SEQ ID NO: 200614 - DNA, 410 bp, Gossypium hirsutum
gtagctctaactacctccgcctgtctttcaacgaggggagaacaagaaaagaaactaagaaatggcacgcaagaagatcagagagtacgattccaagagattgttgaagcagcacttcaaaaggttttccgcctacgatttgcccatcaaatctgcacaagtgacggagtcaactgatttcaatgagctagtagagaaggagccatggcttttgtcgcagaaactggttgtcaagcctgatatgttgtttggaaagcgtgggaagagtggtttggttggcttgaatcttcatttcgctcaagttactgcatttgtgaaagagcgcctcggcaaagaggtggaaatgagtggatgtaaaggacctgttacaacattcattgttgaacctttcatccctcacaatgaagagt

SEQ ID NO: 200615 - DNA, 378 bp, Gossypium hirsutum
catggcatccaatccaagattcgtgttgtccccaagttcccaaaaccaggtattatgtttcaagacataactactcttttactggatcctaaagcattcaaggatacagtggatttgttcgttgagagatacaaagggaagaacatttcagttgttacaggtatagaagctcggggttttatcttcggtactcccattgcattggaaattggagcaaagtttgttcccttaagaaaaccgaacaagttgcctggtaaagttatttcagaagagtatgaactggaatatggaagggattgtctggagatgcatcttggagctgttgaacccggtgagcgggctttggttgttgatgacttgatagcaactggaggcact

SEQ ID NO: 200616 - DNA, 389 bp, Gossypium hirsutum
ggaccatgtaacagttggtgatcttgtagttaaacggcaggaatttattgaggcaacaaaggagtccagcttaacatttttgattgccaagtttgatggtatacttggacttggatttaaagagatttcagttggaaatgctgtgcctgtatggtacaacatggtcaatcaaggtcttgttaatgaaccagttttttcattttggcttaaccgcaatcctgaggatgatgttggcggagaagtggtttttggcgggatggatccaaaacattacaagggggaacacacttatgttcctgtaacacagaaaggatactggcagttcgatatgggtgatgttctgattggtgaccaaacaactggactttgtgccagtggctgcagtgcta

SEQ ID NO: 200617 - DNA, 382 bp, Gossypium hirsutum
gttgattggaagaaaaacaggcggaatatcagtttgtccatttacgtcatctatacgaggcaaggaagatcccagtagccatatcattgtccgaggcaaatcaatggctgggcgtgctgatgacctatttaatctgattaattgtgttcttcaagaagtacagtttacagaccaacaacggttcaagcagtttgtgtcccaaagcaaagccagaatggagaaccggttgagaggtggaggtcatggaattgccgcagctaggatggatgcgaaggtaaatgttgctggctggatttctgagcaaatgggtggagtcagttacctggagtttcttcaagcactggaagaaaaagcggataatgactgggcaagaatttcatca

SEQ ID NO: 200618 - DNA, 380 bp, Gossypium hirsutum
tgcaaacattacaccgcatatgatcttgataattgggatggtgtggaccgataccatttcaatgccagggttagcaagcaagacctggctgatacatatgatgtgccattcaagtcttgtgtggtggaagggaaagttgcaagtgtaatgtgttcttacaatcaagttaatggcaagcccacttgtgctgaccctgatctactcaagggtacaatccgaggtcaatggggccttagtgggtatattgtatcagattgtgattcagttggggtaatgtatgatactcaacatttcacggctactccagaagagtctgctgcagctgccattaaagcaggtttggatttggattgtggaccatttttggcaatccacacaga

SEQ ID NO: 200619 - DNA, 386 bp, Gossypium hirsutum
gaacagatctctggcctaaaacatgttgtagacgaggccaagcagcatcataatgtgaagaatgtgtatgtgtggcatgctttggctggctattggggtggagtcaaacctgcagctgctggtatggaacattatgatacagcattggcatatcctgttcagtccccaggtgtgatgggcaaccagccggatatagttatggacagccttgctgttcatggccttggtttggtgcatccgaagaaggttttcaacttctacaatgagcttcatgcctacctggcttcatgtggagttgatggtgtgaaggtcgatgtgcataacatcatcgagacacttggtgctggacacggtggtagagtatctcttacccgcagttacgttca

SEQ ID NO: 200620 - DNA, 356 bp, Gossypium hirsutum
agaaggtgctaaagccacaaccgaaaccggggatggtttgagaaccggagctgctgcaatgaacgcaatgcagaaagcaacgaatatagatgatgttgacaaaacaatggacgagatcaatgaacaaaccgaaaacatgaaacatatcctagaagcactgtcaactcctattggagctgcaactgattttgacgaggatgaattggaggcagaactcgaagagcttgaaggtactaagttagaagaacagtttctccagcctgcaacaacagctcctgcagcaccaattcatgtgcctgctgctaagcaaccggctcgagctattcctcacaagcacacagacgaagaagatgaac

SEQ ID NO: 200621 - DNA, 243 bp, Gossypium hirsutum
aaaaaatggaccatggccagcatttcttctggaatatgtaaatagttgggttgtaagcatctattggcataagggaattagggtgtccgctgtcacccaggattaccccagatccatcatctgcaatgttcatggagttaatcccaaatttcttgagataagccagggaagggtttagccacaacctatcagtattcaccaaggctttacccaaagggcttactacatttggaaaattatttt

SEQ ID NO: 200622 - DNA, 407 bp, Gossypium hirsutum
gcggcggctgctgcttctcaggcagccgcagcctccgttcccgtctctgatgacgtggcggttgtagaaggttgtattgacaacgatagtgtacagattggggattcatatgattccaagacatcgtttttgatctccgatgggagcatcactgttcatgctggtgaaagattaggtcgcggtatagttactgatgcaattactactccagtggttaatacttctgcatatttctttaagaaaactcaggagcttattgacttcaaggaaaaacgccatacaagttttgaatatgggcggtatggaaatccaacaaaatttattggtggacacaatgatgtccttgctggttgtataagtggttctgagaagttggttacagaaattcgtactttgcatcatatttt

SEQ ID NO: 200623 - DNA, 307 bp, Gossypium hirsutum
gattcagttaagggttcgcacatgtgggacatagacggtaatgagtatatcgactatgttggctcttggggaccagctataattggtcatgcggatgacgaggtgcttgaagctctggctgaaacaatgaagaaaggaaccagctttggcagtccttgtcttcttgagagtgttttggcagagatggtaatctcagctgttccaagcattgaaatggttcgatttgtaaactctggtacagaagcatgcatgggtgtgctccggcttgcccgcacctttactggccgagaaaagattatcaaatttg

SEQ ID NO: 200624 - DNA, 308 bp, Gossypium hirsutum
gcggaattctacaggaagaagcttgctaggcgacttgtttttgaccgcagtgctaatgacgatcataaaaggagtattctgactaagctaaagcagcaatgtggtggacagttcacctcaaaaatggacggcatggttacagatctgacattggcaagggaaaaccaggccaactatgaggactaccttaggagtaactcagctgctcatcctgggattgaattaaccgttactggtcttaaccacaagattctgggccaagttataaatcatttgatcttaaactttctgctgagatgggtaaatgt

SEQ ID NO: 200625 - DNA, 402 bp, Gossypium hirsutum
cacaaggtgaatatgttgctgttgagaacctggagagcatttacggtctcgtgtcagctattgattcgatatggatttacggaaacagctttgagtcgttccttgttgcggttgttaaccccaataaggaagcacttgaaagctggggtgccgacaataacgtaagtggtgacttcgagtccctctgtcaaaaccccaaggccaaagagttcatacttggggagctcgcaaagactggcaaagagaaaaagctgaaaggttttgaattcataaaagctgtccatcttgacccaatgccattcgacatggaacgcgaccttctcactccaacatataagaaagaagaggcctcagttgcttaaatattatcagagtgtaatcgatgagatgtacaagagtgca

SEQ ID NO: 200626 - DNA, 364 bp, Gossypium hirsutum
cacaatttgaatatgttgctgattaaagcgtgcattggatatactgggttgtctcaactaccgattctatattgatctacgtaaacaccttttagtcgatccttgttccaatatcataaccccaatacggaatcacttgcaagctacaattcctacaataactaacgttgttacttccactccatctatcaaaaccccttagccaaacaattcatactcgatcagctccccaagactgccatactttataagcttaaaactttttaattcataagcgctgtccatcttttcccaatcccattcctcatgtatctcaaccttctcactctatcttataataagaagaggcctcaacctcttaaat

SEQ ID NO: 200627 - DNA, 388 bp, Gossypium hirsutum
gaagaacacagattcctagaacccagaaacagaaaagcatggggtctgaaaagccagggtttatatgggtatcaaggcttttggttctaaatattcttggcttattcacagcttgaggtccttaataacaagttttttttgcaggaatcccagttaattaacctgggtaccacgaaaagcattttgaccgtcaatggcagctttccagggcctgaaattcgggttcggagaggggacacagtttttgtcaacgtccacaatcaaggaaaccatgctgtatccctcaagtgggagggcgttaaggattcaattgatggttcgaatgagctgattcagccagggagaaacttcacttacgagatagagttagaggatgaaataggaactc

SEQ ID NO: 200628 - DNA, 377 bp, Gossypium hirsutum
  unsure (1)..(377): unsure at all n locations
cagtctttggacaacgccctaaagcttaagggccaagcggcttttggggtgcattcctttactttacccaacaaccaaatcaccctaatggttcgcaacggttcaacttccttaaatgaaactggcctattcctaaataccaacacacccaattccataccctttctttccttggcggttcttaacttgccaaccagccttaacaacgggggctggggtcaaagtaaaagaccaaatggagttgccggaaccgggaaaaaaaattttcgatagctttttgaacactcttcgtcatttcaatctccaaactcagtttcgagttgctggtggatgggttcgcgataagcttcttggcanagaatgttatgacattgata

SEQ ID NO: 200629 - DNA, 391 bp, Gossypium hirsutum
ggaaattctcgaggtgacccaagttaccccaacctttaactcaccaaagtgacgactgagttccgtcttccactcactttctccgacataatctggctcaagcttcctcctagcgagcgcctcttcttttaccaattcgacgagttaacccctgcctgtttcaactcagttatccttccaaaacttaagcgctctctttccctcacactcgtccattaccttcccctcgctggcaatctcaagtggccaccaaacgaacctaaacccatcattttatacactccaaacgatggagtttccctcacagttgcccactccgatgccgactataacatactctgcagcgatggggtctatgacgctgctgagttgcatgctatcaaacctgacc

SEQ ID NO: 200630 - DNA, 367 bp, Gossypium hirsutum
  unsure (1)..(367): unsure at all n locations
tacaactccaactctaagttgaacatagccatcatggacccagatcttggcataggtggagctgagagattgattgttgatgcggctgttgaattggcatcccatgggcacaatgttcatattttcacagctcatcatgataaaaatcgatgctttgaggaaacccgtgccgaaatccaggtatctttccagttactgggtacggcgacttcctgccttgacatattttctatcgccttcatgctgtatgtgcatatcttcgctgcctttntgntgcactttgtgtgctgttcatgtggccttcgttcgatgttatactagcagaccaggtctccgttgtcgtcccgttgttgaagcttaaacgatc

SEQ ID NO: 200631 - DNA, 402 bp, Gossypium hirsutum
ccatttcccaaatctcctccctcctcttgtttagcgtgcttttcatttccgctcatgcagcgcgctttgaaatccgcaatgagtgctcctacaccgtctgggcagcagcctctcctggtggtggccgtcgcctagaccctcggcaaagttggaccatcgatgtgcctgctggcactgctatggctcgtatttggggtcgaaccaattgcaatttcgatgccagtggtaggggtcattgccaaaccggtgattgtggtggactccttcaatgcaaaggttggggtgtacctccaaacaccctggctgaatatgcacttaaccaatttggaaacatggatttctacgacatttccttagttgatgggtttaacatccccatggtgtttggtccaactaatggcg

SEQ ID NO: 200632 - DNA, 406 bp, Gossypium hirsutum
tgggaggttttgggattgggatggtgtactacggcatgccattaggccttggaaatctatccgtgaatctctatttgggcgtcacattaaacgccttatccgagttgccagcgtcactcattacattcttccttatagggaaaatgaaaaggaaagactcattgttgggtttcacaatattaagcggggtgtgcagcgtgttgtgtgtggttgtggggaaggtgtcgccaagtttacagatagcaatggagctgatatccttcttcagtgcctgctcggccttcaacatgtcactgatatacacattagagctgttccccacatgcgtgaggaactcggcaatatcaatggtgaggcaagcactggtgtttgggggggtgttcagcccactgctcgtggccgctgg

SEQ ID NO: 200633 - DNA, 387 bp, Gossypium hirsutum
ctaatcatgaactgcactggtggaataatcagaactggccttgagggaccaaaactgtcttctattcctgtaccgccatcaaacatgggtcaaaatcttagagctttggtagaatccgaagttgggtgtgatataaaggttcaagttggtgatgagacatttaaagcacataagttgatccctgctgcaacgtcacctggttttaaagcacaattttttgggctcggtggaaaaccctacttggaataaatagtagtaaaaagattttgagccttctatcttcaaggcaatgctcttgtttatttataccgacaagcttcctgatgtacaagaaattgtagactccacatctatgtgtacatctgccaacatggttcagcatctttt

SEQ ID NO: 200634 - DNA, 385 bp, Gossypium hirsutum
ggtgaacataagaaaatggagaccatgggaaaacttgtaatcctgcttacagcttttttatgcctctacctcttcgttgctttgctcaatgttttctacaagtattggtggatacctcaacgggtacagttcatcatgaattcacaaggaatcagaggacctccttatgaatttatccatggaaacaacaaagaagctgcccaaatgctcatggaagcatctaccaaacctatgggcttgacacacgatatatttcccaaaatcgtgccctaatgttactcctggaatcacaaatacgggagcactttttcttagtggaatggatttcgagctcaactgcaaattacagacccagatctggtcaaagaggtccttaaaaacagtg

SEQ ID NO: 200635 - DNA, 398 bp, Gossypium hirsutum
attgatgatcctgtaaacaagcatgctcggagggtggtgtcatcagttgcagtttatggaagtttgattgtgatgctggtatttttgccagtcaagtttgctatgaagatggcaccatctatcttcccacttgatatatcggtatctgatccatttactgagatcccagctgacatgcttctctttcaaatatgcattccatttgccattgagcattttaaattgcggacaacaatcaagtctcttctccgctactggtttactgcagttggctgggcattaggcttaacagagtttttacttcccagacctgatgagaatggtggccaggaaaatgctaatgtagaaccaggtcagctagatagaccacaaattgtgcaactaggtggacaggaaca

SEQ ID NO: 200636 - DNA, 402 bp, Gossypium hirsutum
tgggcagctcacgctaaaatctgatgttgacagttggggggtagtctttattgagcttataaccgggcgcaaggccattgataatacacgtgctccgggagagcagaatcttgttgcatgggcacgaccacttttcagagatcgtaggaagtttccaaaaatggctgacccactactacaaggtcgttatcccatacgaggattgtaccaagctcttgcagttgcagcaatgtgtttgcaggagcaagcagcaacaaggcctctaataggcgatgttgtgacagcacttacatatttagcatcgcaaacctatgaccctaatgcacctaacaatcaaagcaacagagttggtccgtcaactccaagagtcaaggatgatcgaaggagtatggcagacggtct

SEQ ID NO: 200637 - DNA, 408 bp, Gossypium hirsutum
gttaagagcttgcggtgaaaggtggaaactaggcactagatcatttagtactcaaggagcaacaactgctgatgctccacaggcacctcctcctcctccaccgcctgaaaaaacccattttggtggtctaaaagatgaagaccgtattttcaccaacttatatgggttgcatgacccttttctcaaaggtgccatgaaacgtggtgactggtatagaaccaaggatttagtactcaagggtgctgattggattgtgaatgaaatgaagaaatctggacttcgaggacgtggtggtgctggatttccatcgggcctcaaatggtcttttatgccaaaagtatctgatggtcgtccttcttatcttgttgtcaatgctgatgaaagtgaacctggaacctgtaaggacag

SEQ ID NO: 200638 - DNA, 375 bp, Gossypium hirsutum
cagatttctttcggtgatccttggtagagattaacttttggaattttgattatggggaagatccagatccggatccatggattttgaaaggttcggcctttgggttccagaggttgttttccaaaccgttattttggacctcgtggctgtaaccgaccctttaataacccctgattccttgccgtccttgtttaagtccaacagtgttcacggtcaatggaagcatcatgagcttaaggtgaaggacttaaagacccttctctttggtgaaaagcctgtcacagttttcggtatcagaaaccctgaggaaatcccatgggctgaggctggagctgagtatgttgttgagtctactggtgtttttactgacaagga

SEQ ID NO: 200639 - DNA, 393 bp, Gossypium hirsutum
accgaggaaccttgattttggttcaggaccaaatacctggtggattcaattgaaggggggaggtatgtgcaataccattaaaactggtgggtcccgaaaaaggaccaaacccggatcttttactaacatggaaaagcaaatcccatttactggaattttaagtgaaaaagcccaagaaaattccgacttttttaattggaacccagtaaaactttcttattgtgacggtgccttttttactggggacagcgaaaataagggtgcacaattgcaatttagaggccaacgtatatggttagctggaatggaagatttaatgtcaaaaggaatgcgctacgcaaatcaggctcttttttcggggtgttctgctgggggtctggcagcaattttaca

SEQ ID NO: 200640 - DNA, 329 bp, Gossypium hirsutum
agatcgaagacccggagattgtacacgggctagcagggcacagcaagaaaggtgaagattttacgttgcttaaaacagaatgccaaagagcgctaggagatggtttcaccacattctcggtttttgggctctttgacggacacaatggatctgcagctgctatttacacgaaagagaatcttcttaacaatgttctaagtgccattccggcagatcttaatagagatgaatgggttgctgcccttccgagagctttggttgcaggtttcgttaaaacagataaagattttcaacagatagcaaaaacgtcaggaactactgtaaccttt

SEQ ID NO: 200641 - DNA, 378 bp, Gossypium hirsutum
gtttgttaactgtaactgatgttgacatggctttagcgaataccgttactgtccaaatgaggcttggcatgttcgatggtgaaccatcggctcaaccgtatgggcatcttggtccgagacatgtgtgtaccccggatcataaacaactagccttggaagctgctaggcaaggcatagttttgttgaagaactctgggtctttgccgttgtctacttcacgtcatcgtaccatcgcggttattgggccgaattcagatgtcacggaaacaatgataggaaactatgcaggggtggcatgcgattacacgagtcccttgaaaggcatttcaagatacgtgaggactgttcatcaagtaggctgttcaaacgttgcttgca

SEQ ID NO: 200642 - DNA, 395 bp, Gossypium hirsutum
attgagactacctcttgagtcagaccaaggtcttctgaaagtcatttatgctggtgtaaacgcaggtgatgtgaactttagcgcaggccgttattttcaaggaaccaagaaagaccctggatttgaggcagtgggaataattgctgccattggagattctgtaagaaatttggaagttggaactcctgctgcagtcatgactattggatgttatgctgaattcatgaaggttccttcaaagcaaatacttccaattccaagacctgacccggaagttgttgctctgcttacttcaggattaacagcatcaatcgctttggaagagcttggtcagatgaaatctggaaaagttgtccttgtaactgctgctgctggagggactggacaatttgcag

SEQ ID NO: 200643 - DNA, 388 bp, Gossypium hirsutum
gaaaggttcgagaaagaagctgctgagatgaacaagaggtcattcaagtatgcttgggtgcttgacaagctcaaggctgtgcgtgagcgcgggatctccattgatattgccttgtgggaatttgagaccacgaaatactactgcactgtgattgatgcacctggacaccgtgactttatcaagaatatgatgactggtgcgtcacaggctgactgcgctgctttgattattgattgcaccactggtggttgtgaggctggtatcttcaaggatggtcagactcgtgagcacgcattgcttgcttgtaccctcggtgtgaagcaaacgatttgctgttgcatcaagatggatgccactacccctaaatactcgaaggctaggtatgatg

SEQ ID NO: 200644 - DNA, 404 bp, Gossypium hirsutum
agagaagggaaaaagggaaggtgcctgctttccgtcattcccgattccatggcttgtaaaatctcaaattccctgttcctttgcttgggtcctagtcaaaggccaattaggagccaaacaattgctattcattcttctactgcaagtatctgtcatttgaattgggacaatcttcttgttaagggaattaaccataggaagggtataattcccttaagaaggaataaagtcatacaagctgtggcggttccagtaagaccatcttcagcagacagtgctgagtacagaaaacagttagcggaaacttatggattcaggcaaattggagagcctcttcctgataatgttacattaaaggatgttatagacacccttccaagaaagtgtttgagattgacgatgtg

SEQ ID NO: 200645 - DNA, 405 bp, Gossypium hirsutum
aaagattctttgtagcctttacttaatttcctgagagcccacagatataaagggcatgcattgatgttgaatgatcggatacaaagtataccccgacttcaagctgctttggctaaggcagaagatcatcttgctaagctttcacctgatgcaccatattctgagtttgaatacgaattacaaggaatgggttttgagagaggatggggagatactgcagctcatgttctggagacgatgcatcttctcttggacatccttcaggcacctgatccctctatattagagacattccttgggagagtgcctatggtgtttaatgttgtcattctgtctccacatggatacttcgggcaagcaaatgtattaggtttgcctgacactggtggtcaaggtggttatata

SEQ ID NO: 200646 - DNA, 407 bp, Gossypium hirsutum
ggaaaaccaactaaaacccatccctatttccacccgccctccgcctccccgcttcgcctacctcatctccggctctgccggcgactgtcggatgcttaagaggactcttttagccctttaccatcctttgaatcaatacgtggttcatcttgaccgggaagctagctctgaagagaggctcgatctggagaagttcgtgaaggatcatccagtgtttaacaaagtagggaatgttaggatgattgtgaaagctaatttggtcacttacagaggccctactatggttgctaatacgcttcatgctgctgcaattttgttgaaagaaggtggagattgggattggttcattaatcttagtgcttctgattatccccttgttacccaagatgatttggtgcacacatttt

SEQ ID NO: 200647 - DNA, 172 bp, Gossypium hirsutum
ctgaaacagcttcagctcaactaatacaaggttactgggctaaaacctgtgccaatgtagaatccattgtaagaaacaccgctactcataaattcagacaaacttttgtcactgtccccgcaactatccgcctcttcttccatgattgctttgtccagaattgagatgctta

SEQ ID NO: 200648 - DNA, 406 bp, Gossypium hirsutum
tacaaacaagagagttaaagatattgaggtttgtgggccaattgtttatggaactattgctttttatctcggtcgaaaggctagtgagtcgcaatcacataagtggactgtttacgtgcgtggggcaacaaatgaagatcttggagcagtgataaagcatgttgtatttcaacttcatcccagtttcaataaccctacaagaattgttgaagcaccaccttttgagttatcagaatgtggttggggtgaatttgaaattggcattagcattttcttccatagtgatgtttgtgacaagcatttggatttgtgagttgtttatttggttgctcacttgatttgatgccttgtttactaactaggctctgtatttgtaggtatcacatgttgaagttggatcctgaaa

SEQ ID NO: 200649 - DNA, 390 bp, Gossypium hirsutum
aattgaatgggtctgtaataccttcagaacgtccaagtcatatgatgttggagatgtggaatccccttggaattgttggtgtaattacggcatttaatttcccatgtgctgttcttggatggaatgcctgcattgcactggtgtgtggaaactgtgttgtttggaaaggtgctccaaccactcctctggttacaatagcaacaacaaaattagtggctgaagttttggaaaagaataacttacctggtgcaattttcacatcattttgtggcggtgctgaaattggggaagcaattgcaaaagatcgacgcattaatctagtttcatttacagggagttcgaaggtgggtgtaaaagtacaacaaacagtaaatgagagggttggtaaat

SEQ ID NO: 200650 - DNA, 405 bp, Gossypium hirsutum
agaaagaaaaggctttaaaggaaaaggagactggaaatgatgcttataagaagaaagacttcgagacggctattcaacattacaccaaagcaatggagattgatgatgaagatatttcatacataaccaatcgggctgctgtttatttggaaatgggcaagtatggagactgcattaaggattgtgagaaggctgttgaaagaggtagagagctcagagcagactataaaatgatagcgaaagctttgactaggaagggaactgctttggtgaagatggcgaaatgctcaaaagattatgaaccagccatcgagactttccagaaagctcttactgagcatcgcaatcctgacacgttgaagaaactaaatgatgctgaaaaagccaagaaagaactagagcagc

SEQ ID NO: 200651 - DNA, 302 bp, Gossypium hirsutum
  unsure (1)..(302): unsure at all n locations
agtttcatgattatcagccctcttncgggaaaattgctgaggcaactgaaaaatcaggccttgttcttctcgacctctctcacaaccggttttctggtaaaatcccattgaagatcaccgagctgaaaagcttgcaagcattgtttctttctcataatcttcttacaggggaaatcccagcaaggattggaaatttaacttatctccaagtggtcgatctgtcgcataactccttatcaggttcaattccattagatattgntgggtgttttcagttacttgcattgatactcaacaacaac

SEQ ID NO: 200652 - DNA, 383 bp, Gossypium hirsutum
agaaaccttgaagttgaaggtccattttggcagttgggtaaaccgaatgtggctggaaaatgactcttggggttcatcaactcataaccattggctggacactcatggcacaatggagccattcgtgattgcaacgaaccgacaacttagtgtagttcatccaatttataagcttctctatccttactttcgggacacgatgaacatcaatgcttttgctaggcagattctgattaatggaagtggtgtcctggaattaacagtttttcctggaaagtatgcaatggaaatgtcatctataatttacaagagttggaatttgtttgaccaggcacttcttagagatctcaagaaaagaggagttgcagttgattataagagtt

SEQ ID NO: 200653 - DNA, 406 bp, Gossypium hirsutum
gaagagttcaaagaagcaccaaatttacagcaaggaattccaggctatgttagatggtttagatgaagaagacagcttagaagaaggtggtcaagcaacagagaagaaaaggcgtttatctatgcatcaagttaaggctttggagaagaatttcgatgtgggaaacaagttagaaccagagagaaaagtgaagttagctgaagaattggggttacagccaaggcaagtggctatttggttccaaaaccgacgtgctcgttggaagaccaaggtgttggagaaagattatgcaatgcttaaagctaattatgatgctcttaagcttgatcatgacaatcttgaaaaagaaaaactgggtctaattgcaaagttagtgtttatatttcaaaccccattttttagtttt

SEQ ID NO: 200654 - DNA, 384 bp, Gossypium hirsutum
ggaagtgaagaattggcacttgttcttctgggttgctatcggattgtgggctggactcattatcggttatactacagaatattatactagcaatgcttacagtccggtgcaggatgtagcagatgcttgcaggacaggagctgcaacaaatgtgatttttgggttggctctgggatacaaatcggtcattatccccatatttgccattgccatcgctatttacgtgagctttagcttggctgcaatgtatggaatcgcggtggccgctttggggatgctcagcactatagccaccggtcttgcaatcgatgcatatggtcccataagtgacaatgctggcggtattgcagaaatggccggaatgagtcacaagattcgcgaaag

SEQ ID NO: 200655 - DNA, 376 bp, Gossypium hirsutum
atttgcatgagaatcaaatacaatttgcactggaaaggggtatcccttcaacacttggtgtgttgggaacaaaaaggcttccttatccaagcagatcatttgagttagctcattgttcacgatgccgaattgactggcttcagagagatgggattctcctattggaactcgatagattactgagacctggagggtactttgcatattcttctcctgaagcctatgaacaagatccagaaaatagaaagatctggaatgctatgtacagccttttgaaaagaatgtgctggaaagttgttgcaaagagaggccaaactgtgatgtggtctaagcctctgagcaatagctgttacttgaagagagatcctgggactct

SEQ ID NO: 200656 - DNA, 402 bp, Gossypium hirsutum
cattgattattgttccaacctcaaaagcgcaagcaatacagagaagtggacgtgcagggcgtgaaggacctgggaagtgtttccgtctctatcctgagagcgagtttgaaaagcttgaggattcaaccaagccagagattaagcgttgcaacctctcgaatgtcattttgcagctcaaggccctgggtgttgatgatatatttgggtttgacttcatagagaaaccctcaaggacagctattaaaaagtcattggaggagttgctcttgctaggtgctttaactgatgaattcaaactgtcagatccagttggtcgtcaaatggctcggctcccattagatcctgttcattctaaagctttcatcctagctagccagttcaagtgcctggatgaaatgttaa

SEQ ID NO: 200657 - DNA, 339 bp, Gossypium hirsutum
tactgggggttttaacctgactggtatcccaaaaaccttgaaggcttacattgtaaccaccactttaccaaccacccttggttgttggaaccaaagggattccttgtattggccagttccctacctggccttttcgaaatcttcttcttggaagaaaaattctaatcgtagatgacaccaatgtgaatctaaaagtagctgctggtgcattgaagaaatacggagcagatgtggttagtgctacaagaggaatagaagctattgagctgctcacaccacctcaccagtttgatgcctgtttcatggatatccaaatgccggaaatggatgggttttgag

SEQ ID NO: 200658 - DNA, 420 bp, Gossypium hirsutum
ctacaatagggaattgaatcccccttcatcttattgcgcttcggatccagattacccttgtgctcctggtaaacaatattttggccggggtcccatgcaactttcttggaactacaactacgggcagtgtggaagggccataggggtcgacttgttaaacaacccagacctgctatcaagtgatcccacaatttccttcaagtctgcgttttggttttggatgactccacaatcactcgaagccattcttgccacaatgtgatcatcggagcatggtcaccctccagtagcgatcgggcagcaggtcgggttccagggtatggtgtgatcacaaatattatcaatggaggccttgaatgtggtaagggttggaatgcacaggtagaagaccgcattgggttctataagaggtattgtgac

SEQ ID NO: 200659 - DNA, 407 bp, Gossypium hirsutum
cctgcttctgctgatatcaagtctgctgaagatgccagtaattttattgatgaaaagaagatagtaattgttggggtgttccccaaattctccggtcaagagtttgacaactatatggctcttgctgagaaattgcgtcctgattatgaatttggtcatactttggatgctaagtaccttccccgtggcgagtcatcagtgactggccctgtcgtcagacttttcaagccttttgatgaactctttgttgacttcaaggattttaatgtggaagctctagagaagtttgttgaagaatctagcattcctcttgtgactctctttaacaatgacccaagcaatcaccccttcattatcaaattctataacagtccccttgcgaaggctatgttgtttgcaaatttgac

SEQ ID NO: 200660 - DNA, 355 bp, Gossypium hirsutum
caaggaaccttgggccgttggaaaaaccaggagaattttcggggatgggacgggatgaacggagaaagcagtggatccttttgctaagaaggatcggtacgatatcaaggctccttcaattttcactaccagaaatgtgggaaaaactctcgtcaaccgtactcaaggtaccaagaatgcttctgaaagactcaaacaccgggtggttgaaggttttcctggctgatctttaaggcggagaatgaggatcattgcttacagaaagatttcgttgaaaagctgaataaggttcaagggaaaaaatgttttgacccaatttctggggaatgaattttacaactgacaaactgaggtc

SEQ ID NO: 200661 - DNA, 403 bp, Gossypium hirsutum
attgcaatggccacaaacagtcgtagaacatatggtgttctattcgactggctataccctgcgcacatgccacttatcttgaaaggcattactcactggactgacgcaccagaggttaccactccgttgttaaaattcatggctgagtttgtcttgaacaaagcacaacgcttgacatttgactcatcttctcctaatgggattcttcttttccgtgaagtcagtaaactaattgtggcatatgggacaaggattctatctcttcctaatcctgctgatatatatgccttcaagtacaagggaatatggatttcactaactattctggcaagaggtcttgctggaaattatgtaaactttggtgtttctgaactctatggtgatagggcactctccgatgcac

SEQ ID NO: 200662 - DNA, 411 bp, Gossypium hirsutum
ccaatgccaagcttctatcaggaacctacacctccggaggtggaattaaagaagataccacctacaagagctaaatctccaaagcttggtcggaggaaaagctcaactccttcagacattgatggtaacagcaataacaatcaccaaccaggccggctaagtctggatgagaaagcatctcagagcatctctgccaaagtgatttctcctgtccatgcgaagaagtcacagaggaaatcacttcccaaactgccttctcagaagacaagtttgtccggtgcaaaaaatgaggaacagaaatccaaggagtctgatcaggaaacgacaactaaaccgaaagcaacatctaaagtaacaagggaggagagtaccgcatcatcttatttgaaaaatgaagaatcatctccaatt

SEQ ID NO: 200663 - DNA, 379 bp, Gossypium hirsutum
ctctctcagaaacaagaacaaaagcaaaactctccctaaatcttttgtttctttttcttcagcagtgataatggttgagcctgcaacagcaacccaagcagcagctccggtgatgcctcagctgaaagatgagcttgacattgtgataccaactataagaaacttggacttccttgagatgtggaggccattttttcagccctaccatctcatcattgttcaagatggcgatccttcaaaaaccatcaaggtccctcctggttttgactatgagctttataacaggaatgatatcaacaagattctgggtcccaaggcttcttgcatttccttcaaggactctgcttggccgtggttttggttacatggtgtctaagaa

SEQ ID NO: 200664 - DNA, 372 bp, Gossypium hirsutum
atccaagacaaggaagggattccaccagatcagcagaggttgatttttgccggaaagcagctcgaggatgggaggacacttgcggattataacatccaaaaggagtcaaccctgcacttggtgctgcgactgcgtggtggaatgcagatttttgtgaaaactttgactggaaaaactattacattggaggtggagagctcagatacaattgataacgtgaaggccaagattcaggacaaggagggtatcccacctgaccagcagaggttgatttttgctggaaagcaactcgaggatgggaagacgcttgcggattatagcatccaaaaagagtcaaccctgcacttggttctgcgccttcgaggagggatg

SEQ ID NO: 200665 - DNA, 261 bp, Gossypium hirsutum
  unsure (1)..(261): unsure at all n locations
gcttcaacttatgcatttcattttgccagtcagtatttggtagagaaatattcagagatgaagaagacacatgatgaacaactggttggagatgtgcatgctctttctgcaggcctgaagtcctatgtgacatcatttacagcanagtcattgagtacctgcagggaagcctgtggaggtcatgggtatgctgctgtcaaccggtttggtaccttgaggaatgatcatgacattttccagacatttgaaggagacaataca

SEQ ID NO: 200666 - DNA, 402 bp, Gossypium hirsutum
ctttactttaaaaggcatgacgggcaagcagtaacttgcgaagacttctttgctgccatgaaagatgcaaatggtgcggattttgctaacttcttgctatggtattcacaagctgggactcctgtagtaaaagttacttcatcctacaatgctgaggctcatactttttctttgaagtttagtcaagaagtacccccaactcctgggcaacctgttaaagaaccgatgttcattccagtagctgttggtctactggactcaagtggaaaggacatgattctatcttctgtgtatcacaatgggacattgcagtctgttgcaagcaacaatcaaccagtcctcagcactgttcttcgagtaactaagaaagaagaagaatttgtgttttgtgatatattcgag

SEQ ID NO: 200667 - DNA, 329 bp, Gossypium hirsutum
gttttaatcttctgtttctttttaaagttatttatagctcgagcttatgaaaaaaatggcggaaaaaggtaaaaccgatcatccggctttgcttcatggaaaatacgagcttggtcgaatgttgggtcacgggacttttgccaaagtttaccatgcacggcatgttacgacggggaagagcgttgccatgaaagttgtgggcaaagaaaaagtgatcagagtcgggatgatggaacagatccagcgagagatttccgtcatgaatatggtgaagcatcccaacctagtccagttgcacgaaataatggcgagcaaattcaagatttact

SEQ ID NO: 200668 - DNA, 352 bp, Gossypium hirsutum
agaaattgcaatgggtgaagaaactgagtgttgcagagcataaggaccaggatatgaaactccactgaaagccatgtctggtcctaaagaagctcttctttatgttacttgtgtttatactggaacaggaagagagaagcctgatttcttggcaacggttgatgtagatccgaactcaccaacttattctaaagtcatccacaggctatctatgccgtatgtaggtgatgaactacatcactctgggtggaatgcttgcagctcttgccatggtgatccgtcggccgatcgacgttttctgatccctacttcattggtatcgggtcgtgtctatgtgattgacacacaaaag

SEQ ID NO: 200669 - DNA, 406 bp, Gossypium hirsutum
  unsure (1)..(406): unsure at all n locations
ggggtaacttggatcctaatgagctggccactgccaaagaagggcagcggaaagattttcctaacggtattgctgaatgtggtgctgatgctctccggtttgctcttgtttcctacaccgctcagtcagataaaatcaatttggatatcctaagagtggttggctatcgtcaatggtgcaacaaattatggaatgctgttcgttttgccatgagcaaacttccggatgactatactcctccatcaaccataaatcctgagacaatgcctttcagttgtcgctggatactctcagtgttaaacaaggctatatcgaagaccgtattgtcattaaattcatatgaatnntctgatgctacgaccagtgtgtattcttggtgcagtatcagttctgtgatatttcatcg

SEQ ID NO: 200670 - DNA, 419 bp, Gossypium hirsutum
  unsure (1)..(419): unsure at all n locations
cgaagacgtggcaaaatacgaggtgcaaggcagagatattagcccaccctttgtacgagcagctactgtcggcgcacgtgtcgtgtcttaggatcgccacgccggtggaccagctcccgaggattgacgctcagctggatcagtcgcagcacgtggtggccaagtactccgctctcggcggcgcagcccagggcttggttgcggacgacaaagaactcgatcagttcatgacgcaatatgttgtattgctatgttcgtttaaagaacaattgcaacaacatgttcgggtccacgcaatggaagcagttatggcatgctgggaaattgaacaatccttacagagcttaacaggagtntcaccgggggaaggtacggggggcacaatgtcagatgatgatgaagaccagtggaaagtgatg

SEQ ID NO: 200671 - DNA, 312 bp, Gossypium hirsutum
tgaatgttaagatgattactggggatcagctggcggttgccaaagaaactggcatgaggcttggaatgggaacaaacatgtacccttcatcttctttactgggccaagacaaggacgcttacattgctgcccttcctatagatgaattgattgagaaggctgatggattagcaggagtgtttccagaacacaagtatgaaattgttaagaggctacatgagagaaaacatatttgtggtatgacaggagatggggtcaatgatgccccatgctgtaaagaacgcagacatttgaattgctgatgctgatgct

SEQ ID NO: 200672 - DNA, 355 bp, Gossypium hirsutum
gttccattttccctaacaaacctgcatcagatccgatcagatttaactcagatccatccgtatcgggtcttctaaattccagatctttacttttctcgagtaaaggaagaaagaggaagggagagatgagagagattattagcgtccacattggccaagctgggattcaggttgggaattcatgctgggagctttactgtcttgaacatgtaatccaccccgatggaacaatgccgagcgacacctcaatgggcgtcgcacacgatgctttcaacactttcttcagcgaaacgggttcgggaaagcatgtgcctagagctgtctttggtgatctggaacccactgttatcgatga

SEQ ID NO: 200673 - DNA, 363 bp, Gossypium hirsutum
ttccattgagtgctgttgaaaaccagaacttagtggctgcaccttcgaactttcgactatcctggtatcatggacccaatctgttagacgcgattgattccttccaacctcctactagggagttttcaaagcctctaattatgcctatatgtgatgttataaagtcaccttcacaggggcaggtgtctgcatgtggcaagttggaggctggagctgtaagaagcggatcaaaggttttagttatgccatctgcaactatagcaaccgtgcgttccttggagcgtgattcccaagcttgcccaattggaagggctggagataatatagctgtcagcctgaatggaatagacggaaaccatgtga

SEQ ID NO: 200674 - DNA, 349 bp, Gossypium hirsutum
  unsure (1)..(349): unsure at all n locations
cctgggagaaacttcaacttgctgctcgtgttattgttgccatcgagaaccctcaggacatcattgtccaatctgcaaggccatatggtcagagagctgtactgaagtttgcacaatacactggttgtcatgcaattgctggaaggcacactcctggtaccttcactaaccagctccagacatcgttcagtgagcctcgtcttcttatcctcacagatcccaggactgaccaccagcccatcaaggaagcagctctcggaaacattccaaccattgctttntgtgatactgactcaccaatgcgatatgttgacattggtatccctgccaataacaagggaaagcacag

SEQ ID NO: 200675 - DNA, 357 bp, Gossypium hirsutum
  unsure (1)..(357): unsure at all n locations
cattccattgctttctttctgattcaatcttcaatgagtgcccaatatggctgggaaattaactacaggaaatatcactggtattgagaaactgcatattgctggtggagctgaagatcgtactgctattacaaacggcaacgctgcaaagaataaacctctaggtgtttgcttcggtgaattgttgatcgactttgtaccgacggttggaggggtttctctggctgaagcacctgctttcaagaaggctcctggtggtgctcctgcaaatgtggctgttggggtatcacgattaggaggatcatncgctttcgtatgaaaggtacgtgatgatgaatttggctacatgttagctgg

SEQ ID NO: 200676 - DNA, 221 bp, Gossypium hirsutum
gagatttgccgtctttttgatcaaaatttcgtagagcatttagatgaggtgcgtactagtggtgataaggtttacaatgttttcgacaaccaacttcctgctgctttgaaaagggtgcaatttgacagacaactatcaatggagaatattaagaagctcggtactgaagctgttggcttataacccacattaattggttcctgaccagggttttcatcgtt

SEQ ID NO: 200677 - DNA, 209 bp, Gossypium hirsutum
ccaactggaagccgatcagctcaatgtgccgactggcacccatggcgtggtgtatgatgtggattactcaataacgcaccagcagttcacgatctttacactggcactaccagttaataaacttactgattatgttgatcagacagtcactgaagctcaggactactactataaatgaggcgatagcggataggcgtacctaacatatg

SEQ ID NO: 200678 - DNA, 404 bp, Gossypium hirsutum
ggcatttgctttaattcagttgttcagtatcatcatccttatgtcccatgttgcctggcaaatcttccttctcttccttgccatcctcagtatctccttctggtatcagaactattatattacgactgctagggagctagccaggatggttggaattagaaaggctcctattttacatcatttctcagaatctatcacaggcgcaacaacaattcgttgttttggccaggaagacaggttcatggagaaaaacttgagcttaatcgatgattactctcgtgtagccttccataactccagcacaatggaatggttgtgtgttcgaatcaattttcttttcaacttcgttttcttcctggtgttggtcatcctggttagctttgccgcgtctgctattgacccta

SEQ ID NO: 200679 - DNA, 404 bp, Gossypium hirsutum
  unsure (1)..(404): unsure at all n locations
gaagcatggccgtcgggaagaacaagaggatttccgggggaaagaagggaggaaagaagaaggcagcggatccttttgctaagaaggattggtacgatatcaaggctccttcagttttcactaccagaaatgtgggaaaaactctcgtcacccgtactcagggtaccaagattgcttctgaaggactcaaacaccgtgtgtttgaggtttccctggctgatcttcaaggtggtgatgaggatcatgcttacagaaagattcgtttgagagctgaagaggttcaaggaaaaaatgttttgaccaacttctggngaatgaattttacaactgacaaactgaagtctttggttcgtaaatggcanaccctgattgaagctcatgtngacgtgaagaccaactgacat

SEQ ID NO: 200680 - DNA, 289 bp, Gossypium hirsutum
  unsure (1)..(289): unsure at all n locations
ctcttacattacctacaaaatctttgctttcccttttttgtttttttgccaatggcttcttcaccaaaattcatctcttacttcttccttttagccctcttctccgttgaaatacatggtagggatttttttagcaaaatcccaagtgttaacacaaatgagaaagaggtgaccaacaaagaagaacaaaccactttggggaagaaggagcaagagccaaggtttgtccccgagacccanaatggctatgggctttacggtcacgagtctggtcagctccctcctagca

SEQ ID NO: 200681 - DNA, 373 bp, Gossypium hirsutum
atttcctttgccgcccctagggttttattacattggccacatggcttctgcagatgtcgagtaccagtgcttcgtcggaggtctcgcatggaccatcaacgaccgtgctctcgaagaagccttcagtgcttacggcgagatcgtcgattcgaagatcattaacgatcgtgagactggaagatccagaggctctggcttcgttactttccgtgatgagaaatctatgaaagatgctattgaaggaatgaacggtcggagtctcgatggaaggaatataaccgtcaacgaagcacaatctcgccgaagcggctgcggcggcggtggtggaggatttggaggaaacggtgggtacaaccgtggaggctgtggatat

SEQ ID NO: 200682 - DNA, 366 bp, Gossypium hirsutum
gagcaggtagggagaatctgagagctgctaagaaggagttcaacaaaacagaagatgatttgaagtctcttcagagtgttgggcagatcattggtgaagttctcaggcctcttgataatgaacgcttgattgttaaagcaagcagtggccctcgttatgttgttggttgccgcagtaaagttgataaggagaaactgacttcaggaactagagtggttcttgacatgacaacacttactatcatgcgggcacttcctcgtgaagttgatccagttgtttacaacatgttgcacgaggatcctggtaatgttagctactcggctgttggtggtttatctgatcaaattcgagagctgagggaatcta

SEQ ID NO: 200683 - DNA, 387 bp, Gossypium hirsutum
ctaatcatgaactgcactgttggagtagtcagaactcgcgttgagggaccaaaactgtcttctattcctgtaccgccatcagacatgggtcagaatcttagagctttgttagaatccgaagttgggtgtgatataatgtttcaagttggtgatgagacatttaaagcacataagttgatccttgctgcacgttcacctgtttttaaagcacagtttttcgggctcgttggagaccctaacttggataaaatagtagtaaaagattttgagccttctatcttcaaggcaatgctcttgtttatttataccgacaagcttcctgatgtacaagaaattgtagactccacatctatgtgtacatctgccaacatggttcagcatcttttg

SEQ ID NO: 200684 - DNA, 345 bp, Gossypium hirsutum
agaaagaggggattttccttatagagatagatcgggtactgaagcctggaggttattttgttttaacctcaccaacaagtaagccacaaggaagttcaacaagtatgaagaaaagaaacatgttaacaccactggaacaatatactgaaaaaatttgttggagtcttattgctcagcaagatgatactttcatctggcagaaaacagccgatgctcattgctattcttctaacaagaagaacgatgtacctctttgcaaagaaggatatgatgcaccctattatcaggccttggtaccatgtatttctggaacttccagcaaacgctggattcctattcagaaca

SEQ ID NO: 200685 - DNA, 410 bp, Gossypium hirsutum
cagttgtaaaagctgcagttgatgaaagattaagggggcttcaaatttggagggaatcacagggccgggcatctaagctatatggttttaagcatgattctatgtcatcgcttaggaaaacaagtaagacaggagaattggttgattcaaaaactaatggagatctttcacgttccaagtccgaatcaatgaatgaggatgaaaatcttctttgtctgacaggagatgctaagtcggattctgttccagatcttcaacagcaggttgtagggttaaaggtcgagttgtgcaggttgctggacgagaaaagatcagctgttctcagatctgatgaactggagacagcattgatggagatggttaagcaggacaatcgacgccaattatgtgctagggtagagcaattagag

SEQ ID NO: 200686 - DNA, 332 bp, Gossypium hirsutum
ggaagttactactttacctagtgatggcagacggggaccagagtgacaagaatattgagatatggaagatcaagaagcttattaaagcacttgaagccgctagaggcaacggcaccagcatgatatctatcataatgcctgcacgtgatcagacttcaagggataccaagatgctgagagatgaatcaggaacagctgctgacatcataagcagagtcaaccgtcaatctgagttaggtgcaatcacatatgctcagcagaggctcaaactgtatagtgaggttcctgccaacggacttgagctctacactggaacaattgtgactgatgat

SEQ ID NO: 200687 - DNA, 298 bp, Gossypium hirsutum
cgaagttactactttacctagtgatggcaggggggggccagagtgacaggaatattgagatatggaagatcaagaagcttattaaagcacttgaagccgctataggcaacggcaccagcatgatatctatcataatgcctccacgtgatcagacttcaagggataccaagatgctgagagatgaatcagtaacagctgctgacatcataagcagagtcaaccgacaatctgtgttaggtgcagtcacatatgctcagcagaagctcatactttataggatggttccttgcaacggact

SEQ ID NO: 200688 - DNA, 413 bp, Gossypium hirsutum
  unsure (1)..(413): unsure at all n locations
gaagcatggccgtcgggaagaacaagaggatttcgaagggaaagaagggaggaaagaagaaggcagcggatccttttgctaagaaggattggtacgatatcaaggctccttcagttttcactaccagaaatgtgggaaaaactctcgtcacccgtactcagggtaccaagattgcttctgaaggactcaaacaccgtgtgtttgaggtttccctggctgatcttcaaggtggtgatgaggatcatgcttacagaaagattcgtttgagagctgaagaggttcaaggaaaaaatgttttgaccaacttctggggaatgaattttacaactgacanactgaggtctttggttcgtaaatggcaaaccctgattgaagctcatgttgacgtgaagacaactgacaattacactttg

SEQ ID NO: 200689 - DNA, 397 bp, Gossypium hirsutum
  unsure (1)..(397): unsure at all n locations
gccattggtgattgaatggagtttgccacattcggatggggatcaactaggtgctgttagcaaggtttacacacctacagaacatggagttgaaggttcaatatggcagttggctaaagcttatgttgctgtaaatgactctggtgttcatcaactcataagccattggctgaacactcatgcaacaatggagccattcgtgattgcaacgaaccgacaacttagtgtagttcatccaatttataagcttctctatcctcacttccgggacacgatgaacatcaatgcttttgctaggcagattctgattaatggangtggtgtcctggaattaacagtttttcctggaaagtatgcaatggaaatgtcatctataatttacaagagttggaattgt

SEQ ID NO: 200690 - DNA, 395 bp, Gossypium hirsutum
  unsure (1)..(395): unsure at all n locations
gcggaattctacaggaagaagcttgctaggcgacttctttttgaccgcagtgctaatgacgatcataaaaggagtattctgactaagctaaagcagcaatgtggtggacagttcacctcaaagatggagggcatggttacagatctgacattggcaagggaaaaccaggccaactatgaggactaccttaggagtaactcagctgctcatcctgggattgatttaacagttactgttcttaccacaggattctggccaagttataaatcatttgatcttaatcttcctgctgagatggttaagtgtgtggaggttntcaaaggattttatgaaacanaaacanaacacagaaagcttacctggatttactncttgggaactngccacattaatgg

SEQ ID NO: 200691 - DNA, 324 bp, Gossypium hirsutum
ctaaactagtgatccccccggcctcaaggattccggaccagcccccatggcttaattccattttttggggccttccgggaaaaatcggggggattttcgcctggttttcctggatcgaaaggaaaggttaacagatttgcctcttgacgatggagtccgtgatctattgaggggctgtgaaaagcttagaagatttgctctgtatcttcgacctggtggtttaaccgatgtgggacttggttatattggacaatatagttcgaaagtaagatggatgcttctgggatatgttggggaatctgattcggggcttttggagttctc

SEQ ID NO: 200692 - DNA, 355 bp, Gossypium hirsutum
  unsure (1)..(355): unsure at all n locations
agagaaaggtaaaagggaaagggcctggttttccgtgttgccgaatccatggcttgtaaaatctcaaattccctgttcctttgcttgggtcctagtcaaaggccaattaggagccaaacaattgctattcattcttctactgcaagtatctgtcatttgaattgggacaatcttcttgttaagggaattaaccataggaagggtataattcccttaagaaggaataaagtcatacaagctgtggcggttccagtaagaccatcttcagcagacagtgctgagtacagaaaacagttagcggaaacttatggattcaggcaaattggaaagcctcttcctgataatgntacattaa

SEQ ID NO: 200693 - DNA, 333 bp, Gossypium hirsutum
  unsure (1)..(333): unsure at all n locations
ctccattgcatcattgcaacatactgacacagacgggattaatcacaacgtcgttaaacagcttatcatgagttcggtggtggaactctccatatcaaggttaagcaaagcccatanagttggaccggtgtcctggaatctnttatctcttttgcaactccatatcgtgtaacttgggattattattttctatctcgggagcataccctcgaaattgacaagtgggaagacagaactgagtatgaatatgtgaaaaacaaggngatttctattttcctgatgcaagcagggatgcttggaacacttgaagctttatgggaagtcttcccatta

SEQ ID NO: 200694 - DNA, 393 bp, Gossypium hirsutum
ctttattccatcattgcaacatatttacacatactgaaaatatccacaccattttaaaaaagcttaacatcaacctgcattaaatgggctccctccaaccttggccgcttcttctccttccaagatatccttgatccaaccaacaaattagatgagagcctactttttaaacttggtggttaccgaagagtctacaccgacactcttgaacatgagactaaagttgctgtaaaaataggtaatccaaaatccgaacaatgtcttgctgaatttcgcacctaattcaaaatactatctaaacttcaccatctacacattgtctctcttattgtatattgtcatcaaatatccactatgattcatgattacaaatatattgctaatggacccctt

SEQ ID NO: 200695 - DNA, 389 bp, Gossypium hirsutum
cttaaattcaaactttgaatgatccatttcacttgtcattagctttcgtttttttgttctttttaccctgttttcgtttctcattttcctctttgctagctctttgaatctctgagggaagatatggcggccaatgggaacggagtttcgacgacgccgaagagttcgttggcgaggattcagacgcagaagaacggtggaatctgtcatgacgatagcgggaagcctgttaaggctcagacgatcgacgagctttactctttgcagaagaagagatcggcgccgacgactcctcttgacggcgttcagggtacctttgccaccatttctgaagatgagcgccagaggcagcagctccagtccatcagtgcatcgttggcgtcactcac

SEQ ID NO: 200696 - DNA, 346 bp, Gossypium hirsutum
  unsure (1)..(346): unsure at all n locations
agtaataataaaaagtttctaaacagaaattgttttaagcaaagttacaattttcaaacacactaccatatgacatcgcctgatccaaccgtaatgtctaggcagggtttggggtgttacaaatggcctttgttaaagagtttgaagataaatgcattagattgagacactgtttggaattcccttgcccgtaagtccaccttcactagttggatacaacaatgtgtatggcatattgaccggaccaacacggttcttaaattgctcgtcattgntcatctctacaatccgttcctctatctcggtaagccgttttctgaattcatcaaaagctgcaagtggggtt

SEQ ID NO: 200697 - DNA, 335 bp, Gossypium hirsutum
gagcaggtggtgaaggagcaaaacatgttggacgggtttgttatcctggaagggtattgtaatctcctcattgaaagactccatctcattgaggaagacagagaatgccctgatgagctgaaggaggcaatatgtggcttgctctttgcatcttcaaggtgtggagattttcccgagcttcaagagattcgtgcaatcttcacgtctcgctatggcaaagaattcgttgctcgtgccattgagttgcgcaacaattgtggagtcaacactaagattatacagaaactctcaaccaaacaaccagacttgcagagcagatggaatgtgctcaatga

SEQ ID NO: 200698 - DNA, 394 bp, Gossypium hirsutum
  unsure (1)..(394): unsure at all n locations
caacgctcacctttttctttaatattcctccttcaatggagacacagcaattgcaactcaatctcctcctccgcctccgaattaccggaacctgatatccatatccttacctccggcggcttccgaatccccgctcactccagcatattggtgcaaggaagaggaaatttcgaaatacgggattcatttgctagtattgtcgcacgtttactcggtcccacagctgaaacagagatgcagcaagggagttagtcaacggttgacggtggagaacgcggtggacgtcctncaactcgctaggctctgcgacgctcccgatctttacatcaagtgcatgaaatacatcgccgnccatttcaagtccgtcgagcaaacccgagcttggaatttcatg

SEQ ID NO: 200699 - DNA, 287 bp, Gossypium hirsutum
  unsure (1)..(287): unsure at all n locations
gcgcaaatcttaagcctcanatctaccaggaagtcagccggttgcttctggggctgaattgcgggaaaacacttgaaactattgttctacctgaatcagctaaagccctctcttcaaaacatgattttgatcttcaggctttcaaattttctgctgaccaagagttgttaagagaaccccgggtagtaaaggtcggtcttattcagaactccattgctctcccaaccactgctcccttttcagaccagaanaatgctatctttgagaaattgggaccaataattgat

SEQ ID NO: 200700 - DNA, 281 bp, Gossypium hirsutum
caaggaaaccagaatggtcggtttaattaccccaaccggggggaaaattccattgccccgaaaacccaagggttcttccgaagggttcgtccacggaggttaattcaggccctaaaatcaggccgaaagcgcttatcattggacaccaggtgaatattcctgtactaccctttgttgttcccgagggacggagaaggctaggttagccgaaagatggttatcggttcaaggacgcaaggtgcccctgctttttcagggtaagaaggggtagagaaaatgcc

SEQ ID NO: 200701 - DNA, 185 bp, Gossypium hirsutum
gccaaattcgccttgaactggatccttgtaatcagcgagtgctgcactaatccttcgaaaggatccatgagggacgatgagtattcgcaaagcttacatcatagccctacgagattgaaagatcggtatgttgtcaacatgtcactatccattgatgtggctattgatgatgagactcaggatag

SEQ ID NO: 200702 - DNA, 413 bp, Gossypium hirsutum
  unsure (1)..(413): unsure at all n locations
gtttggctctcaaccaagcttgcaattttgcagcggcttcttcaacccgttcaagccgattaaccctcagctttctgttttcggaagttactactttacctagtgatggcagacggtcacgagagtgacacgaatattgagatatggaagatcaagaagcttattaaagcacttgaagccgctagaggcaacggcaccagcatgatatctctcataatgcctccacgtgatcagatttcaagggttaccaagatgcttggagatgaatttggaacagcttcaaacatcaaaagcagagtcaaccgtcaatccgtgttaggtgctatcacatctgctcagcagaggctcaaactntatagtaaggttcctccccacggacttgtgctctacactggaacaattgggactgatga

SEQ ID NO: 200703 - DNA, 338 bp, Gossypium hirsutum
cagttgtaaaagctgcagctgatgaaagattaagggggcttcaaatttggagggaatcacagggccgggcatctaagctatatggttttaagcatgattctatgtcatcgcttaggaaaacaagtaagacaggagaattggttgattcaaaaactaatggagatctttcacgttccaagtccgaatcaatgaatgaggatgaaaatcttctttgtctgacaggagatgctaagtcggattctgttccagatcttcaacagcaggttgtagggttaaaggtcgagttgtgcaggttgctggaagagaaaagatcagctgttctcagatctgatgaactg

SEQ ID NO: 200704 - DNA, 413 bp, Gossypium hirsutum
  unsure (1)..(413): unsure at all n locations
aaaggttttcctcttgtctaattctataagttcttgcggagcaaatattagtactggtgtttttaacatgactgttatcccaaaaccctggagggctagcatgttagcagcagctctacaacgcaccatgggtgttgggaacaaagggaatccctgtaatgggcagttacctagcttgtctcttcgaaatcttcttcttgggagaaaaattctaatcgtagatgacaacaatgtgaatctaaaagtagctgctggtgcattgaagaaatacggagcagatgtggttagtgctacaagaggaatagaagctattgagctgctcacaccacctcaccagtttgatgcctgtttcatggatatccaaatgccggaaatggatgggttngaagctacaaggagaattcgggatatgg

SEQ ID NO: 200705 - DNA, 297 bp, Gossypium hirsutum
caaggggaattgctgtgcctgaatggcccaccatgtgcgatgaaggtctagttaatgaaccagttttatcatttgggtttacccgcagtcctgacgttgatgttggcggacaagtggtttttggccgtatggatccaaaacattacaagggggaacacacttatgttcctgtaccacagaagggatactggcagttctatatgggtgacgtactgattgttgaccaaacaactggactttgtgccactggctgcagtgctatagttgattccgaaacttccttgttgactggaccta

SEQ ID NO: 200706 - DNA, 407 bp, Gossypium hirsutum
  unsure (1)..(407): unsure at all n locations
cggaccaaccggcttattgattcccttcaacggttccaccgccgtaagcatttttaccatttccttgacccatcatgataaagtcatgctcctaggtcacagtgactcttacacccaagaccagaccatgcaagtaaccattgccttcaaccgttttggagaagggcttgtgcagagaatgcctagatgcaggcatggatattttcacgtggtgaacaatgattacacgcattggataatgtatgcaatcggtggcagtgcaaatccgacgatcaacagccaggggaacagatttcttgcaccagataaaatgaataacanagaggtgactaaacgagagaatacgccgcggaaaaaatggaagaaatggaatttgaggtcaagaggggatttgatgttaaatggag

SEQ ID NO: 200707 - DNA, 361 bp, Gossypium hirsutum
gcagactttgcctcctggcaaccagtcttctccggggaaggataatctttcacctaccctgttcctaccgtggctcagatatatcgtgttgagaacttgtatgatggtcctcttgatgatgcctatgccaatgctattaggaactgtgatcctgacggtcctcttatgctttatgttccaaagatgattcccgcttctgataagggtaggttctttgctttcggtcgcgtcttttctggcagagttgcaactggtttgaaggtcagaatcatgggtccaaactatgtacctgctgagaagaaagacttgtctgtaaagagtgtacagagaactgtgatttggatgggaaagaagcaggata

SEQ ID NO: 200708 - DNA, 326 bp, Gossypium hirsutum
gcaacttattcttgagctggagcattcaattagtggggacgttagataccctgattggactgagaaggagccctcttcaacacttttatggattttgttctttttggctcagcattatgacagatgaggacagtatgacattgctctttcaaaaattgatgacgctatacagcacactccaaccgtaattgatttatactctgtcaagagcctgatattgaaacatgctggtgatttggtagctgcagcttcattggcagatgaagctaggtgtatggatcttgcataccgctacataaacagtgtatctgtcaagcgtatgttgc

SEQ ID NO: 200709 - DNA, 412 bp, Gossypium hirsutum
gtccgcgcctcggtcgaggctagcctgaagcgccgggatgttgattacattgatctctactaccagcacagggtcgacactaaaacaccaatagaggatactatgggggaactgaagaagctggtagaagaggggaagataaagtacattggtttatctggagctagccctgaaactataagaagggcacatgttgttcatcccgtctctgccataaaaatgaagtggccgctttggactcgcgatagcaaggacgaaataatccccctctgcagggaacttgggattgggatagttccatatagcctgctcggtcgtggtttcttcggtgcaggactgttgcggaaactgggcctgcaattagttttcggatggagaacttggctcaaaagtatggaggcacccctgcaca

SEQ ID NO: 200710 - DNA, 407 bp, Gossypium hirsutum
gagattttaacatacaaaaaaaaaaccaaaggaaagactaaggctctaatttccaaactccattacagattagatataacggagagcagtttttgataagaaaagagacggtaaaaggaaattaaagatgtcaacagcttcttcattgtgttcatcaactcaagttaatggctttggagggggacttaggcttctaagaacccatctttctcaacccagttccttttcttttactaggaggagaactgctacagtagtgaaggcaactgctcgagtcgataaattttcgaaaagcgatatcattggttccccatctattactctctgctaatttcgctaagttggaggagcaggtgaaagccgtagaagtggcaggctgtgattggatccatgttgatgtaatggat

SEQ ID NO: 200711 - DNA, 320 bp, Gossypium hirsutum
  unsure (1)..(320): unsure at all n locations
aaaaaattcttctgatttttctgagtctttttctaagctggtgtttggctcctgaaaaagtgtttaaggaagaacattgaatgcattagtggcaaccaacagaaacttcaagctagcagccaggcttcttggtttggattctaagcttgaaaagagtctcctcattcccttcagggaaatcaaggttgaatgcaccatacccaaagatgatggcacattgccaacttttgttggctttaggattcaacatgacaatgctagnagtcctatgaaaggaggaatcagatatcaccctgaggttgaccctgatgaagtgaatg

SEQ ID NO: 200712 - DNA, 259 bp, Gossypium hirsutum
  unsure (1)..(259): unsure at all n locations
atgcagtcctcttccgatcttgatcttcattcgcagttgaaaggaattgattcctgaacaacaggagcgcctgaagaaactgagggcagaacatggaaaagtgcaacttgggaatattactgntgatatggtcattggtggaatgagaggaatgacagggttgctttgggaaacctcattacttgacccagatgagggaattcgctttaggggcttgtcaattccgaatgtcanaaactattacagctgcaagcctgat

SEQ ID NO: 200713 - DNA, 376 bp, Gossypium hirsutum
  unsure (1)..(376): unsure at all n locations
gttgattgcaacaagtgttgcagctaggggtttagatgtaaaggagcttgaattagtgattaattttgatgtcccaaatcattatgaagattatgttcaccgtgttggtaggactggtagagccgggcggaaaggctgtgctatcacatttatctctgaggatgatgcaagatatgcaccggatctcgtaaaagctttagaactctctgagcaagttgttcctgatgacctgaaagctctcgcagatggctttatggcaaaagtcaatcagggacttgagcaggctcatggaacaggttatggtggaagtggttntaaattcaatgaagaggaggatgaaaagagaaaagcagcaaagaaagcacaagcaaaagaa

SEQ ID NO: 200714 - DNA, 409 bp, Gossypium hirsutum
cgtttgtttcctgagcaaatctcgggaaggaataccctttttttccccctgttgttaactcgttgtgattgtgaagctttctttaaaagaatcctagttaactcgacgcgtttacccagaaagaggtgaagatgtcaactcctgcaaggaagagattgatgagggattttaagaggttgcagcaagatcctcctgcaggaattagtggtgcacctcatgataacaacattatgctttggaatgctgctatatttggacctgatgacaccccatgggatggaggtacgtttaagctgactcttcagtttacggaggattatccagacaaaccaccagctgttcgttacgtatcccgaatgttccatccatatatgtatgctgatggtagcatctgtttggacattctaca

SEQ ID NO: 200715 - DNA, 376 bp, Gossypium hirsutum
cagttgtaaaagctgcagttgatgaaagattaagggggcttcaaatttggagggaatcacagggccgggcatctaagctatatggttttaagcatgattctatgtcatcgcttaggaaaacaagtaagacaggagaattggttgattcaaaaactaatggagatctttcacgttccaagtccgaatcaatgaatgaggatgaaaatcttctttgtctgacaggagatgctaagtcggattctgttccagatcttcaacagcaggttgtagggttaaaggtcgagttgtgcaggttgctggaagagaaaagatcagctgttctcagatctgatgaactggagacagcattgatggagatggttaagcaggacaatcg

SEQ ID NO: 200716 - DNA, 399 bp, Gossypium hirsutum
  unsure (1)..(399): unsure at all n locations
cattccattgctnttntctgatcaatttcatgaggtgccaataggctgggaaattaactacggaaatatcactggtattgagaaactgcatattgttggtggagctgaagatcgtactgctattacaaacggcaacgctgcaaagaataaacctctagttgtttgcttcggtgaattgttgatcgactttgtaccgacggttggaggggtttctctggctgaagcacctgctttcaagaaggctcctggtggtgctcctgcaaatgtggctgttggggtatcacgattaggaggatcatccgctttcgtaggaaaggtaggtgatgatgaatttggctacatgttagctgacattgtaaaacaaaacaatgttgacaactcttgcatgcgatttgatcg

SEQ ID NO: 200717 - DNA, 368 bp, Gossypium hirsutum
taacagcggtcatctcgtgcttaaagaccctaaaggcaaagagctatggaggtctcaacgccttactgatggttctcaagtgtcccatgcagccatgctcgacaccgggaacttcgtgatcgcaagcaaaaactcgaccaacatatgggagagcttcaaatatccaactgacaccatcttaccgtcacaagaacttgatatggctgaccatcttttatcaactctggttgaaacaagttacagtaaggggaagtatcagcttcgtttcaataatgaatctttcatactgaatcaaatagatatgttcacaggaaaaccttacgaagcttactttaatttcgggaacggttctcggttggtcttcaacg

SEQ ID NO: 200718 - DNA, 360 bp, Gossypium hirsutum
gatttggtttacagcaacctttgctgtcatgcaaaatggaggggcacagaaccagcaagaatatgcatctactatgggtctacttcttagttatgctctaaacattacaagtttattgactgctgtactcaggcttgccagtttggctgaaaatagtttgaatgcggtggagcgtgttggtacatatatagagctgccttcagaagcaccacttattattgagaacagccgtccccctactgcttggccttcattcggatctatcaagtttgaggatgttgtacttcgttacaggcctgaactttcgcctgtcctgcatgggttgtctattacaatttctcctactgacaaggtatgcat

SEQ ID NO: 200719 - DNA, 224 bp, Gossypium hirsutum
tatctgatacatcaacccttgctgtcatgcaaagttcaggggcacagatccatcaagaatatacatctactatggatctacttcttagttatgctctaaacattacaagtttattgactgctgtactcaagcttgccagtttagctgaaaatagattgaatgctgttgaacgtgtttgtacatatatagagctgacttcagaagcaccacttattattgacaac

SEQ ID NO: 200720 - DNA, 349 bp, Gossypium hirsutum
ctgaaatctgagtccaggacataaaatatgaattcaaatcacttgcttcttgaagagcccataagaatggcttccattcttgagccatcaaagcctagtttctttcctgcaatgactaaaattgtggggacacttggtccgaagtcgcgatctgttgaaataatatccgattgtcttaaggctggaatgtctgtggcgaggttcgatttttcgtggggtgatattgaatttcaccaagagacattggaaaatttgaagactgctgttaaaagcactaggaagctttgtgccattatgcttgatactgggggtccagaattgcaagtagttaataaaacggagcacccca

SEQ ID NO: 200721 - DNA, 371 bp, Gossypium hirsutum
catttgtgttgcttgatacccgagacaacagctacattgttgcacgagatgctattggggtcgcatccctctacattggctggggacttgacgggtcggtttggatatcttccgaaatgaaaggattaaatgatgactgtgaacactttgagtgctttcctcctggtcacttgtactccagcaaaacaggaggatttagaagatggtacaatccaccatggttctctgaggccattccatcagttccatatgatccccttgttctaagacgtgcttttgaaaatgctgtgatcaaaagactgatgaccgatgtaccttttggagttcttctatctggaggtctcgattcgtcgttggttgcttctatcaca

SEQ ID NO: 200722 - DNA, 346 bp, Gossypium hirsutum
tagagagaggaaggagatggttgccataaaaattgtccgtggagttaagaagtatcgtgaggcagccatgatagagattgagatgttgcaacagcttagaaaacatgataaaggtggcaaccgttgtgtgcaaatactgaactggtctgactatcgtaaccatatttgcattgtgtctgagaagcttggaccaagcttatacgattttctacgcaaaaacaattatcgctcatttcccattgatcttgtccgtgagattggcagacaactattggaatgtgtagcattcatgcatgatttgaacctgatacacacagacttgaagccagaaaacattcttctagtc

SEQ ID NO: 200723 - DNA, 344 bp, Gossypium hirsutum
cccgaacagatcttgactctttgcaatgcagaagaggatgttaagaagaaggttcacgctatcatcgacaagttcgcggatcgtggtctgcggtcattaggtgttgcaagacagcaagtaccagaaaaatcaaaagatggtgctggtactccatggcaattggatggtttattgcctctggttgatcctccaaggcatgacagtgccgaaaccattcgcagagctcttaaccttggtgttaatgtcaagatgataacaggtgatcaacttgccattgcaaaggaaactggtcgacgactaggaatgggaacaaacatgtatccatctgcttctttgttaggtca

SEQ ID NO: 200724 - DNA, 347 bp, Gossypium hirsutum
ttgagtacgagaaaacacccatctttaccgtgaagtagttcagaaggtcggcggtcgattgggtcctaattatgcgatggatgctgcatggtgctctacgattgagcggaaagctgagcagaggaaagaaaagctcgaaagtgaactcaatgcttataggacgaatttaattaaagaaagtataagaatgggatacaatgattttggtgatttttactatgctcatggtgcattgggggatgcttttaaaagctatgttcgaactcgcgattattgtactacgtcgaagcatattattcaaatgtgtttgaatgcaattcttgtgagcattgaaatggttcaattta

SEQ ID NO: 200725 - DNA, 231 bp, Gossypium hirsutum
ccacattggctcagcgccaccagttaattctgcattctgggacaagcggcatccttatatcggggagtctcctgaaacttcaggttttccccttggatctcttggaagcgtgggctttcctagtagctcgctatcacatccggtggaatatgcttcccacaacattttttctcatgttggtggaaattgcatggatttgacaaaaactggtggggtacgctctcctcagca

SEQ ID NO: 200726 - DNA, 365 bp, Gossypium hirsutum
  unsure (1)..(365): unsure at all n locations
attgaagtttcctttctcgattntctatttagccaagcaagatgcagatcttcgttaagactctaaccggcaagacgatcactctcgaggtcgagagctccgatacgatcgacaacgtgaaggccaaaatccaagataaggaaggcatccctccagaccagcagcgtctgatcttcgccggaaaacagctcgaagacggccggaccttggccgattacaacatccaaaaggagtcaactctccacctcgtccttcgtctgcgcggtgggatgcaaatcttcgtgaaaaccttgactggcaagacaatcactctcgaggtcgagagctccgacacgatcgacaacgttaaagcgaagatccaagac

SEQ ID NO: 200727 - DNA, 287 bp, Gossypium hirsutum
tccacgtattcagcacgagactactctcttctttaccgatattctatttatacgagccagattcaaatgtttgctaatactctaaccgacactacaatgactcttaagatctagagcttagatacgaacaccaacgttaaggtcataatacaacataatgcttgtatcactacttaccagcagcatctgatcttcgccagataacatcttgatgacgacctgaccttggccgattacaccatccctgatgcctcaactctccatcttgtacctcgtatacacggtac

SEQ ID NO: 200728 - DNA, 397 bp, Gossypium hirsutum
cgggcttatcgatgccatccacggatccaccgccagcaccatttctaacaattacatgacacatcatgataaagtcatgctcctaggtcacagtgactcttacacccaagacaagaacatgcaagtcaccattgccttcaaccgttttggagaagggcttgtgcagagaatgcctagatgcaggcatggatattttcacgtggtgaacaatgattacacgcattggataatgtatgcaatcggtggcagtgcaaatccgacgatcaacagccaggggaacagatttcttgcaccagataaaatgaataacaaagaggtgactaaacgagagaatacgccgcggaaaaaatggaagaaatggaattggaggtcaagaggggatttgatgttaaatgga

SEQ ID NO: 200729 - DNA, 373 bp, Gossypium hirsutum
gagctacttaaccatttaccaaatctcctggctcctcttctttagcgtccttttcatttccgctcatgcagcgcgctttgaaatcctcaatgagtgctcctacaccgtctggtctgctgcctctactggtggtggccgtcgcctagaccctgggcttagttggaccatcgatgtgcctgctggcactgctatggctcgtatctcgggtccaaccaattgcaatgtccatgccagcggtatggttcattgccaaaccggcgattgcggtggactccttcaatgcaaatgtcgtagctgtcctacaaacacactggctgaatatgcacttaaccaatttggaaacatggatttctacgacatgtccttaattgat

SEQ ID NO: 200730 - DNA, 399 bp, Gossypium hirsutum
ccgcatctttgaggtttgatggagccctgaatgtggatgtgactgagttccagactaacctggtcccatatcccaggatccactttatgctttcttcttatgcccctgtcatttcagctgagaaggcttaccatgagcagctatcggtggctgagataaccaacagtgcttttgaaccctcttcaatgatggccaaatgtgacccacgacacgggaagtacatggcttgctgccttatgtaccgaggagatgttgtgcccaaagatgtgaatgcggctgtggccaccattaagaccaaacgcacaatccaatttgtggattggtgccctactggattcaagtgcggtatcaactaccagccaccaactgttgttccaggaggggaccttgccaaggttc

SEQ ID NO: 200731 - DNA, 361 bp, Gossypium hirsutum
ctacaatagggaattgaatcccccttcatcttattgcgcttcggatccaaattacccttgtgctcctggtaaacaatattttggccggggtcccatgcaactttcttggaactacaactacgggcagtgtggaagggccataggggtcgacttgttaaacaacccagacctgctatcaagtgatcccacaatttccttcaagtctgcgttttggttttggatgactccacaatcaccgaagccatcttgccacaatgtgatcatcggagcatggtcaccctgcagtagcgatcgggcagcatgtcggattccagggtatggtgtgatcacaaatattatcaatggaggccttgaatgtggt

SEQ ID NO: 200732 - DNA, 216 bp, Gossypium hirsutum
taacatcggtcatctcgtgcttaaagaccctaaaggcaaagagctatggaggtctcaacgccttactgatggctctcaagtgtcccatgcagccatgctcgacaccgggaacttcgtgatcgcaagcaaaaactcgaccaacatatgggagagcttcaaatatccaactgacaccaatctaccgtcacaagaacttgatatggcttgaccatcttt

SEQ ID NO: 200733 - DNA, 383 bp, Gossypium hirsutum
  unsure (1)..(383): unsure at all n locations
gttatcaagtcttcccctttatagcacacaactacgatcacaaataccatttagattctatatatatagatagatatatagatatggagggtgcaaaggaacaattacaagctcctacatatggagatttaatcaccatacttagcattgatggtggtggaataagagggatcatccctggaaccatacttggtttcttagaatctcaacttcaggaactggacggtgaagatgcaagactagcagattacttcgatgtgatagcagggaccagcaccggcggcttggtgacagccatgctaacttgtccgaacgaaaagaatcgaccattatttgctgccaaagacattaaagacttttacctaactaatngtcctaacata

SEQ ID NO: 200734 - DNA, 390 bp, Gossypium hirsutum
ctaagatattcaaccaccatgaatgattcttcactgttctgcagttcatcaaatcacgaagaagaagctgacgttttgcaagccatgcatttagcttccatttcatcactccctttcactttgaaagtcgccgtcgatctcggcttgttagatattatagccgaagccgccgacactcctcctggtatggtgtcggttgctgagatcgtctctaagcttcccaccaataatccaaacgccccttccattgttgatcgaatgctcaggcttttggccgctcactccatcttgacctgtgatcaaatcactggccaagatggcctgacccaaagatcgtatggtcttgcatcaatcggtaaatacttcggtcaaaatgaagatggaatcttc

SEQ ID NO: 200735 - DNA, 376 bp, Gossypium hirsutum
gcaaaactggtggacttggtgatgtcctcggtggacttcctcccgcaatggctgccaaaggacaccgtgttatgacagtgtgtcctcgctatgatcagtacaaggatgcatgggatacaagtgtgttagttgatctaaaagtcggagacaaagttgtaactgttcggttcttccactgctacaaacgtggagttgatcgtgtctttgtcgatcaccccatgttccttgagaaggtatggggcaaaacagcatccaaaatctatggccccagagcaggtttggactacgaagacaatcaactgcggctcagcttgctatgccaggctgctttggaggcacctagagttctaaatttaaatagcagtaaaaatttctc

SEQ ID NO: 200736 - DNA, 389 bp, Gossypium hirsutum
ctggtatggtaatgggggattttagcaatccttctgatctgcctgagtcgctattcgagggcatggatggtatgggcggcatggtcatggttggactaagttccaggaatagagctgttgatgggcatgatgaatattacagtcttgtattgaatttcaaggacgcatgttgtggagttgagaaagaaattgagataacccgactagaaagctgtggaacttgcaatggttcaggtgcaaaacctggaacaacaccatgcaaatgtaccacatgtggcggccaatgtcaggttatctcatctgcaaggactccgttgggtgtacttcagcacgtaatgacatgctcttattggggtgcgacggtggaaaattctaccccatgcaatact

SEQ ID NO: 200737 - DNA, 387 bp, Gossypium hirsutum
ctcaagcatagccagccagctgccagatctgctaagtcgatcaatcgataaaataaaatccagatttcaagaaactagtacttttttttttctgtaaatctgtttcgttgtgttgagaggaggtagaactagaagaggcaacaatggatgcttttagaaggcaagccagcaagctcagagaacaagttgccaagcaacagcaggctgtaataaagcaattcagtggaactggttatgagagctcagatgttgtagttattgatgagattgagatgcaaaggcatcaacaactggacaaattgtacaagtccactcgttcagctagggattttcaaaaagaagttattaaagctgcagaagcatttacagccatcgggtataagcata

SEQ ID NO: 200738 - DNA, 369 bp, Gossypium hirsutum
gttgattggaagaaaaacaggcggaatatcagtttatccatttacgtcatctatacgaggcaaggaagatcccagtagccatatcattgtccgaggcaaatcaatggctgggcgtgctgatgacctatttaatctgattaattgtgttcttcaagaagtacagtttacagaccaacaacggttcaagcagtttgtgtcccaaagcaaagccagaatggagaaccggttgagaggtggaggtcatggaattgccgcagctaggatggatgcgaagttaaatgttgctggctggatttctgagcaaatgggtggagtcagttacctggagtttcttcaagcactggaagaaaaagtggataatgactgggc

SEQ ID NO: 200739 - DNA, 372 bp, Gossypium hirsutum
gattacgccggcgccgccgtgctcggctggggagacgggtattacaaaggggaagaagataaagagaaagcaaagtcaaaagcttctttatctacaatcgccgagcaacagcatcgcaaaaaggttctcagagaactcaactctttgatttccggttcaaccgccaacactgacgactccgtcgatgaagaagtcaccgacaccgaatggttctttttagtttccatgacccaatctttcgttaacggcaacggacttccgggacaagctctattcaattcatgtccagtatgggtcgctggatcggaccgcttatccaattctacgtgtgaaagagcgaaacaaggacgggttttcggtttacaaacgata

SEQ ID NO: 200740 - DNA, 370 bp, Gossypium hirsutum
gttgattggaagaaaaacaggcggaatatcagtttatccatttacgtcatctatactaggcaaggaagatcccagtagccatatcattgtccgaggcaaatcaatggctgggcgtgctgatgacctatttaatctgattaattgtgttcttcaagaagtacagtttacagaccaacaacggttcaagcagtttgtgtcccaaagcaaagccagaatggagaaccggttgagaggtggaggtcatggaattgccgcagctaggatggatgcgaagttaaatgttgctggctggatttctgagcaaatgggtggagtcagttacctggagtttcttcacgcactgtgagaaaaagtggataatgactgggca

SEQ ID NO: 200741 - DNA, 397 bp, Gossypium hirsutum
gaaaccatgggtgttgagccagcatgtcctgtattacttttgtttctcgctgggattatcatttgggtagttgaagctgaagttcactattatgattttgttctggctgagaagaatttcacgaggctgtgcaagaccaagagtatgctggttgttaatggccaattcccaggacccaccatttatgttcataaaggtgatacggtgtttgttaatgtccataatcatggggattatggtctcaccgttcactggcatggggtaaagcaaccaaggaatccatggtcagatgggtcagcatacatcacgcaatgccctattgaacctggccacaatttcacatatgaagttgtgttatctgaggaagaacgaactctcttgtgcatgctaacagtga

SEQ ID NO: 200742 - DNA, 353 bp, Gossypium hirsutum
ctcaagcatagccagccagctgccagatctgctaagtcgatcaatcgataaaataaaatccagatttcaagaaactagtacttttttttttctgtaaatctgtttcgttgtgttgagaggaggtagaactagaagaggcaacaatggatgcttttagaaggcaagccagcaagctcagagaacaagttgccaagcaacagcaggctgtaataaagcaattcagtggaactggttatgagagctcagatgttgtagttattgatgagattgagatgcaaaggcatcaacaactggacaaattgtacaagtccactcgttcagctagggattttcaaaaagaagttattaaagct

SEQ ID NO: 200743 - DNA, 406 bp, Gossypium hirsutum
aagcggtgaatcatagagtgatgatgagcggagatggagagcgatattcaatagccgccttcgccattccaggtgagggtaccataattaaggcacccaaagagcttatagatgagcaacatcctcagctttacaaggactttaatttcatggacttctttcgttttgcctattccgaccgcgcaaagaacatcgaatccggccaacaacttcacgcctttgcttctctatcaccaccaatttccgattaaaaacatgcccgctttgacaagttaaagcccggttttcgctcaaaattgaagttacatagtaataactgagtcctctaccatactactatgatcatgaatttcgttctagaactgaattactatgttataatttgcaataatcgcgcaattgtatc

SEQ ID NO: 200744 - DNA, 408 bp, Gossypium hirsutum
ctacatttggctgctttggagcaaaaaagggctgatgaaaatgtaatgaaattggctgaagatcagaagaggcagaaggaggaacttcacaacaggataattcagcttgagaaaaaattagatcaaaaacaggcattggaactggaaattgagcaactgcgaggatcactgaatgtaattaggcacatgggagatgaagatgatatagaagttcttgagaaagtggatgcaagtcttaaagagttgagagaaaaagaggcagagcttgaagacttagaagcattaaaccaaactcttattgtaagagagcgcaagagcaatgatgaactgcaggatgctcgcaaagaattgattaatggattaaaagaaatatccacccgttcacaaattggtgtcaagagaatggga

SEQ ID NO: 200745 - DNA, 377 bp, Gossypium hirsutum
  unsure (1)..(377): unsure at all n locations
gtccgcgcctcggtcgaggctagcctgaagcgccttgatgttgattacattgatctctactaccagcacagggtcgacactaaaacaccaatagaggatactatgggggaactgaagaagctggtagaagaggggaagataaagtacattggtttatctggagctagccctgaaactataagaagggcacatgttgttcatcccgtctctgccataaaaatgaagtggccgctttggactcgcgatagcaaggacgaaataatccccctctgcatggaacttgggattgggatagttccatatagcctgctcggtcgtggtttcttcagtgcaagactgttgcngaaactgtgcctgcaattagttntcggatggag

SEQ ID NO: 200746 - DNA, 401 bp, Gossypium hirsutum
aattgaatgggtctgtaataccttcagaacgtccaaatcatatgatgttggagatgtggaatccccttggaattgttggtgtaattacggcatttaatttcccatgtgctgttcttggatggaatgcctgcattgcactggtgtgtggaaactgtgttgtttggaaaggtgctccaaccactcctctggttacaatagcatcaacaaaattagtggctgaagttttggaaaagaataacttacctggtgcaattttcacatcattttgtggcggtgctgaaattggggaagcaattgcaaaagatcgacgcattaatctagtttcatttacagggagttcgaaggtgggtgtaaaagtacaacatacagtaaatgagacgtttggtaatgcttgcttgact

SEQ ID NO: 200747 - DNA, 383 bp, Gossypium hirsutum
aaataaaaaatgagctttcttcggctcttgtcagttttccttttgttcttatcctatgtagtcataggatcagctgagcagtgtggaaggcaagcaggcggtgctctttgccccggtggtctatgttgtagccaaattggttggtgtggcagtactgctaactactgcacagttccgggttgccaaagtcagtgcagcggtagtggccctgcccctgggcctggtgggctaaccaatcttatatcaagagagacgtttgatcggatgcttttgcatagggacgatgggggttgtcctgcccgtggcttctatacctatgatgctttcattgctgctgcacgttcttttcctgccttcgctacaactggttaccaagctactcg

SEQ ID NO: 200748 - DNA, 395 bp, Gossypium hirsutum
  unsure (1)..(395): unsure at all n locations
ttccggaccggcctaacccattaattaattcccttgagtattggcttttttccaagactcgggtttacagaaaagctgctggaatgggattggagtttcaaggattaatcaggcccttttccggggaaaatggctgaggcaactgaaaaatcaggccttgttcttctcgacctctctcacaaccggttttctggtaaaatcccattgaagatcaccgagctgaaaagcttgcaagcattgtttctttctcataatcttcttacaggggaaatcccagcaaggattggaaatttaacttatctccaagtggtcgatctgtcgcataactccttatcaggttcaattccattagatattgntnnggtgtttcagttacttgcattgatactcaacaa

SEQ ID NO: 200749 - DNA, 390 bp, Gossypium hirsutum
  unsure (1)..(390): unsure at all n locations
tgcatttacgggttgcagtcatagtttgacagcagaagaagatgatgagctacgtaggatgcgttatgaagtcagccattggaaggagaaagagattaatgggacagagagaaggttgctcggtggttgtccactaaccccgagggagacttccctcttgcttagagcattgggtttccctccaagtactcggatttacttggtagctggtgaagcttatggaaatggaagtatggagcctcttaaggaggattttcctaacatcttctctcattcctcccttgcaacagatgaggaattgaatcctttcaagaaccatcagaacatgttggccggtctagactatgttgttgcccttcagagtgatgtnatttgttatacttatgatgg

SEQ ID NO: 200750 - DNA, 387 bp, Gossypium hirsutum
attgcatatgcacgttccaacaataaggttgttattggcccagctaccgtcggaggaattcaggctgcagcttttaagattggtgacactgctggaacaattgacaacattgttcaatgcaagctgtacaggcctggatctgttggctttgtctccaaatctggtggtatgtcaaatgaaatgtacaacacaattgcccgtgttacagatggaatctatgaaggtattgcaattggaggagatgtcttccctggctccactttatctgaccatattttgcgatttaacaatattccacaggtaaagatgatggttgtgctcggagagcttggtggacgagatgagtattccttggttgaagccctgaaacagggaaaagtgaacaag

SEQ ID NO: 200751 - DNA, 404 bp, Gossypium hirsutum
gaactattctcggacctgctgataatattaggacgatcaccaaagagcatttgcaaagctatattcagacacactatactgctcctagaatggtcattgctgcatccggtgctgttaagcatgaggaaattgttgaccaagtgaagaagttgtttaccaagttatcgtctgatccaaccactggttctcagttagttatgaacgaaccagcaacttttactggttctgaggttagaatgatcaatgatgatgttcctctggcgcaatttgctgttgcttttgagggagcttcttggacagatccagattccattgcgctcatggttatgcaggcaatgttgggttcgtggagcaaaaatgctgggggtggaaaacacatgggctctgagctggcacaaagagtc

SEQ ID NO: 200752 - DNA, 376 bp, Gossypium hirsutum
  unsure (1)..(376): unsure at all n locations
actgccccgccatggcttgtgttagcttcgctaaacgcagcgcgccgtcatcctcttggatcggtggccagcagtctctccctcaacgctccggatcatgcgctcggctcgccactcgcagagtctcactcccgatccgtgctgtcgcttacaccgacgaactcatcaaaaccgccaaaactattgcttcacctggtcgtggaatactggcaattgatgaatcgaatgcaacatgtgggaagagattatcttctattggcttagacaatactgaacccaaccgccaggcttacagacagcttctgctcacaactcctggcctcggagaatatatttccggtgccattcttttcgaggaaacactntaccagtcaac

SEQ ID NO: 200753 - DNA, 293 bp, Gossypium hirsutum
ctacatttggctgctttggagcaaaaaagggctgatgaaaatgtaatgaaattggctgaagatcagaagaggcagaaggaggaacttcacaacaggataattcagcttgagaaaaaattagatcaaaaacaggcattggaactggaaattgagcaactgcgaggatcactgaatgtaattaggcacatgggagatgaagatgatatagaagttcttgagaaagtggatgcaagtcttaaagagttgagagaaaaagaggcagagcttgaagacttagaagcattaaaccaaac

SEQ ID NO: 200754 - DNA, 406 bp, Gossypium hirsutum
cttaacctatcatttaatcacatgagttatggcatatctccaagactcgtgtttacagaaaagctgcttgtattggatttgagtttcaatgatttatcaggccctcttccggggaaaattgctgaggcaactgataaatcaggccttgttcttctcgacctctctcacaaccggttttctggtaaaatcccattgaagatcaccgagctgaaaagcttgcaagcattgcttctttctcataatcttcttacaggggaaatcccagcaaggattggaaatttaacttatctccaagtggtcgatctgtcgcataactccttatcaggttcaattccattagatattgatgggtgttttcagttacttgcattgatactcaacaacaaccatctttccggtgaaattc

SEQ ID NO: 200755 - DNA, 309 bp, Gossypium hirsutum
actaccccagcaatgaaccaagttgaccttggatgtattttggagggtctctcggaggatgctcgtgtcaattgttggaacttgagccaggcagcaatgagacatgagactgagacctgtgtcgtttatgctgatcagttgaagcaaagatgtgtggaacagtttaaagaagggactttggggattgaacagcttgccactgtcgatgggttatgctacttagcatcgaaagtggctgatgcatctgaacctgctaggacataccatgtgaatgcaacgattctcacttccatccctgatatctgagta

SEQ ID NO: 200756 - DNA, 412 bp, Gossypium hirsutum
aagaaaaggcaaaggcgagggtctattttcttcacaaactacaatggcttccgagtctttagtaaccaagaggctagatggtaaggtggcactgataactggtggtgccagtggtttaggagagtgttcagccaggctatttctcaaacatggagccaaggttctgattgctgatattcaagacgaattgggccactccctttgcaaagagcttggaactgaaaacttcagctatgtccattgtgatgtaacatgctaatctgatgtcgaaaatgccgtaaacttagcggtctccaagtatggaaaactcgatatcatgttcaacaatgcaggccttattggtgatggtgaagtcagagttacagacgccagcactgacaacttcaagagagtgttcgatatcaatgtcttg

SEQ ID NO: 200757 - DNA, 342 bp, Gossypium hirsutum
ggaagctgcagataaatctcagggtgcaaatgtatgcattaaaaacttagatgatagtattggtgatgaaacattgaaggaacttttttcagagtttggtaacattacatcttgcaaggttatgcgtgaccctaatggaattagtaagggctctgggtttgttgcattttcaactcctgaagaagcctctcgtgctcttgctgagatgaatggtaaaatggttgttagcaaaccactttatgttgcagtggcgcagaggaaagaagagagaagagcaaggctacaggctcagttttctcaaatgagaccaattatcccctcagttgctcctcgtatgccaat

SEQ ID NO: 200758 - DNA, 387 bp, Gossypium hirsutum
aacacatcccgcattattatcattgtcgttgcttcagttgttggaattcccatactaattgcttcctccatctgcatcattcggagggccagaaagaccccacatcaattacttagaactgatgatgatgaggtcattagggctgactccttgcagttcgactttgccactgttcggtcagcaactaataacttctctgatgcaaataagcttggccaaggtggatttggagctgtttacaagggtcaacttccaaatggagaagaggttgctgtgaaaagactagccagggattctggacaaggggacctggaattcaagaatgaagtcctcttagtggccaagcttcagcaccgcaatttagttaggctccttggtttctgctta

SEQ ID NO: 200759 - DNA, 369 bp, Gossypium hirsutum
gccacttgatctacaagcttggaggtattgacaagcgtgtcattgaaaggtttgagaaggaagctgctgatatgaacaagaggtcattcaagtatgcttgggtgcttgacacgttgaaggctgaacgtgaacgtggtattaccattgatattgccttgtggaagtttgagaccaccaaatattactgcactgtcatctatgcccctggacatcgtgactttatcaagaacatgattactggtacctcccatgccgattgtactgtacttatcattgactctaccactggaggttttgaggcaagtatttccaaagatggacagacccgtgagcatgctctgcttgctttcactcttcgtgtcaagcaaa

SEQ ID NO: 200760 - DNA, 410 bp, Gossypium hirsutum
aaacaccttcttcattagttcatttccattttatgagcaatccatggagtttcttaaaaccctgttttgtttatttgattttaatggtttttgttgtctttttggcagctgagatgatttgtgaagatttgccgaaagacttgtgcgcgttttcgatagcctcttcggggaaaagatgtgtgttggaaacggcggtgaagaaagacggcgacgtccagtatcaatgccggacgtcggaggttgtggtggagaggatggcggagtatatcgagactgacgaatgtgttgctgcatgtggcgccgatagaaactccgtcggcatttcatcagattctcttctcgatcaacaattcaccgccaagctttgtacccctgcttgttaccagaagttgtccaatatttgtgacctt

SEQ ID NO: 200761 - DNA, 412 bp, Gossypium hirsutum
  unsure (1)..(412): unsure at all n locations
caagaatggctctttcagctgccactcttctgactgcccttgcggtactctgctctttctttttcattctattttacatctcatcaagcaaaaatggaaaaggaaaaggaaaagggaaagccattccgggtccgcgacccttgccaattattggaaacctccacatgttaggcatgcttccacaccaatccctttatcacttggccaaaaaatatggtcctatgatgtccataaggctaggcgttgtgccaactgttgtcgtttcatcccctcaagccgncgagatatttctcaagacacatgatgnctgtttcgcaagcaggcccaagacttaaagtcctagaattaatttacaatggcaaaaggggcatagcattcacggaacttggatcatatnngcgtagtgtgagga

SEQ ID NO: 200762 - DNA, 349 bp, Gossypium hirsutum
ctgaaatctgagtccaggacataaaatatgaattcgaatcacttgcttcttgaagagcccataagaatggcttccattcttgagccatcaaagcctagtttctttcctgcaatgactaaaattgtggggacacttggtccgaagtcgcgatctgttgaaataatatccgattgtcttaaggctggaatgtctgtggcgaggttcgatttttcgtggggtgatattgaatttcaccaagagacattggaaaatttgaagactgctgttaaaagcactaagaagctttgtgccattatgcttgatactgggggtccagaattgcaagtagttaataaaacggagcacccca

SEQ ID NO: 200763 - DNA, 381 bp, Gossypium hirsutum
gccagctgccctctaatttttcagctcccgttttcttcaacagtggccgtcccaccgacgaccgtcaatttcacctcagtttctgcggccatggctgcaacggactctcctgtaacgaccaaggtttgtatcactgggagtggccccgccgctcacacggccgctatctacgctgctcgtgctgagctcaagcctattctctttgagggatggatggctaacgatattgcgcctggtggtcagcttaccaccacttccgacgtcgagaacttccctggattcccggatggtatcatgggttcggagcttatggagcggtgccggaaccagtcgcttcggtttggtactactatctttaccgaaactgttgacaaggttgat

SEQ ID NO: 200764 - DNA, 389 bp, Gossypium hirsutum
cttagttcaaagagggtccaatcgtttcgaactataagagaagaagaagttgcagcaatgttgaatcatattgatatagcttcctcgtcatcagcccctgtaaatcttaaaaaactatcacttttgttagcgaaccacgttgtatgtcgcgttacatttggtaaaaaatacggtggcggaggtgacggtggtacgaacagattcgacagggtgttgcatgaagttcagcatctggtgggagaatttgttgtgtcggattactttccgtggatgtggtgggtgaataagttgaatggtatggaaacaagagttgaaaagaacttcgaagaacttgacaagttgtacgatgaagtaattgccgatcatgttgctccgacaagaactaaagc

SEQ ID NO: 200765 - DNA, 404 bp, Gossypium hirsutum
cttagttgttgccactcagctggtggaagaatctatggtgaagcttgatagaatttgtagacaagaaaatgtgatgtcgatttttgctcgctcctacggcctaacaggtttagttcgaatcagtgtgaaggtaacatgttcttggcattgactatctcaccatggtgacatcaatatctcactgataaagctgaatatcagcaagaacaaatcttgaaaatcgtttgaacttatataggcctagaggaaatggatggttatttaatatttttcaagagtctagtatataggtaacagacaaaggaaatatctcgaaatgatgatcaagttttgcttgttgcaggaacacactgtaatttgatcaaagcctgaccatttctagatgaccttcgctaaataatcca

SEQ ID NO: 200766 - DNA, 383 bp, Gossypium hirsutum
aatttattctccaacttctttggaggaaggaacccgtttgatgacccttttatcacacgcccttttggaagcatgtttgattcaagcttctttggccccggtcaaagtccttttatggatatgcatccgactgggtttattgagcgtcaggctccagagccaaagagaccaaggggtctgattattgaagaactaaattctgatgatgagaaggaagaagcagataccgggatgaaagggaatcctaggaagcatggtaggtctaatgccgaaccttatgttgaggttccagatgatgaagctggacaatctgagagaaggaacaggcatttgcagtatatgaatggttacaatggtttgtatcaaaatcagcagcagcaaca

SEQ ID NO: 200767 - DNA, 357 bp, Gossypium hirsutum
acggtggtgatgagtgaaggtacagttccacttggagttcaaattcgaacaaaggagatgcatctgcaagctgagtttggctttgcagctcactggagatacaaggagggtgactgtaagtactcttcatttgtacttcagatggttgagtgggctcgatgggttgtgacttggcattgtgaaacaatgagcaaggaccaatcgtcaatatgctacattgattctgtcaagccaccctgcaccttccctactcattccgatgattgcccgttctcttataagcctcactgcagccaggatggacctgtctatgttatcatgatcgaaaatgataaggtatggttcttaaatagcact

SEQ ID NO: 200768 - DNA, 392 bp, Gossypium hirsutum
  unsure (1)..(392): unsure at all n locations
ctaaagttcagtgctgataaggttgatacaatgatggttcaagccattggtttgcttgatgaccttgataaagagctcaacacatatgcaatgagggttcgtgaatggtatggttggcattttccagagcttactaagatcatacaagacaatatcatgtatgccaaggcagtaaaactaatgggtgaccgtgctaatgctgctaagctcgacttctcagaggtattaccagaagagtttgagacagaattaaaggaggcagcagtcatatccatggggactgaaattagtgaccttgatctgacaaatatcaaagatttatgtgatcaggttctcaatctttctgaataccgagctcagctatatgattatntaaagagcatgatgaacac

SEQ ID NO: 200769 - DNA, 262 bp, Gossypium hirsutum
gagtacgaggaaacacagtgagggagaaatggtttctctgaagctacagaagcggctctccgcgagcgttctaaagtgtggaaaaggaaaggtttggctcgatcctaatgaagtcaacgagatctctatggcaaactcccgccagaacataaggaagttggttaaagatggttttatcatcaggaagccaaccaagattcactctcgatctcgtgctcgtcgcatgaaggaagccaagagaaagggacgtcactctggatat

SEQ ID NO: 200770 - DNA, 383 bp, Gossypium hirsutum
  unsure (1)..(383): unsure at all n locations
ggtggttcaagagaggataagaggaggagtaagcgaccttggtctaactcttgaagggttcctttttcttcatgctctttttatagaaaaagggcgtcttgagacaacttgggctgtcttgaggaagtttggatataatgacgagttaaagctcagggatgatattcttccagttccaaccaagcatgcccctgatcagactgtggagctgacaaatgaagctatcgactttttgcgtgggatcttccgattgtatgacagtgataatgatggatctttgcaaccttctgagtttgatgatatctttgtaactgcaccaganagtgggccttgatgacaactctggatccttcatattgtttggctaacttgatttgcattgg

SEQ ID NO: 200771 - DNA, 377 bp, Gossypium hirsutum
ctaagatattcaaccaccatgaatgattcttcactgttctgcagttcatcaaatcacgaagaagaagctgacgttttgcaagccatgcatttagcttccatttcatcactccctttcactttgaaagtcgccgtcgatctcggcttgttagatattatagccgaagccgccgacactcctcctggtatggtgtcggttgctgagatcgtctctaagcttcccaccaataatccaaacgccccttccattgttgatcgaatgctcaggcttttggccgctcactccatcttgacctgtgatcaaatcactggccaagatggcctgacccaaagatcgtatggtcttgcatcaatcggtaaatacttcgttcaaaatga

SEQ ID NO: 200772 - DNA, 362 bp, Gossypium hirsutum
aaaaggtgaaggtatattatagctttgcgataatggcgagaagtgtttgcgtttggtttgccttggctgcaattgtatgctctttatcggccatttctgctgaagaaagcagtgaatcgaaagaattcgttttgacattggatcactctaattttactgacactgttagcaagcacgatttcattgtcctcgaattttacgctccttggtgcgggcactgtaagcatcttgctcccgagtatgagaaagcagcatccattttgagtaaacatgatcctccaatctttctagctaaagttgatgccgatgatgaagcatacaaagatttagcaagccaatatgatgtcaagggctaccctacg

SEQ ID NO: 200773 - DNA, 402 bp, Gossypium hirsutum
  unsure (1)..(402): unsure at all n locations
cttactcactctgtctctccaaactttgggccatgctggatctgccccttctttcaatatttgaaaaccaagaaactaattttaatttgaatcatgttgcggtacgactccacctcgtcatcagcgggaagtagcagtggcagcttatcatcctcctcctcctcgtccaagccaccgcagcaagatattgatggactactcgccggtgctggttataaagtccggtcgtcggagttacgacaagtagctcaacgactggaacgactcgaaaccgccatgggtaattcgcctgcagatttctctcaacttgcctncgatgctatactctataacccttctgatctggcctgcntggtcgactcgctgctaactgagttcgctgagcctcctcccacttgctcc

SEQ ID NO: 200774 - DNA, 358 bp, Gossypium hirsutum
  unsure (1)..(358): unsure at all n locations
acctgtttccagaggttggcaggaaaaaggctggacacttgctcaagtacccgaatgctcaagtgataaaccttggaatcggtgatactactgaacctattccagatgttattacgtctgcaatggctaagaggtctcatgcattgtctacgctggagggttacagtggttatggagctgaacaaggtgaaaaggcattgagagctgcacttgcttcaacattctatcgcaaccttggcattgangatgatgatatttttgtctcagatggtgctaaatgtgacatatctcgccttcaagttgttttcggatctaatgtcacaatggcagtgcaagacccgtcatacccggcttacgt

SEQ ID NO: 200775 - DNA, 376 bp, Gossypium hirsutum
gtcgagaacaccctgtaggagcacttcctttgctgagtctggctggccaagatgccaccgatgcctttgtagcctatcatcctggcttagcttggcaatatcttgacaagttctttaccgggtattatctcaaagattactctgtctccgaggtatccaaagatttcagaaaacttgctgctgagttttcaaaaatgggtctttttgaaaagaaggaacacgggacaggcattttgctttgcatcatagcattgctgttttctatcagtgtttacggtgttttatgctctaacagcgctttggtgcatctactttcgggtgctttactgggattctcatggatacagagtgggtggattggacatgattccgggca

SEQ ID NO: 200776 - DNA, 391 bp, Gossypium hirsutum
cttactcactctgtctctcccaactttgggccatgctagatctgccccttctttcaatatttgaaaaccaagaaactaattttaatttgaatcatgttgcggtacgactccacctcgtcatcagcgggaagtagcagtggcagcttatcatcctcctcctcctcgtccaagccaccgcagcaagatattgatggactactcgccggtgctggttataaagtccggtcgtcggagttacgacaagtagctcaacgactggaacgactcgaaaccgccatgggtaattcgcctgcagatttctctcaacttgcctccgatgctatactctataacccttctgatctggcctgctgggtcgactcgctgctaactgagttcgctgagccttctt

SEQ ID NO: 200777 - DNA, 368 bp, Gossypium hirsutum
gcgagagagaatttcaggctgaagttgagatcattagccgcgtccatcacaaacatctcgtctcattggtcggatactgtatttctgggacaataagaatgcttgtttatgagtttgttccaaacaacaccttggagtttcacttgcatgggaaggggcgactgaccatggattggccgacaaggatgaaaattgctttaggatctgcaaaaggactggcatatcttcatgaagattgtcatcctaagatcattcaccgtgatattaaggccgctaatattctgttggatttcaagtttgaagcaaaggttgctgattttggactagcgaaaattgcttccgatgtcaacacgcacgtcttcaccaag

SEQ ID NO: 200778 - DNA, 391 bp, Gossypium hirsutum
attgagactacctcttgagtcagaccaagttcttctgaaagtcatttatgctggtgtaaacgcaggtgatgtgaactttagcgcaggccgttattttcaaggaaccaagaaagaccctggatttgaggcagtgggaataattgctgccattggagattctgtaagaaatttggaagttggaactcctgctgcagtcatgactattggatgttatgctgaattcatgaaggttccttcaaagcaaatacttccaattccaagacctgacccggaagttgttgctctgcttacttcaggattaacagcatcaatcgctttggaagagcttggtcagatgaaatctggaaaagttgtccttgtaactgctgctgctggagggactggacaattt

SEQ ID NO: 200779 - DNA, 373 bp, Gossypium hirsutum
tttgccaaggcattttatggcaccgaagtagccagtactattggtcttgtgaatgcagggcagtatcttcaagacaaatatggaggcgggttgttcccgattttatacatttgggctatcgggttgttagcagccggtcaaagtagcaccattaccggcacttatgctgggcagtttatcatgggagggttcttgaacttgaagttgaaaaaatggctaagagcattgatcactaggagttttgctattgttcctactatgatagttgctcttgttttcgatacttctgaggcagcgctagatgtcttaaatgaatggcttaatgtgcttcaatcgattcaaatcccttttgctcttatcccactacttttgt

SEQ ID NO: 200780 - DNA, 363 bp, Gossypium hirsutum
agatctacaaaatttgcgcatatcactttcccctctgtgcagtagttctctgaccggtgcgcgatggtgtttttgaagggagtatcagcgctatccaggctaaggtcacgtgttaaacagcattccagtctcagcaactctgttagatggcttcaaatgcagtcctcttccgatcttgatcttcattcgcagttgaaggaattgattcctgaacaacaggagcgcctgaagaaactgaaggcagaacatggaaaagtgcaacttgggaatattactgttgatatggtcattggtggaatgagaggaatgacagggttgctttgggaaacctcattacttgacccagatgagggaattcgcttt

SEQ ID NO: 200781 - DNA, 399 bp, Gossypium hirsutum
caaagacccaccattgctgcctcagctttatcttttggggattaccagtactcctacagcttcattctgtcaaaggtaatctccagttgaactactatgctcaaagttgccccaatgctgaagagatcatcaaacaacaagtcatcaagctctacaacaaacatggaaacacagctgtttcttgggttcgaaatctcttccatgactgcatggttaagtcatgcgatgcatcgttattggtagagacggtgaatggaattgaatcggaacaaaaatcagataggagttttgggatgagaaatttcaagtacgttaagacaattaaagatgctctggagcaagaatgtccaaggacagtttcctgcgctgatatcgtctctctttctgctagaaatggca

SEQ ID NO: 200782 - DNA, 402 bp, Gossypium hirsutum
  unsure (1)..(402): unsure at all n locations
atcatggaatccatgagacaagatgagcctgattttgagcgggttattgaacttgggagggaagtgagggaaggaatatgtgaactggctcctcgaaagtggaaagaagaaataacctgtgctaatgatttggaaattcttgcccaagtgctgaagtcaagcaacctggacattcattatcttggacggattctggaattcgctttgatcactntgcagaagctatccgctccagccaatgatgatgaaatgaaaggccgctaaccaaaggttattgaaagagttggctgagatatgtggagccagagagaactcggataattctgctgccctcgcaatgatcaagggtctacgttttgtcctagaacagattcaagttcttaaagcagagataagcaaagc

SEQ ID NO: 200783 - DNA, 343 bp, Gossypium hirsutum
ggaaaatggtaaaggaaaatttgtgcgttaattaaattaaatctggtccaaactgtcccgaaacaatatgataggcaaaaatcagggcagatggtgctttgattgatgcaacatacacaaacttattactaaccaggttagtgacagtgtgttttagaagcttgtatgccatatggcatcgtcgccctccccgcatcgctgatgcacttcctgcatcctctccacggacttgcaaatgccactgcagctccaatcaaaagatgcaccacatggattccctgcttgagctttccactcgcaatccaagagagtaccacagcagaggcttcgttcgtcaatatgc

SEQ ID NO: 200784 - DNA, 354 bp, Gossypium hirsutum
gcttactggaccggattcaagtcacctgaaccaattggaccttttccgaacactgggggtaaaccccggattttggaaaatggtggccaaaccattaccaccctttcaaataaatttaaaccctattaaaccgggaaaaaaggttattaaccaagtgccccgatgattgaaaccggggaaggccttggctgggctatgggtgaagcacttgcatttgctacattactggtagaaagtaaccacgttaggttgagtggtcaggatgttgaaaggggtacattcagtcatcggcattctgtgattcatgatcaggaaaccggggaacagtattgccctctggaccatgttatcatc

SEQ ID NO: 200785 - DNA, 364 bp, Gossypium hirsutum
agaaacctaggtgtaaacttgacctccaaatggtggactggaatccagtatgtcatcctggatttggtaggtcgtggaactgttccacaagtgtttgtgaatggcaagcatattggaggctctgatgatctcagtgatgcagtccataatggtacattgcaaagccttctagctgcaagttaatgtaagaaagaaggaaataaattgacttgtgaactgtaaagctgcctgtggattagaagatcatttctgggttgtgaacttagtacgttcactgcaagattttgttgagtgcgctgtgataatggcatgtctctttgaggttatcttatatttcatcttcatcatggaagagaatgactat

SEQ ID NO: 200786 - DNA, 245 bp, Gossypium hirsutum
tatatcaatccaatcgataccctcaacctcacatggcgaccctgcacccaattcttcctatagttagtcctattacaattcactgtccttcgttttacaacgttgcaactgataaacacccttgctatcccatcttaattcacttgcatcacattcgcactcttgaaacttacctaatagcgaataagccctcatccaactgacttaccaacattttctccatccttatcacaaattgcatatcc

SEQ ID NO: 200787 - DNA, 358 bp, Gossypium hirsutum
gtagctctaactacctccgcctgtctttgaacgagaagagaacaagaaaagaaactaagaaatggcacgcaagaagatcagagagtacgattccaagagattgttgaagcagcacttcaaaaggttttccgcctacgatttgcccatcaaatctgcacaagtgacggagtcaactgatttcaatgagctagtagagaaggagccatggcttttgtcgcagaaactggttgtcaagcctgatatgttgtttggaaagcgtgggaagagtggtttggttggcttgaatcttcatttcgctcaagttactgcatttgtgaaagagcgcctcggcaaagaggtggaaatgagtggatgtaaa

SEQ ID NO: 200788 - DNA, 394 bp, Gossypium hirsutum
caacaatccaagatgttgtttcctcccgtactcgtggttgcttccatattcagtgcttgctgtcttgcaacttcaactttaggagctacacttgcaaaagacgaagtgtaagctctggaaagcatacgtgaaacattgacgaagacaaactgtaaatttatcgtggatccgtgcagcagcggacactagagttgtgcaaaatttgcagaaaaagtgtcatactatggtcataatgtcacttgtgattgcaattccagcccctgtcatattgtccgcatagtgctgaagggacaaaatctatcactcactctctcaccacaggtgacctgacttccttacctgcgctaaatcgatctcagtcgtaactatcccagtggctccattcctcgtcaat

SEQ ID NO: 200789 - DNA, 405 bp, Gossypium hirsutum
atctacttgaaccatttgtctttcatttctgtttgccgtcccaattgcttttcattctcccgccaggaaaccttatattatatgaatatttgattatttttcttaatcttttccgtatatttttgtttgtctttcttatgggattgatttttatcattatttcaatttccatcgtctgggtagcttctctttggaagattttcttctcccattcaaaacccacatttttaaatgaaggtacacctttgcacaaaaaaaatgtcttgctggttgttgcgcaccctgatgatgagtccatgttcttttcacctacaataaactacttgacttcaaaagggcacaatctttacctattatgcttgtctattggtaacgcagatggcatgggaagcagtagaaaagatg

SEQ ID NO: 200790 - DNA, 383 bp, Gossypium hirsutum
cctttcccaaatccaaatcactactatctcattcaggcatcccaaagtttccaaattcgtctctgggtttttctcttcatcccttagtctcaaatgggtcgtaggctaaacgacccagaacactcccgtttcgcctctctcatcctgctctcggtggctctcttctcctgtgttttggtctatgcagttgtttcgactttcttgaaccccaatgtaagttctcaagattcgagctttgagtctttggaaatggtggcgagtggtgatttgggggagaggaaggacgagtgttgtagaggcatcgagaatttggagttatggggtccagctgtaaagtggggatccgagttcaagttcaattcctctgtggaaatgtgtcaggc

SEQ ID NO: 200791 - DNA, 411 bp, Gossypium hirsutum
gattcagttaagggttcgcacatgtgggacatagacggtaatgagtatatcgactatgttggctcttggggaccagctataattggtcatgcggatgacgaggtgcttgaagctctggctgaaacaatgaagaaaggaaccagctttggcagtccttgtcttcttgagagtgttttggcagagatggtaatctcagctgttccaagcattgaaatggttcgatttgtaaactctggtacagaagcatgcatgggtgtgctccgccttgcccgcacctttactggccgagaaaagataatcaaatttgaaggttgttaccatggccatgctgatccatttcttgtcaaggcaagtagcggagttgctaccctagggctgcctgactcttctggtgttccgaaagcaaccact

SEQ ID NO: 200792 - DNA, 415 bp, Gossypium hirsutum
cggaccagccaacttaagaggggacctaaattggttaggcccaagggcttttgcaaaaaaaatggtttaagctgggtccggggtgctggtagcttaatggatgaccagaaccttaactgaaaacattccgggatggggaactttgttcaatgcccgtccaggcaatggaaccgcaaatgttcttggggcaactttttggttcgtaattccaaacaagaagcgaaagggagagaaattgatggactggaacgaatgcaagaagctgccatggaacattattttgttactaggggctggtttcgccatatccgacggagtccagtcaagcggactcgctgatcaattatccaaaactctagattttctcgaagaggctccgtatttagctattgcccccgcggtgtgtttaatctgt

SEQ ID NO: 200793 - DNA, 412 bp, Gossypium hirsutum
gtcgcattggtgagagcacaattgagaagagcgactgagagatatggatctttgaattcaagaaaagtttcgaatgccatttcccagctaccggaaaaagagcgcagcaataccaaccatgaaatttcagcgaagctggatagcattccagaaagttgtactactctaggacatgctgctgataaggaaactaagatattggaaagggtgaatagctcttcaattccttctgaggtctgcctatcaaatgaggttgattccaaagggcaagagaatctggctgctaagggtgctgaacaaaccaagaaacccgatacactagtaatacctgttgatttcctatgccctatatctttggaactaatgagggatccagtgattgtggctacaggacagacatatgagagatctt

SEQ ID NO: 200794 - DNA, 370 bp, Gossypium hirsutum
  unsure (1)..(370): unsure at all n locations
caaagctctttctaaatcaaagtgaaatcgagaaatggcacctgaacgattatccaccgagaacagacatgaccatcactgggaagcttaatcctgaagatgataccatcttccttaaagttcagattgcagatacagagggttctactaggaacatctactttccctttgatattgtggaagatacgccattggatgtggcaactgaaatggtgaaagagcttgagataaccgattgggatccacttgaaattgcagaaatgattgatggtgaaatttcagctctaagtccacaatggaaaaaatcagacctnnctagacatcaagcccattatacatataactaccaggaagatgatgatgatgggtg

SEQ ID NO: 200795 - DNA, 371 bp, Gossypium hirsutum
gccctatttcccgaaaggtgggttccggaaacctttggttggaaagtacccaagtggtgggccctcccaagtatctaaaaagttgatttgtctcaggttttgtcagcaatgcttccttttgttgtcgctattaccgctgttgctgctcttgttcaaccttccactttcacctgggtatctaaagacttgtatgctcctgcacttggtgggatcatgttgtccattggaattagactttcatttgatgatttaacacttgcattcaaaagacctttaccgctatctgttggatttattgcacagtatttgctcaaaccggcacttgggtttttagttgcaaaggcattttgtttgtctccgacattctatgc

SEQ ID NO: 200796 - DNA, 408 bp, Gossypium hirsutum
gttgattgcaacaagtgttgcagctaggggtttagatgtaaaggagcttgaattagtgattaattttgatgtcccaaatcattatgaagattatgttcaccgtgttggtaggactggtagagccgggcggaaaggctgtgctatcacatttatctctgaggatgatgcaagatatgcaccggatctcgtaaaagctttagaactctctgagcaagttgttcctgatgacctgaaagctctcgcagatggctttatggcaaaagtcaatcagggacttgagcaggctcatggaacaggttatggtggaagtggttttaaattcaatgaagaggaggatgaaaagagaaaagcagcaaagaaagcacaagcaaaagaatatgggtttgaggaagacaagtcagactctga

SEQ ID NO: 200797 - DNA, 413 bp, Gossypium hirsutum
ccccagcaaagatcagtacatacacgattggtcctttgccaacattgagaagtgaaaaaccaaaattgaaagtcaaagttcgtttgaatttgcatggaattgggtctgtggactcagctacactcttggaagaggaagaagttgaagttctagtttcaaaagagctggcaaaagaagatgctaagatggagacagatgaaaagcctaatgatacttctgcccctggtgccaacgagacagatgttaatatgcaagatgccaagggtacagccgaggcagctggggtcgaaaatggtgttcctcagtctggagacaagcctgtgcagatggagactgataccaaagttgaggctcccaagaagaaggtgaagaaaacaaatgtcccggtggcagagttggtctacggtgcaatg

SEQ ID NO: 200798 - DNA, 351 bp, Gossypium hirsutum
  unsure (1)..(351): unsure at all n locations
gaagaatattttagcactagtgatgtggaagtggctgcatcagacctcaaagatcttggctcaagtgaatatcatccttattttattaaaaggcttgtctccatggccatggacaggcatgataaagagaaggaaatggcatcagttctgctttcttcactctatgctgatgtcatcagcccaccccagattcgggatggttttgggatgcttcttgagtctgctgatgaccttgctgtggatatactagatgcagttgatatcctcactctgtttgtatctcgtgctgtggttgatgagatactgcctncagctttcatcacaagggcaaagaaaacacttnctgaatct

SEQ ID NO: 200799 - DNA, 290 bp, Gossypium hirsutum
gtctcccgctatctcaatggagaagctcaacacatagagtggaggaagatccagactccaactgatgaagtggttggtccttatgacaccttgtctgcctctcctgatgatccctgctgaaaccaaaaagctcttggacaaacttgttgtcttaaagcttaatggaggtctcggaaccactatgggatgtactggtcccaaatccgtcattgaagttcgcaatggcttgacttttcttgacctaattgttattcagatcgagaatcttaattctaaatacggatgtaatg

SEQ ID NO: 200800 - DNA, 398 bp, Gossypium hirsutum
gcgagagagaatttcaggctgaagttgagatcattagccgcgtgcatcacaaacatctcgtctcattggtcggatactgtatttctgggacaataagaatgcttgtttatgagtttgttccaaacaacaccttggagtttcacttgcatgggaaggggcgactgaccatggattggccgacaaggatgaaaattgctttaggatctgcaaaaggactggcatatcttcatgaagattgtcatcctaagatcattcaccgtgatattaaggccgctaatattctgttggatttcaagtttgaagcaaaggttgctgattttggactagcgaaaattgcttccgatgtcaacacgcacgtcttcaccagggtgatgggtactttcgggtatttaacccct

SEQ ID NO: 200801 - DNA, 347 bp, Gossypium hirsutum
ccgagttggttaaggaagaagattgggaagttcttgggaaaatggaagaagaatacattgagagcctttgcttgcagattcttaaattcaaaccagacttggtggttacagaaaaaggacttagtgacttggcatgccattatcttagcaaggctggtgtcagtgcaattaggagggtgagaaagactgacaacaacagaattgcaaaggcatctggagctgttattgtgaatcgtcctgacgaattgcaggaatccgatgttggtactggagctgggctatttgaggttaaaaaaatcggggatgagttctttgcattcattgttgattgcaaagatccaaaagct

SEQ ID NO: 200802 - DNA, 397 bp, Gossypium hirsutum
cgaagaaggtgccggattagagctccctgttgtggtgagatatttgattgtcgtcactgtcataatgaggcaaagaacaatatcaatgttgaccagaagctcagacatgatctcccacgccgtcaaatcagtaagattatttgttcgctatgtggcacagaacaagaggctcaacaagtttgcatcaactgtggtgtttgtatgggaaaatatttctgcaacacctgcaaactttttgatgatgatacatcgaagagacagtatcattgtgatggttgtgggatctgtaggattggagggcaggagaacttcttccattgccacaagtgtggttgctgctattcaattcttctgaaaaatagccatccctgtgttgaaggagcgatgcaccatgact

SEQ ID NO: 200803 - DNA, 410 bp, Gossypium hirsutum
gtctcctaatgggcaatctgaacaaactgcaaatggggggttctgttcatatacaaacaacctctcatctgggcggaatcagaaccttcatcccttccctcatgtcatgaatatgcacaacgcacgaccatcatcaggtgtaggccaatcatatggatacatgaaccacatgtaccctaacaatgtgacctatggtcattatgggaatgccattagaggcggttctgggtttggatcatatggatatgatgcccggaagaaaggtctagggtggtataatgttggtaacaacaaatctaggttccgtggttatggaaaagagaatattgatggtttcaatgagctaaacaaaggacccagagtaaaagggtataagaataaagatggttctggaaatgcaactctagctg

SEQ ID NO: 200804 - DNA, 412 bp, Gossypium hirsutum
gggagaagaaagacttgtatgtaaagagtgtacagagaactgtgatttggatgggaaagaagcaggagacagttgaggacgttccttgtggtaatacagttgccatggttggtttggatcagttcatcaccaagaatgctacattgaccaatgagaaggaagttgatgcccacccaattcgtgccatgaagttttctgtctcccctgttgtccgtgttgctgttcagtgcaaggttgcatcagatcttcccaaacttgttgaagggttgaagcgtttggccaagtctgatcctatggttgtctgtaccattgaagagtctggtgaacacattgttgctggtgctggagagctccaccttgagatctgtctcaaggatttacaagaagatttcatgggtggtgctgagatcgt

SEQ ID NO: 200805 - DNA, 404 bp, Gossypium hirsutum
catcgtgagctggaaaggtgcgtgcttttatgagaacaccgcttggatggagttccataacaagagtggcagtgagttcggtggtggaactctccatatcaaggttagcaaagcccatagttggacgtgtctggatctttatctctttgcaactccatatcgtgtaacttgggattattattttctatctcgggagcataccctcgagattgacaagtgggaagacagagctgagtatgaatatgtgaaaaacaaggggatttctattttcctgatgcaagcagggatgcttggaacacttgaagctttatgggaagtcttcccattatttactaacactggatggggtgagagtgccaacctcgggtttctcaagaaacacatgggggcttctttcgaatcac

SEQ ID NO: 200806 - DNA, 383 bp, Gossypium hirsutum
  unsure (1)..(383): unsure at all n locations
cttaacctatcatttaatcacatgagttatggcatatctccaagactcgtgtttacagaaaagctgcttgtattggatttgagtttcaatgatttatcaggccctcttccggggaaaattgctgaggcaactgaaaaatcaggccttgttcttctcgacctctctcacaaccggttttctggtaaaatcccattgaagatcaccgagctgaaaagcttgcaagcattgtttctttctcataatcttcttacaggggaaatcccagcaaggattggaaatttaacttatctccaagtggtcgatctgtcgcataactccttatcaggttcaattccattagatattgntgggtgttttcagttacttgcattgatactcaacaa

SEQ ID NO: 200807 - DNA, 382 bp, Gossypium hirsutum
gcaggattcacttggtggcaacaacagaactgtcatgatagcctgcattagtccggccgatatcaatgccgaggaaactcttaatactttgaagtatgcaaatcgagctcgtaatatccaaaacaagcctgttgttaaccgagatcctatgtccaacaagatgctaaaaatgcgtcaacaattacagtatctgcaagccgaactttgtgctcgtgggggttccgatgaagtgcaggttctcaaggaaagaattgcttggcttgaagctactaatgaggatctttgccaaaaacttcatgagtaccgcaaaaaatgcaacattacggagcaatgtgaaatagattcgagaaactttgatgaagaggcagctaaagaatgggag

SEQ ID NO: 200808 - DNA, 407 bp, Gossypium hirsutum
gtggaatctgccacaccgatcttcatcaagccaaaggtgatcttggcatgtcaaactacccaatggttcctgggtactactagaactgttttctttatgtttcctagcctgtttctttatcttcatgttcatgaatcaatgaatttcttttggacatttttggattgtgaatttattactttttccaggcatgaagtggttggtgaggtgttggaagttgggtcagatgtaagcaagttcagagttggtgatattgttggcgttggttgtattgttgggtgttgcagaaactgccgaccatgcgactcagacaatgaacaatactgtcttaagaagatctggtcgtacaatgatgtttacactgacggaaaacccacccaaggtggctttgctggttccatggtcgt

SEQ ID NO: 200809 - DNA, 371 bp, Gossypium hirsutum
gccatggctgatgaaagtgtgatggttaaaggaaatggtaccatttttctagctggaccacctcttgtcaaagctgctacaggagaggaagtgtctgcagaggatttagggggtgctactgttcattgtaagacctctggggtttcagattattttgctcaagatgaaatgcatggacttgctctcgggaggaatattgttaagaacttgcacttggctgggaagcaagggatgttgagttcatctccacccgcaaaccttgaatttaaagaaccattgtatgatgttaaggaactccgttccattgcaccagtagaccacaagcagcagtttgatgttcgatcagttattgctcgaattgttgatggaag

SEQ ID NO: 200810 - DNA, 376 bp, Gossypium hirsutum
gtttgaactgatgtctcctgttgagtctgtgaaaagggttttaaagatattgcgaggcatttttcatccaaaagggattgttgttcctgatcctgtccaggctgtttgtacccggtggggaaaggatcgcttcacgtatggatcctactctcatgttgctattggttcatccggggatgattatgatattctagctgagagtgttggagatgggagagtcttctttgctggtgaggcaactaataagcagtatcctgccacaatgcatggagcctttttaagcggcatgagagaggccgctaacatgcttagagtggccaggaggaggtcattggttctatctgacaaagttaataacgacttggagaaatgtgat

SEQ ID NO: 200811 - DNA, 387 bp, Gossypium hirsutum
aagacccatcattcatgtcccgaaaaaactggtctggtccccagagagtgttgacgataagatctcaaacagcaatttccttgccaatggacccgttccttcaactccaactcgttcaaaggtgaagcggcatacgatttcggtgtttgttggggatgaaagtgggatgattaataggattgctggagtttttgctagaagagggtataatattgagtcacttgcggttggtttaaataaagataaggcactttttaccattgttgtgtctggtactgatagagtgcttcagcaagttgtggagcagttacaaaagcttgtgaatgtttggaaggttgaagatctctcaaatgagcctcaggttgaacgtgagctaatgctaataaa

SEQ ID NO: 200812 - DNA, 292 bp, Gossypium hirsutum
  unsure (1)..(292): unsure at all n locations
catggatgtagcagcattgtaaatcttgagttgcttcctcagncaccgcagacaagagctcctggcaatccttggccacagtggcctcgcatattccgtgtagactatgggcaccaagaagctgctaccaaatttggaaaagacccaagaatcctatgaggttttgactaagaggtttataggagatgataatggaactgtgaaaggacttgangtggttcgtgtgcgttgggagaaggatgccaagtggaagttccaattcaagaagttgagggctcanaggaaataatcg

SEQ ID NO: 200813 - DNA, 414 bp, Gossypium hirsutum
aaaagattgaggatgttgccaaactcctttgctgggggaagaaggatgagaagggtgaaattgccatttggcaaaagagagtcaatgatgagtcttgtcgtggtagagaagatgattctcaagccaaattctgcaaggctgaagaggctaacgatgtctggtacaagaaaatggatgtgtgcgttactccataccctgatgttagtagttcgagtgaagttgctggtggggaattgaagccattcccagagaggctatttgctgtccctcctagaattgctagtggaagtgttcctggagtttcagttgagacatatgaagaggacaataacatatggaagaaacatgtcaatgcatataagaaaatcaatagacttattgactctgggaggtatcgtaatattttggatatga

SEQ ID NO: 200814 - DNA, 375 bp, Gossypium hirsutum
gcaaaactggtggacttggtgatgtcctcggtggacgtccttccggaatggctggcaaaggacaccgtgttatgacagtgtgtccttgctatgatcagtaccagggttcctgggatacaagtgggttaattgatctaaaaggtcgagacaaaggtggtactggtcgggtcttccaattggtccaaactggaagtgatcggggtcttgtcgatcaccccatggtccttggaaaaggatggggcaaaaacagcatccaaaaatctatggcccccagagcaggttttggaactacgaagacaatcaactgcggttcagcttgttatgccaggctgctttggaggcacctagagttctaaatttaaatagcagtaaaaa

SEQ ID NO: 200815 - DNA, 370 bp, Gossypium hirsutum
cttctcaaatcttttttcaatcaactctgtccaaagatgcagatcttcgtcaaaacccttaccggcaagaccatcaccctcgaggttgagagttctgacaccatcgacaatgtgaagtctaaaattcaagacaaggaaggcatcccaccagaccagcagcgtctcatcttcgccggaaaacagctcgaggacggccgtaccttggccgattacaacatccagaaggaatctacccttcaccttgtcctccgtcttcgtgggggtatgcagatcttcgtcaaaaccttaaccggcaagaccatcaccctcgaagtcgagagctccgacaccatcgataatgtgaagtctaaaattcaagacaaggaaggca

SEQ ID NO: 200816 - DNA, 373 bp, Gossypium hirsutum
gctggatttgggtgctacgaggtccctagtcgagagatggttccataatcttcccatggttcaacctttctatgcagtcaaatccaaccctaaccccgctttcctcaaagaaatggcagctctcggcaccggctttgactgtgcaagccttcctgagattgaaaccattttatcgcttggggtttcgcctgatcgaatcgttttcgcaaacacatgcaaacccgagtctcacatcaagtatgcaactaaagttggcgttaacttagccactttcgactccaactgtgagctcgaaaagataaagaagtggcacccgaaatgtgaactgttgatccgaatcaaagtcccggaagccagtggttcaacattcatg

SEQ ID NO: 200817 - DNA, 377 bp, Gossypium hirsutum
gattacgccggcgccgccgtgctcggctggggagacgggtattacaaaggggaagaagataaagagaaagcaaagtcaaaagcttctttatctacaatcgccgagcaacagcatcgtaaaaaggttctcagagaactcaactctttgatttccggttcaaccgccaacactgacgacgccgtcgatgaagaagtcaccgacaccgaatggttctttttagtttccatgacccaatctttcgttaacggcaacggacttccgggacaagcttttttcaattcatgtccagtatgggtcgctggatcggaccgcttagccaattctacgtgtgaaagagcgaaacaaggacgggttttcggtttacaaacgataggttg

SEQ ID NO: 200818 - DNA, 393 bp, Gossypium hirsutum
aattgaatgggtctgtaataccttcagaacgtccaaggcatatgatgttggagatgtggaatccccttggaattgttggtgtaattacggcatttaatttcccatgtgctgttcttggatggaatgcctgcattgcactggtgtgtggaaactgtgttgtttggaaaggtgctccaaccactcctctggttacaatagcaacaacaaaattagtggctgaagttttggaaaagaataacttacctggtgcaattttcacatcattttgtggcggtgctgaaattggggaagcaattgcaaaagatcgacgcattaatctaggttcatttacagggagttccaaaggtgggtgtaaaagtacaacaaacagtaaatgagaagtttggtaaatgc

SEQ ID NO: 200819 - DNA, 398 bp, Gossypium hirsutum
gtttaaggttgttcttgggtttctttctctttactgcgagttctgtcaacattgtatgcagccgtagtctgcaaaaagatcatatcgccttgtttgtctttggggattcagtgtatgatcctggaaataataactacatcgacacgattgctcgggcaaattattatccatatggtgaaaccttcttcaaataccccactgggaggttttctgatggtcgtttaattccagactttattgccgagtatgcaaatttaccactaattccaccatatcttcaacctgggaatcatgaagttactactggggtcaactttgcttcagctggagctggtgctttgtctgaaactaatcaaggattcgtgatagatttgaaaacccagctaagttatttcaag

SEQ ID NO: 200820 - DNA, 410 bp, Gossypium hirsutum
gcgacttccaccatgaaaacaagcttcatagccattagcctagcgggaatggttgctggaatggtgaaagctcaatgcggcaacacttgctcggcgaccgagtgttgcagtcggttcgggttttgcgggacgggagacgatttctgcggagtgaattgccgagggggtccttgtgttaacaatggggtctccatagctgccattgttacgcaggaattcttcgatgggatattgaaccaggcggcttccacttgtgtaggaaggagcttttactcgagaggggtgttccttgatgctctcaattctttcactcagttcgcaaggattgggtcggttgaggattctaggcgtgagatcgctgctttctttgctcatgctacccatgaaactggaagtaagcatctcttttt

SEQ ID NO: 200821 - DNA, 407 bp, Gossypium hirsutum
atcatggaatccatgagacaggatgagcctgattttgaccgggttattgagcttgtgagggaagtgagggatgaaatatgtgagctggctcctcgaaattggagagaagaaataactgatgctattgatttggaaattcttgcccaggtgctgaagtcaggcaacctggacattcattatcttggacggattctggaattcgctttgatcactttgcagaagctatccgctccagccaatgatgatgaaatgaaggccgctaaccaaaggttattgaaagagttggctgagatatgtggagccagagagaactcggataattctcctgccctcgcaatgatcaagggtctacgttttgtcctagaacagattcaggttcttaaggcagagataagcaaagctcgtat

SEQ ID NO: 200822 - DNA, 304 bp, Gossypium hirsutum
cattagaacttgtgtgtaccgcaaaaagaccagacgcggatcttctacttacatggaaaagcagataccatttactggaatattaagtgaaaaagccgaagaaaatccagactttttcaattggaaccgagtaaagcttcgttattgtgacggtgcctcttttactggggacagcgaaaataagggtgcacaattgcaatttagaggccaacgtatatggttagctggaatggaagatttaatgtcaaaaggaatgcgctacgcaaatcaagctcttcttttcgggtgttctggctggggtctg

SEQ ID NO: 200823 - DNA, 393 bp, Gossypium hirsutum
ggaaggtactactttacctaatggtgggagaccgtcgggaaaggtgccaggatattgggaaatggaagaacaagaagcttattaaagcacttgaagccgctagaggcaacggcaccagcatgatatctctcataatgcctccacgtgatcagatttcaagggttaccaagatgctgggagatgaatttggaacagcttcaaacatcaaaagcagagtcaaccgtcaatctgtgttaggtgcaatcacatctgctcagcagaggctcaaactttatagtaaggttcctcccaacgggcttgtgctctacactggaacaattgtgactgatgatgggaaagaaaagaaagtcacaattgattttgagcctttcaggcctataaatgcttctcttt

SEQ ID NO: 200824 - DNA, 369 bp, Gossypium hirsutum
ggattatcaatttgaagccttcttcgaaattcctctgtcaagatgcaaattttcgtcaagaccctcactggcaagaccatcacccttgaggtggaaagttctgataccatcgacaatgtaaagaccaagatccaagacaaggaagggatcccaccagaccagcagaggcttatctttgctggtaaacagctggaggatggccgtacccttgctgactacaacatccagaaggaatccacactccatttggtcctccgattgaggggtggtatgcaaatttttgtcaagaccctcaccggaaagaccatcacattggaggtggagagttctgatacgattgacaatgtcaaggccaagattcaggacaag

SEQ ID NO: 200825 - DNA, 372 bp, Gossypium hirsutum
cgccattctctcatttttcgcgtcctttatttaccgtttgggtttctttgggattgacttcgttcaatctttggttttccaaccatcgcctgacgtttggattgccgaggaagaggatgatgaagttctgcttgcaaaggaagatgcccgtaaggtcccttgcgggcaagctctcgattgttcgcttccacctctgcctcctgcggcaccaatcgtgaccgtccagaaggtgttcgatgaaaagcctgtgacggttctaacggaggaagatgaagaaataattaaatctgtagtggctggtacaaccccttcatattccttggaattgaaattgggtgattgcaagagggcggctgcaatcaggcgggaagc

SEQ ID NO: 200826 - DNA, 412 bp, Gossypium hirsutum
  unsure (1)..(412): unsure at all n locations
gcaatggtttgtcagcctgctgagataattggtcttggaacaattgcaagtcatatccgattttggggaatcgattcaggaatacgacacagtgttggaggtgcagactatggatctgttcgaataggagcctttatgggtcgaaagattataaaagctacagcatcaactaggttgtctcaatcaatgtctactgctaatggggcatcccctgatgaagtggacaatgatggactagaattacttgaagccgaagcttcattagattatttatgcaacttgtcacctcacagatacgaagctctttatgccaatctacttcctcaatcaatgcttggtgaggtgttttttgagaaatatgtngatcatggtgatacagttacagtaatcgataagaaacgaacatatagtg

SEQ ID NO: 200827 - DNA, 365 bp, Gossypium hirsutum
gttgaacaaattagcagcagaaccaaatgcatgaagctttaatcgaacagactatatctatacactagtactgatatcaaggtaaatggacttcttggatcctgtgtaagcgttgtgtttatctagctcaaccatttctatgcttgtgaatggaatctgagcaagcggattctcacaaaatggattttaacgcgacggaggaagaggaatttggattctcaagaaactatttcttagcaaaagaaatgggcagttctgggaagaaatctgctcctaaactcagtgatatcaatgtcgttgacgaacaggtattttgcctcattgaatccccatctcaaaaaaagctttgttttttttattctttt

SEQ ID NO: 200828 - DNA, 408 bp, Gossypium hirsutum
gaagaatattttagcactagtgatgtggaagtggctgcatcagacctcaaagatcttggctcaagtgaatatcatccttattttattaaaaggcttgtctccatggccatggacaggcatgataaagagaaggaaatggcatcagttctgctttcttcactctatgctgatgtcatcagcccaccccagattcgggatggttttgtgatgcttcttgagtctgctgatgaccttgctgtggatatactagatgcagttgatatcctcactctgtttgtatctcgtgctgtggttgatgagatactgcctccagctttcatcacaagggcaaagaaaacacttcctgaatcttccaagggatatcaggttctccaaactgccgagaagagctatctctcagctccccac

SEQ ID NO: 200829 - DNA, 414 bp, Gossypium hirsutum
tcgcaccaggaggcccattattcattgtccggaaaaacctggtctttgccccaagaaggtgtgccgataggaactcaaacagcaatttccttgccaatggacccgttccttcaactccaactcgttcaaaggtgaggcggcatacgatttcggtgtttgttggggatgaaagtgggatgattaataggattgctggagtttttgctagaagagggtataatattgagtcacttgcggttggtttaaataaagataaggcactttttaccattgttgtgtctggtactgatagagtgcttcagcaagttgtggagcagttacaaaagcttgtgaatgtttggaagggtgaagatctctcaaatgagcctcagggtgaacgtgagctaatgctaataaagtgaatgcagacccaaa

SEQ ID NO: 200830 - DNA, 392 bp, Gossypium hirsutum
gagccaaggaagtggccatctttgcctcagcttctgagtctttttccaagtcaaacataaattgcagcatcgaagatagtcttgctcgttttagagatgttgtttctgctgctagagagatctcacttccagttcgagggtaccgtcattccaatgctcgaaaatgttatgaattttgtcccaatcgataatcttgctgtccactttcatgacacttatgggcaagctctgtctaatatcttaacatcactccaaatggggatcagtaacgtggattcatcagtttcgggtctcggaggttgtccatatgcctagggtggttccggaaatgttgccaccgaggactggtttacatgctcaatggacttggaatagagacaaatgtcgatctc

SEQ ID NO: 200831 - DNA, 291 bp, Gossypium hirsutum
agaatattggtgtgaaaaaagctctggttttttacaaaagaaggcctcctaaggggatgaagaccaattggatcatgcatgaatatcgacttgcagataaccctaattccaacttcaacaatagaccactcaagtccaaagattcctccatgaggctagatgattgggttctttgccggatctacaagaaatccaatgctttatcttcaacaacagcaataggagcagcaacaagtgatcaagatttagaggaagaagaagcagaacagttcattaaagatgcccttttaa

SEQ ID NO: 200832 - DNA, 395 bp, Gossypium hirsutum
gcagaatttcgcaccagccaaaaaattccaatttttttggttgccttttcaaaggccatttgtactttaaaaatttggttccaagtaaagtattaaaatctaaaagaaaaaaaagtgctaaaaaagctaactttttttttctttctattgttccttctttactctgggttcgtttttcaaagcatataaacctaatttctaacagagcagctgcaactatcatcacccatggcggcaccgatctgggtatgggctttttacgtagccctaactctatttccttccgttttgggaaactcagaaggcgatgctctttatactttgagaagaagcctatcggatcctgataacgtgctccagagctgggatcccacccttgttaacccttgtacttg

SEQ ID NO: 200833 - DNA, 315 bp, Gossypium hirsutum
aaccaattctgagtggcacattcgtgtgtgaatatgttggggagatctttggcgagcaagaggcaaacaataggcttaccaggtatggtagagatggttgcaactatatgttcaacattggttctcaaataaatgatatgagccggttgattgaaggacaagcacgatattttattgatgcatccaaatacggaaatgtttcccggttcatcaatcatagctgctcgccaaatcttgtgaatcatcaagttcttgtggaccgcatggattgtcaccgagctcacattggtctctatgccagtcaagatatatctg

SEQ ID NO: 200834 - DNA, 390 bp, Gossypium hirsutum
cttaactttctctccaaagcaaaccgtgtcgtttacgctacaatcatcgcaaatggcgtcttttactacgttatctcaatcgcctccaaagctattgtttcgtcagttgttcgagaaagaatcatctacttatacttaccttcttgctgattgttcccaccctgataaaccagcgcttttgattgaccctgtagacaggactgttgatagagatttaaatttggttaaagaattggggctgaagcttatttatgctatgaacactcatgtacatgctgatcatgttactggaactggcctcatcaagggcaaggtgcctggtgtcaaatccgttatttcaaaggccagtggttccaaggctgatgtttttgttgaagctggtgacaaaat

SEQ ID NO: 200835 - DNA, 362 bp, Gossypium hirsutum
ccaccctccaatcctccggatcttaacacacagttggataattgttgtgtgtgggaaaacgaaataggggattcatggaagagaggcatattctgtttgggaaatatgagatggggagattgcttgggaaaggcactttcgccaaagtctactacgcgaaggaattaaaatcgggtgaaagcgtcgcgataaaggtcatcaacaaagctgaggtaaagaaagaaggcatgatggagcagatcaagagggaaatctctgtgacgcgtcttgttcggcatccaaacgtagtggaactcaaagaagtcatggcgaccaaaaccaagatcttctttgttatggagtacgtccgtggcggtgaacta

SEQ ID NO: 200836 - DNA, 358 bp, Gossypium hirsutum
cagttgtaaaagctgcagttgatgaaagattaagggggcttcaaatttggagggaatcacagggccgggcatctaagctatatggttttaagcatgattctatgtcatcgcttaggaaaacaagtaagacaggagaattggttgattcaaaaactaatggagatctttcacgttccaagtccgaatcaatgaatgaggatgaaaatcttctttgtctgacaggagatgctaagtcggattctgttccagatcttcaacagcaggttgtagggttaaaggtcgagttgtgcaggttgctggaagagaaaagatcagctgttctcagatctgatgaactggagacagcattgatggagat

SEQ ID NO: 200837 - DNA, 408 bp, Gossypium hirsutum
gtctcctatgggcaatctgaacaaactgcaaatggtgggttctcgtcatatacaaacaacctctcatctgggcggaatcagaaccttcatcccttccctcatgtcatgaatatgcacaacgcaggaccatcatcaggtgtaggccaatcatatggatacatgaaccacatgtaccctaacaatgtgacctatggtcattatgggaatgccattagaggcggttctgggtttggatcatatggatatgatgcccggaagaaaggtctagggtggtataatggtggtaacaacaaatctaaggtccgtggttatggaaaagagaatattgatggtttcaatgagctaaacaaaggacccagagtaaaagggtataagaataaggatggttctggaaatgcaactctagct

SEQ ID NO: 200838 - DNA, 387 bp, Gossypium hirsutum
gtagtctcgagttcactcattaatatgtatgtaaaaggtgggcagctagagattgctcgtactgtatttgatcaacttggttccaaggacttgatttcctggactgcaatcatgtcaggttatgccatgagtgggagaactagagaggcaagggaactctttaatatgatgccggaacggaatgtaatctcatggaatgcaatgctagcagggcatactcgtttgtctcagtgggaagatgccttagaatttatttttcttatgcggagaatgactaaagattttgaccatgtgacgcttgttctaattttaaatgtctgtgctggcctgtcagacgttgaaatggggaaaaaggttcatggatttatctaccgacatgggttcttt

SEQ ID NO: 200839 - DNA, 353 bp, Gossypium hirsutum
  unsure (1)..(353): unsure at all n locations
ggaaaccaggaccaccaagccaacggcgggggaagggncagccaacccaagggggaagcaaagggagcaagcccagaagaggcacccgccgacgggaaaaacgncagagaacgnggcacaacgcggaggagagacaaggcaggagcaggagcaggcngcggangaaacncacaggaaagcagcngcngcgacagcnncngggaaaagcaaagangaaacagncccaggggccaccaagaaggnagaaccaaagaccggagacgagaaaccngncacaagcnccgnngacgaagggaaccgagccaacacancaggggcagagcggggaaaaccgaaaccgggaggcaagaaaa

SEQ ID NO: 200840 - DNA, 391 bp, Gossypium hirsutum
gtcttgtgcaaggtccatcatgcaaatctggtagaggtgatcggctatgctgcaagtgatgatgaactcttccttatttatgaatatgctcaaaagggttcccttagaagccatttacatgatcccttgaacaaaggtcataccccactttcgtggataatgagagttcagattgcactcgatgctgctagaggcctggagtacatccatgagcataccaaaacacattatgttcatcgagatatcaagtcaagcaacatcttgcttgatggttctttcagggcaaagatttcagattttggattgtcaaagcttgttgggaagacaaatgatgaggaagcaacagcaacgaaagttgttggtacatttggatatttggcaccagaatatt

SEQ ID NO: 200841 - DNA, 290 bp, Gossypium hirsutum
cggaaccaccggcgatgatactactcggggaagaggggttgctgccttcttggctcaaacttcccatgaaactacaggtgggtggccaactgcaccggacggtccatacgcatggggatattgctatgttcaggaacagggcaacccttgagattactgggttccaaatcaacaatggccttgtgcccttggtgactaatattctggccgtggtcctattcataacttttacaacttcaacttttgacctgcatgagaagcaatttaggctaatattctgaatgacccct

SEQ ID NO: 200842 - DNA, 353 bp, Gossypium hirsutum
cggaaccaccggcgatgatactactcgtaaaagagggattgctgccttcttggctcaaacttcccatgaaactacaggtgggtggccaactgcaccggacggtccatacgcatggggatattgctatgttcaggaacagggcaaccctggagattactgtgttccaaatcaacaatggccttgtgcccctggtaaaaaatattttggccgtggtcctattcagatctcttacaactacaactatggtccagcaggagaagcaataaaggctaatattctgaatgaccccgatttggtagccaaggacccgaccatttctttcaagacaggtctttggttctggatgactccac

SEQ ID NO: 200843 - DNA, 371 bp, Gossypium hirsutum
  unsure (1)..(371): unsure at all n locations
cgncgagagagaataacagagggaaagcttaagcaatggcggccgaggaggacagcggagagttttacctccgctactacgtgggccacaaagggaaattcgggcacgagtttttggagttcgagttcaggccagatgggaagctccgatacgctaacaactccaactacaaaaacgacaccatgatccgcaaagaggtcttcctcactccttccgttcttaaggaatgccgccgcatcatcgccgacagcgagataatgaaggaagatgataacaattggccagaaccagaccgggttgggcggcaagagcttgagatagtgatggggaatgagcacatctctttcacaacttcaaagattgggtccctt

SEQ ID NO: 200844 - DNA, 370 bp, Gossypium hirsutum
acggtggtgatgagtgaaggtacagttcgacttgaggttcaaattcgaacaaaggagatgcatctgcaagctgagtttggctttgcagctcactggagatacaaggagggtgactgtaagtactcttcatttgtacttcagatggttgagtgggctcgatgggttgtgacttggcattgtgaaacaatgagcaaggaccaatcgtcaatatgctacattgattctgtcaagccaccctgcaccttccctactcattccgatgattgcccgttctcttataagcctcactgcagccaggatggacctgtctatgttatcatgatcgaaaatgataaggtatgtttcttaaatagcacttcattgctttttc

SEQ ID NO: 200845 - DNA, 390 bp, Gossypium hirsutum
aaaggttttcctcttgtctaattctataagttcttggggagcaaatattagtactggtgtttttaacatgactgttatcccaaaaccctggagggctagcatgttagcagcagctctacaacgcaccatgggtgttgggaacaaagggaatccctgtaatgggcagttacctagcttgtctcttcgaaatcttcttcttgggagaaaaattctaatcgtagatgacaacaatgtgaatctaaaagtagctgctggtgcattgaagaaatacggagcagatgtggttagtgctacaagaggaatagaagctattgagctgctcacaccacctcaccagtttgatgcctgtttcatggatatccaaatgccggaaatggatgggtttgaagc

SEQ ID NO: 200846 - DNA, 381 bp, Gossypium hirsutum
caaaagcctgatgtgtttaggggaactgtacgttatgcaagtgtgcatgctcatttgggtaggacaggcagtcgaagggatgaccttgagtcattggcttatacactaatatttttacttaggggaaaacttccctggcaaggttacattggggagaacaaaggatttcttgtttgtaagaagaagatggcaacttctcctgagatgctttgttacttgtgccctcctccttttcaacaatttcttgagattgtgaccaacatgaaatttgatgaagaaccaaattactcaaagctcatttctcttttccgtaatagcattgatttcaattcatcaatatgtcctatccaaattgatggagctattaagctgggtcaaaaa

SEQ ID NO: 200847 - DNA, 286 bp, Gossypium hirsutum
  unsure (1)..(286): unsure at all n locations
ggcagatgcaaccgnactcgnaatggggctcgaccaatctatagaagcagaattcagggacagggtanggctgctcttgcctggacgccagcaagagcttgtttcccgagtgcttgagctttttaaagttcaaccgggcttgtcttgatgtcaagtggtcctatcgatgtctcattcgctaagaatgatcctcgagttagtgcgattatatgggctggttatccaggccaagctggaggaactgcaattgcggatgttttattcggaacgaccaatccaggaagga

SEQ ID NO: 200848 - DNA, 372 bp, Gossypium hirsutum
gcaagatctgttgtcaactgagattgtcaaccgtgggatcgaatcatcgggaccgaatgccggttcgttaacgttctcggttcgggttcgaagacgactacctgattttcttcagtcagttaacttgaagtatgtgaagttagggtaccattatttgatcaaccatggtatatatttggctaccatacctgttttggtacttgtttttagtgccgaagtgggtagtcttagtagggaagagctttggaaaaagctttgggaagatgctcgttatgatctcgccaccgtgctgtcttttttcgctgtttttgtgttcaccgtttccgtttacttcatgtcacgccctcgttccatttatctaattgatttcgc

SEQ ID NO: 200849 - DNA, 373 bp, Gossypium hirsutum
gaaggagttaaatttgtcgtcaatgcaaatattgggaaagacccgtcctactcccttgaccggcttcgagaggaaaatgatgccattgttttggcaattggagccacaaaacccagggaccttcctgtaccaagacgagatttatctggtgttcattttgcaatggaattcctacatgcaaatactaaaagcttgcttgatagtgatctccaagatggtaactacatatcagctaagggcaagaaagtagtagtcatcggtggaggtgacactggtacagattgcattgggacatctatccggcatggatgtagcagcattgtaaatcttgagttgcttcctcagccaccgcagacaagagctcctggcaatc

SEQ ID NO: 200850 - DNA, 320 bp, Gossypium hirsutum
ctccaatgcttaagccaatccattaatccttcccaaaatgtttccaccattctcttcttcaacaccaacccttcttacgcatcagttttgcaagcgtacattcgtaacgctcggttcaacacctcttcgacgcctaaaccggtcatcatcatcactccattggaagaatcccatgtttccgcatcctgaatctgttctcagaaagtcggttttcagctcaaaattcgtagcggcggtcatgattacgaagggttatcttatgtttccgataaacccttctttgtactcgacatgtttaaccttcggtctatatctatcga

SEQ ID NO: 200851 - DNA, 341 bp, Gossypium hirsutum
  unsure (1)..(341): unsure at all n locations
gnagctcgaaccaccaccgccggcctggcaacgaggagagaacaagaaaagaaactaagaaatggcacgcaagaagatcagagagtacgattccaagagattgttgaagcagcacttcaaaaggttttccgcctacgatttgcccatcaaatctgcacaagtgacggagtcaactgatttcaatgagctagtagagaaggagccatggcttttgtcgcagaaactggttgtcaagcctgatatgttgtttggaaagcgtcggaagagtggtttggttggcttgaatcttcatttcgctcaagttactgcatatgtgaaagagcgcctcggcaaagaagtgg

SEQ ID NO: 200852 - DNA, 379 bp, Gossypium hirsutum
ccgccttcgtggaggaatgcaaatctttgttaagagcttgaccggaaagacaattactttggaggttgagagttcagataccattgacaatgtcaaggctaagatccaggacaaggagggtattccgccagaccagcagaggttgatctttgctggtaagcaattagaagatggccgcaccctggctgactacaacatccaaaaggaatccaccctccatttggtgcttcgtcttcgtggtggtatgcaaatatttgtgaagactcttaccggaaagaccattacttttgaggttgagagttcagataccattgacaatgtcaaggctaagatccaggacaaggagggtattcccccagaccaacagagattgatcttt

SEQ ID NO: 200853 - DNA, 368 bp, Gossypium hirsutum
gttatcatccagatgtgaacaaagatcctggggcagagacgaagttcaaggaaattagcaatgcatatgaggtcttgtcagatgatgagaagcgatctctgtatgacaaatatggggaggctggacttaaaggcgctggtatgggagtgggggattttagcaatccttttgatctgtttgagtcgctattcgagggcatggggggtatgggcggcatgggcagcatgggcatgggtggacgaagttccaggaatagagctgttgatgggcaggatgaatattacagtcttgtattgaatttcaaggaagcagtttttggagttgagaaagaaattgagataacccgactagaaagctgtggaacatgc

SEQ ID NO: 200854 - DNA, 356 bp, Gossypium hirsutum
  unsure (1)..(356): unsure at all n locations
cngcggngaaaccnagggctaccgggctaagcggagagcttcagaaagcatttgtaaccggtgtaccaaagctgaagagatcagagctggaagcagcctgcgaagatttcagcaatgtgattagttcttcaacagttggcactgtgtacaaagggacactgtctagtgggattgaaatatccgtggactacatccctgtgaaatttgccaaagattggtcaaggaatttagaagcacagttcagaaacaagattgaaacattatcaaaggtgaaccataaaaatttcgtcaacctagttggatattgtgaggaagacgagccttttacgaggatgaaggtttttgaaaatgctccg

SEQ ID NO: 200855 - DNA, 367 bp, Gossypium hirsutum
caagaatggctctttcagctgccactcttctcactggccttgcggtactctgctctttctttttcattctattttacatctcatcaagcaaaaatggaaaaggaaaaggaaaagggaaagccattccgggtccgcgacccttgccaattattggaaacctccacatgttaggcatgcttccacaccaatccctttatcacttggccaaaaaatatggtcctatgatgtccataaggctaggcgttgtgccaactgttgtcgtttcatcccctcaagccgccgagatatttctcaagacacatgatgctgttttcgcaagcaggccaagacttcaagtcctagaattaatttacaatggccaaagggg

SEQ ID NO: 200856 - DNA, 320 bp, Gossypium hirsutum
gaaagcccgaggacaagattcttcagactattcccgtttttttcttcattattattaattcaatgagaagaacaagtggaatataatttcaaaacgaacgtgaagatgatgaagatccgaatagaaattacgctgtgtttagtcctatttctagtcctcgcgccattttgcatttgctccggcgagcggctccttgttggcatgactcttgttcgaaacgccaccgctcacggcgccgtctggttggatggaagtttgccggcgtatcatctttacagaagattcggcgccggatcaaacaactggattttacagtttga

SEQ ID NO: 200857 - DNA, 380 bp, Gossypium hirsutum
attgcttcccacaacattttttctcatgttggtggcatggatttgatgaaaaatggtggggtacactctcctcagcagatgtcccacctttaccctggcaggaaccctatgatttcaatgccgacgtctcttgattctcctaatgaacgtgttagaagcttctcacaccgtagaaatgaactgaattctagtcatgctgataagaaacaatatgaacttgacattgaccgcatcatacgtggggatgacagctgaacaacacttatgattaataacatacccaacaagtacacttcaaagatgcttctggcagccattgatgaacattgtcgaggaacttatgattttatttatttgccaattgacttcaagaacaaatg

SEQ ID NO: 200858 - DNA, 345 bp, Gossypium hirsutum
  unsure (1)..(345): unsure at all n locations
anccaagacaaggaagggaagccaccagatcagcagaggnngatggtngccggaaagcagctcgaggatgggaggacacttgcggattataacatccaaaaggagtcaaccctgcacttggtgctgcgactgcgtggtggaatgcagatttttgtgaaaactttgactggaaaaactattacattggaggtggagagctcagatacaattgataacgtgaaggccaagattcaggacaaggagggtatcccacctgaccagcagaaggtgatttttgctggaaagcaacttcgggatgggaggacgcttgcggattatagcattcaaaaagagtcaaccctgcac

SEQ ID NO: 200859 - DNA, 363 bp, Gossypium hirsutum
aatgcatgcaggttgtccagtggtttgttaaaagaggttgtcgagacatggagctctgtctggccctcactgccgctactttcagcagccaagttggtgtggctgcatatctcctcccccatgttcctaagcatgtcctaacggccctcagcatcgaaattcttaaggctgcgggtgaacgaagtgggggatctcttgatggtgttgcgtttctcctccactctgacttcttaggtgatgctgctgctacttatgctgttgcagacagcattgcaaagtctgatgatgaggctgttgctcctgagctgagagcatttgttcaagaacactggtcagaggcagctttcttggatggattaaagc

SEQ ID NO: 200860 - DNA, 352 bp, Gossypium hirsutum
  unsure (1)..(352): unsure at all n locations
gnnnctcctgcnnccatggcggatcctagcaactggtcaactgtatccgccgaagatgaggcgaagtatggcttcacgcgcgaggagatgtactcgagtaacctcgctggcaccgtcaatccttacgaccgtcacttgttcctccgccataggtcctataccgattgggcttcccgcgttgaagaggactccctacctaagcttttctcctccactcttaagtctcgcaaaaacgacatccctgttaagacactgttgacggttattgaaggagagcaatctgatggagatgtgctgattttccctgaaatgatcaaatacaagggtttgaccgagggtgatctggatggct

SEQ ID NO: 200861 - DNA, 339 bp, Gossypium hirsutum
  unsure (1)..(339): unsure at all n locations
ggcatgnacgggangcagncatagnnagacagcaggggaagatgatgagctacgtaggatgcgttatgaagtcagccattggaaggagaaagagattaatgggacagagagaaggttgctcggtggttgtccactaaccccgagggagacttccctcttgcttagagcattgggtttccctccaagtactcggatttacttggtagctggtgaagcttatggaaatggaagtatggagcctcttaaggaggattttcctaacatcttctctcattcctcccttgcaacagatgaggaattgaatcctttcaagaaccatcagaacatgttggccggtct

SEQ ID NO: 200862 - DNA, 386 bp, Gossypium hirsutum
gaaaactttagaatcatgggagtgccggaaactgagccattggctcaattgagcttgccgccggggtttcggttttatccaactgatgaagagcttttagtgcaatatttatgcaggaaagttgcagggcatcatttttctctgcaaatcattggcgaaatcgatttatacaaatttaatccatgggatttaccgagtaaagctttgtttggtgaaaaagagttgtattttttcagtcctagagacagaaaatatccgaacgggtcacgacctaatagagttgcagggtccgggtactggaaagctaccggaactgataaaattattacaacggaaggccgtaaagtgggtataaaaaaagctctggttttttacgttggaaaagc

SEQ ID NO: 200863 - DNA, 364 bp, Gossypium hirsutum
gtcagcttcaaaaaccatgtcatccagtggtttgaagtgcttgatgggttgctgggtccatactggaaggcagctggacttgctttcaactgtactttcctcttattcggatctgtcatacaactcatagcttgtgctagtaatatttactacatcaatgacaagctggataaacggacatggacctacatctttggtgcttgctgcgcaaccacagttttcataccatcctttcacaactatcggatttggtctttcattggccttgggatgactacctatacggcctggtacatggccatagctgctgttcttcacggccaggccgagggcgtaacttacagtggttcaacaaagcttggac

SEQ ID NO: 200864 - DNA, 372 bp, Gossypium hirsutum
gaagaattgatagtcagagtactatgcgcatttgagaagattgggcgtgtcattggaagggcagggagtactatcaaaagtataaggcaggcaagtggtgctcgtatcgacgttgatgatacaaaggctgatcgcgatgactgtattataactgtaatagctacagagtcacctgatgatttaaaatccatggctgttgaagctgttctattgctgcaagggaagattaatgatgaagattacgaaactgtaattatgaggctcctcgttccatctaaagttattggttgtattattggaaaaggtggttctattataaatgaaattcggaagagaactaaagctgatgtacgtatatcaaaaaaggataag

SEQ ID NO: 200865 - DNA, 369 bp, Gossypium hirsutum
ggaaagcagcttcaacttcagcttttgggagtgcaggttcagccccatgtcttattgctaatccaatccaccacctacagaccaaacacttctccataggaatcctccctgatggggtcaatcgtagctccgacaattttgtccagaattccgatgccatggaacgtctcttgtctgaccttcaatcccatatcaacaaggttcttgctggaggaggagaaactgctgtgaaaaggaacaggagcagaaataagcttctccctagggaacgaatcgatcgtcttcttgaccctggttcttctttcctcgaattgtctcagcttgcagggcatgaattatacgaagaccctttaccatcaggtggaataa

SEQ ID NO: 200866 - DNA, 354 bp, Gossypium hirsutum
ggcacattaacattgtggtcattggccacgtcgagggcggaaaagcgaccaccactggccacctgatctacaagcttggtggtattgacaagcgtgtgattgaaaggtttgagaaagaagctgcggagatgaacaagaggtcattcaagtatgcttgggtgcttgacaagctcaaggctgaacgtgagcgtggtatcaccattgatattgccttgtggaaatttgagacgaccaaatactactgcactgtgattgatgcgcctggacaccgtgactttatcaagaacatgattactggtacctcgcaggctgattgtgctgttttgattattgattccaccactggtgggtttg

SEQ ID NO: 200867 - DNA, 392 bp, Gossypium hirsutum
  unsure (1)..(392): unsure at all n locations
gtctaactaggatccccggctgagaagcggacgaggaaacaganggctagatccggcagggggggcgcaatcgatccccagatctacccttgaatgaggatgatgataaaattagaagtgcggtggaagtgaagaaaaacgggggagcatttcaaccattccagaaagaaaaaactgcagagatgagtggtcaatctgcaggaggaaaaaccaatggctcagctacaagtacttgtacaacagaaagtgggagtagaggaggagaagccaataatgcaaatacaagtaaaacagaagaaaaagaaggtcaggcttcgagaaagcaaaggcggtgttggtcaccggagttgcataggcgcttcttgcatgctctccaacaactagggggttct

SEQ ID NO: 200868 - DNA, 455 bp, Gossypium hirsutum
ctagcacatttcattgaatctttgaaagaagctgcatcagcaaaggaaggggtaaacattagtaagaagattggggcgcttaatgaagagatgactttgagaatggttttggggaatgtgaagaagtatgagggatttaacctcaaggagcttattgatgagcttactcacatagcaggagctttcaatcttgcagatgttgttccttttctgggtgctttcgacctacagggactcaaagcacgtacaaagaaactcggtgaaaaacttgacaaagccctcgagacgatcattgacgaccatgaacaacataagcaggatgatttcgtcggtacactggttaaagagttaaatcaaccaatgaacaatgatggtgatataatggatcggaatagcatcaaagccataacaatagatatgatggtgggtgccttggacacttcagctgccacatt

SEQ ID NO: 200869 - DNA, 372 bp, Gossypium hirsutum
gcaaattcccttcttttcccctccacccaagcctaaaaaatcatggcgacagctcaaatcagcaaaaaacgaaagttcgtcgctgatggagttttcttcgcggaactcaacgaggtattgaccagggaactggctgaggatggatactctggagtcgaagtcagagttactcctatgcgtaccgagatcatcatcagagccacccgcacccaaaacgttctcggtgaaaaaggtaggaggattagggagcttacctcagtggttcagaagcgattcaagttcccagaaaacagcgtcgagctttacgctgagaaagtcaacaacagaggcctttgcgctattgcccaagccgagtctcttcgcttcaagcta

SEQ ID NO: 200870 - DNA, 390 bp, Gossypium hirsutum
gctcgagatcctattatgggtccattgcgtctctgagtcccagtttccgatccgtaatcaggagcggatagatctacaagtcaaggaggcataagggtgttactgaacattgggttcacttttcttgagacctccttcaatgggaggcatttgatccaatccaatgcaagtggatgcatttgccaccgatgcctcccaatgggagtttcatttttggggacaaggaatccttggccgtgggaactgagttgcttgtatttgggaaggaactgaattcccaagtgatatatagatatagtattttgacaaattcatggactttcgggactagtatgaatcctcctaggtgcttgttcgggtcagctagtcttggagagattgcgattttaa

SEQ ID NO: 200871 - DNA, 273 bp, Gossypium hirsutum
ggatttagcatcaagggatcctgatttgaacaaggggtttaataatgggcttgcttgttcatccaaggtcatcactagtgtaatcctgtcgagttacaaacaagggttgagctccattggatcattggttgatgttggaggtgggattggaggcttaatatcagagatcgtcaaagcatatccacacatcaaaggtgttaattttgatttgccgcatgtcgtctcgacagcaccaacatacaatgcagtctcccatattggtggtgacatgtt

SEQ ID NO: 200872 - DNA, 439 bp, Gossypium hirsutum
ccggcatctcctccttcactgttttccttcaatcggttctctcagttcccatttctacctacatctccgccaccaccacctccgcctctgaatgtcttgttacaatgcatcaaggaaggtgttaaattggaccactgctatcgtccatacagatttattgagagtagtatctagaagacttgttttggcaaccaagacgcagtcaataacgaccatggcagctcaagaggaagaatgtaagggtaatgtgaaggcacagttagcaaaactatttgaagtttcacttaaagtaacagttccgaatgaggcagatgttgacccattgatagctgcctgcactggcaaatttggtgattaccaatgtaataatgccatgggcctttggtctaaaatcaaagggaagggtactcagtttcctggccctccagctgttggagag

SEQ ID NO: 200873 - DNA, 393 bp, Gossypium hirsutum
gttaatgtaaagtatgcgttatcaagatgcttagcaatgctactttggataaagtatatagtcttcgccgtcaagaagtacgagaaaccataggttatttatatagtaaggccggttcgcctgtaaacgtgggagagcagatgtttttaactatcttgaatgtggtgaccaatatgatatggggcgggtccatggaaggggaggccagggcgagccttggtgcagagttcaggcaagtcatctcagaagtaacagaacttttgggtctacctaatgtttcggatttcttcccggcgttggccccgcttgatttgcaaggtgcagtgaaacgtgtccgaaaatcaacggagaagttggacgcaattattgataagataatcaatcaaaggttgg

SEQ ID NO: 200874 - DNA, 409 bp, Gossypium hirsutum
cattccattgctttctttctgattcaatcttcaataagttccgaatatggctgggaaattaactacaggaaatatcactggtattgagaaactgcatattgttggtggagctgaagatcgtactgctattacaaacggcaacgctgcaaagaataaacctctagttgtttgcttcggtgaattgttgatcgactttgtaccgacggttggaggggtttctctggctgaagcacctgctttcaagaaggctcctggtggtgctcctgcaaatgtggctgttggggtatcacgattaggaggatcatccgctttcgtaggaaaggtaagtgatgatgaatttggctacatgttagctgacattttaaaacaaaacaatgttgacaactctggcatgcgatttgatcgaact

SEQ ID NO: 200875 - DNA, 314 bp, Gossypium hirsutum
cttctcatgaccctgcaaatctcctcttctattgaagatctatggaacactcgaagccactgaggatcactcggattaccaagataatggaagacgatggctttactttgataatgttgaaaatttacgagtcgaaagtggaggcatcatcgatggtaatggcaaaacatggtgggaaaagtcctgcaaagtcaacaaagcccttccttgcaaggaagctccaactgctgtaaccttcaatgaatgcactaacctgagagtatcaagtcttcgtataaaagatgcacaacaaatgcacgttatatttcaaaaat

SEQ ID NO: 200876 - DNA, 458 bp, Gossypium hirsutum
gcgtctaactatgaactacggatcctgcaggcatagtagaacgcagcacgagggaatctatgaccactaatccaatggcatgggaaggttcagttaacccaagggtgaagcaaatggagcaagctcagaattgtctccttcctatgggtattacgtcagagaacgttgctcatcgctttggtgtgacaaggcaggagcaggatcaggctgcggttgaatctcacaggaaagcagctgctgctacagcttctggtaaattcaaagatgaaatagtccctgtggccaccaagattgttgatccaaagactggtgatgagaaacctgtcacaatctctgttgatgatgggatccgagctaacacatcagtgtcagatctgggaaaattgaaacctgtattcaagaaaaatgggaccactactgctggaaattctagtcaagtgagtgatggtgctggagct

SEQ ID NO: 200877 - DNA, 406 bp, Gossypium hirsutum
gtatcatctgcgcgttgaaggtggttccgattgtgcgtctgttggttcttttcgcgttagcgaatgccaagaaatcagctgatgtgaccgagctgcagatcggcgtcaaatataagcctccatcatgtgaattccaggctcataaaggtgatagagtaaaagtgcactatcgggggaaactcactgatggaaaggttttcgattccagttttgaaagaggtgatcccattgagtttgagcttggtagtggacaagtaatcaaaggatgggaccaaggattgctggggatgtgcgttggtgagaagcgcaaattgaaaatacctgctaagcttggatatggtgaacagggttcaccacccaccatcccaggtggagcaacgctaatatttgacacagagcttgtttc

SEQ ID NO: 200878 - DNA, 416 bp, Gossypium hirsutum
gggcaatgaaaaggagggatctcttgttgcggcgctgttggagaagagaagatgatggaacatatgttatcctctaccactcagtgtttcacaagaattgtcccccgcagaaaagctatgtccgtgcctgccttaaaagtggtggatatgtcatatctcctgtgaatgaaggaaaacagtctgttgtaaaacacatgcttgcaattgattggaaattctggaaatcttatcttcgaacttcagcagctcggcctattaccattaggatgcttgagagagttgctgcattacgagaattattcagagcaaaacaagtaaaatatccttcggacaatctttcttctggagagttgatacggaaagttaggttgcaccagagtgtggaggatggcgcaattgatatgtgtacacaaata

SEQ ID NO: 200879 - DNA, 384 bp, Gossypium hirsutum
  unsure (1)..(384): unsure at all n locations
ggaaactccgtgggtacatctctagtgcacggttttagtacagattcattactcatggcttcgtggcttaaagtcgctgaagatttatttgaagttgtagatcgaagagcaaagctagttgctaatgatctgtcggaggagccacctgattctcaaacacaaggttcttcagcagaaaaaacaaagccaagggcaaaggcacaaaaaagactttctacaaaaagatctcccaaacctagtgatactataaacaagcaaactagttcagaagtactaaaatcttatgaggctcgtataaaacaactgcagcaagatttatctgtatctaagagtgaagtaaccagggtagagtcaaatatgctngatgctttggcagcaaagaac

SEQ ID NO: 200880 - DNA, 384 bp, Gossypium hirsutum
gtgtaatatgttcgactcaaggagactatagagttgttactgaactggaagtctatgcagtatccatcattggtccttttcctattgctgtaactaatttattggatttaacaagattggatctccataacaacaagctgactggcccaattcctccacaaattggccggctaagacgacttagaatgttaaatttgaggtggaataagctccaagatgtccttcctccggagattggggagcttaaaaaactagcccatctgtcattgagctttaataattttaagggcgagatcccgaaagagcttgcaaatctacccgagctccgttatctctatcttcaagaaaaccgtttcactgggcgaattccacccgaattgggca

SEQ ID NO: 200881 - DNA, 382 bp, Gossypium hirsutum
gagatttgtcgtctttttgatcaaaatttcatagaacatttagatgaggtgcgtactggtggtgataaggtttacaatgttttcgacaaccaacttcctgctgctttgaaaaggttgcaatttgacagacaactatcaatggagaatattaggaagctcgttactgaagctgatggctatcaaccacatttaatagctcctgaacaaggatatcatcggttgattgaatctactttagttactatcagaggtccagctgaggctgctgttgatgcgactcattccattctgaaggatctggttcacaaggctatgagtgaaacttcaacgtcaggggattttcaaggggattttcaagggaacaacagaccacctgtataat

SEQ ID NO: 200882 - DNA, 400 bp, Gossypium hirsutum
tgaggtttctaagatgaagtgtagtattagctttttcaaattccaaattcattttcagaattcatcattttttaggtgatagaatcaagaggatacagggatcagtgactcagtcctgcagaaatgatgactgaagaagatgatctatatccatctagtgttaagatgagataccccattttcattttcttcaaggatgtcagacatgttttcaaactggacgaactgggatcagagatagcacaaattgctttgcctgcggcactggctttgacagccgaccctattgcttctcttgttgacacagcattcattggccaaataggtgctgtggaactggctgctgtaggagtctctattgccttattcaatcaagtctcaagaattgcgatattcccgc

SEQ ID NO: 200883 - DNA, 402 bp, Gossypium hirsutum
  unsure (1)..(402): unsure at all n locations
gaatcactccatcttttaccgtggaaataatttcaaaaggaatggacggtcgaatggggtccctaattatgcgaagggatgctgcattgggtgctctacgattgnagctgaaagcttgagcatgaggaaagaaaagcttcgaaaggtgaactcaatggcttataggtacgaatttaattaaagaaagtataagaaatgggatacaatgattttggtgatttttactatgctcatggtgcattgggggatgcttttaaaagctatgttcgaactcgcgattattgtactacgtcgaagcatattattcagatgtgtttgaatgcaattcttgtgagcattgaaatggttcaatttagtaatgtgactagctacgttagtaaagctgagcatacacctgaagca

SEQ ID NO: 200884 - DNA, 319 bp, Gossypium hirsutum
  unsure (1)..(319): unsure at all n locations
cttcttcatgtttctgaatctgtcagggatgttacgaggctttgtgaacgctaaattcaatggcttgatgtatagttacttgaatatatctattagtaaaaatattgtacctgatgaaattaaaggtagagagattcaccattcattttctatgactctttttcagcctcgaacagttaagctgaaccaccatacactaaagcttctcaagtattggacatggcaattcgttgtcatcccgccaatgtgttctgtcttgatgataaccctgcaacttcttcagttttatccatctggtntgaactggacattcacaatc

SEQ ID NO: 200885 - DNA, 272 bp, Gossypium hirsutum
cagattttgaaagaaataaaggaagaagaagcaatggccactcttacagtgcccacgacagttccttcggtgtctgaagattgtgaacagctaagaaaagccttttcaggatggggaactaatgagggcttaatcatagatatattgggtcacagaaatgccgagcaacgaaacttgattcgaaaaacctacgctgaaacctatggagaggatctcctcaaggcactagacaaggagctctcgaatgactttgagaggctggttttgctttg

SEQ ID NO: 200886 - DNA, 383 bp, Gossypium hirsutum
ggaatctatgaccactaatccaatggcatgggaaggtgcagttaacccaagggtgaagcaaatggagcaagctcagaattgtctccttcctatgggtattacgtcagagaacgttgctcatcgctttggtgtgacaaggcaggagcaggatcaggctgcggttgaatctcacaggaaagcagctgctgctacagcttctggtaaattcaaagatgaaatagtccctgtggccaccaagattgttgatccaaagactggtgatgagaaacctgtcacaatctctgttgatgatgggatccgagctaacacatcagtgtcagatctgggaaaattgaaacctgtattcaagaaaaatgggaccactactgctggaaattctagtc

SEQ ID NO: 200887 - DNA, 411 bp, Gossypium hirsutum
ctcatacttactctttgtctttcagaaagatttgatacattccgaaccctactttgtgctgatggatgctctatgattgatcgaagaatgggtatttatggttatcctattgaaattcaagcacttttctttatggcattgaggtgtgctttatcaatgttgaaacatgatgctgaaggcaaagaatgcattgaaagaattgtgaagcgtttgcatgctttgagttatcacatgcggagttacttctggcttgacttccaacaactaaatgatatttatagatataaaactgaggagtattctcacactgcagtaaacaagttcaatgttattcctgattccatcccggactgggtgtttgattttatgccaacacgaggtggctactttattggcaatgttagtcctgcg

SEQ ID NO: 200888 - DNA, 392 bp, Gossypium hirsutum
tctcaactcgtcgattgtgttagcactatcagctcgtggattcaaaatagaagctttctttgggttatcctaatataagatcgcgttaataccgggtgttcacattatagaagaaggtgtaagatcagagcaccttgttgcaatgaggttttttattgcagacattgccataatgaatctaagaattccccggaatctagtcctcttaagcaacatgacattccacgccatgaagttgaaaaggtcatttgctccctatgtgacacagaacaagatgtacaacagtattgcatcaattgtggagtctgtatggggaagtacttctgtggtaaatgtaaattctttgatgatgatgtttctaaaaaccaatatcactgtgttgaatgtggcat

SEQ ID NO: 200889 - DNA, 386 bp, Gossypium hirsutum
attgccttgccatggcttgtgttagcttcgctaaactgaacgcgccgtcatcctcttggatcggtggccagcagtctctacctcaacgctccggatcatccgctcggctcgccactcgcagagtctcactcccgatccgtgctggcgcttacaccgacgaactcatcaaaaccgccaaaactattgcttcacctggtcgtggaatactggcaattgatgaatcgaatgcaacatgtgggaagagattatcttctattggcttagacaatactgaacccaaccgccaggcttacagacagcttctgctcacaactcctggcctcggagaatatatttccggtgccattcttttcgaggaaacactttaccagtcaactacagatggg

SEQ ID NO: 200890 - DNA, 382 bp, Gossypium hirsutum
ctggaatacgcagcctatccctcccccctctcagatgcagcagtaccccgccggttcagcggccgccggttccggcgagattcgatctctctggattggtgatcttcaaccatggatggatgagaattacctcatgaacatcttcgctcaaactggagaggttgtttcagctaaggtgattaggaataagcagacggctctaccggagggatatgggtttatagagtttgtctcgcaagcggcagctgagcgggttttgcagtcatacaatggggtgccaatgccaaattctgagcagaactttagattgaattgggccgcgctcggatatggggataagaggcaagaagagggcactgactacaccatctttggtggggga

SEQ ID NO: 200891 - DNA, 396 bp, Gossypium hirsutum
aaaaaatcttctgatttttctgagtctttttcttatcttctgtttggctcctgagaaagtgttttaagaagaacaatgaatgcattagtggcaaccaacagaaacttcaagctagcagccaggcttcttggtttggattctaagcttgaaaagagtctcctcattcccttcagggaaatcaaggttgaatgcaccatacccaaagatgatggcacattggcaacttttgttggctttaggattcaacatgacaatgctagaggtcctatgaaaggaggaatcagatatcaccctgaggttgaccctgatgaagtgaatgcattggcgcaactaatgacatggaagacagcagttgcaaacatcccatatggtggggctaaaagtggtataggatgt

SEQ ID NO: 200892 - DNA, 342 bp, Gossypium hirsutum
ctggccttgaccttaaccggaggtactacaaccccgggaatacctaaaagttgggtttccaaatggcgttaaccacgactctattagctgggagtatcatagatttcggaggaacatgaggccggagttaaagaacgccgttaaagcggtgaagtggtcgacggattatctgttgaaagcaacggcaaagcctggagtggtgtatgtacaagttggagatgcgtactcagatcatagctgttgggaaaggccggaggacatggacacgcttcgcacggtgtacaaaatcgacaatgcgcaccctggttctgatgtggcaagtgaaaccgccgctgcattggc

SEQ ID NO: 200893 - DNA, 400 bp, Gossypium hirsutum
  unsure (1)..(400): unsure at all n locations
cagttgttaaagctgcagttgatgaaagattaagggggcttcaaatttggagggaatcacagggccgggcatctaagctatatggttttaagcatgattctatgtcatcgcttaggaaaacaagtaagacaggagaattggttgattcaaaaactaatggagatctttcacgttccaagtccgaatcaatgaatgaggatgaaaatcttctttgtctgacaggagatgctaagtcggattctgttccagatcttcaacagcaggttgtagggttaaaggtcgagttgtgcaggttgctggaagagaaaagatcagctgttctcagatctgatgaactggagacagcattgatggaaatggttaagcaggacaatcgacgccaattatgtgctanggtaga

SEQ ID NO: 200894 - DNA, 414 bp, Gossypium hirsutum
gggcatttaaaaggagggatctcttgttgcggcgctggtggagaagagaagatgatggaacatatgttatcctctaccactcagtgtttcacaagaattgtcccccgcagaaaagctatgtccgtgcctgccttaaaagtggtggatatgtcatatctcctgtgaatgaaggaaaacagtctgttgtaaaacacatgcttgcaattgattggaaattctggaaatcttatcttcgaacttcagcagctcggcctattaccattaggatgcttgagagagttgctgcattacgagaattattcagagcaaaacaagtaaaatatccttcggacaatctttcttctggagagttgatacggaaagttaggttgcaccaaagtgtggaagatggcgcaattgatatgtgtacacaaa

SEQ ID NO: 200895 - DNA, 412 bp, Gossypium hirsutum
gccaaactcggtgattgtggtggactccttcaatgcaaaggttggggtgtacctccaaacaccctggctgaatatgcacttaaccaatttggaaacatggatttctacgacatttccttagttgatgggtttaacatccccatggtgtttggtccaactaatggcggttgtcacaacattcggtgcactgcagacatcaacggacaatgcccgaatgagttaagagctcctggtgggtgcaataacccatgcacggtgtttaagaccaatgaatattgttgcactcaagggtacgggacctgtggtccgacccgttattcaaggtttttcaaggaccggtgccgtgattcatacagttatcctcaagatgatccttcgagcacctttacttgccctgctggttccaattaca

SEQ ID NO: 200896 - DNA, 386 bp, Gossypium hirsutum
aatatgttctttcttttatttctcatttatttgtgttgtattcatgtgacaagagttatccaaatccattacaaaataatccagcttattcagttgtcgagcagtactttgttgatgaggatgataccgtcactgagaagattgttgtgcacaaggaaagtgcaagaggggtgcattttcgacgcgcaggacctcgccaaaaggtgtattttaaaccagatgatgttaatgcatgcattgtaacatgtggtggtctatgtccttggctcaacacggtcatcagggaaatagtgtgtggcctctatcacatgtatggtgtccgaaaagttcttggaatcgatggaagatataagggtttttatgcaaagaacactatcaccttaaca

SEQ ID NO: 200897 - DNA, 391 bp, Gossypium hirsutum
gagatatccaggggaagttcattttcatcctcttcgatagctcttcaaaatctacattcatagcttctgatgctgatggaactgtacctttcttctggggaaccgatgttgatggccatctggttcttgcagacgatgaggagaccgtgaaaaagggctgtgggaaatcttctgctccattcccaaaagggtgcttcttcacatcctctggagggttaaggagcttcgagcatccccagaacgagttgaaggcagtgcctagggtggatggttcaggtcaggcctgtggtgctacgtactgtgtggatacagagacgaagaaggaatcaaccggaatgaagaaagtcgacagtgctgcgaactggtcgacaaactactgagcctcaaaacg

SEQ ID NO: 200898 - DNA, 370 bp, Gossypium hirsutum
gctggatttgggtgctacgaggtccctagtcgagacggggttgcataatcttcccatggttcaacctttctatgcagtcaaatccaaccctaaccccgctttcctcaaagaaatggcagctctcggcaccggctttgactgtgcaagccttcctgagattgaaaccattttatcgcttggggtttcgcctgatcgaatcgttttcgcaaacacatgcaaacccgagtctcacatcaagtatgcatactaaagtggcgttaacttagccactttcgactccaactgtgagctcgaaaagataaagaagtggcacccgaaatgtgaactgttgatccgaatcaaagtcccggaagccagtggttcagcattc

SEQ ID NO: 200899 - DNA, 410 bp, Gossypium hirsutum
gtccggtatacgaattgtatccgaaactctccatttgtgcaaaaaaaaaaagaaaaaagcacgggttgtctaatagaactcctcctgccctacggtagttgatacgtcaaggaagttttacctggaataaaagaacaaaaaaatggattcatgaaggtttaatttaattagtaaatcactcccactctggattcctttagataatgaagatctgattttaggttatgtttcgggagagttttaccaacgtgggatagagtcaacaaaagtgaagtaagtgcttatgattcaaccaggggggcgtataatttatagacttcgcaacaaggattcgaacgattaggtagttttttcaacttcaagatttctttcggggggatccaattcaaatttcaagaaagttattttct

SEQ ID NO: 200900 - DNA, 376 bp, Gossypium hirsutum
gttcttttaatcgatggaggatataagggtttttatgcgcagaacactatcaccttaacacctaagtttgtcgatgatatccataaacgtggaggtacgattcttggaacttctagaggaggtcatgattctgtcaagattgttgaccgcattcaggatcgtgggatcaatcaggtctatataatcggaagtgacgggacacataaaggagcaactgtgatttttgaggaaataaagcgacgtggtttgaaagtagctgttgctggaattcccaaaaccattgacaatgacattccggttattgacaaatcatttggtttcgatactgcggctgacgaagctcaacgtgccattaaagcagcacatgttgaatctg

SEQ ID NO: 200901 - DNA, 384 bp, Gossypium hirsutum
atggtttttagggttttttaatagttgattggtggatatagagtagtgggtagcggtgagatggataaaaccgcacaagaaaaggagcctaaaacacttcctgctagtagttctcaggagccatcttcaaccactaattcagctggtccagcaaatgcagactggtcaggatttcagcaggcatattctcccattcctccacatgggttcttggcatcgagtcctcaagctcccccatatatgtggggggttcagcatattatgcctccatatggtacccaaccacatcctaatgttgcaatgtatcctcatggtggaatatatgcgcatccatccattcctccaggatcctatcctttaagtccttttgctatgccttctcct

SEQ ID NO: 200902 - DNA, 393 bp, Gossypium hirsutum
caatgatttgcagttaattatccaggaaaatgattggcaaaagcagaacattaaaaggtgtacgattctcttctaggggttcttcgacaggttcaaacaccttgggaagtgctgctactgatagtcaaagcacgggagatgaaactctaactcaatcagcagaagaagtacctggaagtccagctgaggctactaagggtactaagagaaagcgagagcctacaaacatgaaagatatatggaaccttcaacctggaactcgtatagtagtagatgccaaccaatatggccagcttattgggaaggaagcgtccaaattggctgaatttctctgtacaattgcaaggactggttctatttgtcctttgaatacaaaacattggaaacatcttt

SEQ ID NO: 200903 - DNA, 378 bp, Gossypium hirsutum
ccctattcaagccatgacttttgatgtgattcttgatggcactgatttagttggccgcgcacgaaccggtcagggtaagacactggcctttgtgttgcctatattggagtctttaacaaatggccctggaaaatcgtcaaggacgtctggatatggaagggcaccaagtgttctagtacttttaccaaccagggaattggctaaacaggtttttgaggactttgaagtttatggtgaggcagtggggttgacatcatgttgattatatggaggtgctccttaccacacccaagagatgaaactgaagagaggggtcgacatagctgttgggactcctggacgtgtaaaggatcacatagagaggggcaatattcactt

SEQ ID NO: 200904 - DNA, 388 bp, Gossypium hirsutum
gcaccctttgaactgaaaaaagaaaacccggaattttaaagacaaaaaaatgccttcttctccgttgattcttctctcaaaaaccatgattttcccagaccaaaaatcaaaccttgaagacctcaagctttcagtttccgatcttcctatgctatcttgccattacattcaaaaaggttgcctctttactcgcccttcaatccccattaattcactgatttcccttctcaaacaatccttgtccaagacgctgtcgtttttccctcctctcgccggccgtttttacacagacccaaatggttacatttacattacttgtaacgacgccggcgttgaattccaccatgccaaatgtgacaccaagttcatccgtgacgtcatcggtccg

SEQ ID NO: 200905 - DNA, 298 bp, Gossypium hirsutum
tcatgggaatgctcaaggcttacaaaagttggtctctttgacgatcacatcctgccggggggtaacagatgtgagtcttgaagccatgggaaagggatgtgcaaacctgaggcagatgtgccttcgctggtgttgctttatttcggatgacggattggtggcttttgccaaatctgcaggttctcttgagtccttacagttagaggagtgcaacagaatcacccaatccgggactattggtgtcctctcaaactgttcgttaaaatcccttaccgtagtaaagtgcatgggaattaag

SEQ ID NO: 200906 - DNA, 274 bp, Gossypium hirsutum
acaacatgttcgtgttcatgcaatggaagcagttatggcttgttgggatcttgagcaatcacttcaaagtttaacaggtgtatctccaggtgaaggcactggtgcaaccatgtctgatgatgaagatgaagttgtagatagtgataccagcttgtttgatggaagttttgatgggattgacagcatggggtttggccccctcgtcccatccgagactgagagatcactaatggaacgtgttaggcaagaactgaagcacgagctgaaacagtgt

SEQ ID NO: 200907 - DNA, 376 bp, Gossypium hirsutum
  unsure (1)..(376): unsure at all n locations
gaagtctgtgacgttgtcctccatgctgatgccatccgcagaggtggtgggcagatcattccaacagctaggagggttttctatgcttctcagctcacagccaagccaaggcttctcgaacctgtttacttggtcgagatccaagccccggagcaggcacttggtggtatttacagttttcttaaccagaagcgtggacatgtatntgaggaaatgcaaagacctggcactccactttacatacatcaagggcatacnncttcctgtcatttgagtccctttgggaattctctaagcacttttgaggggctgcaatcatcaaggacaaagcttttcccacaatgtgtgtttgatcactgggatatgatgtcatcag

SEQ ID NO: 200908 - DNA, 357 bp, Gossypium hirsutum
ggcggtttaagagaggatagaacgccgagtaggcgaccctgttctaactcttgaagggctcctttttcttcatgctctttttatagaaaaagggcgtctggagacaacccgagctgactcgaggaagtccgtatataatgacgagttaaagctcagggatgatattctttcagatccaaccaagcatgcccctgatcagactgaggagctgacaaatgaagctatcgactttttgcgtgggatctttcgatagtatgacagtgataatgatggatccttgcgaccttatgagtgtgacgatctctttgtaactagcccataaagctggccctgatgacaactcatgactcttcatat

SEQ ID NO: 200909 - DNA, 387 bp, Gossypium hirsutum
  unsure (1)..(387): unsure at all n locations
agtcgttggcgcgtacttgtacgcgtacacggccttggatgaaattactgctttccttgtattcatgcaattaatgttggattatcatatcggagcagctagtattgcccgtagcttagctagctacgtggctaccattttcgagctcatccctgctttgaaaggaaacatacctccctgggttggtcatggtggtcaagaattctttggaggaactttgtctatcaatatcctggctccgattcttcttgccgtgttgactgttatcctctgtcttggtgttggagaatcttctgctgataattctttcatgactgcagccaacgttgtcatcgatatttntgtcattattgttggatctttcaaagttgatgtagataattggtc

SEQ ID NO: 200910 - DNA, 175 bp, Gossypium hirsutum
aagcagtttaacttcagaagaaattacagtgaggtagagcttggggagtacatgcaatctcacacgaaactgatgattgattcatcatggaagcttaatgtagctgacatagaaactactctttctcgcgtttgtcaaatggatctccatgatcaaaaatgcaaaaaggtagagc

SEQ ID NO: 200911 - DNA, 383 bp, Gossypium hirsutum
  unsure (1)..(383): unsure at all n locations
gagaatattagtcatgtgangaaagatgatgaaggaaaggggcatgaaggtagtgcctgggtgtgcatcaattgaaattgatggctttgttcatgagtttgtgatgggagattggcatcatcccgaggcaaaggagataagacaggctttgagggttattgctgagcgagttagtgatgctgggtatgaatctcaggtttctgatgtgttacacaatgttggtaatgaagagaaaggaatttatttgtgtgagcatagtgagaggcttgctattgcttatggaattttaaagacgaaagcaccagtgccaattagaatagtaaagaatctaagagtttgcatcgattgtcatgaaatgacaaagatcatcagtaaaatctatg

SEQ ID NO: 200912 - DNA, 400 bp, Gossypium hirsutum
cgaagacgtggcaaaatactaggtgcaaggcagagatattagcccaccctgtgtacgagcagctactgtcggcgcacgtgtcgtgtcttaggatcgccacgccggtggaccagctcccgaggattgacgctcagctggatcagtcgcagcacgtggtggccaagtactccgctctcggcggcgcagcccagggcttggttgcggacgacaaagaactcgatcagttcatgacgcaatatgttgtattgctatgttcgtttaaagaacaattgcaacaacatgttcgggtccacgcaatggaagcagttatggcatgctgggaaattgaacaatccttacagagcttaacaggagtttcaccgggggaaggtacggtggcaacaatgtcagatgatgatga

SEQ ID NO: 200913 - DNA, 311 bp, Gossypium hirsutum
ttaagatgctatattatgttttaccagtggatctaactcctgaacaagaggaggtggcaacaatgtttgcggtaatgcaagagactgattacatgagtaaaccacagttcaagaagaatttctgggaagattggagtaaattactggggagaaaccatgtcattaagagcttggacaaatgtgatttcactccaatctatgagtggcatttgcaggagaaagagaagaagaagcaaatgagttctgaagagaagaaagctttgaaagaagaaaaattgatgcacgaagaaaaggatatgtgggctattgta

SEQ ID NO: 200914 - DNA, 390 bp, Gossypium hirsutum
aacacactgacctcagaaagagcacccaaaagaaaaaacactgatcaacgaaggatttctagggttttttttcggtatcagcaagcgatggcaatggctgctctcagacgcgaagggaggcgtttcgcccctctgatctctccccgtccaattactgctgtccgatcctctcctatcgttcccactcacgaagatgagggtccgattggtgttcgttatatttcaacccaagtcgttagaaaccggatgaagagtgttaagaatattcagaaaattacaaaggctatgaagatggttgctgcctcaaagttgagagcagttcaaactaaagctgagaattcccgaggcctctggcagccatttactgcacttcttggtgatcttcccagt

SEQ ID NO: 200915 - DNA, 234 bp, Gossypium hirsutum
gtcctcttctattcaagggaaaagctcaacacatagagtggaggtagatccaaactccaactgatgaaatggttggtccttatgacaccttggtctcctgttctgatgatcctgcttaaaccaaaaagctcttggacaaacttgttgtcttaaagcttaatggaagtctcggaaccactttgggatgtactggtcccaaatccgtcattgaagttcgcaatggcctgacttttc

SEQ ID NO: 200916 - DNA, 389 bp, Gossypium hirsutum
gttgatcacgggtacttcaataacagtgaaaagtcaggtactgcatatggaaaattatctgcctatatgtggctacttcaatcattcagatgttgcatatggaaaatttgcctgtcctgtgatatctatttatctacataggatagtttgtactctcacaaaattataaaataatgacatgttcagtcgatgaaattgctgatcccaggttactgctgccctcgcacaagctggcctcgagtcctctaacctgatcgttggtatcgatttcacaaaaagcaacgaatggacaggtgcaaggtcattcaaccgcaaaagcttgcatcacatcgggaatggccaaaatccctatgaacaagctatatcaattattggacagagcttatccg

SEQ ID NO: 200917 - DNA, 387 bp, Gossypium hirsutum
ctgggacattctgatagctttaacgtattaaaagtggtggtgaaggacattgttaaggcaattaagatgggtgttgatccacttcctgttcatagtggtctggggggtgcctactactttaggaatcccagaggtgagaatgttgctatcgtgaagccgacagatgaagaaccttttgcaccaaacaatccaaaaggctttgttggtaaagcccttggtcaaccaggtttgaaacgttcggttcgtgtgggggagactggtttcagagaagttgttgcctaccttctggaccatgattattttgccaatgtgccaccgaccgcgctggtgaagattactcactcagtcttcaacattaatggtggtgtgaacagaaataggcctcac

SEQ ID NO: 200918 - DNA, 349 bp, Gossypium hirsutum
gcacctatcctttgactggagcattcaattagtggggacgggagataccctgataggactgagaaggagcccccttcaacacttttatggattttgttctttttggctcagcattatgacagaagaggacagtatgacattgctctttcaaaaattgatgaggctatacagcacactccaaccgtaattgatttatactctgtcaagagccggatattgaaacatgctggtgatttggtagctgcggcttcattggcagatgaagctaggtgtatggatcttgcagaccgctacataaacagtgaatctgtcaaagcgtatgtgcaggctgatcaagtggctttggcag

SEQ ID NO: 200919 - DNA, 197 bp, Gossypium hirsutum
gttaattaaagtttgcgttatcaagatgcttagcaatgctactttggataaagtatatagtcttcgccgtcaagaagtacgagaaaccataggttatttatatagtaaggcccgttcgcctgtaaacgtgggagagcagatgtttttaactatcttgaatgtggtgaccaatatgatatgggggcgggtccatggaa

SEQ ID NO: 200920 - DNA, 390 bp, Gossypium hirsutum
gaagattaaaaaggcactcagaggagtgaaagtcgaggtaacccatagagggaatgtacgtagaaaataccgtgtttcaggattgacttctcagcctactagagagttagtgtttcctgttgatgataattcaaccatgaagtctattgttgaatacttccaagagatgtatggctttacaattcagcatacacatctaccttgtcttcaagtaggaaaccaaagaaaggcaaattatttacctatggaggcttgcaaaattgttgagggacagcgatacacataaagattgaatgaaaggcaaattactgctctcttgaaagtcacatgccaaagaccaagggatcgggagcatgacattttgcagacggttcaacataatgcttacaa

SEQ ID NO: 200921 - DNA, 409 bp, Gossypium hirsutum
aaaactttaaacaggatgacttaatcatgaataaaagattagtgtttgtattgcagatttaaaggcaacatgggagcaggcggaaagacagaaaaagtgcaagcttttttgcccataaaaaatttgaaataggtctataaggccagttgttgaagaagaagcagatcaatggcgaaggagttggaaggattcaatttcgagcaaaggcatggaaaggcgagggtgagagtgggcagagtttggaggagcaaagatggatgccgtcacttcatggtcgaatggaatggtaacatcagcttgctttccaattgcgttgccgcttatgtccgcgatgacaactctgacatcgtcgctactgacaccatgaaaaacactgtttatatcaaagcaaaggaatgttcagaacaac

SEQ ID NO: 200922 - DNA, 387 bp, Gossypium hirsutum
gttcttgtaatcgatggaggatataagggtttttatgcaaagaacactatcaccttaacacctaagtttgtcgatgatatccataaacgtggaggtacgattcttggaacttctagaggaggtcatgattctgtcaagattgttgaccgcattcaggatcgtgggatcaatcaggtctatataatcggaggtgacgggacacataaaggagcagctgtgatttttgaggaaataaggcgacgtggtttgaaagtagctgttgctggaattcccaaaaccattgacaatgacattccggttattgacaaatcatttggtttcgatactgcggttgaggaggctcaacgtgccattaaagcagcacatgttgaatctgaaagtattggg

SEQ ID NO: 200923 - DNA, 434 bp, Gossypium hirsutum
cgtccggcagaattccgcaccagggaaccctctacttgacaaaaaaatatgaaaaggtcagtgctagtatctggtggaatcaacttggtaataatttgctttagccggcaactttaaccaagacatcgacgttacttggggaagatggaagggcaagattctcgaaaacggaaaccttctcactctcaccctcgacaaattctccgggtctggttttcaatccaagaaccaatatctgtttgggaagatcgatatgaacattaagctggttccaggcaactctgctggcactgttaccacttactatgtaagttttatcatcatacttgtctcttattaacattagaactctgtgttgataatgtggggtgacaattgcagcttcgttcggaaaggtcgacatgggatgaaattggacttcgattcttggggaa

SEQ ID NO: 200924 - DNA, 389 bp, Gossypium hirsutum
ggtaagttcaagcttggaagaaagattgggagtggatgttttggagagctttatttaggggtaaatgtgcaaactggagaggaagttgctgtcaaactggaatctgtgaagaccaagcatccacagcttcattatgagtcaaaattgtatatgcttcttcaaggaggaactggtattcctcaccttaagtggtttggagttgaggcggattacaatgtcatggtaattgaccttcttggacctagtttggaagatctgttcaactactgcagtaggaaactctcattaaaaactgtgttgatgcttgctgatcaattgattaatagagtagaatatatgcattcgaggggttttcttcaccgtgatataaagcctgacaacttcttgat

SEQ ID NO: 200925 - DNA, 381 bp, Gossypium hirsutum
attttcttctcgttcccgttagccccccacgaacttaggcaaagcagaggctagagagatgtcggcggcggcggcggcgacaagccgagcgactcgacggatgggagccgaggatgagaagctagtgttcgaaacgacggaaggaatcgagccgatattgagttttgatcagatgggactaaaagacgatctccttcgtggaatctacaattacggcttcgaaaagccatctgctatccagcagagagccgtcatgccgataatcaatggccgcgacgtcattgcccaagctcagtctggtaccggtaaaacttccatgattgccctcaccgtttgccaagtggttgacacagctagcagagaggttcaagcattgatact

SEQ ID NO: 200926 - DNA, 436 bp, Gossypium hirsutum
cagcaatgtcccacgctgttatatatgtgaaaatgcacctgctttctttgactgtgaagtggatggtagttccctttgcctgcaatgtgatatgattgtacatgttggaggtaaaaggacccatgggaggtatctcttgttgaggcagagagttgagtttccaggggataagcctggtcgtttggaggaaccaggtttacaaccgctcagtccggatgaagtaaggaaggatctgaatcagcagtcaaagcttgcagtgagagagaaccggcaaaaccgtggagtctctcatgttccattgcttgatgataatgctaagggtgatggagaggtaggaaatgagttgattgatctaaatgccaggccacaacaggtgcatgggcaagcttctatcaatcaggagcaagccatggatgtttcgagtggcaataatcat

SEQ ID NO: 200927 - DNA, 417 bp, Gossypium hirsutum
ggcatttgctttaattcagttgttcagtatcatcatgcgtatgtcccatgttgcctggcaaatcttccttctcttccttgccatcctcagtatctccttctggtatcagaactattatattacgactgctagggagctagccaggatggttggaattagaaaggctcctattttacatcatttctcagaatctatcacaggcgcaacaacaattcgttgttttggccaggaagacaggttcatggagaaaaacttgagcttaatcgatgattactctcgtgtagccttccataactccagcacaatggaatggttgtgtgttcgaatcaattttcttttcaacttcgttttcttcctggtgttggtcatcctggttagcttgccgcggtctgctattgaccctagcttggcaggatt

SEQ ID NO: 200928 - DNA, 387 bp, Gossypium hirsutum
gaagagacacagatacatagaaccaagaaacagaaaaagatggggtctgaaaagcaagggtttatatggttatcagggcttttgtttctaaatatccttgccttatccacagctgaagtcctttattacgagttttttttgcaagaatcccaggtcactaagctgtgtagcacgaagagcatcttgaccgtcaatgtcatctttccagggcctgatattcgggttcggagaggggacacagtttttgtcaacgtccacaatcaaggaaaccatgctgtatccctcaagtggcatgtcgttaaggattcaaatgacggctccaatgagctgattcagctcagggagaaacttcacttactagatatagctagaggattaaataagaac

SEQ ID NO: 200929 - DNA, 393 bp, Gossypium hirsutum
ggcaggtttcattgggacttttgccattgccttctaagcctgaggtcttcatcaggctcagatgcttcttgccaaaaaagaaagaaaggccgtcctcctgggactgggaagaagcagcaattagcaactctaggtgaatggatgaacagttcggcagtgctggcctttgctccccatgttgtcactgctggaattggagaagacattgtagcgaaaatgttgtccttttcacaacacaggccaatagctgtctgcatcttatcaggcagtggtacagtttcctctgtgaccctacgtcaacctgcatcttctactcctactgtgacatatgagaatggcagtttgaaatgtagaacatgaaaccaatgtgcttctttcctacggatgaaaatg

SEQ ID NO: 200930 - DNA, 414 bp, Gossypium hirsutum
ctaccacacacttgctaatattgctacttggagtggtggcgctcgccactccctcttttggtacctatgagtctcccaactatgggaagccccctactcctgtttataaacctcctaaggtgaaacccccaccttatgaacatcctgtttataaacctcctaaggtgaaacccccaccttatgaacataagccccctgtctatgaaccaccaaagaaggaaaagcctgagcctaagccaccagtttatacacctccaaagaaagagaagcctgaacccaaaccaccagtatatgaacctccaaagaaggaaaagcctgagcctaagccaccagtttatacaccaccaaagaaagagaagcctgagcccaaaccaccagtatatgaaccccccaaagaaggaaaagcctgaacct

SEQ ID NO: 200931 - DNA, 356 bp, Gossypium hirsutum
  unsure (1)..(356): unsure at all n locations
ggaattaaaggcaaaagctcaggtttctcatgcacaaccggatgacggtattgacttttaccatttaaagagtcgaaagggtatgagtcagctggaattggaggatgaggttcaagatgatttaaaacgagcaactggagagtttgtcaaggatccagatgatgcaaataagctcaaccgcattcttcaactgacaggatttagtgatccggtatatgccgaagcatatgtcactgtccatcactatgatattgntcttgatattactgttatcaaccgaaccagggaaacccttcagaatttgtgcttggagttggctactatgggtgatctgaaacttgtggagcgttctcaaa

SEQ ID NO: 200932 - DNA, 410 bp, Gossypium hirsutum
caccaataagttttttagaaattaaaaacttgtctgggttgccaaattgcaaatcaaatttcgattgaatcagacacaatttcttttttcaattttataatgaagaacaaaagggcgagaacgagtgtggacaaggcggtggttgatgtttggcaacgggaagttggggaactctccactaggaatttcgcccaccggcttgccgcttctgaggatcttgtgctccgactcgagatttacaagaaactcaaaaagcaccgaggttgtgtgaacactgtgagctttaatgctgatggtaacattttagtatctggttctgacgataagagggttatactatgggattgggaaactgggaatgctaagcttacttccagtcaggccatgtcaacaatgtttttcaagcaaaa

SEQ ID NO: 200933 - DNA, 324 bp, Gossypium hirsutum
  unsure (1)..(324): unsure at all n locations
aaagaacttttcctccccagtggatctttcagcgtatgatggttttgagttgcgcttaaagggtgatggttgtcggtataaactaattgttcgcactagcactgattgggatacggtgggttatacagcaagctttgacaccattggaggccaatggcagtctattcgtttgccattctcttcactgaggcctgtatttcgagcacggactgtatctgatgctctacccttcaatccaagtaatgtcgtatcatttcagctcatgttcagcangtttgaatatgatgggaaaactgaatcccacttttgtagaaggaccttttg

SEQ ID NO: 200934 - DNA, 375 bp, Gossypium hirsutum
gaagtctgtgacgtggtcctccatgctgatgccatccacagaggtggtgggcagatcattccaacagctaggagggttttctatgcttctcagctcacagccaagccaaggcttctcgaacctgtttacttggtcgagatccaagccccggagcaggcacttggtggtatttacagttttcttaaccagaagcgtggacatgtatttgaggaaatgcaaagacctggcactccactttacaacatcaaggcataccttcctgtcattgagtcctttggattctctagcactttgagggctgcaacatcaggacaagctttcccacaatgtgtgtttgatcactgggatatgaagtcatcagacccaatggaacct

SEQ ID NO: 200935 - DNA, 405 bp, Gossypium hirsutum
  unsure (1)..(405): unsure at all n locations
cagattcttcaactggaatgttacttatggtgacatttacgcacttggtgttcgccagcagggaattcttattaatgggcaatttccagggcctgatctctattctgttactaatgacaacctcatcatcaatgtttacaacaacttggatgaaccttttcttttatcatggaatgggatgcagcaaaggagaaactcgtacgaggatggagtgtacggcacaacatgcccaatcccaccgggcaagaacttcacttacattttacaagcgaaagaccaaatcggtaccttttactactntccatcccttgtntccacaaggcttgctgtggatttggaggcatcaggatcctcaataggcccaaaatccccgtccctttccccgaccctgccggcgatttcact

SEQ ID NO: 200936 - DNA, 411 bp, Gossypium hirsutum
attgagactacctcttgagtcagaccaagttcttctgggagtgatttatgctggtgtaaacgcaggtgatgtgaactttatcgcaagccgttattttcaaggaaccaagaaagaccctggatttgaggcagtgggaataattgctgccattggagattctgtaagaaatttggaagttggaactcctgctgcattcatgactattggatgttatgctgaattcatgaaggttccttcaaagcaaatacttccaattccaagacctgacccggaagttgttgctctgcttacttcaggattaacagcatcaatcgctttggaagagcttggtcagatgaaatctggaaaagttgtccttgtaactgctgctgctggagggactggacaatttgcagtccagcttgcaaaact

SEQ ID NO: 200937 - DNA, 259 bp, Gossypium hirsutum
gaaggctttgacgtggtcctccatgctgatgccatccgcagaggtggtgggcagatcattccaacagctaggagggttttctatgcttctcagctcacagccaagccaaggcttttcgaacctgtttacttggtcgagatccaagccccggagcaggcacttggtggtatttacagttttcttaaccagaaacgtggccatgtatttgaggaaatcctaatacctggcattccactttacaccttcaaggcataccttc

SEQ ID NO: 200938 - DNA, 409 bp, Gossypium hirsutum
gtaagccatcaaacgactgccaattcacgtatgttgagccgaggaactggaccagagggagtgcggaatccaacaattccgactgcaatttatggaataacaacttgaatactctatgcttcgactgccagtcatgcaaggctggatttatagacaacctgaggagttcttggaagaaggtggcgattgtcaacattgcgttcctcatcttcctcattattgtctactctgttggctgctgcgctttcaggaacaataggagagacaattattatgagcagcagacctggaaaccttgagcgaatctttgttcttagtttccgattttggatatgggtacacgtacgttgggtctgggctgctgtatttgcttcctattgttttctgcattgtgttttagtgtctatgc

SEQ ID NO: 200939 - DNA, 393 bp, Gossypium hirsutum
cctgcttctgctgatatcaagtctgctgaagatgccagtggttttattgatgaaaagaagatagtaattgttggggtgttccccaaattctccggtcaagagtttgacaactatatggctcttgctgagaaattgcgtcctgattatgaatttggtcatactttggatgctaagtaccttccccgtggcgagtcatcagtgactggccctgtcgtcagacttttcaagccttttgatgaactctttgttgacttcaaggattttaatgtggaagctctagagaagtttgttgaagaatctagcattcctcttgtgactctctttaacaatgacccaagcaatcaccccttcattatcaaattctataacagtccccttgcgaaagctatgttg

SEQ ID NO: 200940 - DNA, 408 bp, Gossypium hirsutum
aaaagaacttcaatagtttgagtttagggtttttagatcggagattatggggcgttttgctcttctccttttactagctttcgcttcatttcaagccctttgcttcgccgctgatgatgatacggtcttttatgactcatttgatgagccttttgacggacgatggatcgtgtccgataaagatgattacaaaggtgtatggaaacattcgaagagcgaaggacatgatgactacgggcttcttgtgagcgagaaggcacggaagtatgcgatagtgaaggagctcaatgagcctgtgagtctcaaggatggaagcactgtgcttcagtttgagactcgctttcagaatgggcttgaatgtggtggtgcatatttgaaataccttcgtcctcaaaggctggatggaag

SEQ ID NO: 200941 - DNA, 221 bp, Gossypium hirsutum
atctctacttccatttcatctgccatcaatttgctctgaagatcatgttggctatttttcacaaggcatttgctaatccaccagaagagctgaatagtccagcttctcataaatctaccaagaagcctaaacagcctgaagaaaccctaaatgatttcctatctcatcaccctcacaacactttctccatgagctttggcaacgctgctggtttggcttat

SEQ ID NO: 200942 - DNA, 443 bp, Gossypium hirsutum
  unsure (1)..(443): unsure at all n locations
caagaggctgtttcagcagtgagaaaaaacagaggaagaaagaaaagaaaaagaaatagagaaaaggagaacagaagggtcaaagtaactcagatatcaaccgttatttctcatattcatttctgattcctaccaaactgtttctggaggcttaacatctcatttgcaaattggatgtgactgcttcactgtagattgtcaggattaattgtcgatgtctttggagatttagcagtggtagcatcatctgctgcttgggttgagaaatacaaatcaaaagttaaagcatgcatcagtagcattgatgagattaatcatatacactggagaccttctgttgaaattttaaaagaagaaggaatggatgcagcagatctgaaagaattgcatccatccacttgtccccagagaactaangtattagaaaatggaataatctatgc

SEQ ID NO: 200943 - DNA, 398 bp, Gossypium hirsutum
attttgttctcgttcccgttagccccccacgaacttagtcagggcagaggctagagagatgtcggcggcggccgcggcgacaagccgagcgactcgacggatgggagccgaggatgagaagctagtgttcgaaacgacggaaggaatcgagccgatattgagttttgatcagatgggactaaaagacgatctcctgcgtggaatctacaattacggcttcgaaaagccatctgctatccagcagagagccgtcatgccgataatcaatggccgcgacgtcattgtccaagctcagtctggtaccggtaaaacttccatgattgccctcaccgtttgccaagtggttgacacagctagcagagaggttcaagcattgatactgtcacccacgagggaac

SEQ ID NO: 200944 - DNA, 397 bp, Gossypium hirsutum
  unsure (1)..(397): unsure at all n locations
gcaaattcccttcttttcccctccacccaagcctaaaaaaggatggcgacagctcaaatcagcaaaaaacgaaagttcgtcgctgatggagttttcttcgcggaactcaacgaggtattgaccagggaactggctgaggatggatactctggagtcgaagtcagagttactcctatgcgtaccgagatcatcatcagagccacccgcacccaaaacgttctcggtgaaaaaggtaggaggattagggagcttacctcagtggttcagaagcgattcaagttcccagaanacagcgtcgagctttacgctgagaaggtcaacaacagaagcctttgcgctattgcccaggccgagtcttttcgctacaagctactcggaggtcttgcggttcgcaggg

SEQ ID NO: 200945 - DNA, 206 bp, Gossypium hirsutum
gttatgccggaacatttaacgagaagaaatgtggaacgaattgtggaggggcctctcaaagatggtaccacgttcctcgttcatggctcaacccaacagggaatttgttggttgtgtttgaggaatggggtggagatccgaatggaattactttggtacgccgagaaactgacagtgtctgtgctgatatctacgagtggcaaccg

SEQ ID NO: 200946 - DNA, 266 bp, Gossypium hirsutum
  unsure (1)..(266): unsure at all n locations
ggaatgtcctggagttgtttcttgtgctgatatccttggtctgggtgctagagaaggcatcgtttcgctgggaggcccttacattcctctcaaaactggaagaagagaccgtagaaggagcagagcagatgttgtggaagagtatctttcggaccacaatgagaccatctttggcgttctcgacaggtttgccgccatgggtattgacacccctggagtcgttgccctcctaggagctcacagtgtcngcagaactcactgtgtga

SEQ ID NO: 200947 - DNA, 343 bp, Gossypium hirsutum
ttcactttcgttaatcactattttctttttactcttctgtgctttgatcgttgccaatgccactgttccaccctcaaggactttcaagtacataaacgagggtgaaacaggagaattgagtgttgagtattttgcagactatcgtgccctacccattttcttattaccattccaattatgcttttataacaccactcctaatgctttcactttaagactaagaatgggcagtcgccggtccgagtccttaatgcggtgggtctgggatgccaaccgaagaaggcctattctggaaaacgccacattaacttttgggtctaatggaaatctagtgctagctgat

SEQ ID NO: 200948 - DNA, 328 bp, Gossypium hirsutum
tgcagctgtacggaactaggacgagatttattcttagcaaacatgtccttacagcataggtgaggtgagatagaaatctaagagcatgggtgtcaatgctgaaattgtagtcccagtcattgagttcctgtcatcggatttagagcgaggaactgatgggtggcaccatttgtgcaagagggttcgagaggcttgtgaaacttacggttgtttcgaggtggtgtacgaaagggtatcaaagaaagttcgagaggagatgttcggattggtgaaagaattggtccaggttccattggagaggaaacaaaagaacgctagtcccttgcct

SEQ ID NO: 200949 - DNA, 270 bp, Gossypium hirsutum
  unsure (1)..(270): unsure at all n locations
gcaagtttcaatggcaaaggcaaacattctcttggttttcgggtgtgcactgngattgctactgcttgggggtgttggagtggaaggaaatccgaattacagagatgcactacaaaaatcctttctcttcttccaaggccagagatcaggcaagctgcctgccaatcagaaagtttcatggaggtccaactctggtctttctgatggctcccttgaccatgtagatttgactggtggctactactatgctggagacaatgtgaaatttaa

SEQ ID NO: 200950 - DNA, 307 bp, Gossypium hirsutum
ccccagcaaagatcagtacatacacgattggtcctttcccagcattgagaagtgaaaaaccaaaattgaaggtcaaagttcgtttgaatttgcatggaattgtgtctgtggactcagctacactcttggaagaggaagaagttgaagttctagtttcaaaagagctggcaaatgaagatgctaagatggagacagatgaaaagcctaatgatacttctgcccctggtgccaacgagacagatgttaatatgcatgatgccaagggtacagccgaggcagcttttgtcgaaaatggtgttcctcagtc

SEQ ID NO: 200951 - DNA, 412 bp, Gossypium hirsutum
  unsure (1)..(412): unsure at all n locations
cggagactgagaaacatttgcgccatgagaaacattgggggtgtattagctctcatgatgttgcttattgggctcggagttttgatcaggacctcgtgagagcttgtagggatcattatcacaagaggtattggagagttggacttggtttagcgtttaggcttgttgctttggagcctaacttcaggaagctcctaggggatactctcaactctgcctacaagataaccagtagccgattgatccttttggactacgatggcactatgatgcctccaacttcagtgaacaaggggcctagtcatgaggttatttcggttttgaatcgtttatgcgatgaccccaaaaacattgttttcattgtgagcggcanggaccgggataccctgagncaagtggtttcttcatgtga

SEQ ID NO: 200952 - DNA, 414 bp, Gossypium hirsutum
gtggggctgaggcacaggtggcaaggctattggcttggaatgccggggccgaggttaagcccgataggccttatgctgagttttggatgggaacacatgactcggggccaagttttttggctgatggctatggagaaggtcaaaatgtgggtttaaaagagtggattcggaagaatccgaatgtgcttggtcataaggttttggaaaaatgggggcccgatcttccttttctcttcaaggtactttcagtggcaaaagccctttcaatacaggctcatccggataaagaattggccaaagaattgcttaagttgaagccaaatctctataaggatgggaatcacaaacctgagatggctttggcaattacagagttcaaggccctttgtggattcattactctcgaggagctga

SEQ ID NO: 200953 - DNA, 409 bp, Gossypium hirsutum
gtaacatccagtttaaaactatatggcaggctccgacgagtgagtctaaaatgccacctttggagtcctttaaattaacaaattaacatggttggagaaagggcgaacgacaatgtcattattgtcacctttggcaacttttagttaatggatttcatcttgacttgggctaaacacttgacggatctcgatgtttctaatcttcttgttggtgctatggtcaccaaactgttgtatgctttgtattggaaaggtgcatcagtatttgatatgggtagccatatgagcacattagatgttttatggggctctgctacatttcataaaatggcgagagagaaagtattacttattaatgctatacttacttctggatatgagctatcgatgtgtgatacagacatggtgt

SEQ ID NO: 200954 - DNA, 440 bp, Gossypium hirsutum
cccagactcactttgttgtcgtgtgtatatacagagatacgttatagaagcaaaagagcccatctctatatagactacctcaggatctgcaacatcggtacccaaggtactgactttcgctctgaattcctctgggtcaggaatttggagagtgatcactactgaatcaaaatcaaactttggggggaaatggagttttccaagatttttacgatttgtttttctgtattgctgttgtactcctccttggcctatggtcaagcaaggagccctcctccggtcgcaatgagcccaactccagcaccagccccagcaccggcaccggcatatgtaaacctcacttatttactctcagtggctggtccatttcacactttccttgactaccttgagtccactaaagtgattgacacctttcaaaaccagccaacaacactgat

SEQ ID NO: 200955 - DNA, 369 bp, Gossypium hirsutum
gcaaagttggaccatcgatgtgcctgctggcactgctatggctcgtatttggggtcgaaccaattgcaatttcgatgccagtggtaggggtcattgccaaaccggtgattgtggtggactccttcaatgcaaaggttggggtgtacctccaaacaccctggctgaatatgcacttaaccaatttggaaacatggatttctacgacatttccttagttgatgggtttaacatccccatggtgtttggtccaactaatggcggttgtcacaacattcggtgcactgcagacatcaacggacaatgcccgaatgagttaagagctcctggtgggtgcaataacccatgcacggtgtttaagaccaatgaata

SEQ ID NO: 200956 - DNA, 374 bp, Gossypium hirsutum
gctttgccagctgaaaaatctacaggtactcgatttatacgacaagtggcatgacgggggagttgccggtttccgtcacggagcttcccaattagcgtcacttgcatttgggagggaactatttcagcggtcagatcccgtcaagttacggccgttgggagcatcttgaatatttagccgcttcgggtaacgaactcagcggtaaaatcccacctgaaatcggctacctaacgaagctgaagcagttgtacattggctacttcaatagtttcgaatgtggattgccgccggaggtcgggaacttgtcggaacttgttcgttctgacgccgctaactgcatgttatccggtgaaataccgacggagatcggtaag

SEQ ID NO: 200957 - DNA, 338 bp, Gossypium hirsutum
gttcatctaagtccaaggagcggtagctgcaaggttatggggaagaagctagacgcgttgcttggaagagggttcaagccctacaagttgaaatcacttattagtgttgccctttctcgtctttccgttttcaagaatcggcgtcagattcgcagcaaccaagctcgctctgatgttgtggagctccttcagctcggccaccatgatcgtgctcttcttagagcggagcaggtggtgaaggagcaaaacatgttggacgtgtttgttatcctggaagggtattgtaatctcctcattgaaagactccatctcattgaggaagacagagaatgccctga

SEQ ID NO: 200958 - DNA, 303 bp, Gossypium hirsutum
agtacaccctgcacttggtgctccgtcttcgtgggggtatgcagatttttgtgaagacacttactgagaagaccatcaccctggaagttgagagctctgacacaatcgataatgtcaaggccagaattcaagctaaggaatgtatccctgcagaccatcagatgcttatattcgctgtaaagcacctagaggattggaggacccttgcagattacaacatccagaaggagtccactctatacttggcacttcgtctctcatacgtgatgcaaattgtcttgaagaccctgactggaaagacca

SEQ ID NO: 200959 - DNA, 275 bp, Gossypium hirsutum
ggcttatccttgcccttacgcacagcgcgtgtggatcgccaggaattgtaagggtttgcaagacaagattaagttggttcctttgaaccttcataatagacctgcttggtacaatgaaaaagtttaccctgaaaacatggtcccttccttggaccataatgccaaagcctttggggaaagtcttgatttgattaaatatgttattaccaccttcaaagggccgttttttttacctgataatcctaccaaaaaggattcctttaaaacaacttttt

SEQ ID NO: 200960 - DNA, 413 bp, Gossypium hirsutum
atctctacttccatttcatctgccatcaatttgctctggggagcatgttggctatttttcacaaggcatttgctaatccaccagaggagctgaatagtccagcttctcataaatctaccaagaagcctaaacagcctgaagaaaccctaaatgatttcctatctcatcaccctcacaacactttctccatgagctttggcaacgctgctgttttggcttatgtccgccatgaacgtgctgcttcagttcatcagaagttgttttgtgggtttgatgacatatactgcctcttcttagggagcttgaacaatctatttatgctgaatagacaatatggtctttccaaagggagcaatgacgcgatgtttgtgattgaagcatataggacgctgagggataggggtccataccct

SEQ ID NO: 200961 - DNA, 418 bp, Gossypium hirsutum
ctcaaggaatctacagatctctgtccctctttctctaggtctgaaaccctaattccttaatttttacagaagatcgggggtttaatcgcggagaatcaaccatgtttaacaggcttttcgggaaacccaagcaggaagcaaatgctctaaccacgttagacaaattaaatgagacccttgaaatgcttgagaagaaggagaaagtacttgcgaaaaaggctgctgctgaggttgaaaaggccaaggaatttgccaaagggagaaacaagagagcggctatacagtgcttgaagaggaagagactatatgaacagcaaatagagcagcttggaaacttccagcttcgtattcatgatcaaatgataatgttagaaagtgctaaagccacaactgaaactgtagatgcattgagaactgg

SEQ ID NO: 200962 - DNA, 331 bp, Gossypium hirsutum
cagttgtaaaagctgcagttgatgaaagattaagggggcggcaaatttggagggaatcacagggccgggcatctaagctatatggttttaagcatgattctatgtcatcgcttaggaaaacaagtaagacaggagaattggttgattcaaaaactaatggagatctttcacgttccaagtccgaatcaatgaatgaggatgaaaatcttctttgtctgacaggagatgctacgtcagattctgttccagatcttcaacagcacgttgtagggttaaaggtcgagttgtgcaagttgctgtaagagaaatgatcagctgttctcagatctga

SEQ ID NO: 200963 - DNA, 403 bp, Gossypium hirsutum
gccattggtgattgaattgagtttgccacattcggatggggatcaactaggtgctgttagcaaggtttacacacctacagaacatggagttgaaggttcaatatggcagttggctaaagcttatgttgctgtaaatgactctggtgttcatcaactcataagccattggctgaacactcatgcaacaatggagccattcgtgattgcaacgaaccgacaacttagtgtagttcatccaatttataagcttctctatcctcactttcgggacacgatgaacattaatgctttagctaggcagattctgattaatggatgttgtgtcctggaattaacagtttttcctggaaagtattcaatggtaatgtaatttataatttactggaatttggaatttgtttta

SEQ ID NO: 200964 - DNA, 379 bp, Gossypium hirsutum
gtcagtggatgagctgttggtgaaatggcgttacatttctgtgaacgttacaagttaatggtcttgaaaatcagctcaaaatttgaactgaggcgtttttgccgcactacaggaacttctgctcttttaaaactcagccaaccaaagccggatgatttgggatttattgattcaatttcagtcgaggaaattggtggttctcgggtcactgttgtgagaagcgaagaaggtggtaacaagattgccactgtggttctacgaagaagtactgatagtatattggatgatcttgaaagagctgttgatgatggagtgaacacatataaggcaatgtgcagggacagtcaaatggtacctgaagctgcagctactgaaattg

SEQ ID NO: 200965 - DNA, 366 bp, Gossypium hirsutum
gttatgccggaacatttaacgagaagaaatgtggaactaagtgtggaggggcctctcaaagatggtaccacgttcctcgttcatggctcaacccaacagggaatttgttggttgtgtttgaggaatggggtggagatccgaatggaattactttggtacgccgagaaactgacagtgtctgtgctgatatctacgagtggcaaccgaacctaatgaattacctgatgaaagcctctggtaaagtcaacaaacccctaaagccaaaagtgcatttagagtgcgatgctgggcaaaaaatctcagcagttaagtttgccagtttttggaacaccaggaggagtctgtggaagctaccgcgaaggaagc

SEQ ID NO: 200966 - DNA, 314 bp, Gossypium hirsutum
aaaagattgaggatgttgccaaactcctttgctgggagaagaagcgtgagaagggtgaaattgccatttggcaaaagagagtcaatgatgagtcttgtcgtggtagagaagatgattctcaagccaaattctgcaaggctgaagaggctaacgatgtctggtacaagaaaatggatgtgtgcgttactccataccctgatgttagtagttcgagtgaagttgctggtggggaattgaagccattcccagagaggctatttgctgtccctcctagaattgctagtggaagtgttcctggagtttcagttgagaca

SEQ ID NO: 200967 - DNA, 415 bp, Gossypium hirsutum
ggtatgttgcattgtgagatcctggatgtcttatgtcgtcaagagctggatatagcccttgaagaaaaacctgacaagatggatgacaaggagtgggccaagatcaatagacaggcgtgtggtacaattcgcctatgtttggccaaagagcaaaagtactccgtcatgagggagacatcagctaaaaagctgtgggatacattggaagaaaaatttctaacgaaaagtcttgaaaataggctttatatgaaaaagaaactttttcggttcacttatgcacccggtatgtcgatgaatgaccatgtgaactcattcaataaaattttagcagacttgctaaatttggatgagaaatttgaagatgaaaacatagcattattgttgttgaattcccttcctgatgaatatgatcatc

SEQ ID NO: 200968 - DNA, 390 bp, Gossypium hirsutum
gtagctctaactacctccgcctgtctttcaacgagaagagagcaagaaaagaaactaagaaatggcacgcaagaagatcagagagtacgattccaagagattgttgaagcagcacttcaaaaggttttccgcctacgatttgcccatcaaatctgcacaagtgacggagtcaactgatttcaatgagctagtagagaaggagccatggcttttgtcgcagaaactggttgtcaagcctgatatgttgtttggaaagcgtgggaagagtggtttggttggcttgaatcttcatttcgctcaagttactgcatttgtgaaagagcgcctcggcaaagaggtggaaatgagtggatgtaaaggacctgttacaacattcattgttgaaccttt

SEQ ID NO: 200969 - DNA, 343 bp, Gossypium hirsutum
gttccatccatcaaaccatataatataatattccttatatggatatatatatattattctcttgtttctttgaattatttcccaatattttctcattatctatttcttctctaattccttagaacacccttttgactcttttacagcttttgaactttctctttaatttgatttcattttttgttcatcttatttcatagatccaatacttacttctttcaacgtattaaagaaccaaatattgaattgaagctctagatctaaagcatatattggagccatgtcttttattggtacccaacaaaaatgcaaggcttgtgaaaagactgtttacccagtggaa

SEQ ID NO: 200970 - DNA, 321 bp, Gossypium hirsutum
ggcatgttcgatggtgaaccatcagctcaaccgtatgggcgtctcggtccgagacatgtgtgtaccccggatcataaacaactagccttggaagctgctaggcaaggcatagttttgttgaagaactctgggtctttaccgttgtctacttcacgtcatcgtaccgtcgcggttattgggccgaattcagatgtcacagaaacaatgataggaaactatgcaggggtggcatgtgattacacgagtcccttgaaaggcatttcaagatacgtgaggactggtcatcaagcatgctgttcaaacgttgcttgcatagcaaac

SEQ ID NO: 200971 - DNA, 405 bp, Gossypium hirsutum
  unsure (1)..(405): unsure at all n locations
atttcatgtttgcagcaccccaatcttgtgaaactttatggatgctgtatcgaagggaatcaactgttgctagtgtatgagtacttggaaaataatagcctttctcgggctttgtttggaccggaatactctcgaataaatctagattggcctaccaggcagaagatttgtgtcggaatagctaaaggcatagcgtttctccatgaagagtctagactcaaaattgtccacagagacatcaaaggtaccaacgttctgcttgatagagaccttaatcctaaaatatctgactttgngttggccaagcttagcgacgaggataaaactcacatcagcacacgaattgctgggacaatangatatattgcaccagagtatgcactgtggggttacttgacctacaag

SEQ ID NO: 200972 - DNA, 304 bp, Gossypium hirsutum
agtccctccaccctagattcttataattgtgcttcccccctgcaaaggctttattcttcattcgcttcgttgaatttttatcttctttttatctgaacggagtttggtaatccagttttcgtcttcggttgattcaggaaatcttagtttttgaattgcgtgactgaatgatctaatggagtctaaaggtgggaaaaagaagtctagtagtagtaagtctttattctacgaagctcctctcggttacagcattgaagacgtgcggccaaacggtggaatcaagaagttcagatctgctgcttac

SEQ ID NO: 200973 - DNA, 410 bp, Gossypium hirsutum
cttactttgggtgaacaccatgaaccaaattcccaaagggaagtagttggtcactcgattgtcttgacatcatatccttattcagatcctcagtattgcggaattctgacttcatatgggccacaaatgatggtgtcaccacatctatatggaatgcatcatgctagaatgcctttgcctcttaaaatggaagaggagcctgtttatgtaaatgcaaagcaatatcatggcattttgaggcgaagacagatacgtgctaaggctgagcttgaaaagaaagccattaaagttagaaagccataccttcatgagtcccggcatctacatgctatgagaagggctaggggttgtggaggtcgttttcttaatacaaagaagcatggtgatgatgttaccagccccacttcaca

SEQ ID NO: 200974 - DNA, 341 bp, Gossypium hirsutum
ccctcccttttttttttttttttttttttttttttggtaagtaaaactttaatttgtaattcaaacttacaaatacttattagcagacaacaaagaaactggaaaatacagaggaaaaagtacaaatacttcataggattcccatcacttgttgggtacctttatgtaaccaacatgggaagagttagaggctttagcaagggttttcaactcattagcggtccaacatttggatgtttccctgtggtaaaagtaccccaaacacttgcaatcagaggtgcatttccttccacaatcactctcctatatcccttctccttcattgcactggctcatgaaat

SEQ ID NO: 200975 - DNA, 415 bp, Gossypium hirsutum
gttcttggaatcgatggaggatataagggtttttatgggaagaacactatcaccttaacacctaagtttgtcgatgatatccataaacgtggaggtacgattcttggaacttctagaggaggtcatgattctgtcaagattgttgaccgcattcaggatcgtgggatcaatcaggtctatataatcggaggtgacgggacacataaaggagcagctgtgatttttgaggaaataaggcgacgtggtttgaaagtagctgttgctggaattcccaaaaccattgacaatgacattccggttattgacaaatcatttggtttcgatactgcagttgacgaggctcaacgtgccattaaagcagcacatgttgaatctgaaagtattgggaacggcattggacttgtaaagctaatgg

SEQ ID NO: 200976 - DNA, 394 bp, Gossypium hirsutum
  unsure (1)..(394): unsure at all n locations
gagtatcgaagtacccggagaattgtacacttggctagcgaagtcagcgagcaagaaagggtgaagattttaacgttgcttaaaactagaatggccaaagagccgcttaggagatggtttcaccacanttctcggtttttgggcctctttgactggacactaatggatctgcagcttgctatttacactgaaagagaatcttcttaactatatgttctaagtgccattccggctagatcttaatagtagatgnnaatgggttgctgcccttccgagagcctttggttgcagggtttcgttaaaacagataaagattttcaacagagagcaaaaacgtcaggaactactgtaacctttgtgatattagaaggatgggttgtaacagtggcatctg

SEQ ID NO: 200977 - DNA, 436 bp, Gossypium hirsutum
  unsure (1)..(436): unsure at all n locations
aaaacacccatctttaccgtgaagtagttcagaagatcgacggtcgattgggtcctaattatgcgatggatgctgcatggtgctctacgattgagcggaaagctgagcagaggaaagaaaagctcgaaagtgaactcaatgcttataggacgaatttaattaaagaaagtataagaatgggatacaatgattttggtgatttttactatgctcatggtgcattgggggatgcttttaaaagctatgttcgaactcgcgattattgtactacgtcgaagcatattattcagatgtgtttgaatgcaattcttgtgagcattgaaatggttcaatntagtaatgtgactagnctacgtagtaaagctgagcaaacacctgaagcacttgatcccccacttgtgctaagctatgttgtgctgccgggttggctcatttg

SEQ ID NO: 200978 - DNA, 434 bp, Gossypium hirsutum
cactttgattcccatgttgagcaacataacgaagattagtggcagaaatctttcaaagagatgatttctactctccctaaagggaacagctggggtcttcccgatcatctatatcagtatcaagatttttggttcacctcacctttcctacaaggagtcctgttagctcaacaacagtttgaggctcaacccactgatatcatactttctagtgcccctagaaccggcacagcctggttaaaatctctcactttcgctactattacaagaacttcatacgatgattctaccacccctttgcttttcaggatgcctcatgatgttgtgcctttcatggagcttgatcatgctcatttttccgctaatcgacatcttggaattcctcttttggccactcatgctccttattctttcttacctacatcaataattga

SEQ ID NO: 200979 - DNA, 399 bp, Gossypium hirsutum
  unsure (1)..(399): unsure at all n locations
ggcgacttccaccatgtaaaactaagcttcatnagccattattcctgagcgggagatggttgctggaatggtgaaaggctcaatgctggcaaccacttgctcggcgaccgagtgttgcagtcggttcgggttttgcgggacgggagacgatttctgcggagtgaattgccgagggggtccttgtgttaacaatggggtctccatagctgccattgttacgcaggaattcttcgatgggatattgaaccaggcggcttccacttgtgtaggaaggagcttttactcgagaggggtgttccttgatgctctcaattctttcactcagttcgcaaggattgggtcggttgaggattctaggcgtgagatcgctgctttcttgctcatgctacccatgaaact

SEQ ID NO: 200980 - DNA, 383 bp, Gossypium hirsutum
cttcgtcatatggcagcgtcagatatctcgcgatgtacgtatcgggtatccttgagttttagaggtgaagatactcggtaaagtttcacggattatctgtacacagcttctgtgcacttaggaattcgaacatttacagatgatgaggaaatcgagagagggaataacatagatgatgatattgaaaaagcaatactacaccactccaaaatttctatcgctgttttctcaaagaattatgctgcatacacatggtgtcttaacgaacttgtaatgatatttgagcacatgaaatcctctaaacatattgtgttgccagtattctatgatgagtatcccagtcaagtcaagaactcagacgtggtgttatgcaggagcattta

SEQ ID NO: 200981 - DNA, 418 bp, Gossypium hirsutum
  unsure (1)..(418): unsure at all n locations
attattctccaatcaaactgtggttttgataactgtcgctgggtttatccattcgcctcgtttttagaaaaaatatctcaaaatctttttaattttttcttcggataatagggtttaggaaatttttcatcttccaattttcaattggattttgcctgagaaaaagaatgatgagaagacaagaggaaaatcatcgacatcaggatcagcaatcaagggttttccacgagctgtcggcgctggttctgaatcttatacgatcgccgtcgatacctttcgccgacgaatctccggtgccggggtggaggtctcacccccaatacttgtcgacgacgacgatatctncggcgggatacgcttggctgatgctagggatatcggtttcgttgatgttgtgtggatcggttactttctttat

SEQ ID NO: 200982 - DNA, 414 bp, Gossypium hirsutum
ccaaaacgccaatattgtaatgggagaaatataagtcgtcctgcggtttctcttcgcggactcgccctcgatctcagcgaaccgatctccagagggaagaatatactcataagtataagcaaattagatcgaggttctctgataaggtcttcaatttgatattggcttggtacttgcttctccaaaattcaatatggttgtacttgcggcttctgttttaagcaagtctggcaaagtgcttgtctctaggcaatttgtggacatgactcgcataagaattgaaggtcttcttgcagcttttcccaagttggtgggcacggggaagcaacacacatatgttgagactgagaatgttcgatatgtttatcaaccaatagaagctctttatttgctacttgtaaccaacaaacagag

SEQ ID NO: 200983 - DNA, 367 bp, Gossypium hirsutum
ggaatctatgaccactaatccaatggcatgggaaggttcagttaacccaagggtgaagcaaatggagcaagctcagaattgtctccttcctatgggtattacgtcagagaacgttgctcatcgctttggtgtgacaaggcaggagcaggatcaggctgcggttgaatctcacaggaaagcagctgctgctacagcttctggtaaattcaaagatgaaatagtccctgtggccaccaagattgttgatccaaagactggtgatgagaaacctgtcacaatctctgttgatgatgggatccgagctaacacatcagtgtcagatctgggaaaattgaaacctgtattcaagaaaaatgggaccactact

SEQ ID NO: 200984 - DNA, 404 bp, Gossypium hirsutum
ggtaacaacggtgcgggtgggaaaaacggctattccgattgcctcattgaagaagaagaaggtcttaatgaccataatgttgttattaaatgtgctgaaattcagaccgccatatctgaaggagcaacctcatttcttttcaccgagtaccagtatgttggcattttcatggttgcttttgcaatcttgattttccttttccttggctcggtagagggtttcagcacaaagagccagccttgcacttatgacaaatctaagatgtgcaaacctgctcttgccactgctatattcagcacagtatctttcttgctcggtgctgtcacttcagtagtttctggctttcttgggatgaaaattgctacctatgctaatgctcgaaccaccctggaggcaagaaaggg

SEQ ID NO: 200985 - DNA, 275 bp, Gossypium hirsutum
gtaatgcctcccaaagcagctaaatcaaaggaagcaccagcggagaggcccatcctcggccgattctcttctcatatcaagatcggaatcgtgggactgcctaatgctgggaagtctactcttttcaacacgctccgtaagctttcaatcccagctgagaacttccctttttgtacaatcgagcctaatgaagcccgagttaatgtccctgatgagcgattcgaactgttagttgccttcagagctctgggatatgttcgtctccagattggatc

SEQ ID NO: 200986 - DNA, 429 bp, Gossypium hirsutum
gttttcctcatttccctttactcgttgaccgaaatttctcgactcaccgtggtcacaacctctagatctgttacttcctaggcccgatttcataatttcaagatctgcttccagcatctaaacgcgaccgtttccggaactcaactcggagattcaatttttaagggtttcgaatttggatgtgcttgtcttttatttggtctactggaaatgtcgattttgcccaaaggtgattcagttcatattcgagaagtttggaacgataatctagaagaagagtttgctttgatccgtgaaattgttgatacctataattacgtagctatggatactgagttcccgggtgtagttctacgtcctgttggttctttcaagaatatcagtgattataactaccaaactttgaaagataacgtggatatgttgaat

SEQ ID NO: 200987 - DNA, 434 bp, Gossypium hirsutum
  unsure (1)..(434): unsure at all n locations
attatccaaacgatggctatcttttcttcatccatggctgctgggctcattctagggctcctcactgcaaacttggatcctactgttgcgcaaattggtgtttgctatgggatgcttggcaacaatctcccaaatgcaagggaagtcatcaatctttacaaatcaaacaacatcaagcgaatgagactctacgatccaaatcaacaagcattacaagctcttagaggctcaaacattgaagtaattttaggtgtcccgaatgatcaacttcaaaaccttgctaacccttccaaagcacaatcatgggttcgatcaaatgttgtagcctattggccaagtgtccggtttcgatacattgctgttgggaacgaagtccctncatcatcttcattagctcgatttgtgttgcctgccttagtgaatgtattcaatgc

SEQ ID NO: 200988 - DNA, 398 bp, Gossypium hirsutum
attttcttctcgttcccgttagccccccacgaactggggcaaagcagaggctagagagatgtcggcggcggcggcggcgacaagccgagcgactcgacggatgggagccgaggatgagaagctagtgttcgaaacgacggaaggaatcgagccgatattgagttttgatcagatgggactaaaagacgatctcctccgtggaatctacaattacggcttcgaaaagccatctgctatccagcagagagccgtcatgccgataatcaatggccgcgacgtcattgcccaagctcagtctggtaccggtaaaacttccatgattgccctcaccgtttgccaagtggttgacacagctagcagagaggttcaagcattgatactgtcacccaacgaggaac

SEQ ID NO: 200989 - DNA, 407 bp, Gossypium hirsutum
ataaaacccagcattgttaaccctcctccccactgggcagctcgaaacatcaccagggtttggccaatctataggagcataaggtaatccttcgccggaagtacacggtggaaccggtggagtagggaaatcgttctctttaattacaggaggaaaaccattatctccattcggaaaatcgttcctcgaaggctcttctttcggaatagacggaatggaagccggtccaccatagtaatctgggaatagatcttggtgaagatcaatatgaagaggactatccatatcagaacgagtttcatggattgaggatgcagtaggcatatgaggaggggtacccatacgaggaggtgaaggaattgacatcattagaaccgaaattcctcgttgacaattttattaattaa

SEQ ID NO: 200990 - DNA, 425 bp, Gossypium hirsutum
  unsure (1)..(425): unsure at all n locations
ggcttatccttgcccttacgcacagcgcgtgtggatcgccaggaattgtaagggtttgcaagacaagattaagttggttcctttgaaccttcaaaatagacctgcttggtacaaggaaaaagtttaccctgaaaacaaggtgccgtccttggaacataatggcaaagtcattggggagagtcttgatttgattaaatatgttgatagcaacttcgaagggccgtctcttctacctgatgatgctgacaaaaaggagtactttgagacgacgttatcacacatggacgaatttctagggctggtgtatgctacatttaaaggagactcaacaaaggatgctgatgctgcttttgatcacttggaaactgctcttgcaaaatatgatggtccattccttctangcaacgagtttactctggcggaca

SEQ ID NO: 200991 - DNA, 260 bp, Gossypium hirsutum
acatgagcattatgctgatactccacaaacggtaatccaggaggaacttgaggaggctcaaggactgcttaagaccaccaacttcacccgtcaatcaaaagaggctagactagctcgggtttgtgctggactttcatcccgtctgcaataataccaatctgagaatgcacatcttgaggagcttctaatcgctgagagggagctcagtaaatcctatgaggctcgtattaaacacctgcagcatgacttatctgcatcta

SEQ ID NO: 200992 - DNA, 435 bp, Gossypium hirsutum
gtagctctaactacctccgcctgtctttcaacgagaagagaacgggaaaagaaactaagaaatggcacgcaagaagatcagagagtacgattccaagagattgttgaagcagcacttcaaaaggttttccgcctacgatttgcccatcaaatctgcacaagtgacggagtcaactgatttcaatgagctagtagagaaggagccatggcttttgtcgcagaaactggttgtcaagcctgatatgttgtttggaaagcgtgggaagagtggtttggttggcttgaatcttcatttcgctcaagttactgcatttgtgaaagagcgcctcggcaaagaggtggaaatgagtggatgtaaaggacctgttacaacattcattgttgaacctttcatccctcacaatgaagagtactaccttaacatcgtctccgagcg

SEQ ID NO: 200993 - DNA, 398 bp, Gossypium hirsutum
aagtgattaagttttttgaaacatatcacaaggaggagtacaaagtgtataacctttgctctgaaagactatatgatgcttcattacttgaaggaaaggtggccagtttcccgtttgatgatcataattgccccccaattcaattgataatatctttctgtcgaagtgcttactcatggctgaaggaggacattgagaatgttgtagttgtgcattgtaaagctggaatggcaaggacagggttgatgatctctagccttcttctatacttgaagttcttacccactgctgaagagtccattgactactacaaccagaaaagatgtgttgatggaaacgggctcgttatgccaagtcaaattagatatgtcaaatacttcgaacgcacgttaacatac

SEQ ID NO: 200994 - DNA, 153 bp, Gossypium hirsutum
ttcatattgtaatctctaatattttgataaaattctcatttaaattttcttaaatcaactcatcttttaaccaatattcccaaatcctcaaaatcccttataaattataataactaaacccaaataccttttaatgttgttccaattttaaac

SEQ ID NO: 200995 - DNA, 417 bp, Gossypium hirsutum
atttgaaatgtgatttgaagtgcttaagcagggatatcctagcgagtatcatggctcgtctagatggttcaaccctggcctcagctgcctgcacatgttctgaccttcgaggcatagctcgaaaccaaaggttatggaagcaattgtgtaattccacatggccttccactgcactcgacgaagcccaacaccttatttcatcatcaacggatggttttcgcagattctatgctgataattaatcctctatattcaatgatcacacccaatgggtgtcactctcaagtacagcttgaagcctcttgtgccaaggttatctgaactccttggagtcgatgttaaaatggcaaatgactgcattggtgaagaagttgagaaaatggtggctgcattaccagatggcggtgtattgctgct

SEQ ID NO: 200996 - DNA, 331 bp, Gossypium hirsutum
accattatcactggtacttggaaaatatcctaggatttcaatacaagcagcatttgccaagcaaagcttttaatcctctacactctctcaaaaaaaaaaaaaccaaaaggtgttttgctggcaattagtaaaggagacgatgttacaaagcacattgcaaacaaaatgcatgcggtgcactggattccccaaacatccatctgtcagtaaattccaggaacgatcttatagggaaccttgttgcagtatagtttccagtacttaccatatttggaccggcaccggtcatcatccctcttggctcggtcgaataagaggattggaagaaaca

SEQ ID NO: 200997 - DNA, 346 bp, Gossypium hirsutum
acaacatgttcgtgttcatgcaatggaagcagttatggcttgtggagatcttgagcaatcagttgggagtttaacaggtgtatctccaggtgaaggcactggtgcaaccatgtctgatgatgaagatgaagttgtagatagtgataccagcttgtttgatggaagtttagatgggattgacagcatggggtttggtcccctcgtaccatccgagactgagagatcactaatggagcgtgttaggtatgaactgaaacacgacgctcgaaacagtgttactaagagaaaattgtggacattcgagaggaccattgttctttaaacacgatctggacaacttccattc

SEQ ID NO: 200998 - DNA, 435 bp, Gossypium hirsutum
  unsure (1)..(435): unsure at all n locations
gtcacattaacattgtggtcattggccacgtcgattccggaagatcgaccagcactggccacctgatctacaagcttggtggtattgacaagcgtgtgattgaaaggtttgagaaagaagctgcggagatgaacaagaggtcattcaagtatgcttgggtgcttgacaagctcaaggctgaacgtgagcgtggtatcaccattgatattgccttgtggaaatttgagacgaccaaatactactgcactgtgattgatgcgcctggacaccgtgactttatcaagaacatgattactggtacctcgcaggctgattgtgctgttttgattattgattccaccactggtggttttgaggctggtatctccaaggatggtcagactcgtgagcatgctttgcttgcttttaccctnggtgtcaagcaaatgatttgct

SEQ ID NO: 200999 - DNA, 367 bp, Gossypium hirsutum
atttaatctaagaaaacatttccttagagcatagataaaaataagataaaagttaagaacatgggtgtcaatgctgaaattgtagtcccagtcattgagttcctgtcatcggatttagagcgaggaactgatgggtggcaccatttgtgcaagagggttcgagaggcttgcgaaacttacggttgtttcgaggtggtgcactaaagggtatcaaataaagacctagaggagatgttcccattggtgaaagaattggtccacgtcccatcggagagcaaacaaaggaacgctagtccgttgccttaccatggctgggatcgaccatgcagtcaagattctatgctggatgaatgctttgcacttggag

SEQ ID NO: 201000 - DNA, 243 bp, Gossypium hirsutum
gcaagtttcaatggcaaaggcaaacattctcttggttttcttcggttcactgggattgctactgcttgggggtgttggagtggaaggaaatccgaattacagagatgcactacaaaaatcctttctcttcttccaaggccagagatcaggcaagctgcctgccaatcagaaagtttcatggaggtccaactctggtctttctgatggctcccttgaccatgtagatttgactggtggctacta

SEQ ID NO: 201001 - DNA, 441 bp, Gossypium hirsutum
agttgcttcagctataacccaaaccgtgttggctgaaaactggggctgtgcgccaaacttgtgttgcagtcaacatggttattgcggtcagggtaacgattactgtggcactggttgcaaagaaggcccttgtttctccaagtctcccactggtgcttcagttgcctccattgtttcacctcagttcttcaacgggataatcaaccaagctcgtgcggattgtgcaggcaagaaattctatacacgacaagctttcctgactgcacttgattcctttcccgatttcggaaaattgggttctgatgttgaatccaagcgtgagattgctgcattcttcgcccatgctacccatgagactgaattcttttgctatacagaagagcaggataaaagtaatagctactgtgaagccaatccaaagttcccatgtgcaccagggaa

SEQ ID NO: 201002 - DNA, 405 bp, Gossypium hirsutum
gtttgttaactgtaactgatgttgacatggcttgggcgaatagcgttactgtccaaatgaggcttggcatgttcgatggtgaaccatcggctcaaccgtatgggcatcttggtccgagacatgtgtgtaccccggatcataaacaactagccttggaagctgctaggcaaggcatagttttgttgaagaactctgggtctttgccgttgtctacttcacgtcatcgtaccatcgcggttattgcgccgaattcacatgtcacggaaacaatgataggaaactatgcacgggtggcatgctattacacgagtcccttgaaaggcatttcaagatacgtgaggactgttcatcaagtatgctgttcaaacgtagcttgcatagcaaacaatctgtttggattcctcg

SEQ ID NO: 201003 - DNA, 400 bp, Gossypium hirsutum
attgcaatggccacaaacagtcgtagaacatatgggcttctatgggactggctataccctgcgcacatgccacttatcttgaaaggcattactcactggactgacgcaccagaggttaccactccgttgttaaaattcatggctgagtttgtcttgaacaaagcacaacgcttgacatttgactcatcttctcctaatgggattcttcttttccgtgaagtcagtaaactaattgtggcatatgggacaaggattttatctcttcctaatcctgctgatatatatgccttcaagtacaagggaatatggatttcactaactattctggcaagaggtcttgctggaaattatgtaaactttggtgtttttgaactctatggtgatagggcactctccgatg

SEQ ID NO: 201004 - DNA, 344 bp, Gossypium hirsutum
agaaggtgctaaagccacaaccgaaaccgtagatgctttgagagcgcgtaggtgctgcaatgaaggcaatgcagaaagcaacgaatatagatgatgctgacaaaacaatggactagatcaatgaacaaaccgaatacatgaaacagatccaagaagcactgtcaactcctattggagctgcagctgattttgacgaggatgaattggaggcataactcgaagagcttgaatgtgctgagttagaagaacagcttctacagcctgcatcaacatatactgcagcaccaattcatgtgcctgcttgaaggcaaccggctcggactattcctcaatagcacacattc

SEQ ID NO: 201005 - DNA, 424 bp, Gossypium hirsutum
cagcatttgatatgctacatctagctgatgctgttggggtcgatgataagttctgggtgttgggctactcaggtggaagtatccatgcttgggctgctcttagatatgttcctcacagaattgcaggtgcagcggtggttgctccaatgatcaatccgtatgagcctagcatgactaaggaagaaatgagaagtatttggggagagtcattaccaagaaggaagctaatgtactacttagctagaagattgccaaaactgctgtcatttttttaccgccggagtttcctatcaggcaagcatggtcgagttgaaaagttgatgtctgtgtcacttggaaggccggatgagattctgactgaaggagcaaccctttgaagactttctgcatagagatggtgaggagtcagtccgtcaggggaata

SEQ ID NO: 201006 - DNA, 364 bp, Gossypium hirsutum
ggaatgtcctggagttgtttcttgtgctgatatccttgttctgggtgctagagaaggcatcgtttcgttgggaggcccttacatttctctcaaaactggaagaagagacggtagaaggagcagagcagatgttgtggaggagtatcttgcggaccacaatgagaccatctctggcgttctcgacagggttgccgccatgggtattgacacccctggagtcgatgccctcctacgagctcacagtgtcagcagaactcactgtgtgaagctggtgcctccggtgtacccaaaggttgacccttggcctaaccccaaccatgttgcacacatgcttcataaatgccctgatcaaattccatacccc

SEQ ID NO: 201007 - DNA, 438 bp, Gossypium hirsutum
  unsure (1)..(438): unsure at all n locations
aaaaatcgaaaccaagatgaccatagaacatgcgtatcagagggctttggagactgtgatgcagtggctacgcaacgaggtgaatatgagtaagaccaaggtctacttccgcactttcgctcccgtacatttcagaggaggggattggagaaccgggggaagctgccacctcgagactttgccggagctgggaacaacattagtgccatcggaaacttgggagcttctcgaaatagtaaaggatgtgttatcacctcactcaaacacatcccatggaataaaattcgacatattaaacatcactcaaatgacagcaccaaggaaagacgggcacgcgtcgctatactatntaggtcccaaggaaagcccggctccgattcatcggcaagactgcagtcactggtgcttacccggagtgcccgacgcatggaacgagct

SEQ ID NO: 201008 - DNA, 429 bp, Gossypium hirsutum
agttccgacaaaagaaaacgaaaaaagagaagaagacaatcgttttctttttgaagtcgggttttagtttttggggagaaaaaaatgttgggagtatttagcagtgcgatagtgtctccgccggacgagctggtggcggccggttgccgaactccatcacctaagataacggcggatgctctggtgaaacggttccttgagacgaactcctccggcgtgtccatgcagatcggagaccatgtccaattcgcttattctcaccataaagagtctcctttacggcccaggtaaaaaaaaaatcatatatggtattggctgttggatgatctcaatcgttgaaaattaattatgaattcaaacttcagttgatcatcgagtgctttcgaacgaacctaggaattactataatttgtttaatcgaataattta

SEQ ID NO: 201009 - DNA, 407 bp, Gossypium hirsutum
agagagagtatgaatcgccaccacgatccaaaccgtgttcgatggggaagaagtcaatccattttcgaatggtggttctgtcgcacctgcacgaccactggcatccgaacctttgggttttgggcagaaacatgatgctactgtggatatacctctggattcaatgaatgattctaagaaaagagaaaaggagctcgcagcttgggaagctgatcttaaaagaagggaaaaggatataaagagaagagaagatgctgtttcccaagctggtgtttctgtagatgataaaaattggccaccaattttcccgattatacatcatgatatagctaatgagataccggttcatgctcagaggctgcaatatcttgcatttgcaagttggcttggtgttaagatttttttcc

SEQ ID NO: 201010 - DNA, 403 bp, Gossypium hirsutum
atttcaatcgagaaatgtccaccatgtttttgagagctctgctggtgcctctcatggccctggctacatggtcacacgggatgagccgagggcaacagcgaccttcctctttagacgctgcatccaacacactccaataccatggaggccctctcttgaccaagccgaatggcattaacgtttacctcatatggtatggagggttctctctgaaagacagaaactccataactgatttcttcgcttccttcgcgagccctggtcgtcgccaaggaccctcggtttcgacatggtggagaacgatcagtacatacaaggataaaactgggaaacctgtttccgacactgctagacttgtcaaacaagttggtgatgtatattcttcggggaaaaccctgaagcg

SEQ ID NO: 201011 - DNA, 390 bp, Gossypium hirsutum
caaagagcttttcgtcaaacggaagaagggttcactacccttgtgtcggagtgatggagtactggggccaatattgcaacagttgggacatgctgcctggttggagtaatacatcagcaaacgcttttcattgcgaatcttggtgattcgcgcgttgtactgggcaagaaggttggcaacactggaggaatggctgctttgcagttgtcaactgaacacaatgcaaatatcgcagctatcagacaggaacttaaggaattacacccaaatgatccgcagatcgttgtcctcaagcatggagtttggcgagtaaagggcattattcaggtttctagatctataggcgatgtttatatgaaacacgcaaggtacaacaaggaaccaattaac

SEQ ID NO: 201012 - DNA, 451 bp, Gossypium hirsutum
cagcaaccatctaccatccatcttctcattctactctttaccgaccaagagtgaagaaacctcaacaatcaacaactaccaactagatttggattaagtcacccaaaaccaatcaaccaaccaagcaaccgagaagcaaaaagaatggattctgattatggcattcccagagaactttctgatcttcagaaactccgatctcaataccaaccacagctccctccttgcctcgagggaactactgtcagggttgagtttggtgataccactacatctttagacccggctgatgctcataccatagcccgagcttttcctcacacttatggcaagcccttggctcactttctcagggcaactgccaaagtacctgatgctcagattataactgagcatccagctattagggttggacttgtcttttgtgggagacaatcccctggtggccata

SEQ ID NO: 201013 - DNA, 437 bp, Gossypium hirsutum
  unsure (1)..(437): unsure at all n locations
gtctcccacatttcccttccagggaaagggaacagggagttggggtaaaagaaggaacaagacccacactctctgcgttaggtgtggccgccgtagcttccatctccagaagagccgttgctctgcctgtgctttccctgctgctcgtaagaggacatataactggagtgtgaaggcaatcagaagaaagaccactggaaccggtaaaatgaggtatttgcgccatgtccctcgcaggttcaagactggttttagagaaggtactgaagcagcaccgaggaagaaggttgtagcagcttctgcttgaggtattacaagatctgcaaattgcgcgagggtttgggcatagcaaccaataatgctgctgaatatcgtgccataattttaaggttacaggcttgatggcttcttcgttctctatgactntcaaatggttg

SEQ ID NO: 201014 - DNA, 440 bp, Gossypium hirsutum
aagaaaaaggagaccataaaccactggtatagatggaaactgcgaagaaaacaatggacattatcacgattgatagcttctaattaaagtttggaaagtggttatgaataattccagccaaaagaatggaaattacaagcatattaccagaagagtgcctgtgtctgatcatatcgttgacttcgccggaagatgcatgtcgatcggccatgatttctcacgcttccagatcggttgcaaaccgtgatgaagtgtgggaaaggtttctgccgtctgattgtagatcaatcatttcacgatcatcatcatcatcattgctttcgctgggaaagaaggatgtatatttccatctctgttttcatcccattctcattcaaaatggtaccatggtaaactccaaagctcactccttaatctccatctccatcggttttattcga

SEQ ID NO: 201015 - DNA, 433 bp, Gossypium hirsutum; identical to SEQ ID NO: 190601

SEQ ID NO: 201016 - DNA, 395 bp, Gossypium hirsutum
ggaaacccttgaactccaaattttaaagcatttggagaatttggctaacgagatggaaattgattccgagtcggaaaatccaagtgttaaaatcccagaagaaggcggttcaatgcaaatgaattcctcggaaaaaaagggaggcgatgatgaaaaagagcagcttgctggtattatggacaagttaaatatcgagtcatcttcttgcggctgcaagaaaaaaccagtgattatcattgacgctggaatggcatggagtgggaaaacgacgttgcttcataagcttgtttgccatactcaagcttcgaatatgtagggttatgtgatgaatcttgaccccgctgtaatgaccctttcattaggcgctaatattgatatatgagatactggtaaat

SEQ ID NO: 201017 - DNA, 404 bp, Gossypium hirsutum
tgaatgttaagatgattactggggatcagcttgccgttgccagagaaactggcaggaggcttggaatgggaacaaacatgtacccttcatcttctttactgggccaagacaaggacgcttccattgctgcccttcctatagatgaattgattgagaaggctgatggatttgcaggagtgtttccagaacacaagtatgaaattgttaagaggctacaggagagaaaacatatttgtggtatgacaggagatggtgtcaatgatgcccctgctttaaagaaggcagacattggaattgctgttgctgatgctacagatgctgcccgaagtgcttcagacattgtccttactgaacctgggctaagtgtcattatcagtgcagtgctgaccagcagggctattttc

SEQ ID NO: 201018 - DNA, 445 bp, Gossypium hirsutum
aaaagataacgatattcacaagaaaaaagttgaatttgattgggacagcttggagggcccggctgggatgttaagcttggaagaagggattcaaagaccgccagcttttctgctgcgaatagtggtgtcatcccacctccgaccgccacccttagtcaactcatcaacagattccaagcgcgaggtctttctgccaaggacatggttgctttatctggtataatagaccattctttcctcccctgcactgcactactttattatatctatacatctcttctaagctaaattgctttatggtgccgagccaggggctcacacaattgggaaggcaaggtgcgtgcttttcagaggtcgcatatacaacgagacaaacatcgatacttcatttgcgaaggcaaggcaaagtagctgcccaagaaccagcggatcaggggacaacaat

SEQ ID NO: 201019 - DNA, 412 bp, Gossypium hirsutum
gccttttattgttgaatatggtgcagattaccgtgtcataaggggagctaatgcccccttccagcttgcgttttataacaccacccctaatgccttcacccttgcgttacgcatggctacaacgcgttcggagtcgctcttccgatgggtttgggaggccaacagggggaaccctgttcgcgagaacgccacgttctctctcgggactgacgggaaccttgtcttggctgatgccgatggtcggattgcttggcaaagtaacactgccaacaaaagtgtggtagggttccaattgttgcctaatggtaacatggtgttacacgattccaatggcaagttcatttggcaaagttctgatcatccaactgatacactctcggtgggtcagtcgcttagagccggattggcgacg

SEQ ID NO: 201020 - DNA, 406 bp, Gossypium hirsutum
ctcattccacaagtgtttcttcgtcggagtcggagagcagtccgtaggaacaattaaaaagaaccgaaaaaaaaacacagattaagacagaagcatggccagccagctcgtaggaacaaagagagcttgtgtcgtgggtggcagcggattcgttgcctcattgctggtcaagttgttgctcgagaagggttacgccgttaacactacagtcagggaccctgacaaccagaagaagatctctcaccttgtaacactacaagagttgggagacttgaagatctttcaggcggatttaactgatgaagggagctttgatgcccctattgctggttgtgaccttgtcttccatgttgcgacacccgttaactttgcttctgaagatccagagaatgacatgatcaaacca

SEQ ID NO: 201021 - DNA, 446 bp, Gossypium hirsutum
gtagaaggggagcagggagctgctatccatattgttctagtggactccaacactgcgcgtgttgtaacaaccggacctgaagcctctatgaagctagatgttgtggtgcttgaaggtgattttagcaatgaggatgatgaagattggacacaggaggaatttgatagccatttggtaaaagagcgtccaggaaaaagaccactgctgacgggtgacttgcaagtgaccctgaaagagggggttggaacactaggagacctcacttttactgacaattcaagttggataagaagcaggaaattcaggcttggcttgaaggttgcttctggatactgtgagggtatacgtgttcgggaagctaagacagaggcttttactgtcaaggatcacagagggggattgtataagaagcactacccacctgcactgaatgatgaagtatggag

SEQ ID NO: 201022 - DNA, 425 bp, Gossypium hirsutum
cggagacggagaaacatttgcgccatgagaaacagtacaagtagattagctctcatgatgttgcttattgggctcggagttttgatcaggacctcgtgagagcttgtagggatcattatcacaagaggtattggagagttggacttggtttagcgtttaggcttgttgctttggagcctaacttcaggaagctcctaggggatactctcaactctgcctacaagataaccagtagccgattgatccttttggactacgatggcactatgatgcctccaacttcagtgaacaaggggcctagtcatgaggttatttcggttttgaatcgtttatgcgatgaccccaaaaacattgttttcattgtgagcggcagggaccgggataccctgagcaagtggttttcttcatggtgagaaatgggtatt

SEQ ID NO: 201023 - DNA, 441 bp, Gossypium hirsutum
gaacgagttaaattcgtcgtcaatgcaaatattggaaaagacgcgtcctactcccttgaccggcttatagaggaaaatgatgccattgttttggcaattggagccacaaaacccagggaccttcctgtaccaggacgagatttatctggtgttcattttgcaatggaattcctacatgcaaatactaaaagcttgcttgatagtgatctccaagatggtaactacatatcagctaagggcaagaaagtagtagtcatcggtggaagtgacactggtacagattgcattgggacatctatccggcatggatgtagcagcattgtaaatcttgagttgcttgctcagccaccgctgacaagagctcctggcaatccttggccacagtggcctagcatattccgtgtagactatgggcaccaagaagctgctaccaaatttgga

SEQ ID NO: 201024 - DNA, 438 bp, Gossypium hirsutum
gagtcaccaatcatgttgcttaccggacatcagagttctataggtaccgtgaagttcaatccagctgggactgttgttgcatctggatcgcatgacagggaaatttttctgtggaatgtccatggagactgcaaaaacttcatggttctcaaagggcacaagaatgcaattttggatcttcattggaccactgatggatcccagataatatcagctagccccgacaaaactttgagagcatgggatgttgaaacagggaaacaaatcaaaaagatggcagaacattcttcttttgtgaattcatgttgtccatcacggagagggccacctcttgttgttagtggatctgatgacggaactgccaaactttgggatatgcgtcagagaggtgccatccaaacatttcctgataaataccaaattacagctgtcagtttc

SEQ ID NO: 201025 - DNA, 396 bp, Gossypium hirsutum
ctaccacacacttgctaatattgctacttggagtggtggctcgggccactccctcttttggtacctatgagtctcccaactatgggaagccccctactcctgtttataaacctcctaaggtgaaacccccaccttatgaacatcctgtttataaacctcctaaggtgaaacccccaccttatgaacataagccccctgtctatgaaccaccaaagaaggaaaagcctgagcctaagccaccagtttatacacctccaaagaaagagaagcctgaacccaaaccaccagtatatgaacctccaaagaaggaaaagcctgagcctaagccaccagtttatacaccaccaaagaaagagaagcctgagcccaaaccaccagtatatgaacccccaaaga

SEQ ID NO: 201026 - DNA, 435 bp, Gossypium hirsutum
  unsure (1)..(435): unsure at all n locations
ctaaagttgaaatgcctcatcattatataaatggtggttttgatgagcctggccaccatattgtgcataagaggggtacaagtttgctgaagttaactgatgaacctgcagagttagcaaccatgcgagctgagcttcatcgacgaagtattgcacaaatgaggattaacaatcgatcgatccaagacatgcaaatatttggagatccttcaggagttcctattgtaattatggaacgtgtaataaatgcacctcgtcgtactgttagcgatatatcattcttgaagaattttgacgtcatgcatttagctaccacaagcactgttcttgaagctgggaagagccaatctagtacaagtgctgcacagagtgggcaagacttgaagatcngtgtctttgagcatggttttcaagggcatcatctggatctgcgac

SEQ ID NO: 201027 - DNA, 405 bp, Gossypium hirsutum
atttcggggatcaaatactctttcacaaaaaggagagaatataagtaattaattaacacaactttttttcgttgttgttgaaaaagctcatcttttttttgatagttagagtgagcaatggctaagaatgtgggaattcttgctatggaaatctacttccctactacctgtgttcaacaggaagcattggaggctcatgatggtgctagtaaggggaaatacaccattggacttggacaagattgcatggccttttgtacagaagtggaagatgttatctctatgagtttaacagctgttacttcactccttgcaaaatataagattgaccccaaacaaatcggccgtcttgaagttggtagtgagactgtgatcgacaagagcaagtccattaagaccttcttg

SEQ ID NO: 201028 - DNA, 422 bp, Gossypium hirsutum
ggaatctatgaccactaatccaatggcatgggaaggttcagttggcccaagggtgaagcaaatggagcaagctcagaattgtctccttcctatgggtattacgtcagagaacgttgctcatcgctttggtgtgacaaggcaggagcaggatcaggctgcggttgaatctcacaggaaagcagctgctgctacagcttctggtaaattcaaagatgaaatagtccctgtggccaccaagattgttgatccaaagactggtgatgagaaacctgtcacaatctctgttgatgatgggatccgagctaacacatcagtgtcagatctgggaaaattgaaacctgtattcaagaaaaatgggaccactactgctggaaattctagtcaagtgagtgatggtgctggagctgttctgcttatgaaaa

SEQ ID NO: 201029 - DNA, 416 bp, Gossypium hirsutum
ggaatctatgaccactaatccaatggcatgggaaggttcagggaacccaagggtgaagcaaatggagcaagctcagaattgtctccttcctatgggtattacgtcagagaacgttgctcatcgctttggtgtgacaaggcaggagcaggatcaggctgcggttgaatctcacaggaaagcagctgctgctacagcttctggtaaattcaaagatgaaatagtccctgtggccaccaagattgttgatccaaagactggtgatgagaaacctgtcacaatctctgttgatgatgggatccgagctaacacatcagtgtcagatctgggaaaattgaaacctgtattcaagaaaaatgggaccactactgctggaaattctagtcaagtgagtgatggtgctggaactgttctgctta

SEQ ID NO: 201030 - DNA, 431 bp, Gossypium hirsutum
gaaaaccgagtttttcagtaggaactcgggtggtttgttgtcaaatgggtccgaggttaacaagggggaagagaattccattggtgttcttgaggtttatgttcatcaggcaagagatatccataacatctgcatttaccacaagcaggatgtgtatgctaagctttgtctcacctctgaccccgaaagcacggtttccaccaagatcatcaatggtggtgggaggaacccggtgttcaatgataatctacgcctcaatgttcgaactgttgattcctccctcaaaatcgagatattcatgatgagtagagtgaggaattatcttgaagaccagttgttgggatttgcattggtgccactgtctgaagtgctcctcaagaatgggaagttggagaaagaattctctctttcttcaactgatctgttccatt

SEQ ID NO: 201031 - DNA, 292 bp, Gossypium hirsutum
aaaaaatcttctgatttttctgagtctttttcttatcttctggttggctggggagaaagtgttttaagaagaacaatgaatgcattattggcaaccaacagaaacttcaagctagcagccaggcttcttggtttggattctaagcttgaaaagagtctcctcattcccttcagggaaatcaaggttgaatgcaccatacccaaagatgatggcacattggcaacttttgttggctttaggattcaacatgacaatgctagaggtcctatgaaaggaggaatcagatatcacc

SEQ ID NO: 201032 - DNA, 415 bp, Gossypium hirsutum
cgttagccggtgacggtttcgacaccgtcatcaaggcgaaaggagcggtcgatgcggttccgagttgtagaaacaacgtttcatgtgctgatattatggcaatggcgactcatgatgtcattgctatgtcaggtgtaccatcttatgcagtacgaattggctaggtacagatgggttaagctcacacagcatcttagtgtctaaggctatgacgtctcattcagacataagactggaaccaccttatctatatgatcataccacattgactcacccagtactgacatgactgcatcattagttgcactcactcactgactctatcgttacaaccatttgtcacaccgcttatacagtttcagccgtcagagtacattatacccgacattgaaccgagcatatgcgatctaactac

SEQ ID NO: 201033 - DNA, 291 bp, Gossypium hirsutum
agtaatcatatgcttgtcttcaaagattaagccgggcatgttgaagtataaccaaattcggactgtaaacctccaaatgcttaattaaataagtattagttagtttaatggtatttcctactcgaataaccgtagaaattttaaagctaatacgtccaacaaaccccaacttctgaaaggaatccattaattaaataaaaggtcaacccggcctttgcccgttgctctaataattcatgatacctcaacgaatcgaacggcctttgtcccggcaacccataatccaaattt

SEQ ID NO: 201034 - DNA, 408 bp, Gossypium hirsutum
  unsure (1)..(408): unsure at all n locations
cttatcctgaggatctgagtctagagtgtgggaggagttccaagcaatctttagtttatactgagtctgctgtaagccctgaaatgtttgatatggtgctactaaattgtcaaagtgtaaccgagcttcaaaaagttttgcaagatgaaacgagcaagaatgtgcaacagaacggacaattgaaaggatctaatggtggaaaggcacgtgggaagaaacatggtggtaaaaagaacatggtggatttgagaactctcttaaccctttgtgcacaagccgttgcagccgatgattggaggagtgctaatgagctaatcaagcaaatcaggcagcattcttcacctatgggtgatgggatgcagaggatagctcactatttcattgatggcctanaggcacgcttagctg

SEQ ID NO: 201035 - DNA, 405 bp, Gossypium hirsutum
agttgaggagttttttggagctgaatctcccaaaagtgaaggagggcaagaagtcaaagttcagcctgggtgttgcagagcctaagcttggttcccacatctccgagacaacaaaaattccatgtcagagtggggagtttgtgcttgagcttcttcgtggtgtgcggttgcattttgataagtttatcaaggacctaaagtctggggacttagagaaagctcagctcggtctggcgcacagttacagtagagcaaaggttaagttcaatgtcaaccgagttgacaatatggttattcaagcaattttcctacttgacactcttgacaaggatatcaattccttttccatgagagtgagggagtggtactcttggcatttccccgagttggtaaagattgtcaacg

SEQ ID NO: 201036 - DNA, 454 bp, Gossypium hirsutum
  unsure (1)..(454): unsure at all n locations
agcagaagtatttaccttctttggcacagttaaagacgatagcttgttgggctttgactgagcctgaatatggaagtgatgctagtgctgtaaatacaactgcaagaaaggtagagggaggttggataattgacggacaaaaacgctggataggaaacagcacttttgctgatgtgttggttatttttgccaggaataccacaaccaatcagataaatggatatattgttaagaagaattcccctggactgaaagctacaaaaatagcaaacaagattggagtgcgaattgtgcaaaatggtgatattctcttaaagaatgtctttgttcctgatgaggaccgattacctggtctaaactcatttctagatacaaacaangtactggctgtttcacgagtaatggttgcgtggcaacctattggcatatcaatgggtgtctatgacatgtgttt

SEQ ID NO: 201037 - DNA, 391 bp, Gossypium hirsutum
  unsure (1)..(391): unsure at all n locations
cttatcctgaggatctgagtctagagtgtgggaggagttccaagcaatctgtagtttatactgagtctgctgtaagccctgaaatgtttgatatggtgctactaaattgtcaaagtgtaaccgagcttcaaaaagttttgcaagatgaaacgagcaagaatgtgcaacagaacggacaattgaaaggatctaatggtggaaaggcacgtgggaagaaacatggtggtaaaaagaacatggtggatttgagaactctcttaaccctttgtgcacaagccgttgcagccgatgattggaggagtgctaatgagctaatcaagcaaatcaggcagcattcttcacctatgggtgatgggatgcagaggatagctcactatntcattgatggcct

SEQ ID NO: 201038 - DNA, 439 bp, Gossypium hirsutum
agtaataataaaaagtttctaaacagaaattggggtaagcagagttacaattttcaaacacactaccatatgacatcgcctgatccaaccgtaatgtctaggcagggtttggggtgttacaaatggcctttgttaaagagtttgaagataaatgcattagattgagacactgtttggaattcccttgcccgtaagtccaccttcactagttggatacaacaatgtgcatggcatattgaccggaccaacacggttcttcaattgctcgtcattgatcatctctacgatccgttcctctatctcggtaagccgctttctgaattcatcaaaagctgcaagtggggtttcgtctgacgttcattcagggttggctctatgccccagataaacctcatctgacgaatgccttgataggattcctatcaaggatatttccaaa

SEQ ID NO: 201039 - DNA, 408 bp, Gossypium hirsutum
agcaagctaactggtcaccttacgacaacaatggaggatcttgcgttgcagttgccggcgccgattactgtgtaatcgctgctgatactcggatgtcgacgggttacaatattctcacccgtgactactcaaaaatctgtaaattagcagataaatgcgttatggcatcctcaggatttcaagctgacgtgaaggctttacaaaagcatctggcagctaggcacttgatttatcagcatcagcacaacaagcaaatgagctgcccggcaatggcccaactgctgtccaacaccctttattacaagcgcttctttccttattattcttttaatgttttgggtggtctcgataatgaaggatgctgttactccacttgcagaagctgaagctattgatttagtaaaaact

SEQ ID NO: 201040 - DNA, 415 bp, Gossypium hirsutum
attagattccctcataaatccaatacttcgtcggggcgaaatggtttaaggttccattttttaaaatctgtggttgaaatcatcgatggctagttctgggaaccgagaatttgttgatgatcatgtggatcaaaacggcgactaatcgatcgattcatcatcggacggagttaccgagacctcctgtagcggtgaatctggagcggcttcgagacaaaacagcgagacaatgaatgaaatcggactcacggaaagattaaccgacatatttgttgatgaaaacgacagagatttgttgcttcaacaaagcaatcgagatgatagggttcttcaatggttgcaagctttagatatgcgattaatcggcgctagtcgaaacgatgagagactaaagcctatgttgaaagtcaacgtc

SEQ ID NO: 201041 - DNA, 411 bp, Gossypium hirsutum
  unsure (1)..(411): unsure at all n locations
ctaaagttcagtgctgataaggttgatacaatgattgttcaagccattggtttgcttgatgaccttgataaagagctcaacacatatgcaatgagggttcgtgaatggtatggttggcattttccagagcttactaagatcatacaagacaatatcatgtatgccaaggcagtaaaactaatgggtgaccgtgctaatgctgctaagctcgacttctcagaggtattaccagaagagtttgagacagaattaaaggaagcagcagtcatatccatggggactgaaattagtgaccttgatctgacanatatcaaagatatatgtgatcaggttctcaatctttctgaataccgaactcagctatatgattatgtaaagagcatgatgaacaactgtgcaccaaacttgact

SEQ ID NO: 201042 - DNA, 355 bp, Gossypium hirsutum
ccgcagcctagaaaacacaccttatggcagacaggttcagatgttactgatggtcaagctagcatacataggcaacattttctgcagtgtccccaagggttgttaaacaaacattttgaaaaactggtccaatgtgatatgcgtttgaactgtttaagcagacagccagagataattttggattcaccgtactttgaatcacgaagttctgtttttgaggatcccagtgaacctaaagggcatgactatggccaaggggagactggtaaaggatctactagctctggcttccagaatatagcatcacctgttgcagctcactcctcgactttggagattgagaaaggggattctg

SEQ ID NO: 201043 - DNA, 407 bp, Gossypium hirsutum
gcgaagtctacggtaacggcaagatattcgacatcagccataggtacaccgtcgacatgccgtcttgggaatccaaggacggcgtgggacagttcctatggttgcctaaaagcatgaagaacggttccctcgctaataattcggagatgaaactcccaactcacaccggcacccaccttgacgctcccggacacgtcatcgatcggtacttcgatgccggcttcgatgtcgataccctagatttggaagtacttaatggtcctgccctgttgatagatgttccaagggataaaaacattactgccgaggttatggagtctttgaaaataccaaagggagtacgtagagttcttttcagaacattaaatactgacaggcggctaatgtttaagaaagagtttgataca

SEQ ID NO: 201044 - DNA, 435 bp, Gossypium hirsutum
  unsure (1)..(435): unsure at all n locations
ctaaagttcattgctgataaggttgatacaatgatggttcaaggcattggtttgcttgatgaccttgataaagagctcaacacatatgcaatgagggttcgtgaatggtatggttggcattttccagagcttactaagatcatacaagacaatatcatgtatgccaaggcagtaaaactaatgggtgaccgtgctaatgctgctaagctcgacttctcagaggtattaccagaagagtttgagacagaattaaaggaggcagcagtcatatccatggggactgaaattagtgaccttgatctgacaaatatcaaagatttatgtgatcaggttctcaatctttctgaataccgagctcagctatatgattatttaaagagcangatgaacactgttgcaccaaacttgactgctcttgtcngtgaacttgttggt

SEQ ID NO: 201045 - DNA, 415 bp, Gossypium hirsutum
gccattggtgattgaattgagtttgccacattcggatggggatcaactaggggctgttagcaaggtttacacacctacagaacatggagttgaaggttcaatatggcagttggctaaagcttatgttgctgtaaatgactctggtgttcatcaactcataagccattggctgaacactcatgcaacaatggagccattcgtgattgcaacgaaccgacaacttagtgtagttcatccaatttataagcttctctatcctcacttccgggacacgatgaacatcaatgcttttgctaggcagattctgattaatggaggtggtgtcctggaattaacagtttttcctggaaagtatgcaatggaaatgtcatctataatttacaagagttggaatttgtttgaccaggcacttctt

SEQ ID NO: 201046 - DNA, 404 bp, Gossypium hirsutum
aaaaaatcttctgatttttctgagtctttttcttatgttctgtgtggctcctgagaaagtgttttaagaagaacaatgaatgcattagtggcaaccaacagaaacttcaagctagcagccaggcttcttggtttggattctaagcttgaaaagagtctcctcattcccttcagggaaatcaaggttgaatgcaccatacccaaagatgatggcacattggcaacttttgttggctttaggattcaacatgacaatgctagaggtcctatgaaaggaggaatcagatatcaccctgaggttgaccctgatgaagtgaatgcattggcgcaactaatgacatggaagacagcagttgcaaacatcccatatggtggggctaaaggtggtataggatgtaaccctgg

SEQ ID NO: 201047 - DNA, 457 bp, Gossypium hirsutum
gacattaattccgtgccaaaggatgtcaagactcagccacttgctgagaagaaagctacaagtaaaaaaccaaccggtcttggtgctcctccccctggccctccatcaactgttgatgcttacgagaagctgctttcatcaattcccgagttcgcaagctttggcaagctcttcaagtcctctgcacctgtggagttgacagaagcagaaacggaatatgcagttaatgttgtcaaacatatttttgacggtcatgttgtgtttcagtacaactgcagtaataccattccagagcaattattggagaacgtcactgttattgtggatgcttcagaggctgaggaatttgctgaagtagattcaaagcctttaagacaacttccatatgattcacccggacagacctttgtggcatttgaaaagccagagggggtctcagctgttgaaagttttcaaa

SEQ ID NO: 201048 - DNA, 415 bp, Gossypium hirsutum
gagatcttaagtgtgacaacatctttgtcaatggccaccttgggcaggtcaagatcggcgatcttggactagctgccatccttcgtggctcacaacaagcccatagtgtcatagggacccctgaatttatggcaccagaactatatgaagaggattacaatgagctagtggatatatactcctttggaatgtgtgtattagagatgcttacctctgaatacccgtatagcgagtgttccaatcctgctcaaatctacaagaaagtgacttccggaaagttgccagaggcattctataggattcaagatgaagaagcccggaggtttatcggaaagtgcctggagaacggttccaagaggttgcctgctcacgaactcttgcttgatccatttttggcccttaatgaaagcaatct

SEQ ID NO: 201049 - DNA, 447 bp, Gossypium hirsutum
gagatcttaagtgtgacaacatctttgtcaatggccaccttgggcaggtcgggatcggcgatcttggactagctgccatccttcgtggctcacaacaagcccatagtgtcatagggacccctgaatttatggcaccagaactatatgaagaggattacaatgagctagtggatatatactcctttggaatgtgtgtattagagatgcttacctctgaatacccgtatagcgagtgttccaatcctgctcaaatctacaagaaagtgacttccggaaagttgccagaggcattctataggattcaagatgaggaagcccggaggtttatcggaaagtgcctggagaacgtttccaagaggttgcctgctcacgaactcttgcttgatccatttttggcctctaatgaaggcaatctgctgtctgtcccaagagtcctgagccaaaagc

SEQ ID NO: 201050 - DNA, 436 bp, Gossypium hirsutum
gaaaaaggaaagggaaactatgacacacttcgttctagttcatggtatgtgtcatggagcttggtgttggtacaagattgtgtcgctgctcaaatcaggcggccaccgtgtcactcccttggatcttggtgccagtggaatcaaccccaagaccatcactgacttggcttccttgtccgattatgcggagccattaatggcattaatggcctctttgcctgaagacgagaaagtgatactagtgggtcacagttacggtggggttatcatttccttagccatggaaagcttccccatgaaagtattggccgctgtttatctcacagcttttatgccgaatcatgattcttctattgcgactggagtagctgagtacttcagaagggttatggcggagccgctcatggatttccagttattgtttgaagatgggtcg

SEQ ID NO: 201051 - DNA, 440 bp, Gossypium hirsutum
aagactttagacttttcattaaagcgttataaagataagcaaggtaacatttcagactccaagatcaaagcggtatttacgggaccttacattctggataaaaatgggtgatcatctggttttatgtgtggaccgtcttataacacctgaaagtttgcaatcaatgcaagaaactgatgctgctggatcttccggtgaaagttctactcaatcctctgacccagatgcttgtgctattggtgttaaggaagtggaagaacatggttgctgtgatgaagaagaaccacttatacagacagctgaatgccgtatctgccacgaggaggactgcattaagaatgtggagactactcgtgctcgtaatggtagcctgaagtttgctcacaggaaatgtgatcagcattggtgtaatgagaaaggtgatataactcgtgagatct

SEQ ID NO: 201052 - DNA, 433 bp, Gossypium hirsutum
atttcctttgccgcccctagggttttattacatggcccacatggcttctgcagatgtcgagtaccagtgcttcgtcggaggtctcgcatggaccatcaacgaccgtgctctcgaagaagccttcagtgcttacggcgagatcgtcgattcgaagatcattaacgatcgtgagactggaagatccagaggctttggcttcgttactttccgtgatgagaaatctatgaaagatgctattgaaggaatgaacggtcggagtctcgatggaaggaatataaccgtcaacgaagcacaatctcgccgaagcggcggcggcggtggtggtggaggatttggaggaaacggtgggtacaaccgtggaggcggtggatatggtggtcgccgtgaaggtggatatggaggtggtggttacggaggtggacgccgtgatggt

SEQ ID NO: 201053 - DNA, 416 bp, Gossypium hirsutum
attccactcacagaattcaaagttgtagattccgaaactggtgaaatcctcccacctggctccaagggcattataaaggtcaggggaccgccagtgatgaaaggttactataagaatccattggctacgaggcaagccctagacgaatatggttggctaaatactggtgatataggttggattgctcctcatcattcagtagggcgaagtcgtcgatgtggaggtgtgatagttttcgaaggacgtgccaaggacactattgttctttcttctggtgaaaatgttgaacctttagagatcgaagaagctgccttaaggagtactcttattcaacagatcgttgtcatcggccaggatcaacgacgccttggcgctgtcattgtcccaaacaaagatgaagcactcctggcagcaaa

SEQ ID NO: 201054 - DNA, 315 bp, Gossypium hirsutum
cttcctttggtactcaagaaaaagcaagagatgggtttttcagggaaagagtgcgagttcttgagcgagatcggattgagttctggcaatttgggatgttttgtgaatggcacctggaaaggatgtggccctgtggatcctactcttaatcctgccgctaatcacaatattgcctcaattagtgaggctttcttccaagactttcaggaagggatgctggttctcagtgaaacagcatatattgggatccaagttccatgccctaacaaaggccacttactttgactaatccgtgacgctttgggatccagacta

SEQ ID NO: 201055 - DNA, 431 bp, Gossypium hirsutum
ggcaaaacggtgtcagatctttgtgatctatagccggaaggttcatttcgagttcgacgatctcatccttcgatctttccactttcttcagcctaccatgaatcccgaatatgactatcttttcaagctacttcttattggagattccggtgttggaaaatcttgccttcttttgagatttgctgatgattcatatgtagaaagttacataagcaccattggggttgattttaaaatacgcactgtggagcaggatgggaagaccattaaacttcaaatttgggacactgctggtcaagaaagatttaggacaattactagcagctactaccgtggggctcatggcataataattggttatgatgtgacagaccaagaaagcttcaataacgttaggcaatggctgagtgaaattgatcgctatgctagtg

SEQ ID NO: 201056 - DNA, 424 bp, Gossypium hirsutum
ctagcatccaacggcgacttctaggcttactgggccatcgataatggccctttcaacaatgatccatacccatctcccaccagccctcagcggtggtgggatgaatcggatttctgctgtttttgttcatcaaggagttgcttccgataccaaactcaataggggtgctcgacgtttagctgaatcgttgactacccttcttaatctcaatatcgaacctctttgttcgaggaaaaatcttcaatattccaattgggattcgtttgatgatgagaaacataacaccccaacgacgtctcccaaggagatgattgccgataagtggcgtgagcttcatggttcttcggattgggagaagcttttagacccacttcatccatggctacggcgagaaatcgttaagtacggcgagtttgctcaagcg

SEQ ID NO: 201057 - DNA, 420 bp, Gossypium hirsutum
gtaagctgcggttgctaaagctggagcggatcaaggattggttactgatggaagaagagtttgtggctaaccaggaaaggctcaagcctcaggaagagaaagccgaggaggatcgatctaaagtagatgatttgagagggtcgccgatgagtgtcggtaacttggaggagcttatcgatgagaaccatgcgattgtttcatcgtcggttgggccggagtattatgtggggattttatctttcgttgataaggatcagttggagcctggatgtgctattttgatgcacaaataaggttctttttagtgctgggcttctgcaagatgaaagtgatcccatggtatcagtgatgaaggttgaaaaggctccatttggaatcctatgctgatataggaggtttggattctcagatacaggagat

SEQ ID NO: 201058 - DNA, 404 bp, Gossypium hirsutum
cctctctcatcttccgttgtttatacgtttggttggggttgaagaagtgctactaccatggctacaaagaagagcgttggggacttgaaggaagctgatttgaagggaaagaaagtgtttgttagagtcgatctgaacgttccattggatgataacttcaacataactgatgacacaaggatccgtgccgctgttcccaccatcaagtatttgatgggtcatggctctaaagtcatcctctctagtcatttgggacgcccaaagggtgtcactcccaagtacagtttgaagcctcttgtgccaaggttatctgaactccttggagtcgaggttaaaatggcaaatgactgtattggtgaagaagttgagaaaatggtggctgcattaccagatggcggtgtatt

SEQ ID NO: 201059 - DNA, 413 bp, Gossypium hirsutum
caacggtgttttgtgattaaaaaaactaccaagatggtggcagggcaagatggcttccctgcatgaaccatggctagtggagaacgggttgaaggggtctagcaaggagattcgccatggcaggactgcacacaacatgtcgtcttcgtcgttgcggaaaaaatcggacctgacgcttgtttccaaggttcggtatgcaatgcttaggcagttcctcgccaatcttcaagaggtcatattagggaccaagctctccgttctcttcccagctattccattggccattgttgctgagtgttatggatttggaagaccctgggtgtttgcattaagtttacttggacttacaccattggctgaacgagtcagctttctcaccgagcaaattgcttattacactggtccaacagtgg

SEQ ID NO: 201060 - DNA, 279 bp, Gossypium hirsutum
gtaaactgtttttgcttaagctggagctcatcaatgattgggtactggtgaaagaagagtctgtggctaaccataaaaggctcactcctcatgaagagaaagcccctgaggatcgatctaaagttgattattttacagggtcaccgattagtgtcacgtaactcggaggagcttatcactgagaaccattctattgcttcatctacctttgagccggaatattatctggtgactttatcactaacttataacgatcacattatgcactgcatgtgctat

SEQ ID NO: 201061 - DNA, 376 bp, Gossypium hirsutum
ccaaaacgccaatattgcaatgggagaaatatgagtcctgctacggtttctctgcgcggactcgccctctatctcagcgaaccgatctccagagggaagaatatactcataagtatgagcatattagatcgaggttctctgataaggtctatcaattggatattggctcggcacttgcttctacataattcactatggatgtacttgcggcttctgttttaagcaagtctgacatagtgcttgcctctaggcaatttgtggacatgactcgcataagaattgaaggtcttcttgcagcttgtcccaagttggtgggcacggggaagccacacacatatgttgagactgacaatgttcgatatgtgtatcaaccaat

SEQ ID NO: 201062 - DNA, 252 bp, Gossypium hirsutum
ctttgatgctggtttgaacacattattgcagggactgctggggtctagattgaacgctgatattggatctctttatacctttgctccaacagcaatcacaattattcttgctgatcgggtcaatgacaggtcagatcctattgagagatttaaaaggatattgcaatcgaatcaaggtgccctaattgcaacttacactctcaagattgtcctcgacttaacaagcctttgtcgtaatgtttctaagatttt

SEQ ID NO: 201063 - DNA, 416 bp, Gossypium hirsutum
gttaaggaaagtatgcgttatcaagatgcttagggatgcgactttggataaagtatatagtcttcgccgtcaagaagtacgagaaaccataggttatttatatagtaaggccggttcgcctgtaaacgtgggagagcagatgtttttaactatcttgaatgtggtgaccaatatgatatggggcgggtccatggaaggggaggccagggcgagccttggtgcagagttcaggcaagtcatctcagaagtaacagaacttttgggtctacctaatgtttcggatttcttcccggcgttggccccgcttgatttgcaaggtgcagtgaaacgtgtccgaaaatcaacggataagttggacgcaattattgataagataatcaatcaaaggttggaggataagcaaagtgggcacacag

SEQ ID NO: 201064 - DNA, 382 bp, Gossypium hirsutum
gacaaatctaatgcttacggctaaaaacgtgagcaaaagatttgggtatgggaatgctcaagcttacaaaagtggctctttgacgatcacatcctgcgggggtaacagatgtgagtttaagccatggaaagggattcaaacctgaggcagatgtgccttcctgggttgctttatttcaatgacggattggtggcttttgccaaatctgcaggttctcttgagtccttacagttagaggagtgcaacagaatcacccaatccgggactattggtgtcctctcaaactgttcgttaaaatcccttaccgtagtaaagtgcatgggaattaaagatatatcctcggaagttcctttgtcgtgctgcaattcccttaaatcattgt

SEQ ID NO: 201065 - DNA, 411 bp, Gossypium hirsutum
accagttgtttgtctcgttggtctcggtctctttgcgcgaggcgtcccattggtaatttttctttgaacactttaatgcttggttgggacaaataatatgctgatataaataatgcagttaatgtatgatacagcttggtaactgcgtggaaatcggcctgcctatgcttattctactgattatttctcaacagtacctgaagcgtgtcccctcgagagcccatctaatactcgagaggtttgccttgcttatttgcattggaattgtgtgggcttttgctgctatcctaaccgtgtctggtgcttacaacaacgttaagactgctactaaactgagttgccgcacggatcgatcttacctaatgtcttctgcaccttggtatggtcataacgtgctgttctgcttgcttt

SEQ ID NO: 201066 - DNA, 412 bp, Gossypium hirsutum
gttcttggaatcgatggaggatataagggtttttatgcaaagagcactatcaccttaacacctaagtttgtcgatgatatccataaacgtggaggtacgattcttggaacttctagaggaggtcatgattctgtcaagattgttgaccgcattcaggatcgtgggatcaatcaggtctatataatcggaggtgacgggacacataaaggagcagctgtgatttttgaggaaataaggcgacgtggtttgaaagtagctgttgctggaattcccaaaaccattgacaatgacattccggttattgacaaatcatttggtttcgatactgcggttgaggaggctcaacgtgccattaaagcagcacatgttgaatctgaaagtattgggaacggcattggacttgtaaagctaa

SEQ ID NO: 201067 - DNA, 376 bp, Gossypium hirsutum
gcagtttggtgttacctacttagtgactcacaaagaaaccgatcagcaattcggttgtaaatccatcgccacccgtaagcttatcaaccgtgatgacatcgaagacgttcgccgagaagtccagattatgtaccatctaaccggtcacaggaatattgtggagctgaagggggcttatgaggatcgtcactccgtgaatctgataatggaattgtgtgcgggaagtgagttgtttgaccggattatagcgaaaggccattattcagagagggaagcggctaatttgtgccggcagatcgtgacggtggttcataattgtcattccatgggggttatgcatagggacttgaagcctgagaatttcttgttactgagt

SEQ ID NO: 201068 - DNA, 427 bp, Gossypium hirsutum
gtagctctaactaccttcgactgtctttcaacgagaagaggacatgagaagaaactaagaaatggcacgcaagaagatcagagagtacgattccaagagattgttgaagcagcacttcaaaaggttttccgcctacgatttgcccatcaaatctgcacaagtgactgagtcaactgatttcaatgagctagtagagaaggagccatggcttttgtcgcaaaaactggttgtcaagcctgatatgttgttcggaaagcgtgcgaagagtggtttggttggcttgaatcttcatttcgctcaagttactgcatttgtgaaagagcgcctcggctaagaggtggaaatgagtggatgtaaaggacctgttacaacattcattggtgaacctttgatccatcacaatgaagagtactaccttaacatcgtc

SEQ ID NO: 201069 - DNA, 427 bp, Gossypium hirsutum
cgtaacttctccgccgttgattattatcttcgggaatacgctgcggctactaagtgagttggtgcgaagatgagtcgtggtgcagcagtgggacccaaggggaagaagaaaggagcgacctttactatcgactgtgctaagccggttgaagataagatcatggacattgcctcactcgaaaagttcctccaggaacggatcaaggtatgcggcaaagccggtgctcttggcgactccgtcaccgtcacccgcgacaagaccaaaatcaccgtcacgtctgactccaacttctccaagcgttatcttaagtacttgaccaagaagtacttgaagaagcacaatgtccgggattggcttcgagtgattgcttccaacaaggacagatctgtttacgaactccgctacttcaatatcgccgagaatgaag

SEQ ID NO: 201070 - DNA, 423 bp, Gossypium hirsutum
attccactcacagaattcaaagttgatgattccgaatctggtgaaatccttccacctggctccaagggcattataaaggtcaggggaccgccagtgatgaaaggttactataagaatccattgtctacgaggcaagccctagacgaatatggttggctaaatactggtgatataggttggattgctcctcatcattcagtagggcgaagtcgtcgatgtggaggtgtgatagtcttcgaaggacgtgccaaggacactatcgttctttcttctggtgaaaacgttgaacctttagagatcgaagaagctgccttaaggagtactcttattcaacagatcgttgtcatcggccagtatcaacgactccttggcgctgtcattgtcccaaacacagatgaagcactcctggcatcaaaagaggca

SEQ ID NO: 201071 - DNA, 419 bp, Gossypium hirsutum
ggtgtttcctagaaaaagagaaaaaatcaaagggcaaaaggaatatcttcaggtttgcacgtgatatgactcatttgatcagcatcttagtgctgctcctcaaaatctacgctaccaaatcttgctcaggtatttcgctgaagacgcaggagctatatgcgctagtatttttgacccgctacttggatctattcacggattttatatctgtgtacaacaccatcatgaagctggtctttattgccagctctctagccattgtttggtgtatgagaatgcaccgagtcgtgaggcgttcctatgacaaggacctcgatacatttcgtcattatttcctcattttggctagcctcattttggcgcttttggtacacgagaagttcaccttttacgagatcttttgggcattttcaatctac

SEQ ID NO: 201072 - DNA, 408 bp, Gossypium hirsutum
gtgttgttcaaggcaaaaaagagaagctagtgaaccgtgtcaggatctgtgattatcttaagaccttaggaattatccctgatgaattagagaatctagaattaccctctactgtaaaagtgatgtctgagcgtgtccagtttttacagaaacttggattaactattgatgatatcaacgaataccctttaatgcttggctgcagtgtgcgtaaaaacatgatacctgtattaggttacttggaaaaagtcgggattgcaaagtcaaaactaggggagtttgttaagaactatccgcaggttttgcacacaagtgtggttgatgagcttggtcctgatattaagtttcttaaggggcttgatgttgagaagcaagatattggatatggtctacagaagtatccataac

SEQ ID NO: 201073 - DNA, 429 bp, Gossypium hirsutum
gttcagttagaattccccgagataatcttcttaatcgatggggggatgtcacccgagatggaaaatacacaagtagtctccctacaataaacaaacgttttgctgctactcttggtgaacttgtaggtgggagggttggccttgcacattcttcagttggtatcctcaagattgctgtcactattgcagtacgatactccttactacgtcagcagtttggtcctccaaaacagcctgaagtcagcattcttgattatcaatctcagcagcacaagctcatgccaatgttggcttcaacttatgcatttcattttgccactcagtatttggtagagaaatattcagagatgaagaagacacatgatgaacaactggttggagatgtgcatgctctttctgcaagcctgaagtcctatgtgacatcattta

SEQ ID NO: 201074 - DNA, 409 bp, Gossypium hirsutum
aaagagttgtcaatctgttgattaagcaacaatactgggaaaggagagtctaaggacataaggatcttcgtctctgatgtgtgattgtttgaagctatggattcaactggcaaaacccaattctttcggtcgagttccctaacggcgggagaacggatctgtgcatctgctttcttaccggtccttatagtgatcgatttcttgatttatgcaacgtctaattgctttggatgccggccccgacccaagaaatgcatctatgagttcactgatcttacccggctcgctcatgaatcccgattttcggtgaatgaagtcgaggcattgtacgaactcttcaagaagctgagtagctcaataatcgatgatggattaattcacaaggaagagcttcagttagccttgttcc

SEQ ID NO: 201075 - DNA, 373 bp, Gossypium hirsutum
  unsure (1)..(373): unsure at all n locations
ccagattccgacatctactggaagaagctcgaggataaagatcatttctactgccaatttacagctgatcttttcgctatgaaccatacggatttcatcatcaccagtaccttccaagaaattgctggaagcaaggacactgttggtcaatacgagagtcacactgctttcactcttcccggtctctaccgtgttgttcacggaattgatgtgtttgatcctaaattcaacattgtgtcccctggtgccgacatgagcatatactacccttacaccgaggagaagaagagggtgaagcatttccattccgagatngaagaactttttacagcacagttgaaaatgaagaacactggtgtgtgctaaacgaccg

SEQ ID NO: 201076 - DNA, 424 bp, Gossypium hirsutum
gattacgccggcgccgacgtgctcggctggggagacggggattacaaaggggaagaagataaagagaaagcaaagtcaaaagcttctttatctacaatcgccgagcaacagcatcgtaaaaaggttctcagagaactcaactctttgatttccggttcaaccgccaacactgacgacgccgtcgatgaagaagtcaccgacaccgaatggttctttttagtttccatgacccaatctttcgttaacggcaacggacttccgggacaagcttttttcaattcatgtccagtatgggtcgctggatcggaccgcttagccaattctacgtgtgaaagagcgaaacaaggacgggttttcggtttacaaacgatagtttgtataccgttggcgaatggcgtcgtggaattggggtcatcggaattca

SEQ ID NO: 201077 - DNA, 425 bp, Gossypium hirsutum
gttcttggaatcgatggaggatataagggttgttatgcagggaacactatcaccttaacacctaagtttgtcgatgatatccataaacgtggaggtacgattcttggaacttctagaggaggtcatgattctgtcaagattgttgaccgcattcaggatcgtgggatcaatcaggtctatataatcggaggtgacgggacacataaaggagcagctgtgatttttgaggaaataaggcgacgtggtttgaaagtagctgttgctggaattcccaaaaccattgacaatgacattccggttattgacaaatcatttggtttcgatactgcggttgaggaggctcaacgtgccattaaagcagcacatgttgaatctgaaagtattgggaacggcattggacttgtaaagctaatgggacgctactg

SEQ ID NO: 201078 - DNA, 415 bp, Gossypium hirsutum
caatgatgtgcagttaattatccaggaaaatgattggcaaaagcagaacattaaaaggtgtacgattctcttctaggggttcttcgacaggttcaaacaccttgggaagtgctgctactgatagtcaaagcacgggagatgaaactctaactcaatcagcagaagaagtacctggaagtccagctgaggctactaagggtactaagagaaagcgagagcctacaaacatgaaagatatatggaaccttcaacctggaactcgtatagtagtagatgccaaccaatatggccagcttattgggaaggaagcgtccaaattggctgaatttctctgtacaattgcaaggactggttctatttgtcctttgaatacaaaacattggaaacatctttctaaatatgtgttggaaaacat

SEQ ID NO: 201079 - DNA, 412 bp, Gossypium hirsutum; identical to SEQ ID NO: 190982

SEQ ID NO: 201080 - DNA, 433 bp, Gossypium hirsutum
attcagtttacgatctacacacggtggctaccaaaagcatcggtcctccattcattcacgggtcacttttcctgcgggaaatccgatcctggaacctagtgtggagatgaattttactagtaaactacttctaggttcccatggcaggctttacaggaatgctttgaaaatgcctgcattaattttggatgagaaagagaaaaaggtctcgaggtttatctctagtaatggattagttgaagatccatgtgccattgagaaggaaagagctttgatcaatccttggacatcccaggagaaggaaatttttatggataagttggctgcctttgggaaggacttcagaaaaagtgcttcttttcttgatcacatgacatctgctgactgtgttgagttctattaccaaaatcacaaatcagaatgttttgagaaa

SEQ ID NO: 201081 - DNA, 359 bp, Gossypium hirsutum
gagctacttaaccatttcccaaatctcctccctcctcttgtttagcgtccttttcatttccgctcatgcagcgcgctttgaaatccgcaatgagtgctcctacaccgtctgggcagcagcctctcctggtggtggccgtcgcctagaccctcggcaaagttggaccatcgatgtgcctgctggcactgctatggctcgtatttggggtcgaaccaattgcaatttcgatgccagtggtaggggtcattgccaaaccggtgattgtggtggactccttcaatgcaaaggttgtggtgtaccttcaaacaccctggcttaatatgcacttaaccaatttggaaacatggatttctactaca

SEQ ID NO: 201082 - DNA, 424 bp, Gossypium hirsutum
gttatcaagtcttccactttatagcacacaactactatcagaaataccatttagattctatatatatagatagatatatagatatggagggtgcaaaggaacaattacaagctcctacatatggagatttaatcaccatacttagcattgatggtggtggaataagagggatcatccctggaaccatacttggtttcttagaatctcaacttcaggaactggacggtgaagatgcaagactagcagattacttcgatgtgatagcatggaccagcaccggcggcttggtgacagccatgctaacttgtccgaacgaaaagaatcgaccattatttgctgccaaagacattaaagacttttacctaactaattgtcctaacatatttcctcaaccaggatgtccattgttttctcgagcaacaaa

SEQ ID NO: 201083 - DNA, 419 bp, Gossypium hirsutum
gcggaaccctccacgcgccgtcggtaggcgttgtgggttcagtagttctattatttctggactcgctcaaggtagtggagagtacttcacgcgcctaggtgtgggtactcctgcgaggaatctttatatggtgcttgacactggtagcgacgtggtttgggtccagtgttcaccttgcaagagttgctactctcaatctgacccaatttttgacccgtctaaatcagcttctttctcaagtattccttgtagatccgcactttgccgtagcttagattcatcgggatgtaatcaacgccggatgtgtctctatcaagtatcctacggcgacggttctgttactttcggcgacttcttcactgaaacactgacgtttagaagaacctcggtgggacgcgtggcactcggttgcggtcacg

SEQ ID NO: 201084 - DNA, 422 bp, Gossypium hirsutum
  unsure (1)..(422): unsure at all n locations
ggcagatgcaaccgtactcgtaatggggctcgaccaatcgatagaagcagaattcagggacagggtagggctgctcttgcctggacgccagcaagagcttgtttcccgagtggctcgagcttctagaggtccaaccgtgctggtcttgatgtcaggtggtcctatcgatgtctcattcgctaagaatgatcctcgagttagtgcgattatatgggctggttatccaggccaagctggaggaactgcaattgcggatgttttattcggaacgaccaatccaggagggaagctgccaatgacatggtatcctcaagattatgtagctaaagtcccaatgacaaacatggngatgagaccatcaagaggctaccctggaagaacctacagattctataaaggttcagtagtgttccctttcggac

SEQ ID NO: 201085 - DNA, 423 bp, Gossypium hirsutum
gcccaaggttttggatctcttggattgatgacatctgtgctggtttgcccagatgggaagacaatagaagcagaagctgctcatggtactgttacacggcatttcagagttcaccaaaagggtggtgagaccagcacgaacagcatagcatctatctttgcttggacgcgtgggcttgcacacagggcaaaattggatgacaatcctaaactcttggatttcactgagaaactagaggcagcttgtattggaactgtggaatctggaaagatgaccaaagatcttgcactaatcattcacggctctaagcttgctagggacaagtacctgaatactgaggagttcattgatgctgttgcagcatatctaaaagcaagactttcttaagcataaatttgaaaatggtcgaaaattgaacggggt

SEQ ID NO: 201086 - DNA, 410 bp, Gossypium hirsutum
gaaggctactacactctctgttgcatctatagatgatgcagcagggatcgatgaactcatcttcaagttagagctttgcacgaaaaatttgccactagggttcaagatgaaacctattcagtttgagaaggatgatgatacaaactaccatatggatctgatagctgggcttgcaaatatgagggccaggaactacagcattccagatgtggacaagctgaaagccaagttcattgctggaagaattatccctgcaattgccactttcacagctatggccactggtctcgtctgcctggaactttacaaagctctggatggaggacacaaactggaagactaccgtaacactttcgcaaatcttgcactgcctctattctctatggcagagccggttccacccaaaacca

SEQ ID NO: 201087 - DNA, 409 bp, Gossypium hirsutum
cttactttgggtgaacaccatgaaccaaattcccggatggaactagttggtcactcgattgtcttgacatcatatccttattcagatcctcagtattgtggaattctgacttcatatgggccacaaatgatggtgtcaccacatctatatggaatgcatcatgctagaatgcctttgcctcttaaaatggaagaggagcctgtttatgtaaatgcaaagcaatatcatggcattttgaggcgaagacagatacgtgctaaggctgagcttgaaaagaaagccattaaagttagaaagccataccttcatgagtcccggcatctacatgctatgagaagggctaggggttgtggaggtcgttttcttaatacatagaagcagggtgatgatgttaccagccccacttcac

SEQ ID NO: 201088 - DNA, 426 bp, Gossypium hirsutum
tgaatgttaagatgattactggggatcagcttgccattggcaaagaaactggcaggaggcttggaatgggaacaaacatgtacccttcatcttctttactgggccaagacaaggacgcttccattgctgcccttcctatagatgaattgattgagaaggctgatggatttgcaggagtgtttccagaacacaagtatgaaattgttaagaagctacaagagagaaaacatatttgtggtatgacaggagatggtgtcaatgatgcccctgctttaaagaaggcagacattggaattgctgctgctgatgctacagatgctgaccgaagtgcttcagacattgtacttactgaacctgagctaagtgtcattatcaatgcattgctgaccagcatggctatttttcaaagaatgaaaaactacacta

SEQ ID NO: 201089 - DNA, 429 bp, Gossypium hirsutum
ccggaaactgatcctaccgttttattcattcactcttttgtgcattattctcccgatgaccatgttcgttccagaggctgagcttcctgcatgggttgtttgttacatccctgctacaatgtcgttccttaacatccttccggcaccaaaatccttcccgttcattgttccttaccttcttttcgagaataccatgtcggtgaccaagttcaatgctatgatatctggtcttttccaactcggcagtgcatacgagtgggtcgttacgaaaaaatccggacgatcttcggagggtgatcttgtttcattggttgagaaaaagccaaaacaccatcgggttggatcagaacccaatcttgaggaaatgaaagctgatctccagcaagaacaggaacaaaaggctcgtaaaaagaagcataatagaatata

SEQ ID NO: 201090 - DNA, 424 bp, Gossypium hirsutum
gagacctttgtcttcaagaaggagaaagtctccctcgctggtcaggacgagtacattgtgagaggaggaagagatttgtttaagttgctgcctgacgctttcaaagggattaagcagattggtgttattggttggggttcgcagggacccgctcaagctcaaaatttaagggattctcttgctgatgcaaaatctgatatcattgtcaaggttggactcaggaagggttctcgttcttttgatgaagctcgtgctgctgggttctctgaagagaatggcactttgggtgatatatgggaaactatttctggaagtgatcttgtgttactgttaatttctgatgctgcacaggcagacaattatgagaagatattctcctacatgaaaccaaatagcatcctggggctttcacatggctttcttc

SEQ ID NO: 201091 - DNA, 424 bp, Gossypium hirsutum
cttcaatggtggatatgagcataagaaatagcacagagaggaggaaattgggatatttctcatgtggaacagggaatccggttgatgattgctggcgatgtgatcggcattggtatctcaggcgaaagaaccttgccaactgtggcattggctttggacgcaacgccattggtggtcgtgatgggaggtactatgtggtgactgaccctagggatgacgaccctgtgaaccccaaaccaggcacccttcgccatgctgttatccaggaccgtccactttggatcgtgttcaagcgtgacatggtgatcaggttgaagcaggagcttataatgaacagttttaagaccatcgatggtcgtggtgccaatgtgcatatcgctaatggggcctgcatcaccatccagtatgtcactaatattatcat

SEQ ID NO: 201092 - DNA, 417 bp, Gossypium hirsutum
gttgagaaagtgaggattaagtgtctggggtatcaagaaggggctaagatttctaagaatccaactgggaaaaagctgtttgagattatggttaagaaagagagtaatctctgtttggcggctgatgttgccactgctgctgagttgcttgatattgctgagaaggttggacctgaaatttgcctattgaagacccatgttgacatattccctgatttcactccagagttcggatctaagcttcgcgcgattgcagaaaaacataacttcatgatatttgaagaccgtaaatttgcagacatcggtaacacagtaacaatgcagtatgaagggggtatcttccgtattttggaatgggctgatattgttaatgctcatataatctctggtcctggaattgttgatggtttgaaattg

SEQ ID NO: 201093 - DNA, 442 bp, Gossypium hirsutum
ttattaaatccctacattttcccccacccttttctttaacgagtaattctaatgtttaaaagaaaaaaaacatctttttcccctctatcaccaatcctagtccttaccatcatcatcattatcaccaaccaacctcaacaacaacaacagctgcctctgcctatcattttcatttgattataaaaacaatttgtttccatttgtttttgttttctgtagttgggttcttttgttttctggggcatattattaatttataatattattatgtgaaaaaagaagatgaatatttttgctattgcgagaggatgagagtgagagagaattatgcgaaccatttgcgactcttgtgaaagtgctgctgctatcgtcttctgtgctgccgatgaagctgctctctgcggtgcttgtgatgaaaaggtccatttgtgcaataaacttg

SEQ ID NO: 201094 - DNA, 417 bp, Gossypium hirsutum
attttcttctcgttcccgttagccccccacgaacttaggcaaagcagaggctagagagatgtcggcggcggcggcggcgacaagccgagcgactcgacggatgggagccgaggatgagaagctagtgttcgaaacgacggaaggaatcgagccgatattgagttttgatcagatgggactaaaagacgatctcctccgtggaatctacaattacggcttcgaaaagccatctgctatccagcagagagccgtcatgccgataatcaatggccgcgacgtcattgcccaagctcagtctggtaccggtaaaacttccatgattgccctcaccgtttgccaagtggttgacacagctagcagagaggttcaagcattgatactgtcacccacgagggaactggctttacaaacggagaa

SEQ ID NO: 201095 - DNA, 320 bp, Gossypium hirsutum
atttgacgagttttttggagctgaatctcccaaaggggattgagcgcaatatgtcaatgttcagtctgggtgttgcagaacctaagcttggatcccacatcttcgatacaacaaaaatttcatgtcagagtgtagagtttgcacttgatcttcttcgtggtgttcagctgcctttcgataagtctatcattgacctaatctctgggcactcaacgaaagctcaaataggcctggcgcacagttacagatcatcacatgctaaactcaatgtcaaccaacttgtcaacttggcaattcaagcaatttttcctacttgacac

SEQ ID NO: 201096 - DNA, 423 bp, Gossypium hirsutum
ttttactccacacaaagcaaaagggaaagtaatatagtatgaacatcattggttttgagaggaaaaaaggaagggtgaaatatggctggttacagagcagaggatgactatgactaccttttcaaggtagttttgatcggtgattcaggtgtggggaagtctaatttactctccaggttcaccaggaacgagttcagcctcgagtccaagtctactatcggcgttgagttcgctactcgtagtttgaatgtggatggcaaggtcattaaagctcagatttgggacactgctggtcaagaaaggtatcacttttactattcccttgccttgctttcctttatttttgatctgggtatctttagttctcttctgattttgcaaggaatttggttttgttcttattgaacttgaggaaagaaagcg

SEQ ID NO: 201097 - DNA, 396 bp, Gossypium hirsutum
gaatggctctttcagctgccactctattcactgaccttgagggactctgatatgtctttttgattctattttacatcttatcaagcaaaaatggaaaaggtaaaggtaaagggaaagccattccgggttcgcgacccttgccaattattaggaaaccattcacatgttaagcatgcttacacaccaattcctttatcacttggacaataaatatggtcctatgatgtccataaggctaggcgatgtgccaactgttgtcgtttcatcccctcaagccgacgacatatttctcaagacacatgatgctgttctacgaagcaggccaagacttcaagtcctaggattaatttacaatggcaaaaggtgcatagcattcacggaacttggatcatattg

SEQ ID NO: 201098 - DNA, 430 bp, Gossypium hirsutum
  unsure (1)..(430): unsure at all n locations
gtttactttcaatggtctcagccgttcatggatatggtggtggatggactaatgctcatgctactttctatggtgggagtgatgcttcaggcacaatgggtggtgcttgtggttatgggaacctgtatagccagggatatgggacaaacaccgcagctttgagcacagctctgttcaacaatgggcttagctgtgggtcttgctatgagattaagtgtgcgaatgatggcaagtggtgcctgcctggttccattgtggtcactgccaccaatttctgccctacgaacaatgctcttccaaacaatgctggtgggtggtgcaacccttcactgcaacactttgacctttctcagcctgtcttccaacacattgctcagtacanagctggaattgtgcctgtttcttacagaagggtaccatgcatgagaaa

SEQ ID NO: 201099 - DNA, 426 bp, Gossypium hirsutum
  unsure (1)..(426): unsure at all n locations
attcgctaacgtgcgctgcttttccctacttattctctcggaaaatggcgatttctctgcaactgtgtcgtttctccatccgcatcggttccgataactttggcgggagatcggaagctctccctttccggaaacctatctccgtcagatgctccaccgattccacttctgttgtggtggatcccgataacttcgacgccaagtctttccgacataacttgacgaggagcaagaattataatcggaaaggattcggacgcaaagaggaaactctcgagctcatgaatcgagagtatactagtgatatcttaaagaaattgaaggaaaatggaaacgagtatacatggtgaaatgttactgtaaaattggcagaagcgtacggattttgctgnggagttgagagagctgttcaaattgcttatgaac

SEQ ID NO: 201100 - DNA, 285 bp, Gossypium hirsutum
gttaaggaaagtatgcgttatcaatatgcttagcaatgctgctttggagaaagtatatagtcttcgccgtcaagaagtacgagaaaccatatgttatttatatagtaaggccggttcgcctgtaaacgtgggagagcagatgctattaactatcttgaatgtggtgaccaatatgatatggggcgggtccatggaacgtgaggccagagcgagccttggtgcacagttcaagcaagtcatctcataagtaacagaacttttgggtctacctaatgactcggattt

SEQ ID NO: 201101 - DNA, 411 bp, Gossypium hirsutum
ggatggtactaatgcgagtagttatttatactgccaggatgctggtgacgcgtttaaggtcatgagggacaagggtgaacttggtcatcatgacaatcgactcaacagataaggaccagagatttaaaaatattgttcgaaacgactgcaagcatttttcccatatttagtttacatccaattggactaaaagacgatatccttcgtggaatctacaattaccggttttaaaaaccatctgctattcaacagagaaccgtcatgcccattatcaatggccgtgacgtcattgcccaagctcagtctggtaccggtaaaacttccatgattgccctcaccgtttgccaagtggttgacacagctagcagagaagttcaagcattgatactgtcacccacgagggaactggct

SEQ ID NO: 201102 - DNA, 431 bp, Gossypium hirsutum
ggaaaaccctgaagcgcgcccaattagccaacttgatgaagagcaagatagagagcaaaatctttccattagaccctaatggaatttacttggttttgactgctaaagatgttacagtagagcggttctgcatggcatcatgcggtttccatgacagcatattagtaggggggtcaactcgagtggttttcgcacacgtgggagaccctacagtccaatgccctggtctttgtgcttggccttatgctctgccggcttatggtcctccaggcccagccttggtggcacctaatggaattggaaccgatggcatgatcataaacatagccaccctacttgcaggggctaccactaaccccttcaagaccggttattttcaaagggacgcgttggcaccattggaggctgtcacagcttgtcctggaatattt

SEQ ID NO: 201103 - DNA, 420 bp, Gossypium hirsutum
aaaattgaagcacgtttaaggaatgttttgaaaggagatggcgatattcgtagcgcgaaaaccacggtttctatggccgtaactcataccgaaagaaggttgcatcaaatgatgttcgcagatcgtgattacgaacggaaaccgattttggaacataagtcggagttgtcggctgtcaccgtgcaaaactgggtggaaaggggttattctgttgtgaatgttcaatgcaaggaccgaactaaactcctgtttgatgttgtttgcacattgacagatatgcaatatgttgtgtttcatgccactatcaaaacatcaggcgataaagcatatttggaattgtatattatgcacagagacggaatactggttagttcagaacccgaacgacatcgtttaatccaatgtttacaagctgcagtc

SEQ ID NO: 201104 - DNA, 413 bp, Gossypium hirsutum
aaaattgattcacgtttaaggaatgttttgaggggatatggcgatattcgtagcgcgaaaaccacggtttctatggccgtaactcataccgaaagaaggttgcatcaaatgatgttcgcagatcgtgattacgaacggaaaccgattttggaacataagtcggagttgtcggctgtcaccgtgcaaaactgggtggaaaggggttattctgttgtgaatgttcaatgcaaggaccgaactaaactcctgtttgatgttgtttgcacattgacagatatgcaatatgttgtgtttcatgccactatcaaaacatcaggcgataaagcatatttggaattttatattatgcacagagacggaatactggttaattcaaaacccgaacgaacatctttaatccaatgtttacaagc

SEQ ID NO: 201105 - DNA, 396 bp, Gossypium hirsutum
atcagtcttcttggtccacaactttggaatctgaaggaaagtcggatcatctacttactatggaagaaaatacagaaaaattggatcaatcttcttggtccatgacttcagaatttgaagggaagtctgatcatctagttgcaaaggaggtatcctctagtaaagttggggttcaacgacattcggaaatagcaactattgatttatttcttgatagatccatcagttgcattcctggtttaagtaaaaggcactctcgccagctagaagaatgtggcttttacactttgcggaaactgttacatcattctcctcggacctatgcagatttacagaatgcacaaactgagattgatgatggccagtacttgatttttgctgggacaattatgtcgt

SEQ ID NO: 201106 - DNA, 398 bp, Gossypium hirsutum
ggagctcaatggcttgttgttagccggcgaattcatccaggtccatactggcagatgtgtgtgtttctatgtatgggaggcaatagcactacatggatgaacactgcagttctggttacttgtatgcgaaacttcccgaaaaatcgaggcccggtctcggggatccttaagggctatgtcggactcagtaccgcaatcttcacggatatatgcacagctctgttttcttcggacccttcaacgtttctcttcattcttgccgttgttccggccatcgtttgtcttaccgctacatttttcctccacgaaatcccaaccccgactttcaacccgagcgaactccggcaagaaacgctgtattttcacgtcttcaatggcattgctatcatattagccgt

SEQ ID NO: 201107 - DNA, 335 bp, Gossypium hirsutum
gccattggtgattgaatttagtttgccacattctgatgttgaggggctaggggctgttctcaaggagtactcacctacagaacatggagcagtatggtcaatatggcggatgaataaaacttatgttgctgtaaatgactctgatgttcatcaactcattaaccattggctgaacactcatgcatcaatggagccattcgtgatttcaacgaacctacaacttatggtacttcatacggtctataagctcatctatcctctctttcaagacacgataaacgtcaatgctttttatatgctcattctaattaatggaagtggtatccttgaattaa

SEQ ID NO: 201108 - DNA, 417 bp, Gossypium hirsutum
atccaatacaaggaagggattccaccagatcggggcaggttgatttttgccggaaagcagctcgaggatgggaggacacttgcggattataacatccaaaaggagtcaaccctgcacttggtgctgcgactgcgtggtggaatgcagatttttgtgaaaactttgactggaaaaactattacattggaggtggagagctcagatacaattgataacgtgaaggccaagattcaggacaaggagggtatcccacctgaccagcataggttgatttttgctggaaagcaactcgaggatgggaggacgcttgcagattatagcatccaaaaggagtcaaccctgcacttggttctgcgccttcgaggagggatgcagatattccttaagaccttgactggtaaaaccataacactggag

SEQ ID NO: 201109 - DNA, 369 bp, Gossypium hirsutum
ctaaagttcagtgctgataacgttgatacaatggttggtcaagccattgatttgcttgatgaccttgataaagagctcaccacatatgcaatgagggttcgtgaatggtatggttgccattttccagagcttactaagatcatccaagacattatcatgtatgccaaggcagtaaaactaatggttgaccgtgctaatgctgctaagctcgacttctcagaggtattaccagaagagtttgagacagatttaaaggaggcagcagtcatatccatggggactgaatttagtgaccttgatctgacaaatatcaaagatttatgtgatcaggttctcaatctttctgaataccgagctcagctatatgat

SEQ ID NO: 201110 - DNA, 292 bp, Gossypium hirsutum
gttagtctccttcaaggcgacaacgttgttgctgtttttgctcgccttggtgacgatattcaatggcctttggctaaagatgagcctgttgtgaaacttgatgcttcccactatttctgtactcttagagtgtcatcgaatgggtgcgttgaagactgaatagattctaatcaaaccgaggatgttttgaactatggtctgacaattgactgaaaagggctagaaggtttgttgaatgagcttgatagaatcttggaaacttacaggtgcttttcgatgcaacaagtgaaag

SEQ ID NO: 201111 - DNA, 294 bp, Gossypium hirsutum
cgaggaattattgaatgtccgtcccttgaaagcgatcatggaactagcgccagaggagcttcagttcttgtcgttgaccgatatcctgagggaatccgttgcaatccctaaaagatctgccaaaacctattatgttatgaccttaactatgattttgcctatctcttttgccattttagctcactcgattttcacccatgctatcttaaatcaactcgctttcgatccgctgggagacccagtccagacccggcacgagtggactcttctatgaacttccagttctgttaccta

SEQ ID NO: 201112 - DNA, 291 bp, Gossypium hirsutum
  unsure (1)..(291): unsure at all n locations
gtccattgcgcaccgcattgtctcccatcctaggcagggggagaaacaataatcttgttgtcaatcttgcaattgtgcatatggatgattcggcaagggcattcaagcatcgtgtagaatatgattgcgcagccatcgagggctacatggaacaatatggcgtaacggaacatgaggcttatgattaattcatcaagcatatagagagctcctgganggacattaacgtagagtttctgaaaccaaccgaaatgccagtacctggtctaaatataagtctcaaccttgcaa

SEQ ID NO: 201113 - DNA, 445 bp, Gossypium hirsutum
tctagaggctagacgcatgcgtccggctgctctaatttggcatgagcttactttgctactcactaaatagcacgacaggggacggataaggtaagagtacgagtttttgagcgacatcggaatgacttccggcaatgtgccatgttccgtgaatggtatcttgaaaggaagcgctcctgtgcttcctactgttaattctgcgaataatcagaaaattgccgtagttaatcaggctctcatgcaacagtatgaggaaaggatccaagttagctacgaaacactgaacatctggctgcttgttatacaccctaataaaatggacataaatcgacaaatctgtgatgcattgaaagccaaactacagcaccttgaacccctagccactgtagagacggtacaagatcttcccgaaggaattggtgaagttcaagagatcattgacatg

SEQ ID NO: 201114 - DNA, 291 bp, Gossypium hirsutum
gtttatgggagtgtgattgtgatgctggtatttttgcctgtcgggcttgctatgaggatggtgccctctattctcccactggatatatcgggatctgatccatataccgagattccagatgacatgcttatctttcaaatatgcatgccttttgctgatgagcattttaaattgagggcaacaatcatgtcatgtctgtgctattggttctctgcagttgagtgggcattaggcttaacagactttttacttcccatactctgtgagaatggtggccatgacaatgttaat

SEQ ID NO: 201115 - DNA, 385 bp, Gossypium hirsutum
  unsure (1)..(385): unsure at all n locations
acatgctgttattgagttaactagaaaggctggggaagtaaccaaagctctgaatcttgaccatgttcttgaagtttctaacaaacagtgcccttgttacaattcaatgggagaagctgacattgacaacaataagctaaggaaagcagcttctcgagaagatgccactgacaactatttatattgtccaaaagctaaagatattgacagcggagatttgaaacattttcaaaagcactgggctaatggtgagcctgttattgtcagcaatgtccttgagaatgcatctggttagagctgggagccaatggttatgtggcgtgcttttcgtcaagtaacaaataataaaagtgatcaccaattgnaagttaaggcacttcattgc

SEQ ID NO: 201116 - DNA, 199 bp, Gossypium hirsutum
gtcaatgatgccaatgtcgactgggtttccagggtctggaagaatggaactggctgcggggcttgttatcagggtaggtgcactaaccctcaaatatgtgctgataatggggtgaacatactggtgaccgactatggcgaaggcgacaacaccgatttcatacttagtccacccgcatatgcaaggatggcgcgaccag

SEQ ID NO: 201117 - DNA, 288 bp, Gossypium hirsutum
aacagtccaattatgcaaacgatggctatcttttctacatcaagggctgctatgctccttcttctagggctcttcgctgcaaacttggatcctactgctgcacagattggtgtttgctatgggatgcttggctataatctcccaaattcatgggaaggcattcaactttacaaatctaacaacatcccgctattgaggctctacgatcctaatcaacaagcattacaagctcttaaaggctccaacattgaagtaatgttaggtgttccaaaaggtcaacttcaaaac

SEQ ID NO: 201118 - DNA, 407 bp, Gossypium hirsutum
aaacaaggcattgcttcacacgatatattgagtaccagcgttgtgtagctgcaaaaggagaaggtgctccagagtgtgataagtttgcaaggtattatcgtgccttgtgtcctggagaatggatagatcgatggaatgagcaaagggagaatggtacttttccaggtcctctctagatgagatggtacccctattgttatccgaaaaatccctgttgtgacttttttttccctctgttatatcaaaccgtaacagttgaaccacagatgaatttccaggatgaaagcagaatttctcaggaaatatccaatttgtaaaggatgatgtaataataaaatgtggcgtgtaccctaacttagactagatcaatggaccatacaattgtgttgctcataaatgggaaatca

SEQ ID NO: 201119 - DNA, 404 bp, Gossypium hirsutum
gctcgagattaaatgcccccctccttaaactacagctcgtttgttggataaacttgttgggcattttctagaagagacgtgtgtgaatcctactttcatcatcaaccatgctgaaataatgaggcctttggcaaaatggcataagtcaaaaccagcgctgactgaacgtttccagctgtttatcaacaaacatgaactttgcaatgcatacactgagttgaatgatcctgttgtacaacgtcaacgatttgctgaacaactgaaggatcgacaatctggtgatgatgaagctatggctctagatgaaacattctgtactgcacttgagtatggattgccgtcaactggtggttggagattgggtatcgatcggctagctatgctattaacagattcacagaata

SEQ ID NO: 201120 - DNA, 410 bp, Gossypium hirsutum
gccacttgatctacaagcttggaggtattgacgagcgggtcattgaaaggtttgagaaggaagctgctgagatgaacaagaggtcattcaagtatgcttgggtgcttgacaagttgaaggctgagcgtgaacgtggtattaccattgatattgccttgtggaagtttgagaccaccaaatattactgcactgtcatcgatgcccctggacatcgtgactttatcaagaacatgattactggtacctaccaggccgattgtgctgtacttatcattgactctaccactggaggttttgaggcaggtatttccaaggatggacagacccgtgagcatgctctgcttgctttcactctcggtgtcaagcaaatgatttgctgctgcaacaagatggatgccacaacccccaaa

SEQ ID NO: 201121 - DNA, 244 bp, Gossypium hirsutum
cagtatagtaatataccaagcctttgcttaaagggaagttaagctatggaacgacaagcgcgagagatgaatgtatgagaagtttgcggagctgtatgccgttatcaaggcaacagataaaattgaaaaagcttatgtgagggatattatatcatcatctggatatgagacttaatgccagaagcttattggccattttaagaccttgggttcaacactcaaagattctggccctagtattgaa

SEQ ID NO: 201122 - DNA, 433 bp, Gossypium hirsutum
  unsure (1)..(433): unsure at all n locations
gtagtctcgagttcactcattaatatgtatgtaaaatgtgggcagctagagattgctcgtactgtatttgatcaacttggttccaaggacttgatttcctggactgcaatcatgtcaggttatgccatgagtgggagaactagagaggcangggaactctttaatatgatgccggaacggaatgtaatctcatggaatgcaatgctagcagggcatacttcgttgtctcagtgggaagatgccttaaaatttatttttcttatgcggagaatgactaaagattttgaccatgagacgcttgttctaattttaaatgtctgtgctggcctgtcagaacgtgaaatggggaaaaaggttcatggatttatctaccgacatgggttcttttccaaaatatttggaagtaatgcacttctggacatgtaccgaaaat

SEQ ID NO: 201123 - DNA, 416 bp, Gossypium hirsutum
gacattaattccgtgccaaaggatgtcaagactgagccacttgctgagaagaaagctacaagtaaaaaaccaaccggtcttggtgctcctccccctggccctccatcaactgttgatgcttacgagaagctgctttcatcaattcccgagttcgcaagctttggcaagctcttcaagtcctctgcacctgtggagttgacagaagcagaaacggaatatgcagttaatgttgtcaaacatatttttgacggtcatgttgtgtttcagtacaactgcagtaataccattccagagcaattattggagaacgtcactgttattgtggatgcttcagaggctgaggaatttgctgaagtagattcaaagcctttaagacaacttccatatgattcacccggacagacctttgtggcatt

SEQ ID NO: 201124 - DNA, 311 bp, Gossypium hirsutum
ggaagatgcaagctgcaacacgaaacattcattccaattgtcaaagaatttgtggaagctttaggtggtttcagtattaccgatctgtttccttccatcaaattgcttcccatgatcagtgggatgagagccaaacttgagaggtgtcaccatgatttggacatgatgcttgaaagcatcattgaagaacatagagctagcaatgcaaatctgggaaacagtgatgatgaaacggatgatctacttgatgttcttctgaatcttcaagatcatggaagccttgaaatttcctttaacgactgacaacatca

SEQ ID NO: 201125 - DNA, 89 bp, Gossypium hirsutum
cttggatttatgaaagacgaacaactgctaaagcatttgccgaggatgttttcattaatcatgaaacttcctttttacaagcacattgc

SEQ ID NO: 201126 - DNA, 412 bp, Gossypium hirsutum
attcgccgcacggcatcagtctcatcaggcggggaagggtgtctcacaggaagtttgaacacccaaggcatggctcccttggatttcttccgaggaagcgagcttctcgtcacagagggaaagtgaaggcatttcctaaggatgacccaagcaaaccttgcaagctcactgcctttttgggctacaaggcaggcatgacacacattgtccgagaggtcgaaaaacctggatctaagcttcacaagaaagagacatgtgaagctgttacgatcgttgaaacccctcctatggtgattgttggggttgttggttatgtcaagacaccacgtggtcttcgcagcttgaacaccgtttgggctcagcatctgagcgaggaagtcaaacgtaggttctacaagcattggtgcaagtc

SEQ ID NO: 201127 - DNA, 206 bp, Gossypium hirsutum
ggatttagcatcaagggatcctgatttgaacaagctttttaataatgggcttgcttgttcatccaaggtcatcactagtgtaatcctgtcgagttacaaacaagggttgagctccattggatcattggttgaagttggaagtgggattggaggcttaatatcagagatcgtcaaagcatattcacacattaaagggtgttaatttt

SEQ ID NO: 201128 - DNA, 290 bp, Gossypium hirsutum
aaaaaatcttctgatttttctgagtctttttcttatcttctgggtggctcctgagaaagtgttttaagaagaacaatgaatgcattagtggcaaccaacagaaacttcaagctagcagccagacttcttgatttggattctaagcttgaaatgagtctcctcattcccttcaaggaaatcatggatgaatgcaccatacccatagatgatggcacatgggcaacttttgttagtcttaggattcaacatgacattgcttgaggttctatgaaaggaggaatcagatatca

SEQ ID NO: 201129 - DNA, 170 bp, Gossypium hirsutum
gtttatgggagtttgattgcgatgctggtatgtctgcctgtcaggctagctatgaggatggtgccctatactctcccactagatatatcggtatctgatccatataccgcgattccagctgacatgcttctagttcaaataagcttaccgtttgcttgtgagcattttaa

SEQ ID NO: 201130 - DNA, 413 bp, Gossypium hirsutum
gtttgagggacacccattcattgtggaagctggggttagtgtgggtggaaaagatgttaaacagggtttgaatattttccgatttgcaaatcgaattccgcttctttttgagcaaggtggtgatgttgtcacgaggactgcgctaaagagaatcagttggaataattacaagatcaaccaaacacaagataaaatcggtgtctttgtgagtattgtaagcacgaaaattccatttaaagggactggaaaggagtacatcggggatgatatcagcgaaatagctagtgctgtcaaatctgcaattcagcaatgctgcatccaactgaagtcgaaaatagtaaagaaaatgcaggcgcgagaacagcaagagagaaaacgaaatttgagcaagtatatccccgatgccacaaatg

SEQ ID NO: 201131 - DNA, 381 bp, Gossypium hirsutum
aacccatttccctctttctctgtccatccatgggtccgtctcttcttctttttcttcttttttatcctctcaaagacctttttgtgttgcagaatttactcctttttagttttgtggactatgccaaaagctggggttcttcctggttaactaacgcctatttttgggtgggttgaacttatatcagtactagccgattagaggttctctcaagtttcagacatatttgaggtcctatcttggaacaatgatgatgtttgacgagatgggaatttgtggggatatggatttcttcagtgctccacttggggaaaaagatgtggcagcctcacaaattgaaccagacgcgacggtggacgatgattatagtgatgaataaat

SEQ ID NO: 201132 - DNA, 434 bp, Gossypium hirsutum
accattttccgtgaaaaaaagggatgcaactgtagttgcaaagctaaagaaagggaagaagcatgaatatccatggcctgcagatccagatccaaatgtgaaaggcggggtcctaactcatctctcccatttcaagcctttgaaagaaaagcaaaagcccgttactttggattttgagaagccccttgttgaaatcgagaagaagatgattgacgtgaggagaatggcaaatgaaactggtttggatttcagtgatcagattatattgttggagaataagtatcaacaggctttaaaggacttatacacacatcatgcccctatacaacgtgtacacaatgcccgacaccccaatagacctacattccttgatcatatatttaacattaccgataagtttgtggaacttcatggagatcgatcagggtatgatg

SEQ ID NO: 201133 - DNA, 162 bp, Gossypium hirsutum
acggtggtgatgagtgaaggtacagttccacttgaagttcatggtcgaacaaaggagatgcatttgcaagctaagtttggctttgcagctcactggagatacaaggagggtgactgtaagtactcttgatttgtactttataaggttgaataggctcgatgg

SEQ ID NO: 201134 - DNA, 404 bp, Gossypium hirsutum
aaaaaatcttctgatttttctgagtctttttctgatcttctgtttggctcctgagaaagtgttttaagaagaacaatgaatgcattagtggcaaccaacagaaacttcaagctagcagccaggcttcttggtttggattctaagcttgaaaagagtctcctcattcccttcagggaaatcaaggttgaatgcaccatacccaaagatgatggcacattggcaacttttgttggctttaggattcaacatgacaatgctagaggtcctatgaaaggaggaatcagatatcaccctgaggttgaccctgatgaagtgaatgcattggcgcaactaatgacatggaagacagcagttgcaaacatcccatatggtggggctaaaggtggtataggatgtaaccctgg

SEQ ID NO: 201135 - DNA, 411 bp, Gossypium hirsutum
  unsure (1)..(411): unsure at all n locations
gtccgcgcctcggtcgaggctagcctgaagcgcgttgatgttgattacattgatctctactaccagcacagggtcgacactaaaacaccaatagaggatactatgggggaactgaagaagctggtagaagaggggaagataaagtacattggtttatctggagctagccctgaaactataagaagggcacatgttgttcatcccgtctctgccataaaaatgaagtggccgctttggactcgcgatagcaaggacgaaataatccccctctgcagggaacttgggattgggatagttccatatagcctgctcggtcgtggtttcttcggtgcaggacttgtgcggaaactgttgcctgcaatagttttcggatggagaacttggctcanaagtatggaggcacccctgcac

SEQ ID NO: 201136 - DNA, 353 bp, Gossypium hirsutum
attggagtcctactggaggacctgatctgatgggcggggattgtgtgcatgctactttgctgaaccacgtctgtgttaactctgacgacgttcatgagaaaactgggcaaatgacagatcctgctttgactgattacgctgagtttcagattgttctaaccatcatcagatataccttgagagcatctcccactacatattcaacgatgaaagtgagatcgcaagcgtgctctgcagaaactacaactgatgcaaacaggctctatcccatgcaggcccgtggcacctggtccgtccctgacatcaatgtcaacgactctgttactaacagcaagatcgacaacttgaatgga

SEQ ID NO: 201137 - DNA, 290 bp, Gossypium hirsutum
gaaaatcttgtttaaaatataagaaaaaagtcatacgcaatgagcactgccggtcaggttattcgttgcaaagctgcggtggcatgggaggccgggaagccactatctatagaagaagtggaagtggcaccaccccaaaaacatgaagtccgtattaagattctcttcactgacttatgtcacactgatgtatactactgggagtgtaagggttacactcctctgtttgctcagatacttggtcatgaagcctcaggaatcgtggagagtgtgggtgagggtgtgaatga

SEQ ID NO: 201138 - DNA, 426 bp, Gossypium hirsutum
aagaaaaggcaaaggcgagggtctattttcttcacaaactacaatggcttccgagtctttagtaaccaagaggctagatggtaaggtggcactgataactggtggtgccagtggtttaagagagtgttcagccaggctatttctcaaacatggagccaaggttctgattgctgatattcaagacgaattgggccactccctttgcaaagagcttggaactgaaaacttcagctatgtccattgtgatgtaacatgcgaatctgatgtcgaaaatgccgtaaacttagcggtctccaagtatggaaaactcgatattatgttcaacaatgcaagccttattggtgatggtgaaagcagagttacagacgccagcacttgcaacttcaagagagtgttcgatatcaatgtcttgggtggattcttggg

SEQ ID NO: 201139 - DNA, 413 bp, Gossypium hirsutum
ccgcactgtccctcttttcggatcaattcataggtcagacactcaacgtaacattcctcgtctacctcttggccatcaccctgaccctttgtgctcttgcggtgctagaaatcaagtggtccggcattgaactggaagagtggtggaggaatgaacagttctggttgattggaggcaccagtgctcatcttgctgcagtgctccatgggctattaaaggtgattgccggtatcgaaatatcattcaccctgacatcaaaatccgctggtgatgatgtggatgatgattttgctgatctctacatcttcaaatggacatcgctcatgatacccccactcaccatcatatttgttaatttgattgccattgcgtacggagtcctgcgtacggtatacagtgatgtacctgaatgg

SEQ ID NO: 201140 - DNA, 281 bp, Gossypium hirsutum
  unsure (1)..(281): unsure at all n locations
gaagcttccttttccgttttagatctcaaaattcaaaaggctctctttaggatctcatggctgctactattgtctccgtcaaagctaggcagatcttcgacagccgtggaaatcctacggttgaggttgatgtggaaatatcgaacgngataaagggtagggccgcagttcctagcggtgcatccactggaatttacgaggctcttgagtggagagatggangttccgattacctcggtgaaggtgtatcgaaggctggtgctaatgttaacacaatcatc

SEQ ID NO: 201141 - DNA, 370 bp, Gossypium hirsutum
atcatggaatccatgagacaggatgagcctgggtttgaccgggttattgagcttgtgagggaagtgagggatgaaatatgtgagctggctcctcgaagttggagagaagaaataactgatgctattgatttggaaattcttgcccaggtgctgaagtcaggcaacctggacattcattatcttggacggattctggaattcgctttgatcactttgcagaagctatccgctccagccaatgatgatgaaatgaaggccgctaaccaaaggttattgaaagagttggctgagatatgtggagccagagagaactcggataattctcctgccctcgcaatgatcaagggtctacgttttgtcctagaacaga

SEQ ID NO: 201142 - DNA, 300 bp, Gossypium hirsutum
ctcacctacacaatggatttctcaacattctcaatctttcacattttcatccttcctctactttgtccttctcttggttcttcttcggcagttcgagaccctgaatctgtcgtagctgaagttcataagagcataaatgcttcgaggaggcacttgggttacttgtcatgtggaacggggaaccctattgatgactgctggaggggtgaccccaagtgggagagtaatcgtcaaaagctagctgattgcggaatcggattcggaaaggacgcgattggcggaaagaacggtgaaatctat

SEQ ID NO: 201143 - DNA, 415 bp, Gossypium hirsutum
gcgccgccctatttgccacaaaaccctagcgtagatactccacagacattgtcgtttactctcggcatccatggatattgaggctgagatccgtgcactgcagcttgactctgctgaagataataatgccacgctcattcctgaagatgcaaaaccagaagaagttgaaatgacagataaggtggaggaggaaggtatgacggatgaggttgatactaaatctcagccagtccaggctgagccaaaagtgaaagacaaggaagtagctgatatggattgtgcagaagtaccagatgaaatggaatcacaaaagaagcgccacttgaatgtggtctttattggtcatgttgatgctggcaagtcaacaactggaggccagatactcttcctcagtggtcaggttgatgaccgtacg

SEQ ID NO: 201144 - DNA, 401 bp, Gossypium hirsutum
ctaaggtgaagcccccaccttatgaacataagccccctgtttatgaaccaccaaagagggagaagcctgagcctaagccaccagtttatacgcctccaaagaaagagaagcctgaacccaaaccaccagtatatgaacctccaaagaaagaaaagcctgagcctaagcctaagccaccaatttatacgccaccaaagaaagagaagcctgaacccaaaccaacagtatatgaaccttcaaagaaaggaaaaccttaacctaaaccaccaatttatattccaccaaagaaaggaaatcctaaacctaaaccaacaatgtatgaaccaacaaagaaagagaaaccttaacctaatccaccaatttattcaccttcaaaggaagaaaaaccataacccaaacca

SEQ ID NO: 201145 - DNA, 383 bp, Gossypium hirsutum
atttcgatttgattgaagaagaagatttagcggttcgagtgcaggcgattcgtgggcttcctttgttttgtaaggatacaaaggagtacatttctaaaatagtagacattttagggcaactccttactgctgatgagattgtggagcgtgatgctggtcataaaagccttaatgtctggattaaggcaagatgtgaaagaacttattggaataattgaagggcaggctgatttagatgcacaatttgacgtctctgatgcagatcatattgataggttgatatcgtgtctgttcatggctattccattttttgtgaggggtgcacctggcagcaagtttctcaactacttaaacaaacacattatacctgtttttgataagct

SEQ ID NO: 201146 - DNA, 378 bp, Gossypium hirsutum
aaagactcaaagacatagaaagcggccatggagaaggaaagagagcaacaagtttacttggcaaggctcgctgagcaagctgaaagatacgatgagatggttgaggccatgaagagtgttgctaagttggatgttgagctgactgtggaggagaggaatctgttatctgtgggatataagaaatgtgaatggaacaagaaaggcaatctggccgataactgcttcaattggacaaaaaggagaaggccaaagtaattgaccaaatgggaaaaagataaaaggttattagccaaaggttgaaaaagaactcttaaaaatattccatgacattcttttaatcattgataagcaccttatttcattttccttcaacgggga

SEQ ID NO: 201147 - DNA, 389 bp, Gossypium hirsutum
  unsure (1)..(389): unsure at all n locations
taacagcaaagatgagctcttcttcttcttcagtgatatgttcggtggttattattttagctgtatttttcaattcattgttgttatgtaatggtggaaagactagtatctacgttaggaaagaggagaaaactgtggatatgccccttcacagtgacgttttccaagctcctcttggttacaatgcacctcaacaggttcatataacacanggcgaccatgtggggaaagctgtgattgtttcatgggtgacccaagatgaacccggttcaaatacagtggtttattggactgaaagtagcacagagaagatgaaggcactggggaaaattagcacttataagtactataattatacctttggtttcattcatcactgtactgtcaag

SEQ ID NO: 201148 - DNA, 349 bp, Gossypium hirsutum
atcaagaaggaagcttgctggaccatctcaaacatcaccgctggaaatgtagatcagatacaggctgtaattgaggctgggattattgcccctctagtccatctccttcaaaatgccgagtttgagatcaagaaagaagctgcttgggcaatttcaaatgctacatctggtggtacccatgaacaaataaagtttttggtgagccaaggttgcattaagccattatgtgatcttctgaactgtcctgacccaagaattgtcacggtttgtttagaaggtcttgaaaacattttgaaagttggtgaaacagagaaaaatctgggtcacactggagacgtcaatctctatg

SEQ ID NO: 201149 - DNA, 373 bp, Gossypium hirsutum
  unsure (1)..(373): unsure at all n locations
gagctacttaaccatttcccaaatctcctccctcctcttgttgagcgtccttttcatttccgctcatgcagcgcgctttgaaatccgcaatgagtgctcctacaccgtctgggcagcagcctctcctggtggtggccgtcgcctagaccctcggcaaagttggaccatcgatgtgcctgctggcactgctatggctcgtatttggggtcgaaccaattgcaatttcgatgccagtggtaggggtcattgccaaaccggtgattgtggtggactccttcaatgcaaaggttggggtgtacctncaaacaccctggctgaatatgcacttaaccaatttggaaacatggatatctacgacatttccttagatgat

SEQ ID NO: 201150 - DNA, 390 bp, Gossypium hirsutum
cttaaattcaaactttgaatgatccatttcacttctcattagcgttcgtttttttggtctttttaccctgttttcgtttctcattttcctctttgctagctctttgaatctctgagggaagatatggcggccaatgggaacggagtttcgacgacgccgaagagttcgttggcgaggattcagacgcagaagaacggtggaatctgtcatgacgatagcgggaagcctgttaaggctcagacgatcgacgagcttcactctttgcaaaagaagaaatcggcgccgaccacttctcttgaccgggttcaaggttcctttggccaccttttctgaagatgagcgccagaggcagcagctccagtccatcagtgcatcgttggcgtcactcac

SEQ ID NO: 201151 - DNA, 354 bp, Gossypium hirsutum
  unsure (1)..(354): unsure at all n locations
cgtcgagagagaataacagagggaaagcttaagcaatggcggccgaggaggacagcggagagttttacctccgctactacgtgggccacaaagggaaattcgggcacgagtttttggagttcgagttcaggccagatgggaagctccgatacgctaacaactccaactacaaaaacgacaccatgatccgcaaagaggtcttcctcactccttccgttcttaaggaatgccgccgcatcatcgccgacagcgagataatgaaggaagatgataacaattggccagaaccagaccgtgttgngcggcaagagcttgagatagtgatggggaatgagcacatctctttcacaactt

SEQ ID NO: 201152 - DNA, 390 bp, Gossypium hirsutum
caatggctataaatcaggagccacaacatcaacagctgctgaacaaccccaagctacccacatccctgaaaaaccaggcactcaagcaccatggaagccagtggttccaaccccaagtgccaagcctgccccaaaaagtgacaccatccttggcaaaccatatgaagacataaggttgcactacacaattggtaaagaactgggaaaaggtcagtttggtgtaacttatctttgcattgagaattcaactgggaaacaatatgcttgcaagactatatcaaagaggaagttaatcacaaagaatgataaagaagatatgagaagggagatacaaattatgcagcatttgagtgggcaacctaatattgtggagtttaaaggtgcatatga

SEQ ID NO: 201153 - DNA, 384 bp, Gossypium hirsutum
aaagaacttttcctccccagtggatctttcagcatatgatggtgttgagttgcgcttaaagggtgatggttgtcggtataaactaattgttcgcactagcactgattgggatacggtgggttatacagcaagctttgacaccattggaggccaatggcagtctattcggttgccattctcttcactgaagcctgtatttcgagcacggactggatctgatgctctaaccttcaattcaagtaatggccgatcatttcaactcatggtcaacaaggttgaatatgatgggaaactgaatcccacttttggagaaagaccttttgaactttcaatctttaccattaaagccttcattaaggatcctatcacttccaagtttgtaca

SEQ ID NO: 201154 - DNA, 267 bp, Gossypium hirsutum
agttgcttcagctataacccaaaccgtgttggctcaaaactgtggctgtgctccaaacttgtgttgcagtcaacatggttattgcggtcagggtaacgattactgtggcactggttgcaaagaaggcccttgtttctccaagtctaccactggttcttcaaatgcctcccttgtttcaccctaggtcttcaacggtataatcaaccaagctcgtgcgcattgtgcatgcaagaaattctatacacgacatgcttttctgactgcact

SEQ ID NO: 201155 - DNA, 257 bp, Gossypium hirsutum
attatcagcttgagatgatgagatgtctaagggaggttaatgtggatgacaacactggtggatggtaccaatcaacgatttttggctcatatcagacagttgagctcattgagacttttatgaattatcaggagaatattaggaggtgtgtatgcattatctacgatccttcaaggtctaatcaaggtgtcttggctcttaatgctttgaagctatctgattcttttatggaactttaccgagctaatagctttact

SEQ ID NO: 201156 - DNA, 333 bp, Gossypium hirsutum
tactagttctttttatgaatgctgtctttttcatagtgggtgcggtaccagaaacatgccctgctgatctcggtggaaaatgtggtgaagatggtgaatgggaaggggaatttttccctggagttcccaaaattaagtatgagggtccttctagcaagaatccactttcatacaaatggtacaatgcagaagaagtgattctcgggaagaaaatgaaggactggttgagatttagtgttgcattttggcatacatttcgtggaacaggtgccgatccttttggtgcacccacaaagtattggccatgggaagatggtaccaattccattgcta

SEQ ID NO: 201157 - DNA, 392 bp, Gossypium hirsutum
cagttgtaaaagctgcagttgatgaaagattaagggggcttcggatttggagggaatcacagggccgggcatctaagctatatggttttaagcatgattctatgtcatcgcttaggaaaacaagtaagacaggagaattggttgattcaaaaactaatggagatctttcacgttccaagtccgaatcaatgaatgaggatgaaaatcttctttgtctgacaggagatgctaagtcggattctgttccagatcttcaacagcaggttgtagggttaaaggtcgagttgtgcaggttgctggaagagaaaagatcagctgttctcagatctgatgaactggagacagcattgatggagatggttaagcaggacaatcgacgccaattatgtgct

SEQ ID NO: 201158 - DNA, 388 bp, Gossypium hirsutum
gttgagaaagtgaggattaagtgtctggggtatcaagaaaggggtaagatttctaagaatccaactgggaaaaagctgtttgagattatggttaagaaagagagtaatctctgtttggcggctgatgttgccactgctgctgagttgcttgatattgctgagaaagttggacctgaaaatttgctattggagacccatggtgacatattccctggtttcactccaaaattcggatctaaacttcgcgccattgcagaaaaaccttacttcatgatatttgaagaccgttaatttgcagacatcggtaacacagttaccatgcaatatgaagggggtatcttccgtattttggaatgggctgatattgttaatgctcatataatctctg

SEQ ID NO: 201159 - DNA, 384 bp, Gossypium hirsutum
attcaaaaatcaacaccatgggctcttccggtgaatttcggggagattgtaacccggattacgatcacgaaagtgaagtaaaggcttttgatgatacaaaagccggtgtgaagggaatagtagattcaggtgtcacacaaatccctcgtatattcatagatcaaagccttatccttgagaagaataacaccgattgttccaataatcagctaggtgtcccgatcatagacctccaaggcatcggtggagactcggctcgccatgccgaggtgattaaccaagttcgaaatgcttgtgcggattggggtttctttcaggtaattcaccatgggattcctgcaagcgttttggatgaaatgattgatgggatccgtcggtttcatg

SEQ ID NO: 201160 - DNA, 125 bp, Gossypium hirsutum
atatccttgagctttacactttatgccgtaaattatgacaggggcagtttggggttacttacttatgtaccgagatttcgactgggattgaatatgcttgtaagtccatatcgaaaaggaagttg

SEQ ID NO: 201161 - DNA, 382 bp, Gossypium hirsutum
caacaaacaagacgtcagctaagatgaatatgggcaatgctagtggggaggatgctattgaggcactccaatcacaagctcacatttggagacatgctttcaacttcgtaagcttcatgtctctaaaatgtgcacttgatttaggcatccttgatatcattcatgatcatggcaagcccatgactattacccagctggttgctgcactacagattctcaaccctactaaagcatgcgacatttataggctcatgctcattctagttcactcggacttctttgcacgccaaaagctagacaatgatgctcaagaataaagatatgttcttaccaactcttctcgtattttgctcaagaataatccccttttcataacgcctac

SEQ ID NO: 201162 - DNA, 315 bp, Gossypium hirsutum
caattatccaaacgatggctatcttttcttcatccatggctgcgatgctcattctagggctcctcactgcaaacttggatcctactgttgcgcaaattggtgtttgctatgggatgcttggcaacaatctcccaaatgcaagggaagtcatcaatctttacaaatcaaacaacatcaagcgaatgagactctacgatccaaatcaacaagcattacaagctcttaaaagctcaaacattgaagtaattttaagtgtcccgaatgatcaacttcaaaaccttgctaacccttcccaagcacaatcatgggttcgat

SEQ ID NO: 201163 - DNA, 211 bp, Gossypium hirsutum
cttctcttgattccaaatctctcccagaagatgcagatctttgtgaggacccttactggtaagaccatcacccttgaggtagaaagttctgatactatcgataatgtcaaggctaaaatccaagacaaagaagggatccctcctgaccagcaaaggcttatctttgccggaaaacaactcgaagatggccgaactcttgccgactacaata

SEQ ID NO: 201164 - DNA, 408 bp, Gossypium hirsutum
  unsure (1)..(408): unsure at all n locations
gtgcatggagaggaagagtagctcgtaaagaactgcggaagctgaagatggctgctagggagacgggagctctgcaagctgcaaagaacaaactggaaaagcaagttgaggaactgacatggagattacaactggagaaacgaatgagggttgacctggaagaagctaaaacacaagaaaatgcaaaactgcagtctgctttgcaagacatacaacttcagtttaaagaaactaaagaattgcttgccaaggaacgtgatgctgccaaaaaggcagctgaggtagtccctataattcaggaagtttcggtggtggaccctctgatgttggagaagcttacaaatgagaatgaaaaactgaaagcattagtgaagttcgtggaaaagaaaatngatgaaacagagaaaa

SEQ ID NO: 201165 - DNA, 367 bp, Gossypium hirsutum
ccatgatattgatgttgatgatttaaaaaataatacacggtatgctggtggctattctgagggaagtcgaactgttaaacttttctgggaggttatgaatgattttgagcccaaagaacgtttcatgctgctaaaatttgtgaccagctgttcgcgagctcctttattggggttcaaatacttgcagccggctttcacaattcataagggtgcaagtgatgcttctctttgggctggaaatggagggtcaaatgtggagcgacttccatcaacttatacattccattacactcttaagctttcaacattcaagcggtcaagtactctgaaagccaagcttcgttatgcaattaattctaatgctgga

SEQ ID NO: 201166 - DNA, 340 bp, Gossypium hirsutum
gggaaatgtatacaaagcgatatttttacggttggaggctacggttgggcgatttacttctaccccgacggtaaaaatccggaggatagtgcgatgtatgtttcggttttcattgccttggctagcgaaggtacggatgttcgagcgcttttcgagctcacccttgttgaccagagcgggaaagggaagcataaggttcatagtcactttgacagagcgttggagagtgggccttatacgttgaagtacagaggaagcatgtggggctacaaacgattctttagaagaacaactttagaaagttctgactacattaaggatgattgcctaatcatgaact

SEQ ID NO: 201167 - DNA, 381 bp, Gossypium hirsutum
ccatgatattgatgttgatgatttaaaaaataatacacggtatactggtggctattctgagggaagtcgaactgttaaacttttctgggaggttatgaatgattttgagcccaaagaacgttgcatgctgctaaaatttgtgaccagctgttcgcgagctcctttattggggttcaaatacttgcagccggctttcacaattcataaggttgcaagtgatgctcctctttgggcttgaatccgaagttcaaatttggaaccaatttcattaacttctaaattctataacaatcttaaactttcaacattcaagcggtcaaattctttgaaagcaaagcttcgttattcaattaattctaatgctggatttgaaccttctta

SEQ ID NO: 201168 - DNA, 374 bp, Gossypium hirsutum
gggaaatccaagttcataattggtgatggcaacaatgtatatgagtggacttatgttgagaatgtggctcatgctcatatttgtgctgaacgagctctagcatctggaggagaagttgcagaaaaagctgcaaggaaggcatattttataaccaatttggagcctatcaagttttgggagtttggttctctaatacttgaaggtcttggctatcagaggccaaaaataaagattcctgccattgatgtaatgccaattgcacatattgtggagtggacatatcgggtattaagcccatatggtatgaaaggtccacagttgacaccttcaagagttagaaatctgacttgcagcatatcatttgataggtccag

SEQ ID NO: 201169 - DNA, 289 bp, Gossypium hirsutum
cttctcttgattccaaatctctcccagaagatgcagatctttgtgaagacccttactggtaagaccatcacccttgaggtagaaagttctgatactatcgataatgtcaaggctaaaatccaagacaaagaagggatccctcctgaccagcaaaggcttatctttgccggaaaacaactcgaggatggccgaactcttgccgactacaatatccaaaaggagtccaccctccacctagtccttcgtctaaggtgtggcatgcagatattcgtgaatactcttactggca

SEQ ID NO: 201170 - DNA, 357 bp, Gossypium hirsutum
ccggacggtccatacgcatggggatattgctatgttcacgaacggggcaaccctggtaaaaaatattttggccgtggtcctattcagatctcatacaactacaactatggtccagcaggagaagcaataaaggctgatattctgaatgaccccgatttggtagcaaaggacccgaccatttctttcaagacaggtctttggttctggatgacaccacagtcacctaaaccttcaagtcacgatgtcatcaccggccaatggaagccatctgcagaagacacggccgctggtcgggtacctggatacggtgtcatcaccaacatcatcaatggtggcatctaatgtggcaaaagatcc

SEQ ID NO: 201171 - DNA, 333 bp, Gossypium hirsutum
cataaaatcatgggtttctcccatattgatgcctttcatggagggaggtgacgaagaaggggcaaaagcgaattacgcagccacgttatgcttttatgaccaagagtgaagccgatcatcttgaagatggctaccgatggccaaaatatggacaaaaagctgttaaaaatagtccatttcctaggagttactatcgctgcacaaacagcaaatgtacagtgaagaagacggtggaacgatcctctgaagatcccaccatcgtcattactacatatgatggtcaacactgtcatcatagtgtcggactaccccgatgtggactcatcagccatg

SEQ ID NO: 201172 - DNA, 430 bp, Gossypium hirsutum
ggaatgtcctggagttgtttcttgtgctgatatccttgtgctgtctgctagagaaggcatcgtttcgttgggaggcccttacattcctctcaaaactggaagaagagacggtagaaggagcagagcagatgttgtggaggagtatcttccggaccacaatgagaccatctctggcgttctcgacaggtttgccgccatgggtattgacacccctggagtcgttgccctcctaggagctcacagtgtcggcagaactcactgtgtgaaactggtgcaatcggtgtacccagaggttgaccctgccttcagccccgaccatgttccacacatgctccataaatgccctgatcaaatcccagaccccaaggccgtccagtatgtgagaaacgatcgtgggacacccatggttttggacaacaactactacagg

SEQ ID NO: 201173 - DNA, 259 bp, Gossypium hirsutum
cgaagaaggtgccggattagagctccctgttgtggtgagagaggtgattgtcgtcactgtcataatgaggcaaagaacaatatcaatgttgaccagaagctcagacatgatctcccacgccgtcaaatcagtaagattatttgttcgctatgtggcacagaacaagaggctcaacaagtttgcatcaactgtggtgtttgtatgggaaaatatttctgcaacacctgcaaactttttgatgatgatacatcgaagagac

SEQ ID NO: 201174 - DNA, 308 bp, Gossypium hirsutum
  unsure (1)..(308): unsure at all n locations
gacagagtttatattggatcttgtactggtggtaaaactgaagagttgcttgctgctgctaaagtctttctagcttcaggaaagaaggtcaaggttcctacattccttgttccggctacacaaaaggtttggttggacttatatactctccctgtacccggatcttgtgggaagacatgctcccagatatttgaagaagctggctgtgacacacccgcaagccctagctgtggtgcttgtttgggtggcccgaaagacacatatgcacgtatgaacgaagcanaggtctgtgtctcaacaacaaaccg

SEQ ID NO: 201175 - DNA, 379 bp, Gossypium hirsutum
agagaatgagctctaagaggaaggtgttgcagggtaacacgacgaggactcgtgtagggaagtacgagcttgggaaaaccttgggcgaggggagctttgcaaaggttaagttcgctaagaatgttgagactggcgagtgcgtcgccattaaaatcctcgaccgtgaccaagttctccgtcaccgaatggtcgaacagattaaaagagaaatatcaacaatggaacttatcaagcattccaatggtattaaaatatttgagggtattgcaaggtagacaaggatttatattgtcatcgaatttggtgatggtggcgaacttttcgacaaaattgccaagaacgggagacttaaagaggatgaagccaggagctattttca

SEQ ID NO: 201176 - DNA, 380 bp, Gossypium hirsutum
tctacgtttctcacattttttttcaatggcgtctctcttaaacggttcgactcttcttctacccacaaaaccctttcttcccactcgttcccgactcacttcttcacctactctgcgagttaactcactgactcaccgtcttccatcaccatcgactcgtcctcgtcgagttatcaaagttgcagcagcactcgacggtgattattcatcccaaaagagttgcagcaattaacaaaggggaacgaatatggtacctgggtgggaatataaccattggcttatcggtatggaattccctaaagaccctgcttcaacgagagaaccaatgattgaaacctatcttaacacttttgctactgtgcttggcaacatggaagaag

SEQ ID NO: 201177 - DNA, 314 bp, Gossypium hirsutum
gtcacagggttgtcaacagagcaaagaaaaaggttgacaattgcgggggagcttgttgctaatccctcaataattttcatggatgaaccgacatctggccttgacgcgagagcagcagccattgtcatgaggactgtcagaaacactgtggacactggaagaacagttgtttgcactattcatcagcctagtattgatatctttgaagcctttgatgagttgctactgatgaaaagaggaagtcaggtgatttactctggaccattatgcctgaattctcacaagatcatttgacttttctgagtcaattcctg

SEQ ID NO: 201178 - DNA, 434 bp, Gossypium hirsutum
taacgatgtgagggatgctttggggagcttatctaggcgtgggttggaggtgagattgcctggtcatcataagggaaaatctaatggttcagtgcttgagttgaatgatgagcccatggttatccaaaatagccggtgggccagccttccgccagaagctgttgcgtgatgtgatcaagagattggaagcgagtgaaagcaactggcctgctcgcaagcatgttgttgcttgtgctgcagtatgcaagtcatggagggaaatgtgcaaagaaattgttagatgtcccgagttcttcgggaaaatcacctttccagtttctctgaagcagcctgtgtcaagggatggaaccattcaatgctttattaagagagacaaatctaatttaacttatcaccttttactttgccttagtcctgctttgcttgttgaaaat

SEQ ID NO: 201179 - DNA, 307 bp, Gossypium hirsutum
gacgggcttgcaagctatgatgactctgaatttatcgaagcagggcctataaaaaaggacatgggatatctgtttgagtttatcgcatgctatgttgcatgtggaagagctaaaatcccaaaaactgttctaaatcagattttggaatacttgacttcaataaatgacaggtcaacaaagggttctaccatgaatactggaagatcccaaagaagagagaagccattactggcacttttggaagtagtgccagaaactgaatgggacccatcctatgtgctacaattatgtgagaatgcatgctttt

SEQ ID NO: 201180 - DNA, 381 bp, Gossypium hirsutum
ggttccaaaaagctgcaccttcagagttcccagcttgggttagggccactgaaaggagactgttgcaggagtccaagcctaccccaaatgtaattgtggctaaagacggttccggccatttcaggacgattaacgaggcggtgcaattggtgggaaagaagaaccaatcgagattcgtgatctatgtgaaagaaagcaagtatgttgagaatgtgaatctggataaacacaggtggaatgtcatgatttacggggatgggaaaactaaaactataatttcccgcaggccgaactttggtgatggaacttgcaactttgattccacaactttcaattgggcaagaaagggattcattgccaaggaccttaaggtcggaaacc

SEQ ID NO: 201181 - DNA, 377 bp, Gossypium hirsutum
gactgactaagatttcaactgtctctcactctcctgttttgctgcctttaccaagagagaatgaaaccaaaatttctgtttctcttccttgtattatgcagtctcactatagacaacgttttagcaacctcacttggaactcatggcaaaattcccgacaatgaaacaatataccgagtctccaaaccacggtgttgggggtggattggaaaatcactaaaagtcctattcacttacaatttggtgaaggcaaccaaatgggaaccactcttggtttgggatttccagcttgagaaatattccccatggtgggcacttcaaaggaaagcagactgcaagctacagcattcgtttccagagggagatttcaagctggg

SEQ ID NO: 201182 - DNA, 387 bp, Gossypium hirsutum
aaacaatgcaaatgatgtatgacataatttacaaggcattggtggaaactggacttgagaatagatatgagcctcaagattttttaaatttcttctgtcttggcaatcgagaagtagaagattctttggttgttagagatgccactgcatcaaacactcctcaggtaaatagaccgtttcagctctctttaatattccagtcttgctcatccatgaaaaaatattaaccaaatggtggtaacccaaggccctggctaaaagaaacggcgctttatgaattacattcaatcttaagggattatagtggatgatgaatatgtcataataggatccggttacattaaccaacgcttaatggaaggcacttgagacactggaatagccatg

SEQ ID NO: 201183 - DNA, 330 bp, Gossypium hirsutum
cgatgtcgaaaacgaagaggtgtgggttcaatcaggtgcaatcgtgggtgaagtatactacagaatcaatgaaagaagcacgaaacttaccttcccaggggcttttggctacactgtaggaatgggtgggttcattagcggtggatgcgatggtttattgtcccgaacatacggtctcgccgctgataatgtaatcgatgcgcacgttggtcgatgctagtgggaaaagtctttattgaaaaaccattgggggagaattggtttgggccctttcaagaagccgaagttggaacctcgggaaccgtcttttatggaaaattaaacttggtc

SEQ ID NO: 201184 - DNA, 289 bp, Gossypium hirsutum
gtatggatgccgtcactctcttcccgatgggttgatgagagctgccgatgtcatgattgctggtaaggtcgctgttgtctgtggttatggtgatgtcggcaagggttgtgctgctgccttgaagcaagccggtgctcgcgtcattgtcaccgagatcgatcccatctgtgcccttcaggctctaatggaaggacttcaagttttgacccttgaggatgtggtctccaaggctgatatctttgtaaccaccactggtaccaaggacataatcatggttaaccacttgagg

SEQ ID NO: 201185 - DNA, 276 bp, Gossypium hirsutum
ggcaaccacaatttcgagctcctgaagaagctggtccttgctggtggatcagttctccgcacccaattgcctggcaggcctaccgttgactgtcttttcgctgatccggctagagacgggattagcttactcaagatttggaatgtatacaagtgttccggcgttgttggcgcttttaactgccaaggtgctagttggtgcaaggtcaccaagaaaacccgaattcatgatgcatcacctggtacacttacaagttctggttgtgccaactatgtt

SEQ ID NO: 201186 - DNA, 400 bp, Gossypium hirsutum
atacttgtgggcctgccaagattgtgaaacccactaaatgcatgacggctgataaaaggagaataactcaagctatgatgacatggaatgttacatgcacatattcccaattcctggctcaaaagactcctacatgttgcgtctcgctctcttccttctataataacactatcgtgaattgcccgacatgtgcttgtggctgtcagaataactcaactgaatctgggagttgtgtaagcgaaaggtcttcacatttagcttcagctgttccgggcaaatctaccaatgcaccacctttgcttcagtgtacgagccatatgtgtccagttcgaattcactggcatgttaagctcaactacaaggaatactggcgtgtgaagatcacgatcaccaatttcaa

SEQ ID NO: 201187 - DNA, 389 bp, Gossypium hirsutum
  unsure (1)..(389): unsure at all n locations
gctttgtaaaggagacgtagagcaatggttttactttataccgagacaagagagggaggctcgtgggggaagagctagccgaactacagcttcgggatattggaaggcgacggngtcttacggctatgtctactcgtcggacgatcgactggatcggatgaaaaaaacaatggtcttttacagggaaaaagcccaaattggaaggaaacccaatgggaaatggatgaattttgaacccttgaagcaattgccgaaccaatttggggttgttcttcaaaggtgaaacctgaattcaagttggggcgagtctaaggtggattgagcaagttttgagcattcgattgacccccactataagcacacaacaatgctgtaacaactttcggggg

SEQ ID NO: 201188 - DNA, 388 bp, Gossypium hirsutum
caaatatatcggatcctggacagattgctcgagctgtgtatgaggtggaggaggcaactgcaactgcctttgacataattctagaacataagatgattaaatcagaaactcgagctccactcataaaattccttcaacttttagtggcccatcatccttccaggaggtgtcggaaaggaagcgcataagtacttgtcaactttaataactgggcccatttaaatttgtggtcattaaaccagccttatggttacccccagtacatgataagggtgcctcccaatttccatatttgtggaaagggtggtccccgtggatattggatggtttgtcgtggcaacaagaacgattcccggggctttaattggggtttatgggttttaatgca

SEQ ID NO: 201189 - DNA, 386 bp, Gossypium hirsutum
gttcaacacataatgatggataaagctgcagatatatggaaccgaatttctaagggtggatatctttatgtttgcggtgatgccaagggtatggcaagagatgttcatcgcactttgcacactattattcaggagcaggaaaatgtggattcatcaaaggcggagtctatggtgaagaaactccagatggacggacgataccttagagacgtgtggtgatgggtataatttcttgtagcgttcattcaccagttcatctcagagaaaaaacgtttgggtttgatagtgatagcagaaagctaaactggtttttcatattgggagaagatctactagatgttagatctttttttttttttctatataaattttctaaatcttgaaat

SEQ ID NO: 201190 - DNA, 404 bp, Gossypium hirsutum
cttgcagctgcttagaaaatgaagtgagtaattcgtctttgttaatttgtctatgagcttttttttgccatcttattgttttatttgttatatttggttattgttttctattgccaatgcaggcaaagacattggagcaagaggcacatccggccttagataaattgacttccaagattagtactctcaatttggagcgtgttcgccaaattaaaagccgattagttgcaataacaggacgtgtcccaaagggaagggattaattggaacacttgctccatgattattaaaatattggccaaatgtatttaactggaaaaccacttcttggaaattctttaaccttgtctattaatgaaaaggatgatatggatgatgacattctttgaccagacattaatgag

SEQ ID NO: 201191 - DNA, 328 bp, Gossypium hirsutum
catgcatggaggactctcgtggcaggcatacaatgaagagactgcttcagttactgacagttcattcacaatggttgggttgttggagcagataaatacaaccagagatgcaactgactatttgtggtacacaacagacgttaagattgacccccatgaaggattcttgaggaatggaaaatctactgttcttactgtcttatcagctggccatgctttgcatggttttgtcaatggtcaactatcaagaagttcctatggaagtctagaattccccaaactaacattcagccaacgtgttaatttgagagctggtatcaataaaatt

SEQ ID NO: 201192 - DNA, 439 bp, Gossypium hirsutum
aaaagagagaaatattctgatctcggcaataactgttctgatggctcgtatatcgaccaaagagtgaatgttagtaattctggtgaccttacaagtgtcaggagaaacgctgacagtgctgcatactattcttgctcttcatcgacttctgttccatgtggtccttgttcctcaaaaagaagggtagactgtaatgggtcagatttcataactgaatgtgattttgatttcccccccttaccaataacagatttgcttgagaagaatgaagatgagaaagaatttgatgcaaatgaggaagtgttttctgctcaatataaattgatgtttgaggacgatcatatgcataggtttcaaatcaataacaatgctgatttaattatggaatccaatgtttcatgctcactatctaaaaatgtctcatgtcgatataactctg

SEQ ID NO: 201193 - DNA, 301 bp, Gossypium hirsutum
  unsure (1)..(301): unsure at all n locations
ccacaaagtcaaaagctaaggtataatatttttattttaagctgttgcaatgggagcagtagcttccatcgctttcatggcttcaaaccttggttccttggcctggaatttcagtcctgcatacagtttcatgtactcttcaaacacaaatttggggtaaacctgtttgttcttttcctcagcttctttctccaccaacgccggcgccggatagatgacagcgtcgctgccggggttgtagaatgaagctaaagacatccgagttccatncgtttgggctatgactcggtgctccacactc

SEQ ID NO: 201194 - DNA, 386 bp, Gossypium hirsutum
cacataaggtgggagttacacagtgtacgattgctcacgcttgggagaagacaaagtatccagattccgacatctactggaagaagctcgaggataaatatcatttctcctgccaatttacagctgatcttttcgctatgaaccatacggatttcatcatcaccagtaccttccaagaaattgctggaagcaaggacactgttggtcaatacgagaagtacactgctttcactcttcccggtctctaacgggttggtcacgggattgatgcgtttgatcctaaattcaacattgggtcccctggtgccgacattagcatatactacccttacaccgaggagaagaagagggtgaagcatttccatttcgagattgaagaacctctt

SEQ ID NO: 201195 - DNA, 313 bp, Gossypium hirsutum
  unsure (1)..(313): unsure at all n locations
atttagcagatatttacaacagttggttatggaatcgcttggcgaggagtttgatctggatggtcaccgggtaaatcaaggaatttctgattatggaaataaatgaagcacagatcagcacgcctatatccaacaactgagggagggtgtgcataatttctctgcgacctttatcgaagttctacgtgatagaccccctggtcatgattgggagctagaaccgggtgttacatgtggtgactacctgtttggaatgctacagggcacangatcagctctgtatgcaaatgaccgtgaatccatcactgtcact

SEQ ID NO: 201196 - DNA, 310 bp, Gossypium hirsutum
  unsure (1)..(310): unsure at all n locations
gcaatttcatatatctgatcgtccatgggaggttctgaggaatgcagttagtaagacatacaatcgtatcactgatctaaggaaagagatttcatctctgaagaagagtgttgtatctgcagaagacgctgcatctaaggcaaaagcagatttggaggctgctgagtcaaagcttaccctagtggaaggtgaacctgttcttggtgaaaaccctacanagntaaagcatttaanatctgtngcttggaaagaccaangaagagacagtatccatgcatgactctntagaagccaaagaggctctttttgc

SEQ ID NO: 201197 - DNA, 349 bp, Gossypium hirsutum
gttcaaacgtagccttccacgatactgtactaaatttatcgaggtatgcatcatgctctgtgctgaccacagtccctgtgtctctggtgcgcacaacactatagtgactgcaagagctgggaaggaccttgtgtccagtcttgtgtcaggtttgcttacaattggtcctcgctttggtgggcaattgatgatgctgcacgatacttaaagatgcttacgaaaggggtcttaacacctatgaatttggttgaagccttgaaaagaatggcattcctgatcctggaaattgtcacaagatccagaaaagggaccaccgagattagaaagttgagcttcttcaactgtttgc

SEQ ID NO: 201198 - DNA, 387 bp, Gossypium hirsutum
aaatggcccttcgatcgttagccaccaggaaaaccctagccttggctctcaactccaccaggctggctcagtctcgagccttgcagaccttctcgctccccgatcttccgtacgactatggcgcactcgagcccgccatcagtggagagatcatgcagctccatcaccagaagcatcaccaaacttacatcactaactataacaaggctttggagcagctccatgacgctatccagaaaggagattcttccaccgtcgttaagttgcaaagcgccatcaagttcaacggctgaggtcatatcaaccactcaattttttggaagaatcttgcccctattcgtgaaggaggaggtgagccttcacatggttctttgggttgggccattg

SEQ ID NO: 201199 - DNA, 310 bp, Gossypium hirsutum
ccatgatattgatgttgatgatttaaaaaataatacacggtatactggtggctattctgagggaagtcgaactgttaaacttttctgggaggttatgaatgattttgagcccaaagaacgttgcatgctgctaaaatttgtgaccagctgttcgcgagctcctttattggggttcaaatacttgcagccggctttcacaattcataaggttgcaagtgatggctctctttgggcttgaatccgaagttcaaaagtggaacgactttcatcaacttctacatgctattacacttttaagctttcaacattc

SEQ ID NO: 201200 - DNA, 272 bp, Gossypium hirsutum
tgaatatgataatggggctgctatagaagctgtggggagacgtactggccggacctcaaccggaacgtggacttggccggctgaggaagatcacaaccaccccacccttgtccaccaaagatgaggcttcatcaatggcgatgccgacgagtccgacgacacctgggacaccgtcgacgccggtgtcagctcgtaaggacaacgtgtggaggagcgtgttcaatccaggtagcaaccttgcaaccaaaagtattggcgctgaaattttcgac

SEQ ID NO: 201201 - DNA, 320 bp, Gossypium hirsutum
ggaccatgtaacagttggtgatcttgtagttagacagcatgaatttattgaggcaacaaaggagtccagcttaacatttttgattgccaagtttgatggtatacttggacttggatttaaagagatttcagttggaaatgctgtgcctgtatggtacaacatggtcaatcaaggtcttgttaatgaaccagttttttcattttggcttaaccgcaatcctgaggatgatgttggcggagaagtggtttttggcgggatggatccaaaacattacaagggggaacacacttatgttcctgtaacacagaaaggatactggc

SEQ ID NO: 201202 - DNA, 307 bp, Gossypium hirsutum
tccagcccgagtctgatttcatccccttaacgttattttggaagggacatttttatgctcatagttcgactcaagggtgggtcggccggtccgcctcacggtgagcaccggtctgctcgtccctactgccggcgatgcgctcctggccttaattggccgggtcgttcctccggcgctgttactttgaagaaattagagtgctcaaagcaggcctacgcttgtatacattagcatgggataacatcataggatttcgatcctattgtgttggccttcgggatcggagtaatgattaacacggacagtc

SEQ ID NO: 201203 - DNA, 358 bp, Gossypium hirsutum
cttctcaggaccctgcaaatctcctcttctattgaagatctatggaacactcgaagccactgaggatcactcggattaccaagataatggaagacgatggctttactttgataatgttgaaaatttacgagtcgaaggtggaggcatcatcgatggtaatggcaaaacatggtgggaaaagtcctgcaaagtcaacaaagccctcccttgcaaggaagctccaactgctgtaaccttcaatgaatgcactaacctgagagtatcaagtcttcgtataaaagatgcacaacaaatgcacgttatatttcaaaaatgtgtgaattgtaaagcatttaaccttttggtgacggcacctggg

SEQ ID NO: 201204 - DNA, 382 bp, Gossypium hirsutum
tcaagttcaaggattacaattgtaccgttgagtactacggatcggctttccttgttgtacaaagcaggccgcctgccgggtctccgcaaaacatcaagacaacccttaagttggatcgaatggattggaattcatttaggtggaaagatgccgatttgttggtcttcaacaccggccattggtggaactacgagaagaccgttagagggggatgttactttcaagtcggggaaaaaatcgaaaccaagatgaccatagaacatgcgtatcagaggtctttggagactgtgatgcagtggctacgcaacgaggtgaatatgagtaagaccaaggtctacttccgcactttcgctcccgtacatttcagaggaggggattggag

SEQ ID NO: 201205 - DNA, 368 bp, Gossypium hirsutum
gggaagcaatatgaatcttcaacaaaattcggacaggatgaaggagaagacatcgtaccaaaaactttccctgtttgtgacgatcgtcattcagaattgattccctgcttagacagacatttaatataccaaatgagattaaagctggacttgtctgtgatggagcactacgaacgtcactgccctcctcctgaaaggagatacaattgcttgattcctcctcctccaggatacaaggtcccaattaagtggcctcaaagcagagatgaagtatggaaagcaaatattccccatacacaccttgcacatgagaaatctgaccagaactggatggttgtacaaggtgaaaagattgtattttcaagggg

SEQ ID NO: 201206 - DNA, 348 bp, Gossypium hirsutum
ctaaagttcagtgctgataaggttgatacaatgattgttcaagccattggtttgcttgatgaccttgataaagagctcaacacatatgcaatgagggttcgtgaatggtatggttggcattttccagagcttactaagatcatacaagacaatatcatgtatgccaaggcagtcaaactaatgggtgaccgtgctaatgctgctaagctcgacttctcagaggtattaccagaagagtttgagacagaattaaaggatgcagcagtcatatccatggggactgaaattagtgaccttgatctgacaaatatcaaagatttatgtgatcagggtcctaatctttctgaa

SEQ ID NO: 201207 - DNA, 113 bp, Gossypium hirsutum
ttgaaagataagataaatggttcttctagagaaactgtgggatgatgtagtggcctgaccttaacctgaacgtggccttggccggcttaggaagatcacaaccacccaaccct

SEQ ID NO: 201208 - DNA, 369 bp, Gossypium hirsutum
catacagagaaaacaaaaacctcacaggcaccgctcgttatgcaagtgttaacactcaccttggaattgagcaaagccgcagagatgatttggaatcccttggttatgtgcttatgtatttcctgagaggaagccttccctggcaggggctaaaagctggcacaaaaaagcaaaaatatgataagattagcgaaaaaaaagtgtcaacttcgatagaggtgctctgtaagtcatatccatctgagtttgtctcgtattttcactactgtcgttctttgcggtttgaagataaacccgattattcctatttgaagaggcttttccgagacttgtttataagagaaggttatcagtttgactacattcttg

SEQ ID NO: 201209 - DNA, 375 bp, Gossypium hirsutum
aattgaatgggtctgtaataccttcagaacgtccaaatgatatgatgttggagatgtggaatccccttggaattgttggtgtaattacggcatttaatttcccatgtgctgttcttggatggaatgcctgcattgcactggtgtgtggaaactgtgttgtttggaaaggtgctccaaccactcctctggttacaatagcaacaacaaaattagtggctgaagttttggaaaagaataacttacctggtgcaattttcacatcattttgtggcggtgctgaaattggggaagcaattgcaaaagatcgacgcattaatctagtttcatttacagggagttcgaaagtgggtgtaaaagttccaccaacagtaaatg

SEQ ID NO: 201210 - DNA, 161 bp, Gossypium hirsutum
agttgcttcagctataacccaaaccgtgttggctcaaaagtgtggctgtgcgccaaacttgtgttgcagtcaacatggttattgcggtcagggtaacgattactgtggcactggttgcaaagaaggcccttgtttcttcaagtcttccactggtgcttcag

SEQ ID NO: 201211 - DNA, 385 bp, Gossypium hirsutum
catactttcaaggttgtaggaaagtgaagaaatggtgaagatgggttgtattggagctggttatgttggaggtccaacaatggcagtcattgcactcaactgtccctccattgaagttgtcgttgttgacatctaggttactcgaattctatgcctgaaccatggcccattaccaatctattaaccaagtcttaatggaatggtccaacaattcaagggaaaggacccggtcttcaacaccgaccttgaaaaacctgtcttcgaagccgaccttatctttggttctggaaacacgcccaccaaaacccgatgtctcggtgctggcaaatctctggaccttacatattgggaaagcgcaccaaggatgattgctgatgtatcaaaa

SEQ ID NO: 201212 - DNA, 341 bp, Gossypium hirsutum
atcaatttgaagccttcttcgaaattcctctttcaagatgcggattttcgtcaagaccctcactggcaagaccatcacccttgaggtggaaagttctgataccatcgacaatgtaaagaccaagatccaagacaaggaagggatcccaccagaccaacagaggcttatctttgctggtaaacagctggaggatggccgtacccttgctgactacaacatccagaaggaatccacactccatttggtcctccgattgaggggtggtatgcaaatttttgtcaagaccctcaccgggaagaccatcacccttgaggtggaaagttctgataccatcgacaatg

SEQ ID NO: 201213 - DNA, 368 bp, Gossypium hirsutum
atcttattctttgcctcacacacatcgcatgtggatggacgggaattgataggcttactatgacaggatttacatggttcctttaaacctttaatatatacctgattgctacatggaaaaagattacccttaatacaatgtgacatgcttggtacataatggcaaagtcattgcagcgagtcttgattagattaactatggagatagcaacttgaaaagtccttatctgctacctgatgatactgacaaagatgtgtactttgatacgacgatgtcacacatagactaatgcttaaacctgacgtatgctacatttaaacgatactcaacaaacggatgctgatgctgctttatatcacttggaaact

SEQ ID NO: 201214 - DNA, 371 bp, Gossypium hirsutum
atcaataacagaagcaaaaaagaaaagggttctttggtcactaagttttattcttttatcatttcatttgatcgccaaaaaaggaaaagcttaatccaaattgaagaggaaaaaaaaagggtgcaccatggatcatgcagctgatgcccatagaactgatttgatgaccatcactcgccatgtccttaatgaacaaaccaagtaccctgaatctcgtggtgatttcaccatcttgctcaatcatattgttcttggctgtaaattcgtttgctcttctgttagcaaggcgggtcttgccaaactatttggacttgctggagaaaccaatatccaaggtgaagaacaaaagaaattggatgtgctttctaatg

SEQ ID NO: 201215 - DNA, 371 bp, Gossypium hirsutum
gcagaatacagcgatgccttgaatgaagttagtgcggggtatgttggcaaaaaaggattgggaaagcaggtggcagctaaaccaaaagagcaaaagagtgcagatggaaatagttctgataaggtgaacttaggtagcaggccctcatctgaaatagatcttccttgtgctgaattgggaaaggtgcgattgagatttgctcctgaacctagtggttatctccatatagggcactctaaagcagccttattaaatcaatactttgttcaacggtaccaaggtgaagtaatcttgcgctttgatgataccaatcccaccaaagaaagcaatgaatttgtagaaaatcttataaaagatgttgagacattggg

SEQ ID NO: 201216 - DNA, 158 bp, Gossypium hirsutum
gccagttattggtttaggtgtttgtcgtatggatgggaaagaggttagagacctcatcatcaactccatcaagcttgtttatcgtcattttgattgtgctgctgactaccagaattaaacagaaattcgtgaggcattttctgaagcattcaaaacct

SEQ ID NO: 201217 - DNA, 381 bp, Gossypium hirsutum
tcaagttcaaggattacaattgtaccgttgagtactaccgatctgctttccttgttgtacaaagcaggccgcctgccgggtctccgcaaaacatcaagacaacccttaagttggatcgaatggattggaattcatttaggtggaaagatgccgatttgttggtcttcaacaccggccattggtggaactacgagaagaccgttagagggggatgttactttcaagtcggggaaaaaaatcgaacccaaatgaccatagaacatgcgtatcaaaagtctttggaaactgtgattcaatggctacgcaacgaggtgaatattgaatagaccaaagtctactttcggactttcggttccgtacatttcaaaagaagggattgga

SEQ ID NO: 201218 - DNA, 272 bp, Gossypium hirsutum
ctaagatattcaaccaccatgaatgattcttcactgggctggagttcatcaaatcacgaagaagaagctgacgttttgcaagccatgcatttagcttccatttcatcactccctttcactttgaaagtcgccgtcgatctcggcttgttagatattatagccgaagccgccgacactcctcctggtatggtgtcggttgctgaaatcgtctctaagcttcccaccaataatccaaacgccccttccattgttgatcgaatgctcaagctttt

SEQ ID NO: 201219 - DNA, 319 bp, Gossypium hirsutum
acaacatgttcgtgttcatgcaatggaagcagttatggcttgttgggatcttgagcaatcacttcaaagtttaacaggtgtatctccaggtgaaggcactggtgcaaccatgtctgatgatgaagatgaagttgtagatagtgataccagcttgtttgatggaagttttgatgggattgacagcatggggtttggccccctcgtcccatccgagactgagagatcactaatggagcgtgttaagcaagaactgaagcacgagctgaaacagtgttacaaagagaaaattgtggacattagagaagaaattctacgtaag

SEQ ID NO: 201220 - DNA, 352 bp, Gossypium hirsutum
gcatgcttcaactttcggatctcagtcaacgatagggagcccagatccccatcttttctagccgacaagcttgccaggttgatgaccgccatactcgaagcatactcatcagatgacaggcatcatgttgactattacaggatcgggaagagtgaagaattccgcaggtacttaaatttgacacgagatctgcaaagggtggatcttcaattactaagtccagacgagagactagccttcttcttgaacttatataatgccatggccatccatgctgtaattaccattggacatcctgaacgaatacttgatagaagagcttttttcggtgaattccaatatgtaattgggg

SEQ ID NO: 201221 - DNA, 383 bp, Gossypium hirsutum
agagaacaaatatggagaaacaacagaaatccggtcagggggtgcttgttatggcacccttccaaggccacttaactcccatgctccagctggctactatcttgcactcaaagggcttctcaattactatagttcaccctgaattgaactctcttaacccttcaaaccaccccgaattcaccttcgtacccattccagattagatcaagggatctcaactctcaaatgaagaccttgcagattagctcaaggaatctctagtgtcaactgtagatgttgcaagttccgtgcagagtctcaacaaaaactgtgcagcaccatttaaaaaatgcctcgaaaacattttgcactctcatcaccatattgctgcagtcatatataat

SEQ ID NO: 201222 - DNA, 348 bp, Gossypium hirsutum
ccttgtccgggctctaataccccttcacaaaccaaggggctggccgatgtaccaccagcagttgtcttactgcatcacgcagtttgtcgagaaagactgcaaactagctgatactgctataaggggattgttgaaatactggccaattactaatatctcaaaggaagtcatgttccttagtgagcttgaagaaattctggaagctactcatcctgctgaatttcagagatgtatggtacccttgttccaaaaaattgcacgatgtttgagcagttcacactttcaggtatcataaaaggctttgtacttgtggaataacgatcacatcgagagcttgattagacaaaa

SEQ ID NO: 201223 - DNA, 291 bp, Gossypium hirsutum
tgccaaaggtggtgtgaccaagaagaaaagtggacaggctgatgaagatcactcccctgaacatagccaggctgatgagaatgaacgggttgccggtgacgatgacgacgacgatgttcagtggcaaactgatacttctcttgcggctgcccaacaacgcatccaagagcagttgagtgctagtactgctgatatggtgatgctctctaccgatgaagagaagaaaaagtcggttaaaaagtctcccgagcctgaaaccaaggttcatgaaaatggtgttggtgctcatga

SEQ ID NO: 201224 - DNA, 370 bp, Gossypium hirsutum
ggaatctatgaccactaatccaatggcatgggaagggtcagttaacccaagggtgaagcaaatggagcaagctcagaattgtctccttcctatgggtattacgtcagagaacgttgctcatcgctttggtgtgacaaggcaggagcaggatcaggctgcggttgaatctcacaggaaagcagctgctgctacagcttctggtaaattcaaagatgaaatagtccctgtggccaccaagattgttgatccaaagactggtgatgagaaacctgtcacaatctctgttgatgatgggatccgagctaacacatcagtgtcagatctgggaaaattgaaacctgtattcaagaaaatgggaccactactgctg

SEQ ID NO: 201225 - DNA, 378 bp, Gossypium hirsutum
agagtaaaatttgatccagatcgcattgttatgagcggtggatccaccggagctcatgagatggttgccttttgcttggcagatcctggtgaagcatttctcgtccccactccttattatccagggtttgatcgtgacttgaagtggaaaaccggggttgaacttgtaccagtcaactgtgaaagctgcattaatttcaagatcaccaggaacgccttggaagctgcgtatgtaaaagttcaggaggctaacctaagagtgaaggccttgctcataaccaatccatcgaacccattgggtactgtcttggatcgagacacattgaagagcatggttaggttcataaacgacaagaacatacacctgattggtgatgag

SEQ ID NO: 201226 - DNA, 292 bp, Gossypium hirsutum
ggaccatgtaacagttggcgatctcgtagttaaacatggggagtgcattgaggctacaaaggagtccagcttaacattcttgattgccaagtatgatggtatactaggacttggatttaaagagatttcaactggaaatgctgagcctgtactggacatcatggtcaatcaagggcttgttaatgaaccaactgtttcattttagcctaaacgcaatcctgaagattacgttggcagacaaatgggttttggcgggatggattcaaaacattacaaaggggaacacacttat

SEQ ID NO: 201227 - DNA, 375 bp, Gossypium hirsutum
tttacatccaaacataatgttcatacattagcaaaaagtgacataatgtcattaacttatatgtcataatctatatgttaaatttcacaacaccaaaaagttacactagtatggctttctactaattgcatcttgccatccaaatattacatataaaaaaagttatcaaaacaataccaacacaaccatgatttttaatggtcaaaaaggaatcctcttaattattccaattggacctaaaaagggagaccggaaaaaaaattagcctttgcattggatgggcaagaattttgctcaatgcacgattgcactcattcctaattaaaccttctacctcggattagaaccgatattaattttgagcactttcttgaa

SEQ ID NO: 201228 - DNA, 304 bp, Gossypium hirsutum
gctgacttgaagtttatagtgattaagagtctacccgggctggagagttgtattcctggagctccatatgttggcatgtgcaacaatagctagcgattgcactcaactgtgcctacattgaagttgtcgttgttgacatctcggttactcgaatctcagcctggaacagtgaccaattaccaatctatgagccatgtcttaatgaagtggtcaaacaatgcaagggaaggaacctgttcttcagcaccgacatagaaaaaacatgtctccgaagcagacttaatctttgtttctgtaaacacgc

SEQ ID NO: 201229 - DNA, 379 bp, Gossypium hirsutum
acatcatgttgtttatatggaggtgctccttaccacggccagagagatgaaactgaagagaggggttgacatagttgttgggactcctggacgtgtaaaggatcacatagagaggggcaatattcacttaggttcattgacattccgagttcttgatgaagcagatgaaatgttgagaatgggatttgttgatgatgttgaacttatattaggcaaggtagcggatgcaagttaagttcatacagttctttttagtgccaccttgccagactgggtgaagggtattgcttcaaggtttcttaaaccaagtaagaagactgttgatctagttggtaatgagaagatgaaggctatttccaatgttaggcatattgttttg

SEQ ID NO: 201230 - DNA, 366 bp, Gossypium hirsutum
ggaccatgtaacagttggtgatcttgtagttaaacatcgggaaggtattgaggcaacaaaggagtccagcttaacatttttgattgccaagtttgatggtatacttggacttggatttaaagagatttcagttggaaatgctgtgcctgtatggtacaacatggtcaatcaaggtcttgtaaataaaccagttttttaatttggcttaacccgaattcttaagattatggttgccgaaaaatgggttttggccggattgatcccaaacatttccagggggaacacacttatggtcctggtacacagaaaggattcttgcaattcgatattggtgatggtctgaatggtgaccaaacaactggactt

SEQ ID NO: 201231 - DNA, 356 bp, Gossypium hirsutum
gagatatccatgggaagttcattttcatcctcttcgagaggtcttcaaaatctacattcatagcttctgatgctgatggaactgtacctttcttctggggaaccgatgttgatggccatctggttcttgcagacgatgaggagaccgtgaaaaagggctgtgggaaatcttctgctccattcccaaaagggtgcttcttcacatcctctggagggttaaggagcttcgagcattcccagaacgagttgaaggcagtgcctagggtggatggttcaggtcaggcctgtggtgctacgtactgtgtggatacagagacgaagaaggaatcaaccgggattgaagaaagtcgacagtgc

SEQ ID NO: 201232 - DNA, 350 bp, Gossypium hirsutum
agttgctagtcgcctgaagatcacaatagtaggtggctggatacccgaacgctgtggtgataagttgtataatacttgttgtgtctttggtactgatggaaagctgaaagccaagcatcgcaagattcacctttttgatatcgatattcctgggaagattacctttatggaatccaaaacccttactggaggggagactcctactggtgtggacacagatgttgggcggattggtataagcatctgttatgacattcgctttactgaattagcaatgatatatgctgcaagaggtgctcacttgatatgctatcctggagcatttaacatgacaaccggaccattgcatt

SEQ ID NO: 201233 - DNA, 214 bp, Gossypium hirsutum
ggatggtactaatgtgaggagttatttatactgcgaggatgtggctgaggcatttgaggtcattcttcacaagggtgaagttggtcatgtttataatgttggaacaaagaaggagaggagagtgattgatgtagccaaagatatatgcaaacttttttcaatggactcggagacaagcatcaagtttgttgaaaacagaccatttaacgaccag

SEQ ID NO: 201234 - DNA, 307 bp, Gossypium hirsutum
attctctgctgctttcagtttccgaaggaaattcgggattggtctctcgtctgccaatggtgttattttcttcggtgatggtccctatgtgttcctccctggagttgatgcatcagaatcgcttactttcacaccgctcttcattaaccctatcagcacagccccttctttccctctcggtgaaccttccgccgagtatttcatcggcgttaagtccatcaaagtgaacgaaaaacccgtctcactgaatacaacgttactgtccattaacagcgaaggtgttgtgggcacatagattatcaccgtg

SEQ ID NO: 201235 - DNA, 363 bp, Gossypium hirsutum
ctcctttcaacacatgagaatcttcatggtggtaacgaaatgcagtgtgctggtgttagtcatgatggtcatattttggtgactggggccgatgatggtttagtttctgtttggagaatcagtgaggacggcccccgtgcctctagacgactgctgttggaaaaagtgctttgtggtcatacagctaaaatcacatgtcttcgtgtcagtcagccttacatgctggttgtgagtggatcagatgactgcactgttatcatatgggacctaagctcattagtatttgttaggcagcttcctgagttcccagcaccagtttctgcagtttacgtgaatgatttatctggggaaattgtgacagct

SEQ ID NO: 201236 - DNA, 337 bp, Gossypium hirsutum
aaaaattcttaggtcttgtttttggcggaagggttgggaaatgcttgtgttgttcgagactcccgcgggctttgcccttttcaaagtattggatgaagggaagctaaacaaagttgaggacttgtcaaaagaattcttggctgcagattcagcaagaaaggttgtctcgttgcaagccttttccaagttcgaaaacacagcagaagcattggaagcagcaacgaaactacttgaaagcactcccagcaaaggtttgcgcaagttcttacgtgctcattgtgatggtgaaacactaggagtggctgattcaaaacttggaaatgcaattaaagaaaaa

SEQ ID NO: 201237 - DNA, 338 bp, Gossypium hirsutum
gcggcggctgctgcttctcaggcagccgcaggctcggttcccgtctctgatgacgtggcggttgtagaaggttgtattgacaacgatagtgtacagattggggattcatatgattccaagacatcgtttttgatctccgatgggagcatcactgttcatgctggtgaaagattaggtcgcggtatagttactgatgcaattactactccagtggttaatacttctgcatatttctttaagaaaactcaggagcttattgacttcaaggaaaaacgccatacaagttttgaatatgggcggtatggaaatccaacaaaatttattggtggacacaatga

SEQ ID NO: 201238 - DNA, 290 bp, Gossypium hirsutum
cccctctgtgccgtgtcttgcgggtttcacttgacagctagcaaaggatctgcaagatggaaagcatgaatagcttttggcagttaggagatgatctccggggacaatctaaagcctcagaggatcacaaatggttgatggttgcctacaaactggctgaacagacgaggataaagggtgagcgaatgaacaatctcgatctttcaaagggtccagctgaagtaaggacaagggataaatttgggttccatgaatacaacaaattcgagaaccttaacttcaatatgttg

SEQ ID NO: 201239 - DNA, 302 bp, Gossypium hirsutum
gtcatctgcatcttccgtcctttcaaaggttgatctgcagggtttgagcatcacggatctttctcttgctgtgatcgggcactatggcaagtctgcgactaatctaatgctgagtggtctacaaaatgtgagcgataagggattttgggtgatgggtaatgctcacggtctgcaaaagttggtctcttttacaattgcttcttgctgaggggtaactgatgtgagtcttgaagccattggaaagggatgcgctaacctgaagcaaatgtgccttcgcatgtgttgcttcaattctggcgatg

SEQ ID NO: 201240 - DNA, 348 bp, Gossypium hirsutum
gcagcagagccctgatattgcccaaggtgtccacggacactttacaaagcgtccagaagagattggagccggtgaccagggtcatatgtttggttatgccactgatgaaacccctgaattcatgcctcttagccatgtccttgcaactaagctcggtgcacgtcttactgatgttaggaagaatggcacctggcccttgctaaaggctgatgggtaaacccaagtcactggtgaattcttcaatggccatggggccatggttccaagtcgtgtgcacaatggccttattttcacccaacatgatgagactggttccaaccatgaaatcggttgttaacttaaggggcc

SEQ ID NO: 201241 - DNA, 376 bp, Gossypium hirsutum
ggatggtactaatgtgaggagttatttatactgcgaggatgtggctgaggcatttgaggtcattcttcacaagggtgaagttggtcatgtttataatgttggaacaaagaaggagaggagagtgattgatgtagccaaagatatatgcaaacttttttcaatggactcggaaacaagcatcaagtttgttgaaaacagaccatttaacgaccagaggtattttcttgatgatcagaaattgaagaacttgggatggtctgagcgaactgtgtgggaagatggcttgaagaagaccatagaatggtacactcaaaatcctgattggtggggcgatgtgtctggtgcactgctttcacacccgagaatgctgatgatg

SEQ ID NO: 201242 - DNA, 229 bp, Gossypium hirsutum
gcttgtttatgagtacgtctacaatgggaatttagagcaatggcttcacggacatgttgcgccttgcaattctcttacatgggagatccgtatgaatatagtgcttggaactgccaaagggtaaacgtctggttaactgataatgttatgcacaacttgtattgtccttggttttttcctgcatgtttgcttacaatgatgttgtctgccaaaattgaaacttgattta

SEQ ID NO: 201243 - DNA, 344 bp, Gossypium hirsutum
gcagcttgaagatggtcgcaccttatctgattgctggatccaaaaagagtccaccctccacctagtacttcgtcttctaggtggcatgcaaatctttgtcaaaactctcactggaaagacaattaccttggaggtggagagttcggataccattgataatgtgaaagccatgattcaggacagagaaggaatcccaccataccaacaaagattgatttttgctggaaaacaacttgaagatggaaagactcttgccgattataatatccagaaagagtctactctccatttggttcttcgccttcgtggtggtatgcatatctttgtaaagactcttaccggaa

SEQ ID NO: 201244 - DNA, 353 bp, Gossypium hirsutum
gttccttacaaatttcaactctttgggcatgggcaagccaatcctaaatatggtcatctcgtacatacggtatctgatgatgtagtttatacatctggtgtggacattgcaattgtgaacaaccggtctaaagttgaggatttttatcagtcttatattactaccggtcttgccatagtatctccaattcacaatacataatcaagagcttgggtattactaaaaccttatactgcagacatgtgtgactatgactgcacgtagttgattcataattgcttttgttcattagattctccaacattgagtacacgatgctattcttggtcctcctaggaggcaacttgtgacta

SEQ ID NO: 201245 - DNA, 369 bp, Gossypium hirsutum
cccgatccaaacgtgtcgtcacacctcctgttgatgcgtccacatattggatttggcagcttgctaaggcccacgtttgctccaatgatgctggtgttcaccaattggttaaccactggttacgaacacatgcatgcatggagccttttatattggctgcacataggcaattgagcgcaatgcacccgatctttaagcttttggatccacacatgatatatacgctagagatcaatgccctagctcgccaaagcttgatctgcgctgatggtgttatcgagaactgcttcactcccggtcgctactgcatggagatgagtgctgctgcttatcggatcccattgcgcttcgacagggaaagcctgcctg

SEQ ID NO: 201246 - DNA, 169 bp, Gossypium hirsutum
cttcctttggttctcaagaaaaagcaagagatgggtttttcaaggaaagagtacgagttcttgagcgagatcggattgagttctggcaatttgggatgttttgtgaatggcacctggaaaggaagtggccctgtggtttctactcttaatcctgcccataatcagaaaa

SEQ ID NO: 201247 - DNA, 355 bp, Gossypium hirsutum
cgacgacccgagacgcgcacacctcgaccaatacatgcgccaggtggagctcgcaggcgaaccagcgatttcagcgatgataaagagatacgccgagcaaaaccgccccgtttcttgcttcatcaacaaccctttcattccttgggcatctgatgttgctgaaagtctcggcatcccttctgcaatgctttgggtgcagtcttgcgcgtgtttcgccgcctattaccattacaatcatgggttagtgacgtttcctactgaaactgatcctgaatttgatgttcaggtgccgtccatgccgcttctcaagcaccatgaagttctagcttttgcacccttcaactcttttgcttac
